United States Patent Application Publication US 2011/0183924 A1 - sequence listing, part 267

SEQ ID NO: 765630 - protein, 739 aa, Homo sapiens
RGGAWAKRPAGGGGGRSVLLFPAAAVADPARQALLTVASSGPRSPALASAPAPGPQPSSQPRPPAAAMSKEERPGREEILECQVMWEPDSKKNTQMDRFRAAVGAACGLALESYDDLYHWSVESYSDFWAEFWKFSGIVFSRVYDEVVDTSKGIADVPEWFKGSRLNYAENLLRHKENDRVALYIAREGKEEIVKVTFEELRQEVALFAAAMRKMGVKKGDRVVGYLPNSEHAVEAMLAAASIGAIWSSTSPDFGVNGVLDRFSQIQPKLIFSVEAVVYNGKEHNHMEKLQQVVKGLPDLKKVVVIPYVSSRENIDLSKIPNSVFLDDFLATGTSEQAPQLEFEQLPFSHPLFIMFSSGTTGAPKCMVHSAGGTLIQHLKEHLLHGNMTSSDILLCYTTVGWMMWNWMVSLLATGAAMVLYDGSPLVPTPNVLWDLVDRIGITVLVTGAKWLSVLEEKAMKPVETHSLQMLHTILSTGSPLKAQSYEYVYRCIKSSILLGSISGGTDIISCFMGHNFSLPVYKGEIQARNLGMAVEAWNEEGKAVWGESGELVCTKPIPCQPTHFWNDENGNKYRKAYFSKFPGIWAHGDYCRINPKTGGIVMLGRSDGTLNPNGVRFGSSEIYNIVESFEEVEDSLCVPQYNKYREERVILFLKMASGHAFQPDLVKRIRDAIRMGLSARHVPSLILETKGIPYTLNGKKVEVAVKQIIAGKAVEQGGAFSNPETLDLYRDIPELQGF

SEQ ID NO: 765631 - protein, 605 aa, Homo sapiens
ARYEAGWLIRPRVVDTSKGIADVPEWFKGSRLNYAENLLRHKENDRVALYIAREGKEEIVKVTFEELRQEVALFAAAMRKMGVKKGDRVVGYLPNSEHAVEAMLAAASIGAIWSSTSPDFGVNGVLDRFSQIQPKLIFSVEAVVYNGKEHNHMEKLQQVVKGLPDLKKVVVIPYVSSRENIDLSKIPNSVFLDDFLATGTSEQAPQLEFEQLPFSHPLFIMFSSGTTGAPKCMVHSAGGTLIQHLKEHLLHGNMTSSDILLCYTTVGWMMWNWMVSLLATGAAMVLYDGSPLVPTPNVLWDLVDRIGITVLVTGAKWLSVLEEKAMKPVETHSLQMLHTILSTGSPLKAQSYEYVYRCIKSSILLGSISGGTDIISCFMGHNFSLPVYKGEIQARNLGMAVEAWNEEGKAVWGESGELVCTKPIPCQPTHFWNDENGNKYRKAYFSKFPGIWAHGDYCRINPKTGGIVMLGRSDGTLNPNGVRFGSSEIYNIVESFEEVEDSLCVPQYNKYREERVILFLKMASGHAFQPDLVKRIRDAIRMGLSARHVPSLILETKGIPYTLNGKKVEVAVKQIIAGKAVEQGGAFSNPETLDLYRDIPELQGF

SEQ ID NO: 765632 - protein, 385 aa, Homo sapiens
MFSSGTTGAPKCMVHSAGGTLIQHLKEHLLHGNMTSSDILLCYTTVGWMMWNWMVSLLATGAAMVLYDGSPLVPTPNVLWDLVDRIGITVLVTGAKWLSVLEEKAMKPVETHSLQMLHTILSTGSPLKAQSYEYVYRCIKSSILLGSISGGTDIISCFMGHNFSLPVYKGEIQARNLGMAVEAWNEEGKAVWGESGELVCTKPIPCQPTHFWNDENGNKYRKAYFSKFPGIWAHGDYCRINPKTGGIVMLGRSDGTLNPNGVRFGSSEIYNIVESFEEVEDSLCVPQYNKYREERVILFLKMASGHAFQPDLVKRIRDAIRMGLSARHVPSLILETKGIPYTLNGKKVEVAVKQIIAGKAVEQGGAFSNPETLDLYRDIPELQGF

SEQ ID NO: 765633 - protein, 739 aa, Homo sapiens; identical to SEQ ID NO: 765630

SEQ ID NO: 765634 - protein, 225 aa, Homo sapiens
LTARYEAGVWEIQARNLGMAVEAWNEEGKAVWGESGELVCTKPIPCQPTHFWNDENGNKYRKAYFSKFPGIWAHGDYCRINPKTGGIVMLGRSDGTLNPNGVRFGSSEIYNIVESFEEVEDSLCVPQYNKYREERVILFLKMASGHAFQPDLVKRIRDAIRMGLSARHVPSLILETKGIPYTLNGKKVEVAVKQIIAGKAVEQGGAFSNPETLDLYRDIPELQGF

SEQ ID NO: 765635 - protein, 739 aa, Homo sapiens; identical to SEQ ID NO: 765630

SEQ ID NO: 765636 - protein, 464 aa, Homo sapiens
RGGAWAKRPAGGGGGRSVLLFPAAAVADPARQALLTVASSGPRSPALASAPAPGPQPSSQPRPPAAAMSKEERPGREEILECQVMWEPDSKKNTQMDRFRAAVGAACGLALESYDDLYHWSVESYSDFWAEFWKFSGIVFSRVYDEVVDTSKGIADVPEWFKGSRLNYAENLLRHKENDRVALYIAREGKEEIVKVTFEELRQEVALFAAAMRKMGVKKGDRVVGYLPNSEHAVEAMLAAASIGAIWSSTSPDFGVNGVLDRFSQIQPKLIFSVEAVVYNGKEHNHMEKLQQVVKGLPDLKKVVVIPYVSSRENIDLSKIPNSVFLDDFLATGTSEQAPQLEFEQLPFSHPLFIMFSSGTTGAPKCMVHSAGGTLIQHLKEHLLHGNMTSSDILLCYTTVGWMMWNWMVSLLATGAAMVLYDGSPLVPTPNVLWDLVDRIGYLGSWRLLQNQPQDRGHRHAWPE

SEQ ID NO: 765637 - protein, 171 aa, Homo sapiens
RLGSEAGWAYFSNIPGIWAHGDYCRINPKTGGIVMLGRSDGTLNPNGVRFGSSEIYNIVESFEEVEDSLCVPQYNKYREERVILFLKMASGHAFQPDLVKRIRDAIRMGLSARHVPSLILETKGIPYTLNGKKVEVAVKQIIAGKAVEQGGAFSNPETLDLYRDIPELQGF

SEQ ID NO: 765638 - protein, 228 aa, Homo sapiens
RGGAWAKRPAGGGGGRSVLLFPAAAVADPARQALLTVASSGPRSPALASAPAPGPQPSSQPRPPAAAMSKEERPGREEILECQVMWEPDSKKNTQMDRFRAAVGAACGLALESYDDLYHWSVESYSDFWAEFWKFSGIVFSRVYDEVVDTSKGIADVPEWFKGSRLNYAENLLRHKENDRVALYIAREGKEEIVKVTFEELRQEVALFAAAMRKMGMYNSVQRMNLYL

SEQ ID NO: 765639 - protein, 100 aa, Homo sapiens
RPVGKGLRVSVGTACFAEEAKACVGRKITAGPQPQRAGSRTEGAPRCTLQPPAREKQQETELLPLTQWWFLTPKTSWTIGSEQQSLQFALFCSRETTRIK

SEQ ID NO: 765640 - protein, 376 aa, Homo sapiens
MYCAYTIPGMGGNSLMYYYNGKAVYAPSASTADYNRDSPGYPSSKPATSTFPSSFFMQDGHHSSDPWSSSSGMNQPGYAGMLGNSSHIPQSSSYCSLHPHERLSYPSHSSADINSSLPPMSTFHRSGTNHYSTSSCTPPANGTDSIMANRGSGAAGSSQTGDALGKALASIYSPDHTNNSFSSNPSTPVGSPPSLSAGTAVWSRNGGQASSSPNYEGPLHSLQSRIEDRLERLDDAIHVLRNHAVGPSTAMPGGHGDMHGIIGPSHNGAMGGLGSGYGTGLLSANRHSLMVGNHREDGVALKGSHSLLPSRVRSTAFLSRLGFLLTEPPQGLRGAPLRGACSPGAEITEEVVTWTTRGRIFPGLCTRTGGARRGGP

SEQ ID NO: 765641 - protein, 417 aa, Homo sapiens
MKFPLSLTIMNSGLWSCLLLVCQIEVLMLSAMSDHISKQHHRMKFKQCRCSDTGLCCLDHEGKAEVYAPSASTADYNRDSPGYPSSKPATSTFPSSFFMQDGHHSSDPWSSSSGMNQPGYAGMLGNSSHIPQSSSYCSLHPHERLSYPSHSSADINSSLPPMSTFHRSGTNHYSTSSCTPPANGTDSIMANRGSGAAGSSQTGDALGKALASIYSPDHTNNSFSSNPSTPVGSPPSLSAGTAVWSRNGGQASSSPNYEGPLHSLQSRIEDRLERLDDAIHVLRNHAVGPSTAMPGGHGDMHGIIGPSHNGAMGGLGSGYGTGLLSANRHSLMVGNHREDGVALKGSHSLLPSRVRSTAFLSRLGFLLTEPPQGLRGAPLRGACSPGAEITEEVVTWTTRGRIFPGLCTRTGGARRGG

SEQ ID NO: 765642 - protein, 365 aa, Homo sapiens
KVRKVPPGLPSSVYAPSASTADYNRDSPGYPSSKPATSTFPSSFFMQDGHHSSDPWSSSSGMNQPGYAGMLGNSSHIPQSSSYCSLHPHERLSYPSHSSADINSSLPPMSTFHRSGTNHYSTSSCTPPANGTDSIMANRGSGAAGSSQTGDALGKALASIYSPDHTNNSFSSNPSTPVGSPPSLSAGTAVWSRNGGQASSSPNYEGPLHSLQSRIEDRLERLDDAIHVLRNHAVGPSTAMPGGHGDMHGIIGPSHNGAMGGLGSGYGTGLLSANRHSLMVGNHREDGVALKGSHSLLPSRVRSTAFLSLSGIPLTEPPQGLRGAPLRGACSPGAEITEEVVTWTTRGRIFPGLCTRTGGARRGGP

SEQ ID NO: 765643 - protein, 203 aa, Homo sapiens
MYCAYTIPGMGGNSLMYYYNGKAVYAPSASTADYNRDSPGYPSSKPATSTFPSSFFMQDGHHSSDPWSSSSGMNQPGYAGMLGNSSHIPQSSSYCSLHPHERLSYPSHSSADINSSLPPMSTFHRSGTNHYSTSSCTPPANGTDSIMANRGSGAAGSSQTGDALGKALASQAQLFGLEMEDRPHRLLIMKDPYTLCKAELKIV

SEQ ID NO: 765644 - protein, 126 aa, Homo sapiens
EEAATKKERKGVTGKEPTGTTPMQQEELRGWDRTGQGRGEGATGMELVQPSHNQPLPGALAARRAPRWALWSVLSRSPPHRPSDAPFQRLERGGRPRIASSAVSPAPRTATTQCPTLPDAGGRWRP

SEQ ID NO: 765645 - protein, 101 aa, Homo sapiens
AAGCFVTRRHGDKDRVPGSSAPAKGCWPRRRLNLAGAGMGCREQRNVALILWMPYFYIICTVLAVSFPDHCLVCFLRKAKREEIEEKVDFQLQTFIHLLSA

SEQ ID NO: 765646 - protein, 253 aa, Homo sapiens
MALSMPLNGLKEEDKEPLIELFVKAGSDGESIGNCPFSQRLFMILWLKGVVFSVTTVDLKRKPADLQNLAPGTHPPFITFNSEVKTDVNKIEEFLEEVLCPPKYLKLSPKHPESNTAGMDIFAKFSAYIKNSRPEANEALERGLLKTLQKLDEYLNSPLPDEIDENSMEDIKFSTRKFLDGNEMTLADCNLLPKLHIVKVVAKKYRNFDIPKEMTGIWRYLTNAYSRDEFTNTCPSDKEVEIAYSDVAKRLTK

SEQ ID NO: 765647 - protein, 253 aa, Homo sapiens; identical to SEQ ID NO: 765646

SEQ ID NO: 765648 - protein, 249 aa, Homo sapiens
MALSMPLNGLKEEDKEPLIELFVKAGSDGESIGNCPFSQRLFMILWLKGVVFSVTTVDLKRKPADLQNLAPGTHPPFITFNSEVKTDVNKIEEFLEEVLCPPKYLKLSPKHPESNTAGMDIFAKFSAYIKNSRPEANEALERGLLKTLQKLDEYLNSPLPDEIDENSMEDIKFSTRKFLDGNEMTLADCNLLPKLHIVKVVAKKYRNFDIPKEMTGIWRYLTNAYSRDEFTNTCPSDKEVEIAYSDVAK

SEQ ID NO: 765649 - protein, 266 aa, Homo sapiens
MALSMPLNGLKEEDKEPLIELFVKVNLKFGLSGYIGKAGSDGESIGNCPFSQRLFMILWLKGVVFSVTTVDLKRKPADLQNLAPGTHPPFITFNSEVKTDVNKIEEFLEEVLCPPKYLKLSPKHPESNTAGMDIFAKFSAYIKNSRPEANEALERGLLKTLQKLDEYLNSPLPDEIDENSMEDIKFSTRKFLDGNEMTLADCNLLPKLHIVKVVAKKYRNFDIPKEMTGIWRYLTNAYSRDEFTNTCPSDKEVEIAYSDVAKRLTK

SEQ ID NO: 765650 - protein, 211 aa, Homo sapiens
MILWLKGVVFSVTTVDLKRKPADLQNLAPGTHPPFITFNSEVKTDVNKIEEFLEEVLCPPKYLKLSPKHPESNTAGMDIFAKFSAYIKNSRPEANEALERGLLKTLQKLDEYLNSPLPDEIDENSMEDIKFSTRKFLDGNEMTLADCNLLPKLHIVKVVAKKYRNFDIPKEMTGIWRYLTNAYSRDEFTNTCPSDKEVEIAYSDVAKRLTK

SEQ ID NO: 765651 - protein, 119 aa, Homo sapiens
MRKGTSIAWNSPKPEYFLGSVDKIPDKDHLSEEKNFKESCLFDRDLREQLTTIDKETLQGAAKPDAHFRTMPCGQLLHFLQRNTIIAAVSGVAILMAIVLLLLGLASYIRKKQPSDMYS

SEQ ID NO: 765652 - protein, 319 aa, Homo sapiens
SEDWLLHDGLWTKAKMSRAMALFFVLCWIQVEMGFHHVGQAGHELLTINGSSCLSFLSSWDHRCTPPRPDEIVLQVFSKVPYDPSFDETRTAVRSITKRDTQKSYSQQKSLNNAAFASGSNEREEHLAKIFDEILLQVFPKFPYDPSFNEATAVRSITKTDMRKGTSIAWNSPKPEYFLGSVDKIPDKDHLSEEKNFKESCLFDRDLREQLTTIDKETLQGAAKPDAHFRTMPCGQLLHFLQRNTIIAAVSGVAILMAIVLLLLGLASYIRKKQPSSPLANTTYNIFIMDGKTWWHNSEEKNFTKLAKKQKQLKSSSCV

SEQ ID NO: 765653 - protein, 458 aa, Homo sapiens
MLPDFMLVLIVLGIPSSATTGFNSIAENEDALLRHLFQGYQKWVRPVLHSNDTIKVYFGLKISQLVDVDEKNQLMTTNVWLKQEWTDHKLRWNPDDYGGIHSIKVPSESLWLPDIVLFENADGRFEGSLMTKVIVKSNGTVVWTPPASYKSSCTMDVTFFPFDRQNCSMKFGSWTYDGTMVDLILINENVDRKDFFDNGEWEILNAKGMKGNRRDGVYSYPFITYSFVLRRLPLFYTLFLIIPCLGLSFLTVLVFYLPSDEGEKLSLSTSVLVSLTVFLLVIEEIIPSSSKVIPLIGEYLLFIMIFVTLSIIVTVFVINVHHRSSSTYHPMAPWVKRLFLQKLPKLLCMKDHVDRYSSPEKEESQPVVKGKVLEKKKQKQLSDGEKVLVAFLEKAADSIRYISRHVKKEHFISQVVQDWKFVAQVLDRIFLWLFLIVSVTGSVLIFTPALKMWLHSYH

SEQ ID NO: 765654 - protein, 458 aa, Homo sapiens; identical to SEQ ID NO: 765653

SEQ ID NO: 765655 - protein, 168 aa, Homo sapiens
MKRPFSKEDIDAANKHMKKCSSSLAIREMQIKTTMRYHFTPVRMAIIKKSGNNRCWRGCGEIGTLLHCWWDCKLIQPLWKSVWRFLRDLELEIPFDPAIPLLGIYPKDYKSCCYKDTCTHMFIAALFTIAKTWNQPKCPTMIDWIKKMWHIYTMEYYGAIKRMSSCPL

SEQ ID NO: 765656 - protein, 115 aa, Homo sapiens
LLHCAGDGGGLWAWAPRLGGGSRLEVDVKLWLPGGGGRAVETVAWETYPLLRSENRAPEPHAAQVWGSSRVNCRLQVRHPHAHALPLPLRDPRDPSSGTRAESSASSREVWARQA

SEQ ID NO: 765657 - protein, 407 aa, Homo sapiens
MDNVLPVDSDLSPNISTNTSEPNQFVQPAWQIVLWAAAYTVIVVTSVVGNVVVMWIILAHKRMRTVTNYFLVNLAFAEASMAAFNTVVNFTYAVHNEWYYGLFYCKFHNFFPIAAVFASIYSMTAVAFDRYMAIIHPLQPRLSATATKVVICVIWVLALLLAFPQGYYSTTETMPSRVVCMIEWPEHPNKIYEKVYHICVTVLIYFLPLLVIGYAYTVVGITLWASEIPGDSSDRYHEQVSAKRKVVKMMIVVVCTFAICWLPFHIFFLLPYINPDLYLKKFIQQVYLAIMWLAMSSTMYNPIIYCCLNDRFRLGFKHAFRCCPFISAGDYEGLEMKSTRYLQTQGSVYKVSRLETTISTVVGAHEEEPEDGPKATPSSLDLTSNCSSRSDSKTMTESFSFSSNVLS

SEQ ID NO: 765658 - protein, 311 aa, Homo sapiens
MDNVLPVDSDLSPNISTNTSEPNQFVQPAWQIVLWAAAYTVIVVTSVVGNVVVMWIILAHKRMRTVTNYFLVNLAFAEASMAAFNTVVNFTYAVHNEWYYGLFYCKFHNFFPIAAVFASIYSMTAVAFDRYMAIIHPLQPRLSATATKVVICVIWVLALLLAFPQGYYSTTETMPSRVVCMIEWPEHPNKIYEKVYHICVTVLIYFLPLLVIGYAYTVVGITLWASEIPGDSSDRYHEQVSAKRKVVKMMIVVVCTFAICWLPFHIFFLLPYINPDLYLKKFIQQVYLAIMWLAMSSTMYNPIIYCCLNDR

SEQ ID NO: 765659 - protein, 195 aa, Homo sapiens
MDNVLPVDSDLSPNISTNTSEPNQFVQPAWQIVLWAAAYTVIVVTSVVGNVVVMWIILAHKRMRTVTNYFLVNLAFAEASMAAFNTVVNFTYAVHNEWYYGLFYCKFHNFFPIAAVFASIYSMTAVAFDRYMAIIHPLQPRLSATATKVVICVIWVLALLLAFPQGYYSTTETMPSRVVCMIEWPEHPNKIYEKV

SEQ ID NO: 765660 - protein, 970 aa, Homo sapiens [sequence omitted]

SEQ ID NO: 765661 - protein, 970 aa, Homo sapiens [sequence omitted]

SEQ ID NO: 765662 - protein, 938 aa, Homo sapiens
MATCIGEKIEDFKVGNLLGKGSFAGVYRAESIHTGLEVAIKMLYNYFEDSNYVYLVLEMCHNGEMNRYLKNRVKPFSENEARHFMHQIITGMLYLHSHGILHRDLTLSNLLLTRNMNIKIADFGLATQLKMPHEKHYTLCGTPNYISPEIATRSAHGLESDVWSLGCMFYTLLIGRPPFDTDTVKNTLNKVVLADYEMPTFLSIEAKDLIHQLLRRNPADRLSLSSVLDHPFMSRNSSTKSKDLGTVEDSIDSGHATISTAITASSSTSISGSLFDKRRLLIGQPLPNKMTVFPKNKSSTDFSSSGDGNSFYTQWGNQETSNSGRGRVIQDAEERPHSRYLRRAYSSDRSGTSNSQSQAKTYTMERCHSAEMLSVSKRSGGGENEERYSPTDNNANIFNFFKEKTSSSSGSFERPDNNQALSNHLCPGKTPFPFADPTPQTETVQQWFGNLQINAHLRKTTEYDSISPNRDFQGHPDLQKDTSKNAWTDTKVKKNSDASDNAHSVKQQNTMKYMTALHSKPEIIQQECVFGSDPLSEQSKTRGMEPPWGYQNRTLRSITSPLVAHRLKPIRQKTKKAVVSILDSEEVCVELVKEYASQEYVKEVLQISSDGNTITIYYPNGGRGFPLADRPPSPTDNISRYSFDNLPEKYWRKYQYASRFVQLVRSKSPKITYFTRYAKCILMENSPGADFEVWFYDGVKIHKTEDFIQVIEKTGKSYTLKSESEVNSLKEEIKMYMDHANEGHRICLALESIISEEERKTRSAPFFPIIIGRKPGSTSSPKALSPPPSVDSNYPTRDRASFNRMVMHSAASPTQAPILNPSMVTNEGLGLTTTASGTDISSNSLKDCLPKSAQLLKSVFVKNVGWATQLTSGAVWVQFNDGSQLVVQAGVSSISYTSPNGQTTRYGENEKLPDYIKQKLQCLSSILLMFSNPTPNFH

SEQ ID NO: 765663 - protein, 743 aa, Homo sapiens [sequence omitted]

SEQ ID NO: 765664 - protein, 317 aa, Homo sapiens
RRAQPATFIPRVAVKMALVASVRVPARVLLRAGARLPGAALGRTERAAGGGDGARRFGSQRVLVEPDAGAGVAVMKFKNPPVNSLSLEFLTELVISLEKLENDKSFRGVILTSDRPGVFSAGLDLTEMCGRSPAHYAGYWKAVQELWLRLYQSNLVLVSAINGACPAGGCLVALTCDYRILADNPRYCIGLNETQLGIIAPFWLKDTLENTIGHRAAERALQLGLLFPPAEALQVGIVDQVVPEEQVQSTALSAIAQWMAIPDHARQLTKAMMRKATASRLVTQRDADVQNFVSFISKDSIQKSLQMYLERLKEEKG

SEQ ID NO: 765665 - protein, 317 aa, Homo sapiens; identical to SEQ ID NO: 765664

SEQ ID NO: 765666 - protein, 321 aa, Homo sapiens
RGALLGTLSAKEYAVVESGMALVASVRVPARVLLRAGARLPGAALGRTERAAGGGDGARRFGSQRVLVEPDAGAGVAVMKFKNPPVNSLSLEFLTELVISLEKLENDKSFRGVILTSDRPGVFSAGLDLTEMCGRSPAHYAGYWKAVQELWLRLYQSNLVLVSAINGACPAGGCLVALTCDYRILADNPRYCIGLNETQLGIIAPFWLKDTLENTIGHRAAERALQLGLLFPPAEALQVGIVDQVVPEEQVQSTALSAIAQWMAIPDHARQLTKAMMRKATASRLVTQRDADVQNFVSFISKDSIQKSLQMYLERLKEEKG

SEQ ID NO: 765667 - protein, 349 aa, Homo sapiens
RGALLGTLSAKEYAVVEIRDGAGGFCASPGARSAPRGRNPGWAGIGPGPGPGPGTNGLPHAAFAGARLPGAALGRTERAAGGGDGARRFGSQRVLVEPDAGAGVAVMKFKNPPVNSLSLEFLTELVISLEKLENDKSFRGVILTSDRPGVFSAGLDLTEMCGRSPAHYAGYWKAVQELWLRLYQSNLVLVSAINGACPAGGCLVALTCDYRILADNPRYCIGLNETQLGIIAPFWLKDTLENTIGHRAAERALQLGLLFPPAEALQVGIVDQVVPEEQVQSTALSAIAQWMAIPDHARQLTKAMMRKATASRLVTQRDADVQNFVSFISKDSIQKSLQMYLERLKEEKG

SEQ ID NO: 765668 - protein, 305 aa, Homo sapiens
PGKRAAARGEAGGRRAAVSAGARLPGAALGRTERAAGGGDGARRFGSQRVLVEPDAGAGVAVMKFKNPPVNSLSLEFLTELVISLEKLENDKSFRGVILTSDRPGVFSAGLDLTEMCGRSPAHYAGYWKAVQELWLRLYQSNLVLVSAINGACPAGGCLVALTCDYRILADNPRYCIGLNETQLGIIAPFWLKDTLENTIGHRAAERALQLGLLFPPAEALQVGIVDQVVPEEQVQSTALSAIAQWMAIPDHARQLTKAMMRKATASRLVTQRDADVQNFVSFISKDSIQKSLQMYLERLKEEKG

SEQ ID NO: 765669 - protein, 310 aa, Homo sapiens
LLGRAWVESAEGLCASPWRAFCSGTGARLPGAALGRTERAAGGGDGARRFGSQRVLVEPDAGAGVAVMKFKNPPVNSLSLEFLTELVISLEKLENDKSFRGVILTSDRPGVFSAGLDLTEMCGRSPAHYAGYWKAVQELWLRLYQSNLVLVSAINGACPAGGCLVALTCDYRILADNPRYCIGLNETQLGIIAPFWLKDTLENTIGHRAAERALQLGLLFPPAEALQVGIVDQVVPEEQVQSTALSAIAQWMAIPDHARQLTKAMMRKATASRLVTQRDADVQNFVSFISKDSIQKSLQMYLERLKEEKG

SEQ ID NO: 765670 - protein, 317 aa, Homo sapiens
MMFEASLFYFIRGLMFIVVTVQMAGDSVLLRAGARLPGAALGRTERAAGGGDGARRFGSQRVLVEPDAGAGVAVMKFKNPPVNSLSLEFLTELVISLEKLENDKSFRGVILTSDRPGVFSAGLDLTEMCGRSPAHYAGYWKAVQELWLRLYQSNLVLVSAINGACPAGGCLVALTCDYRILADNPRYCIGLNETQLGIIAPFWLKDTLENTIGHRAAERALQLGLLFPPAEALQVGIVDQVVPEEQVQSTALSAIAQWMAIPDHARQLTKAMMRKATASRLVTQRDADVQNFVSFISKDSIQKSLQMYLERLKEEKG

SEQ ID NO: 765671 - protein, 295 aa, Homo sapiens
MVRGRVLCSGGARLPGAALGRTERAAGGGDGARRFGSQRVLVEPDAGAGVAVMKFKNPPVNSLSLEFLTELVISLEKLENDKSFRGVILTSDRPGVFSAGLDLTEMCGRSPAHYAGYWKAVQELWLRLYQSNLVLVSAINGACPAGGCLVALTCDYRILADNPRYCIGLNETQLGIIAPFWLKDTLENTIGHRAAERALQLGLLFPPAEALQVGIVDQVVPEEQVQSTALSAIAQWMAIPDHARQLTKAMMRKATASRLVTQRDADVQNFVSFISKDSIQKSLQMYLERLKEEKG

SEQ ID NO: 765672 - protein, 319 aa, Homo sapiens
VKMAACGFLVLMLLCCCCSCSCCCVVPCVSLCAAVPSCAVLELWRAWLCSGGGDGARRFGSQRVLVEPDAGAGVAVMKFKNPPVNSLSLEFLTELVISLEKLENDKSFRGVILTSDRPGVFSAGLDLTEMCGRSPAHYAGYWKAVQELWLRLYQSNLVLVSAINGACPAGGCLVALTCDYRILADNPRYCIGLNETQLGIIAPFWLKDTLENTIGHRAAERALQLGLLFPPAEALQVGIVDQVVPEEQVQSTALSAIAQWMAIPDHARQLTKAMMRKATASRLVTQRDADVQNFVSFISKDSIQKSLQMYLERLKEEKG

SEQ ID NO: 765673 - protein, 306 aa, Homo sapiens
RGALLGTLSAKEYAVVESGMALVASVRVPARVLLRAAGGGDGARRFGSQRVLVEPDAGAGVAVMKFKNPPVNSLSLEFLTELVISLEKLENDKSFRGVILTSDRPGVFSAGLDLTEMCGRSPAHYAGYWKAVQELWLRLYQSNLVLVSAINGACPAGGCLVALTCDYRILADNPRYCIGLNETQLGIIAPFWLKDTLENTIGHRAAERALQLGLLFPPAEALQVGIVDQVVPEEQVQSTALSAIAQWMAIPDHARQLTKAMMRKATASRLVTQRDADVQNFVSFISKDSIQKSLQMYLERLKEEKG

SEQ ID NO: 765674 - protein, 300 aa, Homo sapiens
RRAQPATFIPRVAVKMALVASVRVPARVLLRAGARLPGAALGRTERAAGGGDGARRFGSQRVLVEPDAGAGVAVMKFKNPPVNSLSLEFLTELVISLEKLENDKSFRGVILTSDRPGVFSAGLDLTEMCGRSPAHYAGYWKAVQELWLRLYQSNLVLVSAINGACPAGGCLVALTCDYRILADNPRLKDTLENTIGHRAAERALQLGLLFPPAEALQVGIVDQVVPEEQVQSTALSAIAQWMAIPDHARQLTKAMMRKATASRLVTQRDADVQNFVSFISKDSIQKSLQMYLERLKEEKG

SEQ ID NO: 765675 - protein, 257 aa, Homo sapiens [sequence omitted]

SEQ ID NO: 765676 - protein, 69 aa, Homo sapiens
ETQLGIIAQWMAIPDHARQLTKAMMRKATASRLVTQRDADVQNFVSFISKDSIQKSLQMYLERLKEEKG

SEQ ID NO: 765677 - protein, 90 aa, Homo sapiens
MLITTAILRPQMLGLLVENTENPPQYPRVIGSVGRVSNQFPFTGKPYHRVRLGKFWPGHTLALFKGLWVGPSLQQPISGFGRESPAILSQ

SEQ ID NO: 765678 - protein, 1235 aa, Homo sapiens
YLAMANGVIPPPGGASPLPQVRVPLEEPPLSPDVEEEDDDLGKTLAVSRFGDLISKPPAWDPEKPSRSYSERDFEFHRHTSHHTHHPLSARLPPPHKLRRLPPTSARHTRRKRKKEKTSAPPSEGTPPIQEEGGAGVDEEEEEEEEEEGESEAEPVEPPPSGTPQKAKFSIGSDEDDSPGLPGRAAVTKPLPSVGPHTDKSPQHSSSSPSPRARASRLAGEKSRPWSPSASYDLRERLCPGSALGNPGGPEQQVPTDEAEAQMLGSADLDDMKSHRLEDNPGVRRHLVKKPSRTQGGRGSPSGLAPILRRKKKKKKLDRRPHEVFVELNELMLDRSQEPHWRETARWIKFEEDVEEETERWGKPHVASLSFRSLLELRRTIAHGAALLDLEQTTLPGIAHLVVETMIVSDQIRPEDRASVLRTLLLKHSHPNDDKDSGFFPRNPSSSSMNSVLGNHHPTPSHGPDGAVPTMADDLGEPAPLWPHDPDAKEKPLHMPGGDGHRGKSLKLLEKIPEDAEATVVLVGCVPFLEQPAAAFVRLNEAVLLESVLEVPVPVRFLFVMLGPSHTSTDYHELGRSIATLMSDKLFHEAAYQADDRQDLLSAISEFLDGSIVIPPSEVEGRDLLRSVAAFQRELLRKRREREQTKVEMTTRGGYTAPGKELSLELGGSEATPEDDPLLRTGSVFGGLVRDVRRRYPHYPSDLRDALHSQCVAAVLFIYFAALSPAITFGGLLGEKTEGLMGVSELIVSTAVLGVLFSLLGAQPLLVVGFSGPLLVFEEAFFKFCRAQDLEYLTGRVWVGLWLVVFVLALVAAEGSFLVRYISPFTQEIFAFLISLIFIYETFYKLYKVFTEHPLLPFYPPEGALEGSLAAGLEPNGSALPPTEGPPSPRNQPNTALLSLILMLGTFFIAFFLRKFRNSRFLGGKARRIIGDFGIPISILVMVLVDYSITDTYTQKLTVPTGLSVTSPDKRSWFIPPLGSARPFPPWMMVAAAVPALLVLILIFMETQITALIVSQKARRLLKGSGFHLDLLLIGSLGGLCGLFGLPWLTAATVRSVTHVNALTVMRTAIAPGDKPQIQEVREQRVTGVLIASLVGLSIVMGAVLRRIPLAVLFGIFLYMGVTSLSGIQLSQRLLLILMPAKHHPEQPYVTKVKTWRMHLFTCIQLGCIALLWVVKSTAASLAFPFLLLLTVPLRHCLLPRLFQDRELQALDSEDAEPNFDEDGQDEYNELHMPV

SEQ ID NO: 765679 - protein, 945 aa, Homo sapiens
RVGDKLVPCHPSGLAPILRRKKKKKKLDRRPHEVFVELNELMLDRSQEPHWRETARWIKFEEDVEEETERWGKPHVASLSFRSLLELRRTIAHGAALLDLEQTTLPGIAHLVVETMIVSDQIRPEDRASVLRTLLLKHSHPNDDKDSGFFPRNPSSSSMNSVLGNHHPTPSHGPDGAVPTMADDLGEPAPLWPHDPDAKEKPLHMPGGDGHRGKSLKLLEKIPEDAEATVVLVGCVPFLEQPAAAFVRLNEAVLLESVLEVPVPVRFLFVMLGPSHTSTDYHELGRSIATLMSDKLFHEAAYQADDRQDLLSAISEFLDGSIVIPPSEVEGRDLLRSVAAFQRELLRKRREREQTKVEMTTRGGYTAPGKELSLELGGSEATPEDDPLLRTGSVFGGLVRDVRRRYPHYPSDLRDALHSQCVAAVLFIYFAALSPAITFGGLLGEKTEGLMGVSELIVSTAVLGVLFSLLGAQPLLVVGFSGPLLVFEEAFFKFCRAQDLEYLTGRVWVGLWLVVFVLALVAAEGSFLVRYISPFTQEIFAFLISLIFIYETFYKLYKVFTEHPLLPFYPPEGALEGSLAAGLEPNGSALPPTEGPPSPRNQPNTALLSLILMLGTFFIAFFLRKFRNSRFLGGKARRIIGDFGIPISILVMVLVDYSITDTYTQKLTVPTGLSVTSPDKRSWFIPPLGSARPFPPWMMVAAAVPALLVLILIFMETQITALIVSQKARRLLKGSGFHLDLLLIGSLGGLCGLFGLPWLTAATVRSVTHVNALTVMRTAIAPGDKPQIQEVREQRVTGVLIASLVGLSIVMGAVLRRIPLAVLFGIFLYMGVTSLSGIQLSQRLLLILMPAKHHPEQPYVTKVKTWRMHLFTCIQLGCIALLWVVKSTAASLAFPFLLLLTVPLRHCLLPRLFQDRELQALDSEDAEPNFDEDGQDEYNELHMPV

SEQ ID NO: 765680 - protein, 1262 aa, Homo sapiens
YLAMANGVIPPPGGASPLPQVRVPLEEPPLSPDVEEEDDDLGKTLAVSRFGDLISKPPAWDPEKPSRSYSERDFEFHRHTSHHTHHPLSARLPPPHKLRRLPPTSARHTRRKRKKEKTSAPPSEGTPPIQEEGGAGVDEEEEEEEEEEGESEAEPVEPPPSGTPQKAKFSIGSDEDDSPGLPGRAAVTKPLPSVGPHTDKSPQHSSRPCSELRDGDGTTDLALSSPRLLCCLPSSPSPRARASRLAGEKSRPWSPSASYDLRERLCPGSALGNPGGPEQQVPTDEAEAQMLGSADLDDMKSHRLEDNPGVRRHLVKKPSRTQGGRGSPSGLAPILRRKKKKKKLDRRPHEVFVELNELMLDRSQEPHWRETARWIKFEEDVEEETERWGKPHVASLSFRSLLELRRTIAHGAALLDLEQTTLPGIAHLVVETMIVSDQIRPEDRASVLRTLLLKHSHPNDDKDSGFFPRNPSSSSMNSVLGNHHPTPSHGPDGAVPTMADDLGEPAPLWPHDPDAKEKPLHMPGGDGHRGKSLKLLEKIPEDAEATVVLVGCVPFLEQPAAAFVRLNEAVLLESVLEVPVPVRFLFVMLGPSHTSTDYHELGRSIATLMSDKLFHEAAYQADDRQDLLSAISEFLDGSIVIPPSEVEGRDLLRSVAAFQRELLRKRREREQTKVEMTTRGGYTAPGKELSLELGGSEATPEDDPLLRTGSVFGGLVRDVRRRYPHYPSDLRDALHSQCVAAVLFIYFAALSPAITFGGLLGEKTEGLMGVSELIVSTAVLGVLFSLLGAQPLLVVGFSGPLLVFEEAFFKFCRAQDLEYLTGRVWVGLWLVVFVLALVAAEGSFLVRYISPFTQEIFAFLISLIFIYETFYKLYKVFTEHPLLPFYPPEGALEGSLAAGLEPNGSALPPTEGPPSPRNQPNTALLSLILMLGTFFIAFFLRKFRNSRFLGGKARRIIGDFGIPISILVMVLVDYSITDTYTQKLTVPTGLSVTSPDKRSWFIPPLGSARPFPPWMMVAAAVPALLVLILIFMETQITALIVSQKARRLLKGSGFHLDLLLIGSLGGLCGLFGLPWLTAATVRSVTHVNALTVMRTAIAPGDKPQIQEVREQRVTGVLIASLVGLSIVMGAVLRRIPLAVLFGIFLYMGVTSLSGIQLSQRLLLILMPAKHHPEQPYVTKVKTWRMHLFTCIQLGCIALLWVVKSTAASLAFPFLLLLTVPLRHCLLPRLFQDRELQALDSEDAEPNFDEDGQDEYNELHMPV

SEQ ID NO: 765681 - protein, 604 aa, Homo sapiens
DLVLGVTRVDRTSIINIDHWGDGYNAPGKELSLELGGSEATPEDDPLLRTGSVFGGLVRDVRRRYPHYPSDLRDALHSQCVAAVLFIYFAALSPAITFGGLLGEKTEGLMGVSELIVSTAVLGVLFSLLGAQPLLVVGFSGPLLVFEEAFFKFCRAQDLEYLTGRVWVGLWLVVFVLALVAAEGSFLVRYISPFTQEIFAFLISLIFIYETFYKLYKVFTEHPLLPFYPPEGALEGSLAAGLEPNGSALPPTEGPPSPRNQPNTALLSLILMLGTFFIAFFLRKFRNSRFLGGKARRIIGDFGIPISILVMVLVDYSITDTYTQKLTVPTGLSVTSPDKRSWFIPPLGSARPFPPWMMVAAAVPALLVLILIFMETQITALIVSQKARRLLKGSGFHLDLLLIGSLGGLCGLFGLPWLTAATVRSVTHVNALTVMRTAIAPGDKPQIQEVREQRVTGVLIASLVGLSIVMGAVLRRIPLAVLFGIFLYMGVTSLSGIQLSQRLLLILMPAKHHPEQPYVTKVKTWRMHLFTCIQLGCIALLWVVKSTAASLAFPFLLLLTVPLRHCLLPRLFQDRELQALDSEDAEPNFDEDGQDEYNELHMPV

SEQ ID NO: 765682 - protein, 135 aa, Homo sapiens
MGAVLRRIPLAVLFGIFLYMGVTSLSGIQLSQRLLLILMPAKHHPEQPYVTKVKTWRMHLFTCIQLGCIALLWVVKSTAASLAFPFLLLLTVPLRHCLLPRLFQDRELQALDSEDAEPNFDEDGQDEYNELHMPV

SEQ ID NO: 765683 - protein, 1210 aa, Homo sapiens
YLAMANGVIPPPGGASPLPQVRVPLEEPPLSPDVEEEDDDLGKTLAVSRFGDLISKPPAWDPEKPSRSYSERDFEFHRHTSHHTHHPLSARLPPPHKLRRLPPTSARHTRRKRKKEKTSAPPSEGTPPIQEEGGAGVDEEEEEEEEEEGESEAEPVEPPPSGTPQKAKFSIGSDEDDSPGLPGRAAVTKPLPSVGPHTDKSPQHSSRPCSELRDGDGTTDLALSSPRLLCCLPSSPSPRARASRLAGEKSRPWSPSASYDLRERLCPGSALGNPGGPEQQVPTDEAEAQMLGSADLDDMKSHRLEDNPGVRRHLVKKPSRTQGGRGSPSGLAPILRRKKKKKKLDRRPHEVFVELNELMLDRSQEPHWRETARWIKFEEDVEEETERWGKPHVASLSFRSLLELRRTIAHGAALLDLEQTTLPGIAHLVVETMIVSDQIRPEDRASVLRTLLLKHSHPNDDKDSGFFPRNPSSSSMNSVLGNHHPTPSHGPDGAVPTMADDLGEPAPLWPHDPDAKEKPLHMPGGDGHRGKSLKLLEKIPEDAEATVVLVGCVPFLEQPAAAFVRLNEAVLLESVLEVPVPVRFLFVMLGPSHTSTDYHELGRSIATLMSDKLFHEAAYQADDRQDLLSAISEFLDGSIVIPPSEVEGRDLLRSVAAFQRELLRKRREREQTKVEMTTRGGYTAPGKELSLELGGSEATPEDDPLLRTGSVFGGLVRDVRRRYPHYPSDLRDALHSQCVAAVLFIYFAALSPAITFGGLLGEKTEGLMGVSELIVSTAVLGVLFSLLGAQPLLVVGFSGPLLVFEEAFFKFCRAQDLEYLTGRVWVGLWLVVFVLALVAAEGSFLVRYISPFTQEIFAFLISLIFIYETFYKLYKVFTEHPLLPFYPPEGALEGSLAAGLEPNGSALPPTEGPPSPRNQPNTALLSLILMLGTFFIAFFLRKFRNSRFLGGKARRIIGDFGIPISILVMVLVDYSITDTYTQKLTVPTGLSVTSPDKRSWFIPPLGSARPFPPWMMVAAAVPALLVLILIFMETQITALIVSQKARRLLKGSGFHLDLLLIGSLGGLCGLFGLPWLTAATVRSVTHVNALTVMRTAIAPGDKPQIQEVREQRVTGVLIASLVGESPPPPCTPPSLGPTVLHLHYPRLDPESPNVLCVALNLTPKPASQHSPSPLLLESFSGSLSCPLFSLFFFETESRSVTQAGVQWRDL

SEQ ID NO: 765684 - protein, 898 aa, Homo sapiens
YLAMANGVIPPPGGASPLPQVRVPLEEPPLSPDVEEEDDDLGKTLAVSRFGDLISKPPAWDPEKPSRSYSERDFEFHRHTSHHTHHPLSARLPPPHKLRRLPPTSARHTRRKRKKEKTSAPPSEGTPPIQEEGGAGVDEEEEEEEEEEGESEAEPVEPPPSGTPQKAKFSIGSDEDDSPGLPGRAAVTKPLPSVGPHTDKSPQHSSRPCSELRDGDGTTDLALSSPRLLCCLPSSPSPRARASRLAGEKSRPWSPSASYDLRERLCPGSALGNPGGPEQQVPTDEAEAQMLGSADLDDMKSHRLEDNPGVRRHLVKKPSRTQGGRGSPSGLAPILRRKKKKKKLDRRPHEVFVELNELMLDRSQEPHWRETARWIKFEEDVEEETERWGKPHVASLSFRSLLELRRTIAHGAALLDLEQTTLPGIAHLVVETMIVSDQIRPEDRASVLRTLLLKHSHPNDDKDSGFFPRNPSSSSMNSVLGNHHPTPSHGPDGAVPTMADDLGEPAPLWPHDPDAKEKPLHMPGGDGHRGKSLKLLEKIPEDAEATVVLVGCVPFLEQPAAAFVRLNEAVLLESVLEVPVPVRFLFVMLGPSHTSTDYHELGRSIATLMSDKLFHEAAYQADDRQDLLSAISEFLDGSIVIPPSEVEGRDLLRSVAAFQRELLRKRREREQTKVEMTTRGGYTAPGKELSLELGGSEATPEDDPLLRTGSVFGGLVRDVRRRYPHYPSDLRDALHSQCVAAVLFIYFAALSPAITFGGLLGEKTEGLMGVSELIVSTAVLGVLFSLLGAQPLLVVGFSGPLLVFEEAFFKFCRAQDLEYLTGRVWVGLWLVVFVLALVAAEGSFLVRYISPFTQEIFAFLISLIFIYETLGIDTWASGRAQPWAGGLLRTQRCAWNHS

SEQ ID NO: 765685 - protein, 83 aa, Homo sapiens
LRDALHSQCVAAVLFIYFAALSPAITFGGLLGKGLGLGELRGSSSHFWSQCHLQDSGSGCDHIRGPMVRCASKGVSTLQRCWI

SEQ ID NO: 765686 - protein, 121 aa, Homo sapiens
ALVVHPTPGQCPSFPAVDDGGSRCSRPPRPHPDLHGDTDHGVREMGGGGGRDEAKLLGSLAWFQGYSRDIIISIRVLGGGSWWQSLRKRVCVEELAGVRRRWGRSREQWHPGQGHGFPVMV

SEQ ID NO: 765687 - protein, 192 aa, Homo sapiens
  misc_feature (1)..(1): Xaa can be any naturally occurring amino acid
  misc_feature (3)..(3): Xaa can be any naturally occurring amino acid
XGXQEFGTRGVWGGDMLGCGIPALGLLLLLQGSADGNGIQGFFYPWSCEGDIWDRESCGGQAAIDSPNLCLRLRCCYRNGVCYHQRPDENVRRKHMWALVWTCSGLLLLSCSICLFWWAKRRDVLHMPGFLAGPCDMSKSVSLLSKHRGTKKTPSTGSVPVALSKESRDVEGGTEGEGTEEGEETEGEEEED

SEQ ID NO: 765688 - protein, 171 aa, Homo sapiens
MPPQSSLGCDSFCLSLFSMTLTVWREVLGKYFVDCAQLRFGSCFSQGLAPVKKRRNFPVKQWGKNDPFPLGPLKGMEPFFGPDSKGAFPSKTRMFPFGFSWKQKRKPWAGPRAGSRSYGLSPASPHPRPTSWAYYRLPSSLQSPGNRALSHSDPHQTCSAPGMIGWGGAAI

SEQ ID NO: 765689 - protein, 194 aa, Homo sapiens
MAKQKRKVPEVTEKKNKKLKKASAEGPLLGPEAAPSGEGAGSKGEAVLRPGLDAEPELSPEEQRVLERKLKKERKKEERQRLREAGLVAQHPPARRSGAELALDYLCRWAQKHKNWRFQKTRQTWLLLHMYDSDKVPDEHFSTLLAYLEGLQGRARELTVQKAEALMRELDEEGSDPPLPGRAQRIRQVLQLLS

SEQ ID NO: 765690 - protein, 192 aa, Homo sapiens
IGRRPGWPSEAAGGAGRAVRTAGASLPRRRPCPRDLTAGSEGEAVLRPGLDAEPELSPEEQRVLERKLKKERKKEERQRLREAGLVAQHPPARRSGAELALDYLCRWAQKHKNWRFQKTRQTWLLLHMYDSDKVPDEHFSTLLAYLEGLQGRARELTVQKAEALMRELDEEGSDPPLPGRAQRIRQVLQLLS

SEQ ID NO: 765691 - protein, 209 aa, Homo sapiens
AGVTVQPAGSGSSRAGPAGHGQCGGAEAAGGAGRAVRTAGASLPRRRPCPRDLTAGSEGEAVLRPGLDAEPELSPEEQRVLERKLKKERKKEERQRLREAGLVAQHPPARRSGAELALDYLCRWAQKHKNWRFQKTRQTWLLLHMYDSDKVPDEHFSTLLAYLEGLQGRARELTVQKAEALMRELDEEGSDPPLPGRAQRIRQVLQLLS

SEQ ID NO: 765692 - protein, 213 aa, Homo sapiens
HEGRKAASATQLFTLRWATMAKQKRKVPEVTEKKNKKLKKASAEGPLLGPEAAPSGEGAGSKGEAVLRPGLDAEPELSPEEQRVLERKLKKERKKEERQRLREAGLVAQHPPARRSGAELALDYLCRWAQKHKNWRFQKTRQTWLLLHMYDSDKVPDEHFSTLLAYLEGLQGRARELTVQKAEALMRELDEEGSDPPLPGRAQRIRQVLQLLS

SEQ ID NO: 765693 - protein, 209 aa, Homo sapiens; identical to SEQ ID NO: 765691

SEQ ID NO: 765694 - protein, 216 aa, Homo sapiens
PGAARPGGGPGVRGAGEAGAAGMAKQKRKVPEVTEKKNKKLKKASAEGPLLGPEAAPSGEGAGSKGEAVLRPGLDAEPELSPEEQRVLERKLKKERKKEERQRLREAGLVAQHPPARRSGAELALDYLCRWAQKHKNWRFQKTRQTWLLLHMYDSDKVPDEHFSTLLAYLEGLQGRARELTVQKAEALMRELDEEGSDPPLPGRAQRIRQVLQLLS

SEQ ID NO: 765695 - protein, 143 aa, Homo sapiens
MRRALIPPCRGGPSASDRCCSCSPSGFSAGRGRCPVQGCLRPHRVQLLRRWGPGSPAGQRLSKGFQLLRWWGPGSPAPEPRKGPFPPPDPPWPVTAVTVMAGSVPSAQSVDALESPGPLALEGPSSPRNLLWREMSIFLPGIF

SEQ ID NO: 765696 - protein, 256 aa, Homo sapiens
NNSKDDVGNPLVNPKGANGAAGGPQMAKQKRKVPEVTEKKNKKLKKASAEGPLLGPEAAPSGEGAGSKGEAVLRPGLDAEPELSPEEQRVLERKLKKERKKEERQRLREAGLVAQHPPARRSGAELALDYLCRWRPCPTRFCPGRASQPLPEGVEAFTRTHCVEGSRAVRWAQKHKNWRFQKTRQTWLLLHMYDSDKVPDEHFSTLLAYLEGLQGRARELTVQKAEALMRELDEEGSDPPLPGRAQRIRQVLQLLS

SEQ ID NO: 765697 - protein, 209 aa, Homo sapiens; identical to SEQ ID NO: 765691

SEQ ID NO: 765698 - protein, 143 aa, Homo sapiens; identical to SEQ ID NO: 765695

SEQ ID NO: 765699 - protein, 206 aa, Homo sapiens
AGVTVQPAGSGSSRAGPAGHGQCGGAEAAGGAGRAVRTAGASLPRRRPCPRDLTAGSEGEAVLRPGLDAEPELSPEEQRVLERKLKKERKKEERQRLREAGLVAQHPPARRSGAELALDYLCRWAQKHKNWRFQKTRQTWLLLHMYDSDKVPDEHFSTLLAYLDAAAALLVGSARGGAAAQCRAASDHTGCSSSGGGGRVHQQGSG

SEQ ID NO: 765700 - protein, 190 aa, Homo sapiens
KARYEGWVGGEAAGGAGRAVRTAGASLPRRRPCPRDLTAGSEGEAVLRPGLDAEPELSPEEQRVLERKLKKERKKEERQRLREAGLVAQHPPARRSGAELALDYLCRWAQKHKNWRFQKTRQTWLLLHMYDSDKVPDEHFSTLLAYLDAAAALLVGSARGGAAAQCRAASDHTGCSSSGGGGRVHQQGSG

SEQ ID NO: 765701 - protein, 194 aa, Homo sapiens; identical to SEQ ID NO: 765689

SEQ ID NO: 765702 - protein, 194 aa, Homo sapiens; identical to SEQ ID NO: 765689

SEQ ID NO: 765703 - protein, 209 aa, Homo sapiens; identical to SEQ ID NO: 765691

SEQ ID NO: 765704 - protein, 113 aa, Homo sapiens
NNSKDDVGNPLVNPKGANGAAGGPQMAKQKRKVPEVTEKKNKKLKKASAEGPLLGPEAAPSGEGAGSKGEAVLRPGLDAEPELSPEEPIPLRGPHSWSPACVHRGAWLWPVFL

SEQ ID NO: 765705 - protein, 209 aa, Homo sapiens; identical to SEQ ID NO: 765691

SEQ ID NO: 765706 - protein, 209 aa, Homo sapiens; identical to SEQ ID NO: 765691

SEQ ID NO: 765707 - protein, 219 aa, Homo sapiens
NNSKDDVGNPLVNPKGANGAAGGPQMAKQKRKVPEVTEKKNKKLKKASAEGPLLGPEAAPSGEGAGSKGEAVLRPGLDAEPELSPEEQRVLERKLKKERKKEERQRLREAGLVAQHPPARRSGAELALDYLCRWAQKHKNWRFQKTRQTWLLLHMYDSDKVPDEHFSTLLAYLEGLQGRARELTVQKAEALMRELDEEGSDPPLPGRAQRIRQVLQLLS

SEQ ID NO: 765708 - protein, 209 aa, Homo sapiens; identical to SEQ ID NO: 765691

SEQ ID NO: 765709 - protein, 143 aa, Homo sapiens; identical to SEQ ID NO: 765695

SEQ ID NO: 765710 - protein, 143 aa, Homo sapiens; identical to SEQ ID NO: 765695

SEQ ID NO: 765711 - protein, 168 aa, Homo sapiens
MDALDKVVQEREDALRLLQTGQERARPGAWRRDIFGRIIWHKFKQWVIPWHLNKRYNRKRFLALPYAIAYGKAKSGTAHLRRWAQKHKNWRFQKTRQTWLLLHMYDSDKVPDEHFSTLLAYLEGLQGRARELTVQKAEALMRELDEEGSDPPLPGRAQRIRQVLQLLS

SEQ ID NO: 765712 - protein, 151 aa, Homo sapiens
KARYEGWVGGEAAGGAGRAVRTAGASLPRRRPCPRDLTAGSEALIPPCLGRAQRILTGAAAALLVGSARGGAAAQCRAASDHTEGPGKEAEKGTEERGEAASAGGRPCGPAPACQALGGRTGPGLPLQMGPKAQELEVSEDEADVAPAAHV

SEQ ID NO: 765713 - protein, 194 aa, Homo sapiens; identical to SEQ ID NO: 765689

SEQ ID NO: 765714 - protein, 209 aa, Homo sapiens; identical to SEQ ID NO: 765691

SEQ ID NO: 765715 - protein, 163 aa, Homo sapiens
MGQKAQDWRFQQDEADVGSCCTCITSDKGPDEHFINLVATGGLQAGREVTVRRRSPMRTDKRAESTCREGQGLETCGRVKTCTLSANSGTRWVRHPVPHVATRGRGRGYFAPQGFWFGGPRGRWQTPLTKPGANTARENESKESRGDDLAHPLCTGSGGVSRE

SEQ ID NO: 765716 - protein, 807 aa, Homo sapiens
VCVPLRTGYCLPRAPVGFCVPTFNPNCGSRGSRTGRRGATGHSWLCLGPCTAPQPVAPPTVPKEYGPPEEGPAWTVILRSSSTEPRQAVQSLCPPRPGDAEAGAEAQVGPGGAAPPASLQAPLVGPTVAPVESPPYRLPGMTHVAGRTDAFQTQLDPGAAFLGPTHPISPGLTPLHTASIHGWGAKPPPPTQPPGCRMSPGKALMGACGPGKEHGSLARGQRHLPQPLASSHQLTGPEVSDETPTGAREGWKSQFVRHNWDSHSLGPWDPGTLRQSRRGPAWADGGWGQGGSASLCLPSSSDEYQAARATLLRAFQAKFDTFVVPCVVASGDIKDRKGSEPLSFRCGVLWPEQGVVSRKRAVPLLLPNSGAWAGRGPPTLPSACPSYPSPHNTLYLELWCPTVAPSVVVTSHKGKTIFNFGDVAVGHRSIKKISIQNVSPEDLALDFSLLNPNGPFVLLNHSSLLRAGGTQVLVLSFSPHESILAQETLDIITKRGTLTLTLMGTGVASMITCSIEGSVLNMGYVIAGESVSSGFKLQNNSLLPIKFSMHLDSLSSTRGRGQQQLPQFLSSPSQRTEVVGTQNLNGQSVFSVAPVKGVMDPGKTQDFTVTFSPDHESLYFSDKLQVVLFEKKISHQILLKGAACQHMMFVEGGDPLDVPVESLTAIPVFDPRHREASSRPGPLSPEAEELRPILVTLDYIQFDTDTPAPPATRELQVGCIRTTQPSPKKTVEFSIDSVASLQHKGFSIEPSRGSVERGQTKTISISWVPPADFDPDHPLMVSALLQLRGDVKETYKVIFVAQVLTGP

SEQ ID NO: 765717 - protein, 520 aa, Homo sapiens
VCVPLRTGYCLPRAPVGFCVPTFNPNCGSRGSRTGRRGATGHSWLCLGPCTAPQPVAPPTVPKEYGPPEEGPAWTVILRSSSTEPRQAVQSLCPPRPGDAEAGAEAQVGPGGAAPPASLQAPLVGPTVAPVESPPYRLPGMTHVAGRTDAFQTQLDPGAAFLGPTHPISPGLTPLHTASIHGWGAKPPPPTQPPGCRMSPGKALMGACGPGKEHGSLARGQRHLPQPLASSHQLTGPEVSDETPTGAREGWKSQFVRHNWDSHSLGPWDPGTLRQSRRGPAWADGGWGQGGSASLCLPSSSDEYQAARATLLRAFQAKFDTFVVPCVVASGDIKDRKGSEPLSFSPHNTLYLELWCPTVAPSVVVTSHKGKTIFNFGDVAVGHRSIKKISIQNVSPEDLALDFSLLNPNGPFVLLNHSSLLRAGGTQVLVLSFSPHESILAQETLDIITKRGTLTLTLMGTGVASMITCSIEGSVLNMGYVIAGESVSSGFKVKHTWALVLAPASQEGFPPGRTQASCQK

SEQ ID NO: 765718 - protein, 473 aa, Homo sapiens
FSSGGWSPAAPSPTGPRAPPPPRPPAAGPAATMKKFFQEFKADIKFKSAGPGQKLKESVGEKAHKEKPNQPAPRPPRQGPTNEAQMAAAAALARLEQKQSRAWGPTSQDTIRNQVRKELQAEATVSGSPEAPGTNVVSEPREEGSAHLAVPGVYFTCPLTGATLRKDQRDACIKEAILLHFSTDPVAASIMKIYTFNKDQDRVKLGVDTIAKYLDNIHLHPEEEKYRKIKLQNKVFQERINCLEGTHEFFEAIGFQKVLLPAQDQEDPEEFYVLSETTLAQPQSLERHKEQLLAAEPVRAKLDRQRRVFQPSPLASQFELPGDFFNLTAEEIKREQRLRSEAVERLSVLRTKAMREKEEQRGLRKYNYTLLRVRLPDGCLLQGTFYARERLGAVYGFVREALQSDWLPFELLASGGQKLSEDENLALNECGLVPSALLTFSWDMAVLEDIKAAGAEPDSILKPELLSAIEKLL

SEQ ID NO: 765719 - protein, 388 aa, Homo sapiens
MAAAAALARLEQKQSRAWGPTSQDTIRNQVRKELQAEATVSGSPEAPGTNVVSEPREEGSAHLAVPGVYFTCPLTGATLRKDQRDACIKEAILLHFSTDPVAASIMKIYTFNKDQDRVKLGVDTIAKYLDNIHLHPEEEKYRKIKLQNKVFQERINCLEGTHEFFEAIGFQKVLLPAQDQEDPEEFYVLSETTLAQPQSLERHKEQLLAAEPVRAKLDRQRRVFQPSPLASQFELPGDFFNLTAEEIKREQRLRSEAVERLSVLRTKAMREKEEQRGLRKYNYTLLRVRLPDGCLLQGTFYARERLGAVYGFVREALQSDWLPFELLASGGQKLSEDENLALNECGLVPSALLTFSWDMAVLEDIKAAGAEPDSILKPELLSAIEKLL

SEQ ID NO: 765720 - protein, 283 aa, Homo sapiens [sequence omitted]

SEQ ID NO: 765721 - protein, 704 aa, Homo sapiens
FSSGGWSPAAPSPTGPRAPPPPRPPAAGPAATMKKFFQEFKADIKFKSAGPGQKLKESVGEKAHKEKPNQPAPRPPRQGPTNEAQMAAAAALARLEQKQSRAWGPTSQDTIRNQVRKELQAEATVSGSPEAPGTNVVSEPREEGSAHLAVPGVYFTCPLTGATLRKDQRDACIKEAILLHFSTDPVAASIMKIYTFNKDQDRVKLGVDTIAKCACGPFALPGPSSSSQHPSHWGCHPLWPPHYLLRWVGKEHRPRVRQLHPEASGKGLGLLGPQFTRVQNEGVEGIRGFPPWLPWGTCGGGRVPPHSPGLRIGGRPGGPRCPPTPREHPAGAPCWHCGPSALALHSSGTVASPPLWLIVPFQGWWDGEGFRGAPAGTRGGLHGVSEVCLPPGDGLLPSQSLGRFFPLTRGQVWLSCCYLEQEAQRGRVGSLGCAPLTFSTYPRYLDNIHLHPEEEKYRKIKLQNKVFQERINCLEGTHEFFEAIGFQKVLLPAQDQEDPEEFYVLSETTLAQPQSLERHKEQLLAAEPVRAKLDRQRRVFQPSPLASQFELPGDFFNLTAEEIKREQRLRSEAVERLSVLRTKAMREKEEQRGLRKYNYTLLRVRLPDGCLLQGTFYARERLGAVYGFVREALQSDWLPFELLASGGQKLSEDENLALNECGLVPSALLTFSWDMAVLEDIKAAGAEPDSILKPELLSAIEKLL

SEQ ID NO: 765722 - protein, 294 aa, Homo sapiens
FSSGGWSPAAPSPTGPRAPPPPRPPAAGPAATMKKFFQEFKADIKFKSAGPGQKLKESVGEKAHKEKPNQPAPRPPRQGPTNEAQMAAAAALARLEQKQSRAWGPTSQDTIRNQVAASIMKIYTFNKDQDRVKLGVDTIAKYLDNIHLHPEEEKYRKIKLQNKVFQERINCLEGTHEFFEAIGFQKVLLPAQDQEDPEEFYVLSETTLAQPQSLERHKEQLLAAEPVRAKLDRQRRVFQPSPLASQFELPGDFFNLTAEEIKREQRLRHFLRSGAAGGGVRVRPGGPAERLAAF

SEQ ID NO: 765723 - protein, 100 aa, Homo sapiens
IRARYPIGEGTFYARERLGAVYGFVREALQSDWLPFELLASGGQKLSEDENLALNECGLVPSALLTFSWDMAVLEDIKAAGAEPDSILKPELLSAIEKLL

SEQ ID NO: 765724 - protein, 407 aa, Homo sapiens
FSSGGWSPAAPSPTGPRAPPPPRPPAAGPAATMKKFFQEFKADIKFKSAGPGQKLKESVGEKAHKEKPNQPAPRPPRQGPTNEAQMAAAAALARLEQKQSRAWGPTSQDTIRNQVRKELQAEATVSGSPEAPGTNVVSEPREEGSAHLAVPGVYFTCPLTGATLRKDQRDACIKEAILLHFSTDPVAASIMKIYTFNKDQDRVKLGVDTIAKYLDNIHLHPEEEKYRKIKLQNKVFQERINCLEGTHEFFEAIGFQKVLLPAQDQEDPEEFYVLSETTLAQPQSLERHKEQLLAAEPVRAKLDRQRRVFQPSPLASQFELPGDFFNLTAEEIKREQRLRSEAVERLSVLRTKAMREKEEQRGLRKYNYTLLRVRLPDGCLLQGGHQRCPWRAARVGRGPWAPPALTP

SEQ ID NO: 765725 - protein, 221 aa, Homo sapiens
FSSGGWSPAAPSPTGPRAPPPPRPPAAGPAATMKKFFQEFKADIKFKSAGPGQKLKESVGEKAHKEKPNQPAPRPPRQGPTNEAQMAAAAALARLEQKQSRAWGPTSQDTIRNQVRKELQAEATVSGSPEAPGTNVVSEPREEGSAHLAVPGVYFTCPLTGATLRKDQRDACIKEAILLHFSTDPVAASIMKIYTFNKDQVLGNGVHTQLHPSCLCERGDL

SEQ ID NO: 765726 - protein, 83 aa, Homo sapiens
QYTRTSPTSVGRALGVYQAEACPAAPRRRASRHHEEILSGVQGRHQVQERGTRSEAQRVRGGKGPQREAQPASPQAAPPGTHQ

SEQ ID NO: 765727 - protein, 388 aa, Homo sapiens; identical to SEQ ID NO: 765719

SEQ ID NO: 765728 - protein, 151 aa, Homo sapiens
  misc_feature (58)..(58): Xaa can be any naturally occurring amino acid
MKIYTFNKDQDRVKLGVDTIAKYLDNIHLHPEEEKYRKIKLQNKVFQERITCWKDHEXLGAWVQKGASARSGDPEKSTCRVEHLGQQRLERPDTWVRTGAKEGGRFNPPGRGAGIHQRERRKPPRGGPDTERGGTTGPAENGGGRPPAGGD

SEQ ID NO: 765729 - protein, 231 aa, Homo sapiens
MCGTHEFFEAIGFQKVLLPAQDQEDPEEFYVLSETTLAQPQSLERHKEQLLAAEPVRAKLDRQRRVFQPSPLASQFELPGDFFNLTAEEIKREQRLRSEAVERLSVLRTKAMREKEEQRGLRKYNYTLLRVRLPDGCLLQGTFYARERLGAVYGFVREALQSDWLPFELLASGGQKLSEDENLALNECGLVPSALLTFSWDMAVLEDIKAAGAEPDSILKPELLSAIEKLL

SEQ ID NO: 765730 - protein, 100 aa, Homo sapiens
GRGGSTHASRTFYARERLGAVYGFVREALQSDWLPFELLASGGQKLSEDENLALNECGLVPSALLTFSWDMAVLEDIKAAGAEPDSILKPELLSAIEKLL

SEQ ID NO: 765731 - protein, 82 aa, Homo sapiens
FFFRWLVSGGPVPDWAPCPPAPAAPRRRASRHHEEILSGVQGRHQVQERGTRSEAQRVRGGKGPQREAQPASPQAAPPGTHQ

SEQ ID NO: 765732 - protein, 144 aa, Homo sapiens
FSSGGWSPAAPSPTGPRAPPPPRPPAAGPAATMKKFFQEFKADIKFKSAGPGQKLKESVGEKAHKEKPNQPAPRPPRQGPTNEAQMAAAAALARLEQKQSRAWGPTSQDTIRNQVRKELQAEATVSGSPEAPGTNVTPTNLSPP

SEQ ID NO: 765733 - protein, 66 aa, Homo sapiens
RLPAEFPAAARADSRSQSDGLPLPQVPSALLTFSWDMAVLEDIKAAGAEPDSILKPELLSAIEKLL

SEQ ID NO: 765734 - protein, 849 aa, Homo sapiens
METFENIRAAGGKMCWAPKSIECRAENYPEVSIDQVGQVLTCSLETGLTCKNEDQTGRFNMCFNYNVRVLCCDDYSHCPSTPATSSTATPSSTPGTTWILTKPTTTATTTASTGSTATPTSTLRTAPPPKVLTTTATTPTVTSSKATPSSSPGTATALPALRSTATTPTATSVTPIPSSSLGTTWTRLSQTTTPTATMSTATPSSTPETAHTSTVLTTTATTTGATGSVATPSSTPGTAHTTKVPTTTTTGFTATPSSSPGTALTPPVWISTTTTPTTRGSTVTPSSIPGTTHTATVLTTTTTTVATGSMATPSSSTQTSGTPPSLTTTATTITATGSTTNPSSTPGTTPIPPVLTTTATTPAATSNTVTPSSALGTTHTPPVPNTTATTHGRSLPPSSPHTVRTAWTSATSGILGTTHITEPSTVTSHTLAATTGTTQHSTPALSSPHPSSRTTESPPSPGTTTPGHTTATSRTTATATPSKTRTSTLLPSSPTSAPITTVVTMGCEPQCAWSEWLDYSYPMPGPSGGDFDTYSNIRAAGGAVCEQPLGLECRAQAQPGVPLRELGQVVECSLDFGLVCRNREQVGKFKMCFNYEIRVFCCNYGHCPSTPATSSTAMPSSTPGTTWILTELTTTATTTESTGSTATPSSTPGTTWILTEPSTTATVTVPTGSTATASSTQATAGTPHVSTTATTPTVTSSKATPFSSPGTATALPALRSTATTPTATSFTAIPSSSLGTTWTRLSQTTTPTATMSTATPSSTPETVHTSTVLTTTATTTGATGSVATPSSTPGTAHTTKVLTTTTTGFTATPSSSPGTARTLPVWISTTTTPTTRGSTVTPTVLGLRA

SEQ ID NO: 765735 - protein, 849 aa, Homo sapiens; identical to SEQ ID NO: 765734

SEQ ID NO: 765736 - protein, 730 aa, Homo sapiens
AATLRIPITCIVLTTTATTPTVTSSKATPSSSPGTATALPALRSTATTPTATSVTPIPSSSLGTTWTRLSQTTTPTATMSTATPSSTPETAHTSTVLTTTATTTGATGSVATPSSTPGTAHTTKVPTTTTTGFTATPSSSPGTALTPPVWISTTTTPTTRGSTVTPSSIPGTTHTATVLTTTTTTVATGSMATPSSSTQTSGTPPSLTTTATTITATGSTTNPSSTPGTTPIPPVLTTTATTPAATSNTVTPSSALGTTHTPPVPNTTATTHGRSLPPSSPHTVRTAWTSATSGILGTTHITEPSTVTSHTLAATTGTTQHSTPALSSPHPSSRTTESPPSPGTTTPGHTTATSRTTATATPSKTRTSTLLPSSPTSAPITTVVTMGCEPQCAWSEWLDYSYPMPGPSGGDFDTYSNIRAAGGAVCEQPLGLECRAQAQPGVPLRELGQVVECSLDFGLVCRNREQVGKFKMCFNYEIRVFCCNYGHCPSTPATSSTAMPSSTPGTTWILTELTTTATTTESTGSTATPSSTPGTTWILTEPSTTATVTVPTGSTATASSTQATAGTPHVSTTATTPTVTSSKATPFSSPGTATALPALRSTATTPTATSFTAIPSSSLGTTWTRLSQTTTPTATMSTATPSSTPETVHTSTVLTTTATTTGATGSVATPSSTPGTAHTTKVLTTTTTGFTATPSSSPGTARTLPVWISTTTTPTTRGSTVTPTVLGLRA

SEQ ID NO: 765737 - protein, 251 aa, Homo sapiens
TWRPLHRENSYNSVTRKTGRPFSHRKTTWILTELTTTATTTESTGSTATPSSTPGTTWILTEPSTTATVTVPTGSTATASSTQATAGTPHVSTTATTPTVTSSKATPFSSPGTATALPALRSTATTPTATSFTAIPSSSLGTTWTRLSQTTTPTATMSTATPSSTPETVHTSTVLTTTATTTGATGSVATPSSTPGTAHTTKVLTTTTTGFTATPSSSPGTARTLPVWISTTTTPTTRGSTVTPTVLGLRA

SEQ ID NO: 765738 - protein, 659 aa, Homo sapiens
METFENIRAAGGKMCWAPKSIECRAENYPEVSIDQVGQVLTCSLETGLTCKNEDQTGRFNMCFNYNVRVLCCDDYSHCPSTPATSSTATPSSTPGTTWILTKPTTTATTTASTGSTATPTSTLRTAPPPKVLTTTATTPTVTSSKATPSSSPGTATALPALRSTATTPTATSVTPIPSSSLGTTWTRLSQTTTPTATMSTATPSSTPETAHTSTVLTTTATTTGATGSVATPSSTPGTAHTTKVPTTTTTGFTATPSSSPGTALTPPVWISTTTTPTTRGSTVTPSSIPGTTHTATVLTTTTTTVATGSMATPSSSTQTSGTPPSLTTTATTITATGSTTNPSSTPGTTPIPPVLTTTATTPAATSNTVTPSSALGTTHTPPVPNTTATTHGRSLPPSSPHTVRTAWTSATSGILGTTHITEPSTVTSHTLAATTGTTQHSTPALSSPHPSSRTTESPPSPGTTTPGHTTATSRTTATATPSKTRTSTLLPSSPTSAPITTVVTMGCEPQCAWSEWLDYSYPMPGPSGGDFDTYSNIRAAGGAVCEQPLGLECRAQAQPGVPLRELGQVVECSLDFGLVCRNREQVGKFKMCFNYEIRVFCCNYGHCPSTPATSSTAMPSSTPGTTWILTELTTTATTTESTGSTATPSSTPELLAPHM

SEQ ID NO: 765739 - protein, 322 aa, Homo sapiens
MRYDTLRENSFAYSRRHDEQPLGLECRAQAQPGVPLRELGQVVECSLDFGLVCRNREQVGKFKMCFNYEIRVFCCNYGHCPSTPATSSTAMPSSTPGTTWILTELTTTATTTESTGSTATPSSTPGTTWILTEPSTTATVTVPTGSTATASSTQATAGTPHVSTTATTPTVTSSKATPFSSPGTATALPALRSTATTPTATSFTAIPSSSLGTTWTRLSQTTTPTATMSTATPSSTPETVHTSTVLTTTATTTGATGSVATPSSTPGTAHTTKVLTTTTTGFTATPSSSPGTARTLPVWISTTTTPTTRGSTVTPTVLGLRA

SEQ ID NO: 765740 - protein, 218 aa, Homo sapiens
MGRLLALVVGAALVSSACGGCVEVDSETEAVYGMTFKILCISCKRRSETNAETFTEWTFRQKGTEEFVKILRYENEVLQLEEDERFEGRVVWNGSRGTKDLQDLSIFITNVTYNHSGDYECHVYRLLFFENYEHNTSVVKKIHIEVVDKANRDMASIVSEIMMYVLIVVLTIWLVAEMIYCYKKIAAATETAAQENASEYLAITSESKENCTGVQVAE

SEQ ID NO: 765741 - protein, 218 aa, Homo sapiens; identical to SEQ ID NO: 765740

SEQ ID NO: 765742 - protein, 218 aa, Homo sapiens; identical to SEQ ID NO: 765740

SEQ ID NO: 765743 - protein, 106 aa, Homo sapiens
MRQWVGEVGWGPWRSAFEEVSPGRWTEDAWHGLLTGTPGGPGHGHSLPSFGVWAGTRSGDFLKGLGGGEGIVNGGIFSLRQKIFKGKIIFLVCCFRRPIKTVFSYV

SEQ ID NO: 765744 - protein, 328 aa, Homo sapiens
MVTQESMLKAALPLFTRFIISNGLRTEHGVFEITLETVDRALPVVTRNKGLRLAQGAVGLLSPDLLQLTDPDTPAENLTFLLVQLPQHGQLYLWGTGLLQHNFTQQDVDSKNVAYRHSGGDSQTDCFTFMATDGTNQGFIVNGRVWEEPVLFTIQVDQLDKTAPRITLLHSPSQVGLLKNGCYGIYITSRVLKASDPDTEDDQIIFKILQGPKHGHLENTTTGEFIHEKFSQKDLNSKTILYIINPSLEVNSDTVEFQIMDPTGNSATPQILELKWSHIEWSQTEYEVCENVGLLPLEIIRRGYSMDSAFVGIKFLQVSTVTCARFSP

SEQ ID NO: 765745 - protein, 377 aa, Homo sapiens
MVTQESMLKAALPLFTRFIISNGLRTEHGVFEITLETVDRALPVVTRNKGLRLAQGAVGLLSPDLLQLTDPDTPAENLTFLLVQLPQHGQLYLWGTGLLQHNFTQQDVDSKNVAYRHSGGDSQTDCFTFMATDGTNQGFIVNGRVWEEPVLFTIQVDQLDKTAPRITLLHSPSQVGLLKNGCYGIYITSRVLKASDPDTEDDQIIFKILQGPKHGHLENTTTGEFIHEKFSQKDLNSKTILYIINPSLEVNSDTVEFQIMDPTGNSATPQILELKWSHIEWSQTEYEVCENVGLLPLEIIRRGYSMDSAFVGIKVNQVSAAVGKDFTVIPSKLIQFDPGMSTKMWNIAITYDGLEEDDEVFEVILNSPVNAVLGTKT

SEQ ID NO: 765746 - protein, 324 aa, Homo sapiens
HKSKVTVSSDRFRFIISNGLRTEHGVFEITLETVDRALPVVTRNKGLRLAQGAVGLLSPDLLQLTDPDTPAENLTFLLVQLPQHGQLYLWGTGLLQHNFTQQDVDSKNVAYRHSGGDSQTDCFTFMATDGTNQGFIVNGRVWEEPVLFTIQVDQLDKTAPRITLLHSPSQVGLLKNGCYGIYITSRVLKASDPDTEDDQIIFKILQGPKHGHLENTTTGEFIHEKFSQKDLNSKTILYIINPSLEVNSDTVEFQIMDPTGNSATPQILELKWSHIEWSQTEYEVCENVGLLPLEIIRRGYSMDSAFVGIKFLQVSTVTCARFSP

SEQ ID NO: 765747 - protein, 69 aa, Homo sapiens
PFTSLGSDEAPPTATTPVLLQAIVTGVPRHPGHRPSLGCTCSLPSCPRAELCTDHSALRQDDNTPQCFP

SEQ ID NO: 765748 - protein, 89 aa, Homo sapiens
TWSEPGGGGSRTEPSSQEVPGVSRGEAIVSKTARRGMQEKEPVPPSWGPPRKDVGFSQERGNRGSYSKKVYNPTQVVFRVGVDCGGETL

SEQ ID NO: 765749 - protein, 213 aa, Homo sapiens
MATRGHVQDPNDRRLRPIYDYLDNGNNKMAIQQADKLLKKHKDLHCAKVLKAIGLQRTGKQEEAFTLAQEVAALEPTDDNSLQALTILYREMHRPELVTKLYEAAVKKVPNSEEYHSHLFMAYARVGEYKKMQQAGMALYKIVPKNPYYFWSVMSLIMQSISAQDENLSKTMFLPLAERMVEKMVKEDKIEAEAEFDSWVLTFGLWVNLKPSA

SEQ ID NO: 765750 - protein, 972 aa, Homo sapiens
MATRGHVQDPNDRRLRPIYDYLDNGNNKMAIQQADKLLKKHKDLHCAKVLKAIGLQRTGKQEEAFTLAQEVAALEPTDDNSLQALTILYREMHRPELVTKLYEAAVKKVPNSEEYHSHLFMAYARVGEYKKMQQAGMALYKIVPKNPYYFWSVMSLIMQSISAQDENLSKTMFLPLAERMVEKMVKEDKIEAEAEVELYYMILERLGKYQEALDVIRGKLGEKLTSEIQSRENKCMAMYKKLSRWPECNALSRRLLLKNSDDWQFYLTYFDSVFRLIEEAWSPPAEGEHSLEGEVHYSAEKAVKFIEDRITEESKSSRHLRGPHLAKLELIRRLRSQGCNDEYKLGDPEELMFQYFKKFGDKPCCFTDLKVFVDLLPATQCTKFINQLLGVVPLSTPTEDKLALPADIRALQQHLCVVQLTRLLGLYHTMDKNQKLSVVRELMLRYQHGLEFGKTCLKTELQFSDYYCLLAVHALIDVWRETGDETTVWQALTLLEEGLTHSPSNAQFKLLLVRIYCMLGAFEPVVDLYSSLDAKHIQHDTIGYLLTRYAESLGQYAAASQSCNFALRFFHSNQKDTSEYIIQAYKYGAFEKIPEFIAFRNRLNNSLHFAQVRTERMLLDLLLEANISTSLAESIKSMNLRPEEDDIPWEDLRDNRDLNVFFSWDPKDRDVSEEHKKLSLEEETLWLRIRSLTLRLISGLPSLNHPVEPKNSEKTAENGVSSRIDILRLLLQQLEATLETGKRFIEKDIQYPFLGPVPTRMGGFFNSGCSQCQISSFYLVNDIYELDTSGLEDTMEIQERIENSFKSLLDQLKDVFSKCKGDLLEVKDGNLKTHPTLLENLVFFVETISVILWVSSYCESVLRPYKLNLQKKKKKKKETSIIMPPVFTSFQDYVTGLQTLISNVVDHIKGLETHLIALKLEELILEDTSLSPEERKFSKTVQGKVQSSYLHSLLEMGELLKKRLETTKKLKI

SEQ ID NO: 765751 - protein, 972 aa, Homo sapiens; identical to SEQ ID NO: 765750

SEQ ID NO: 765752 - protein, 972 aa, Homo sapiens; identical to SEQ ID NO: 765750

SEQ ID NO: 765753 - protein, 972 aa, Homo sapiens; identical to SEQ ID NO: 765750

SEQ ID NO: 765754 - protein, 932 aa, Homo sapiens
MATRGHVQDPNDRRLRPIYDYLDNGNNKMAIQQADKLLKKHKDLHCAKVLKAIGLQRTGKQEEAFTLAQEVAALEPTDDNSLQALTIFTGRCTDAGMALYKIVPKNPYYFWSVMSLIMQSISAQDENLSKTMFLPLAERMVEKMVKEDKIEAEAEVELYYMILERLGKYQEALDVIRGKLGEKLTSEIQSRENKCMAMYKKLSRWPECNALSRRLLLKNSDDWQFYLTYFDSVFRLIEEAWSPPAEGEHSLEGEVHYSAEKAVKFIEDRITEESKSSRHLRGPHLAKLELIRRLRSQGCNDEYKLGDPEELMFQYFKKFGDKPCCFTDLKVFVDLLPATQCTKFINQLLGVVPLSTPTEDKLALPADIRALQQHLCVVQLTRLLGLYHTMDKNQKLSVVRELMLRYQHGLEFGKTCLKTELQFSDYYCLLAVHALIDVWRETGDETTVWQALTLLEEGLTHSPSNAQFKLLLVRIYCMLGAFEPVVDLYSSLDAKHIQHDTIGYLLTRYAESLGQYAAASQSCNFALRFFHSNQKDTSEYIIQAYKYGAFEKIPEFIAFRNRLNNSLHFAQVRTERMLLDLLLEANISTSLAESIKSMNLRPEEDDIPWEDLRDNRDLNVFFSWDPKDRDVSEEHKKLSLEEETLWLRIRSLTLRLISGLPSLNHPVEPKNSEKTAENGVSSRIDILRLLLQQLEATLETGKRFIEKDIQYPFLGPVPTRMGGFFNSGCSQCQISSFYLVNDIYELDTSGLEDTMEIQERIENSFKSLLDQLKDVFSKCKGDLLEVKDGNLKTHPTLLENLVFFVETISVILWVSSYCESVLRPYKLNLQKKKKKKKETSIIMPPVFTSFQDYVTGLQTLISNVVDHIKGLETHLIALKLEELILEDTSLSPEERKFSKTVQGKVQSSYLHSLLEMGELLKKRLETTKKLKI

SEQ ID NO: 765755 - protein, 724 aa, Homo sapiens
NAEYEPAVKFGSDDWQFYLTYFDSVFRLIEEAWSPPAEGEHSLEGEVHYSAEKAVKFIEDRITEESKSSRHLRGPHLAKLELIRRLRSQGCNDEYKLGDPEELMFQYFKKFGDKPCCFTDLKVFVDLLPATQCTKFINQLLGVVPLSTPTEDKLALPADIRALQQHLCVVQLTRLLGLYHTMDKNQKLSVVRELMLRYQHGLEFGKTCLKTELQFSDYYCLLAVHALIDVWRETGDETTVWQALTLLEEGLTHSPSNAQFKLLLVRIYCMLGAFEPVVDLYSSLDAKHIQHDTIGYLLTRYAESLGQYAAASQSCNFALRFFHSNQKDTSEYIIQAYKYGAFEKIPEFIAFRNRLNNSLHFAQVRTERMLLDLLLEANISTSLAESIKSMNLRPEEDDIPWEDLRDNRDLNVFFSWDPKDRDVSEEHKKLSLEEETLWLRIRSLTLRLISGLPSLNHPVEPKNSEKTAENGVSSRIDILRLLLQQLEATLETGKRFIEKDIQYPFLGPVPTRMGGFFNSGCSQCQISSFYLVNDIYELDTSGLEDTMEIQERIENSFKSLLDQLKDVFSKCKGDLLEVKDGNLKTHPTLLENLVFFVETISVILWVSSYCESVLRPYKLNLQKKKKKKKETSIIMPPVFTSFQDYVTGLQTLISNVVDHIKGLETHLIALKLEELILEDTSLSPEERKFSKTVQGKVQSSYLHSLLEMGELLKKRLETTKKLKI

SEQ ID NO: 765756 - protein, 859 aa, Homo sapiens
MATRGHVQDPNDRRLRPIYDYLDNGNNKMAIQQADKLLKKHKDLHCAKVLKAIGLQRTGKQEEAFTLAQEVAALEPTDDNSLQALTILYREMHRPELVTKLYEAAVKKVPNSEEYHSHLFMAYARVGEYKKMQQAGMALYKIVPKNPYYFWSVMSLIMQSISAQDENLSKTMFLPLAERMVEKMVKEDKIEAEAEVELYYMILERLGKYQEALDVIRGKLGEKLTSEIQSRENKCMAMYKKLSRWPECNALSRRLLLKNSDDWQFYLTYFDSVFRLIEEAWSPPAEGEHSLEGEVHYSAEKAVKFIEDRITEESKSSRHLRGPHLAKLELIRRLRSQGCNDEYKLGDPEELMFQYFKKFGDKPCCFTDLKVFVDLLPATQCTKFINQLLGVVPLSTPTEDKLALPADIRALQQHLCVVQLTRLLGLYHTMDKNQKLSVVRELMLRYQHGLEFGKTCLKTELQFSDYYCLLAVHALIDVWRETGDETTVWQALTLLEEGLTHSPSNAQFKLLLVRIYCMLGAFEPVVDLYSSLDAKHIQHDTIGYLLTRYAESLGQYAAASQSCNFALRFFHSNQKDTSEYIIQAYKYGAFEKIPEFIAFRNRLNNSLHFAQVRTERMLLDLLLEANISTSLAESIKSMNLRPEEDDIPWEDLRDNRDLNVFFSWDPKDRDVSEEHKKLSLEEETLWLRIRSLTLRLISGLPSLNHPVEPKNSEKTAENGVSSRIDILRLLLQQLEATLETGKRFIEKDIQYPFLGPVPTRMGGFFNSGCSQCQISSFYLVNDIYELDTSGLEDTMEIQERIENSFKSLLDQLKDVFSKCKGDLLEVKDGNLKTHPTLLENLVFFVEVSFCSLPKRHCCS

SEQ ID NO: 765757 - protein, 589 aa, Homo sapiens
MATRGHVQDPNDRRLRPIYDYLDNGNNKMAIQQADKLLKKHKDLHCAKVLKAIGLQRTGKQEEAFTLAQEVAALEPTDDNSLQALTILYREMHRPELVTKLYEAAVKKVPNSEEYHSHLFMAYARVGEYKKMQQAGMALYKIVPKNPYYFWSVMSLIMQSISAQDENLSKTMFLPLAERMVEKMVKEDKIEAEAEVELYYMILERLGKYQEALDVIRGKLGEKLTSEIQSRENKCMAMYKKLSRWPECNALSRRLLLKNSDDWQFYLTYFDSVFRLIEEAWSPPAEGEHSLEGEVHYSAEKAVKFIEDRITEESKSSRHLRGPHLAKLELIRRLRSQGCNDEYKLGDPEELMFQYFKKFGDKPCCFTDLKVFVDLLPATQCTKFINQLLGVVPLSTPTEDKLALPADIRALQQHLCVVQLTRLLGLYHTMDKNQKLSVVRELMLRYQHGLEFGKTCLKTELQFSDYYCLLAVHALIDVWRETGDETTVWQALTLLEEGLTHSPSNAQFKLLLVRIYCMLGAFEPVVDLYSSLDAKHIQHDTIGYLLTRYAESLGQYAAASQSCNFALRFFHSNQKDVSEKLFFNCDLVC

SEQ ID NO: 765758 - protein, 109 aa, Homo sapiens
MSILLEPGVIQDVLAAGSHLQLLELLNLCSHYLIQELNSFNYLDLYRLADLFNLTLLEKAVIDFLVKHLSELLKSRPEEVLTLPYCLLQEVLKSDRLTSLSEEQIWQVE

SEQ ID NO: 765759 - protein, 620 aa, Homo sapiens
MPSERCLSIQEMLTGQRLCHSESHNDSVLAALNQQRSDGILCDITLIAEEQKFHAHKAVLAACSDYFRAMFSLCMVESGADEVNLHGVTSLGLKQALEFAYTGQILLEPGVIQDVLAAGSHLQLLELLNLCSHYLIQELNSFNYLDLYRLADLFNLTLLEKAVIDFLVKHLSELLKSRPEEVLTLPYCLLQEVLKSDRLTSLSEEQIWQLAVRWLEHNCHYQYMDELLQYIRFGLMDVDTLHTVALSHPLVQASETATALVNEALEYHQSIYAQPVWQTRRTKPRFQSDTLYIIGGKKREVCKVKELRYFNPVDQENALIAAIANWSELAPMPVGRSHHCVAVMGDFLFVAGGEVEHASGRTCAVRTACRYDPRSNSWAEIAPMKNCREHFVLGAMEEYLYAVGGRNELRQVLPTVERYCPKKNKWTFVQSFDRSLSCHAGYVADGLLWISGGVTNTAQYQNRLMVYEPNQNKWISRSPMLQRRVYHSMAAVQRKLYVLGGNDLDYNNDRILVRHIDSYNIDTDQWTRCNFNLLTGQNESGVAVHNGRIYLVGGYSIWTNEPLACIQVLDVSREGKEEVFYGPTLPFASNGIAACFLPAPYFTCPNLQTLQVPHHRIGTI

SEQ ID NO: 765760 - protein, 646 aa, Homo sapiens
MPSERCLSIQEMLTGQRLCHSESHNDSVLAALNQQRSDGILCDITLIAEEQKFHAHKAVLAACSDYFRAMFSLCMVESGADEVNLHGVTSLGLKQALEFAYTGQILLEPGVIQDVLAAGSHLQLLELLNLCSHYLIQELNSFNYLDLYRLADLFNLTLLEKAVIDFLVKHLSELLKSRPEEVLTLPYCLLQEVLKSDRLTSLSEEQIWQKCGICAAFCALRGDWCPGFLNGMTRLLAVRWLEHNCHYQYMDELLQYIRFGLMDVDTLHTVALSHPLVQASETATALVNEALEYHQSIYAQPVWQTRRTKPRFQSDTLYIIGGKKREVCKVKELRYFNPVDQENALIAAIANWSELAPMPVGRSHHCVAVMGDFLFVAGGEVEHASGRTCAVRTACRYDPRSNSWAEIAPMKNCREHFVLGAMEEYLYAVGGRNELRQVLPTVERYCPKKNKWTFVQSFDRSLSCHAGYVADGLLWISGGVTNTAQYQNRLMVYEPNQNKWISRSPMLQRRVYHSMAAVQRKLYVLGGNDLDYNNDRILVRHIDSYNIDTDQWTRCNFNLLTGQNESGVAVHNGRIYLVGGYSIWTNEPLACIQVLDVSREGKEEVFYGPTLPFASNGIAACFLPAPYFTCPNLQTLQVPHHRIGTI

SEQ ID NO: 765761 - protein, 306 aa, Homo sapiens
MPSERCLSIQEMLTGQRLCHSESHNDSVLAALNQQRSDGILCDITLIAEEQKFHAHKAVLAACSDYFRAMFSLCMVESGADEVNLHGVTSLGLKQALEFAYTGQILLEPGVIQDVLAAGSHLQLLELLNLCSHYLIQVEYTNTAQYQNRLMVYEPNQNKWISRSPMLQRRVYHSMAAVQRKLYVLGGNDLDYNNDRILVRHIDSYNIDTDQWTRCNFNLLTGQNESGVAVHNGRIYLVGGYSIWTNEPLACIQVLDVSREGKEEVFYGPTLPFASNGIAACFLPAPYFTCPNLQTLQVPHHRIGTI

SEQ ID NO: 765762 - protein, 597 aa, Homo sapiens
MHPPKTPSGALHRKRKMAAWPFSRLWKVSDPILFQMTLIAALLPAVLGNCGPPPTLSFAAPMDITLTETRFKTGTTLKYTCLPGYVRSHSTQTLTCNSDGEWVYNTFCIYKRCRHPGELRNGQVEIKTDLSFGSQIEFSCSEGFFLIGSTTSRCEVQDRGVGWSHPLPQCEIVKCKPPPDIRNGRHSGEENFYAYGFSVTYSCDPRFSLLGHASISCTVENETIGVWRPSPPTCEKITCRKPDVSHGEMVSGFGPIYNYKDTIVFKCQKGFVLRGSSVIHCDADSKWNPSPPACEPNSCINLPDIPHASWETYPRPTKEDVYVVGTVLRYRCHPGYKPTTDEPTTVICQKNLRWTPYQGCEALCCPEPKLNNGEITQHRKSRPANHCVYFYGDEISFSCHETSRFSAICQGDGTWSPRTPSCGDICNFPPKIAHGHYKQSSSYSFFKEEIIYECDKGYILVGQAKLSCSYSHWSAPAPQCKALCRKPELVNGRLSVDKDQYVEPENVTIQCDSGYGVVGPQSITCSGNRTWYPEVPKCEWETPEGCEQVLTGKRLMQCLPNPEDVKMALEVYKLSLEIEQLELQRDSARQSTLDKEL

SEQ ID NO: 765763 - protein, 597 aa, Homo sapiens; identical to SEQ ID NO: 765762

SEQ ID NO: 765764 - protein, 432 aa, Homo sapiens
MHPPKTPSGALHRKRKMAAWPFSRLWKVSDPILFQMTLIAALLPAVLGNCGPPPTLSFAAPMDITLTETRFKTGTTLKYTCLPGYVRSHSTQTLTCNSDGEWVYNTFCIYKRCRHPGELRNGQVEIKTDLSFGSQIEFSCSEGFFLIGSTTSRCEVQDRGVGWSHPLPQCEIVKCKPPPDIRNGRHSGEENFYAYGFSVTYSCDPRFSLLGHASISCTVENETIGVWRPSPPTCEKITCRKPDVSHGEMVSGFGPIYNYKDTIVFKCQKGFVLRGSSVIHCDADSKWNPSPPACEPNSCINLPDIPHASWETYPRPTKEDVYVVGTVLRYRCHPGYKPTTDEPTTVICQKNLRWTPYQGCEALCCPEPKLNNGEITQHRKSRPANHCVYFYGDEISFSCHETSRFSAICQGDGTWSPRTPSCGDIFQRRDYI

SEQ ID NO: 765765 - protein, 546 aa, Homo sapiens
MHPPKTPSGALHRKRKMAAWPFSRLWKVSDPILFQMTLIAALLPAVLGNCGPPPTLSFAAPMDITLTETRFKTGTTLKYTCLPGYVRSHSTQTLTCNSDGEWVYNTFCIYKRCRHPGELRNGQVEIKTDLSFGSQIEFSCSEGFFLIGSTTSRCEVQDRGVGWSHPLPQCEIVKCKPPPDIRNGRHSGEENFYAYGFSVTYSCDPRFSLLGHASISCTVENETIGVWRPSPPTCEKITCRKPDVSHGEMVSGFGPIYNYKDTIVFKCQKGFVLRGSSVIHCDADSKWNPSPPACEPNSCINLPDIPHASWETYPRPTKEDVYVVGTVLRYRCHPGYKPTTDEPTTVICQKNLRWTPYQGCEALCCPEPKLNNGEITQHRKSRPANHCVYFYGDEISFSCHETSRFSAICQGDGTWSPRTPSCGDICNFPPKIAHGHYKQSSSYSFFKEEIIYECDKGYILVGQAKLSCSYSHWSAPAPQCKALCRKPELVNGRLSVDKDQYVELSLALGTEPGTQRCPSVSGRPPKAVNKCSQAKDSCSVSQTQRM

SEQ ID NO: 765766 - protein, 102 aa, Homo sapiens
MGFYISQPEVCHFRLNLCNQDSVYLTWLPEPGLRCTLFPTPGASSSSFPDLLVQMPPSSCRATGHPWPAVVSLLPAIKGREILKFNLRTPCYLVKKFLNYFL

SEQ ID NO: 765767 - protein, 182 aa, Homo sapiens
LRSLAFLLSLPLADSSPLGSRSAGHQSRRPCPTELKARPGLVRGVRPSPPPGSAPAPTRTSGSAAAGRDRAGSKACGEAQDGRVGCHDVGPPDLEPCPAQGEQRAYGPGAGAAVRESLPAGPGAFAGPPGGFPWTFNGDSARPPDFLMQAFSYMTFFEARFSKDILKVAFLISCLTGWRSSS

SEQ ID NO: 765768 - protein, 182 aa, Homo sapiens; identical to SEQ ID NO: 765767

SEQ ID NO: 765769 - protein, 182 aa, Homo sapiens; identical to SEQ ID NO: 765767

SEQ ID NO: 765770 - protein, 182 aa, Homo sapiens; identical to SEQ ID NO: 765767

SEQ ID NO: 765771 - protein, 182 aa, Homo sapiens; identical to SEQ ID NO: 765767

SEQ ID NO: 765772 - protein, 182 aa, Homo sapiens; identical to SEQ ID NO: 765767

SEQ ID NO: 765773 - protein, 182 aa, Homo sapiens; identical to SEQ ID NO: 765767

SEQ ID NO: 765774 - protein, 71 aa, Homo sapiens
KFYFLILPAGPGAFAGPPGGFPWTFNGDSARPPDFLMQAFSYMTFFEARFSKDILKVAFLISCLTGWRSSS

SEQ ID NO: 765775 - protein, 182 aa, Homo sapiens; identical to SEQ ID NO: 765767

SEQ ID NO: 765776 - protein, 114 aa, Homo sapiens
PLQDRFWSQEQLSSPPEETASSPPTHSGLPNGTLTSSVGLYYTYIYIYIYIYIILEFVSHNTEYIVATLYLGLDSLSETPDFTFSLEGAGTYISQSSFLRILPSCPISATSDTS

SEQ ID NO: 765777 - protein, 114 aa, Homo sapiens; identical to SEQ ID NO: 765776

SEQ ID NO: 765778 - protein, 114 aa, Homo sapiens; identical to SEQ ID NO: 765776

SEQ ID NO: 765779 - protein, 114 aa, Homo sapiens; identical to SEQ ID NO: 765776

SEQ ID NO: 765780 - protein, 148 aa, Homo sapiens
MKLLVLAVLLTVAAADSGISPRAVWQFRKMIKCVIPGSDPFLEYNNYGCYCGLGGSGTPVDELDKCCQTHDNCYDQAKKLDSCKFLLDNPYTHTYSYSCSGSAITCSSKNKECEAFICNCDRNAAICFSKAPYNKAHKNLDTKKYCQS

SEQ ID NO: 765781 - protein, 161 aa, Homo sapiens
EGAGRQCVPGVLADRFELWLCLLAVAAADSGISPRAVWQFRKMIKCVIPGSDPFLEYNNYGCYCGLGGSGTPVDELDKCCQTHDNCYDQAKKLDSCKFLLDNPYTHTYSYSCSGSAITCSSKNKECEAFICNCDRNAAICFSKAPYNKAHKNLDTKKYCQS

SEQ ID NO: 765782 - protein, 82 aa, Homo sapiens
GHLSFFSHLDCKMKLLVLAVLLTVAAADSGISPRAVWQFRKMIKCVIPGSDPFLEYNNYGCYCGLGGSGTPVDELDKQKQRV

SEQ ID NO: 765783 - protein, 148 aa, Homo sapiens; identical to SEQ ID NO: 765780

SEQ ID NO: 765784 - protein, 148 aa, Homo sapiens; identical to SEQ ID NO: 765780

SEQ ID NO: 765785 - protein, 386 aa, Homo sapiens
PYSCAECKETFSDNNRLVQHQKMHTVKTPYECQECGERFICGSTLKCHESVHAREKQGFFVSGKILDQNPEQKEKCFKCNKCEKTFSCSKYLTQHERIHTRGVKPFECDQCGKAFGQSTRLIHHQRIHSRVRLYKWGEQGKAISSASLIKLQSFHTKEHPFKCNECGKTFSHSAHLSKHQLIHAGENPFKCSKCDRVFTQRNYLVQHERTHARKKPLVCNECGKTFRQSSCLSKHQRIHSGEKPYVCDYCGKAFGLSAELVRHQRIHTGEKPYVCQECGKAFTQSSCLSIHRRVHTGEKPYRCGECGKAFAQKANLTQHQRIHTGEKPYSCNVCGKAFVLSAHLNQHLRVHTQETLYQCQRCQKAFRCHSSLSRHQRVHNKQQYCL

SEQ ID NO: 765786 - protein, 229 aa, Homo sapiens
MFAIQPGLAEGGQFLGDPPPGLCQPELQPDSNSNFMASAKDANENWHGMPGRVEPILRRSSSESPSDNQAFQAPGSPEEGVRSPPEGAEIPGAEPEKMGGAGTVCSPLEDNGYASSSLSIDSRSSSPEPACGTPRGPGPPDPLLPSVAQAVQHLQVQERYKEQEKEKHHVHLVMYRRLALLQWIRGLQHQLIDQQARLQESFDTILDNRKELIRCLQQRAAPSRPQDQA

SEQ ID NO: 765787 - protein, 229 aa, Homo sapiens; identical to SEQ ID NO: 765786

SEQ ID NO: 765788 - protein, 134 aa, Homo sapiens
MLTRIGMGCQAEWNDNGYASSSLSIDSRSSSPEPACGTPRGPGPPDPLLPSVAQAVQHLQVQERYKEQEKEKHHVHLVMYRRLALLQWIRGLQHQLIDQQARLQESFDTILDNRKELIRCLQQRAAPSRPQDQA

SEQ ID NO: 765789 - protein, 116 aa, Homo sapiens
GDLQIISFSSYNLHSPRTALFVRLLELHTSGLNFTSASISARLSNLILPGPLLNASGSGLLFLANIFFSLLLVEPSQQTCIWQSWDIECGGWGEHVTSLESDGPRVDFWKSSVGWF

SEQ ID NO: 765790 - protein, 41 aa, Homo sapiens
MVTLSHLSCWAFPGYHPGAWSGCMCAWRPPEDPATHHWCCL

SEQ ID NO: 765791 - protein, 642 aa, Homo sapiens
MSGVGDQPGQRGESLSLLKIQKLAGRGGGRLESQLLRRLRQENHLNLGGRGCSEPRLHHCTPAWVTETLSQKKKKRKKERKKIGDEENSKVGISRNCVQMHPVVALQEVCLMKLGKHFAIFPLAVFLCSLLPLFFPWFVIIRREVLQRLVAVKESFLIFILESVTFIPGSHADLLIQSQLTRFILPSSWKTVCMNWSNRTEIHLNSDSSTSQGGGHISLCPTLSNFSEIRGGRVFPSGKWGESLQIVEMKYRIREKEKSVIEIDHFIEIRVDFYFNYSGEFNKRHYLKSFSNIDLGFFFLEWTHYIYKQLFCYSDFLLSENEIICFTFQSFVKQLEVIGRKAISNSAGQTKVWEILLTSHNTECLNMRIEFHDVVVPFNSGHHPNLMFSCYPKTVEGNWVFGRLLNHGLCQFESEILTSIYYKNRDLIQIAQYISKVNTFLKWNFLPSASTHSRSEAEYFKIELRSVSDGKVIFKNLDFIPVSGWVLSSFGPGKGPSSHSCPKSPSLSLPARLSAVWKEKGEEDGNGPTLQAEKELLGGLRRGRGKAVGVCWGWYPSAFPSPQPEKSIRLLFKAFEPALARTKHVRLEMLLLIAGVLIENIYDVGWGGRRQVVVMQENLVLKIYEFGGKGWDSQAKSVIILK

SEQ ID NO: 765792 - protein, 322 aa, Homo sapiens
MCSKNEEVQEASARSDKVTLLADISICLCWILTPQDSAAKKPSRGENRNENEESTSKAETSEDSASRGETTGRSQKEFGEKRDQEGKTGERQQKNPEEKTRKEKRDSGPAIGKDKKTITGERGPREKGKGLGRSFSLSSNFTTPEEVPTGTKSHRCDECGKCFTRSSSLIRHKIIHTGEKPYECSECGKAFSLNSNLVLHQRIHTGEKPHECNECGKAFSHSSNLILHQRIHSGEKPYECNECGKAFSQSSDLTKHQRIHTGEKPYECSECGKAFNRNSYLILHRRIHTREKPYKCTKCGKAFTRSSTLTLHHRIHARERAC

SEQ ID NO: 765793 - protein, 46 aa, Homo sapiens
KRCDLNFLFIMSGGENRNENEESTSKAETSEDSASRGETTGRSQKE

SEQ ID NO: 765794 - protein, 395 aa, Homo sapiens
DAHEFLIAALDVLHRHCKGDDNGKKANNPNHCNCIIDQIFTGGLQSDVTCQVCHGVSTTIDPFWDISLDLPGSSTPFWPLSPGSEGNVVNGESHVSGTTTLTDCLRRFTRPEHLGSSAKIKCSGCHSYQESTKQLTMKKLPIVACFHLKRFEHSAKLRRKITTYVSFPLELDMTPFMASSKESRMNGQYQQPTDSLNNDNKYSLFAVVNHQGTLESGHYTSFIRQHKDQWFKCDDAIITKASIKDVLDSEGYLLFYHKQFLEYESLICSWSEKQRQCIGKPHKVILPGHPPPPSLPPPPRPGDTTSHADVAPLHLGPIVVGMDHTDGEAPGAALKMDEMRGVLWVGGAAYTRHQNISCVMTWGCNGGLTAQSDRCLAFPSTRCGKAPTCCKIMGP

SEQ ID NO: 765795 - protein, 476 aa, Homo sapiens
MERDEPPPSGGGGGGGSAGFLEPPAALPPPPRNGFCQDELAELDPGTNDRAEQRTCLICGDRATGLHYGIISCEGCKGFFKRSICNKRVYRCSRDKNCVMSRKQRNRCQYCRLLKCLQMGMNRKAIREDGMPGGRNKSIGPVQISEEEIERIMSGQEFEEEANHWSNHGDSDHSSPGNRASESNQPSPGSTLSSSRSVELNGFMAFREQYMGMSVPPHYQYIPHLFSYSGHSPLLPQQARSLDPQSYSLIHQLLSAEDLEPLGTPMLIEDGYAVTQAELFALLCRLADELLFRQIAWIKKLPFFCELSIKDYTCLLSSTWQELILLSSLTVYSKQIFGELADVTAKYSPSDEELHRFSDEGMEVIERLIYLYHKFHQLKVSNEEYACMKAINFLNQDIRGLTSASQLEQLNKRYWYICQDFTEYKYTHQPNRFPDLMMCLPEIRYIAGKMVNVPLEQLPLLFKVVLHSCKTSVGKE

SEQ ID NO: 765796 - protein, 476 aa, Homo sapiens; identical to SEQ ID NO: 765795

SEQ ID NO: 765797 - protein, 377 aa, Homo sapiens [sequence omitted]

SEQ ID NO: 765798 - protein, 542 aa, Homo sapiens
GGSRAPTQHGQLLIVGHKVALVIHDWLLIFPTAPASPPVHLGRRPRRLGRRSWRSNKPGADPRHHRMERDEPPPSGGGGGGGSAGFLEPPAALPPPPRNGFCQDELAELDPGTNDRAEQRTCLICGDRATGLHYGIISCEGCKGFFKRSICNKRVYRCSRDKNCVMSRKQRNRCQYCRLLKCLQMGMNRKAIREDGMPGGRNKSIGPVQISEEEIERIMSGQEFEEEANHWSNHGDSDHSSPGNRASESNQPSPGSTLSSSRSVELNGFMAFREQYMGMSVPPHYQYIPHLFSYSGHSPLLPQQARSLDPQSYSLIHQLLSAEDLEPLGTPMLIEDGYAVTQAELFALLCRLADELLFRQIAWIKKLPFFCELSIKDYTCLLSSTWQELILLSSLTVYSKQIFGELADVTAKYSPSDEELHRFSDEGMEVIERLIYLYHKFHQLKVSNEEYACMKAINFLNQDIRGLTSASQLEQLNKRYWYICQDFTEYKYTHQPNRFPDLMMCLPEIRYIAGKMVNVPLEQLPLLFKVVLHSCKTSVGKE

SEQ ID NO: 765799 - protein, 452 aa, Homo sapiens
MAAIELFSSYKKHEMETWEVSVSDDRAEQRTCLICGDRATGLHYGIISCEGCKGFFKRSICNKRVYRCSRDKNCVMSRKQRNRCQYCRLLKCLQMGMNRKAIREDGMPGGRNKSIGPVQISEEEIERIMSGQEFEEEANHWSNHGDSDHSSPGNRASESNQPSPGSTLSSSRSVELNGFMAFREQYMGMSVPPHYQYIPHLFSYSGHSPLLPQQARSLDPQSYSLIHQLLSAEDLEPLGTPMLIEDGYAVTQAELFALLCRLADELLFRQIAWIKKLPFFCELSIKDYTCLLSSTWQELILLSSLTVYSKQIFGELADVTAKYSPSDEELHRFSDEGMEVIERLIYLYHKFHQLKVSNEEYACMKAINFLNQDIRGLTSASQLEQLNKRYWYICQDFTEYKYTHQPNRFPDLMMCLPEIRYIAGKMVNVPLEQLPLLFKVVLHSCKTSVGKE

SEQ ID NO: 765800 - protein, 236 aa, Homo sapiens
RELLLLPGQPQTPVFPSTHDPRTVTLDFRNAGIPAPPPPLPPQPPPPPPPPPVEPTKLPFKELDNQWPSEAIPPGPRGRDEVTEEYMELAKSRGPWRRPPKKRHEDLVPPAGSPELSPPQPLFRPRSEFEEMTILYDIWNGGIDEEDIRFLCVTYERLLQQDNGMDWLNDTLWVYHPYILLAWGALHLLGCRKSLLTSLGPTTQSVAARGAHEGDSMHHRHFPSRVCVPAPCQAPE

SEQ ID NO: 765801 - protein, 240 aa, Homo sapiens
RELLLLPGQPQTPVFPSTHDPRTVTLDFRNAGIPAPPPPLPPQPPPPPPPPPVEPTKLPFKELDNQWPSEAIPPGPRGRDEVTEEYMELAKSRGPWRRPPKKRHEDLVPPAGSPELSPPQPLFRPRSEFEEMTILYDIWNGGIDEEDIRFLCVTYERLLQQDNGMDWLNDTLWVYHPSTSLSSAKKKKRDDGIREHVTGCARSEGFYTIDKKDKLRYLNSSRASTDEPTMYGYFEPGRRK

SEQ ID NO: 765802 - protein, 146 aa, Homo sapiens [sequence omitted]

SEQ ID NO: 765803 - protein, 453 aa, Homo sapiens
MSIVTVQLGQCGNQIGFEVFDALLSDSHSSQGLCSMRENEAYQASCKERFFSEEENGVPIARAVLVDMEPKVINQTLSKAAQSGQWKYGQHACFCQKQGSGNNWAYGYSVHGPRHEESIMNIIRKEVEKCDSFSGFFIIMSMAGGTGSGLGAFVTQNLEDQYSNSLKMNQIIWPYGTGEVIVQNYNSILTLSHLYRSSDALLLHENDAIHKICAKLMNIKQISFSDINQVLAHQLGSVFQPTYSAESSFHYRRNPLGDLMEHLVPHPEFKMLSVRNIPHMSENSLAYTTFTWAGLLKHLRQMLISNAKMEEGIDRHVWPPLSGLPPLSKMSLNKDLHFNTSIANLVILRGKDVQSADVEGFKDPALYTSWLKPVNAFNVWKTQRAFSKYEKSAVLVSNSQFLVKPLDMIVGKAWNMFASKAYIHQYTKFGIEEEDFLDSFTSLEQVVASYCNL

SEQ ID NO: 765804 - protein, 418 aa, Homo sapiens [sequence omitted]

SEQ ID NO: 765805 - protein, 334 aa, Homo sapiens [sequence omitted]

SEQ ID NO: 765806 - protein, 238 aa, Homo sapiens
MRQSGASQPLLINMYLPDPVGDGLFKDGKNPSWGPLSPAVQKGSGQIQLWQFLLELLADRANAGCIAWEGGHGEFKLTDPDEVARRWGERKSKPNMNYDKLSRALRYYYDKNIMSKVHGKRYAYRFDFQGLAQACQPPPAHAHAAAAAAAAAAAAQDGALYKLPAGLAPLPFPGLSKLNLMAASAGVAPAGFSYWPGPGPAATAAAATAALYPSPSLQPPPGPFGAVAAASHLGGHYH

SEQ ID NO: 765807 - protein, 214 aa, Homo sapiens
RLVGLGVNRPRGAEPRGFSSGQIQLWQFLLELLADRANAGCIAWEGGHGEFKLTDPDEVARRWGERKSKPNMNYDKLSRALRYYYDKNIMSKVHGKRYAYRFDFQGLAQACQPPPAHAHAAAAAAAAAAAAQDGALYKLPAGLAPLPFPGLSKLNLMAASAGVAPAGFSYWPGPGPAATAAAATAALYPSPSLQPPPGPFGAVAAASHLGGHYH

SEQ ID NO: 765808 - protein, 130 aa, Homo sapiens
EEELKIFNRAQPEFPIALSTEILLEVCRSMSSAAGFCASRPGLLFLGLLLLPLVVAFASAEAEEDGDLQCLCVKTTSQVRPRHITSLEVIKAGPHCPTAQLIATLKNGRKICLDLQAPLYKKIIKKLLES

SEQ ID NO: 765809 - protein, 158 aa, Homo sapiens
YLSFRTAVPRCPLQASGLEGQPGIKRAGEVQESLATETQPEFPIALSTEILLEVCRSMSSAAGFCASRPGLLFLGLLLLPLVVAFASAEAEEDGDLQCLCVKTTSQVRPRHITSLEVIKAGPHCPTAQLIATLKNGRKICLDLQAPLYKKIIKKLLES

SEQ ID NO: 765810 - protein, 130 aa, Homo sapiens; identical to SEQ ID NO: 765808

SEQ ID NO: 765811 - protein, 128 aa, Homo sapiens
ENYLPLEGYLFPESYLPRALPAPRELTVPRGLPVHRELLASRGLLASRELPVPRGLPAYRGLPVPRELLCLESYLPSEGYPPSECYLSSLLLLSLGLSTCTLEPISFHLFRIKQDMVKKTLLMKNITF

SEQ ID NO: 765812 - protein, 528 aa, Homo sapiens
MSGAGVAAGTRPPSSPTPGSRRRRQRPSVGVQSLRPQSPQLRQSDPQKRNLDLEKSLQFLQQQHSEMLAKLHEEIEHLKRENKDLRYKLIMNQTSQKKGENWALQFLMGCSCHPGEPLQTVLAHLAALAPVCQPSGDRFWGTWTDAATSSRGWMMLRSQAQHVLLSGSPGPEVIAVEEVGTGCSPDLPPPSRAEMGRNPWDSPCPARSLPQIAAVARPRISSPMALSPDMLGAQGLWTHSIQGSLPAIWAATMGTKGGSRVLFPCHLSKALPHPDSGPHPAQDSGLWSRAHFPLSLGLGLTSGGHLTGGWSQPGNIVAGAVPRALPSQRDMENGVEGGPFPSRCGNSSELFWAKCGPSRQPQPCSAGDADRTREEAMLSLGTCCSMCPKPSCFPDGPSGNHLSRASAPLGARWVCINGVWVEPGGPSPARLKEGSSRTHRPGGKRGRLAGGSADTVRSPADSLSTSSFQSVKSISNSGEQAGVHVLTGVSAPRGPQPGWPLGVLTRYPLLGQAPGFGDEGAAEKSPAS

SEQ ID NO: 765813 - protein, 380 aa, Homo sapiens [sequence omitted]

SEQ ID NO: 765814 - protein, 314 aa, Homo sapiens
MSGAGVAAGTRPPSSPTPGSRRRRQRPSVGVQSLRPQSPQLRQSDPQKRNLDLEKSLQFLQQQHSEMLAKLHEEIEHLKRENKDLRYKLIMNQTSQKKDSLSTSSFQSVKSISNSGKARPQPGSFNKQDSKADVPQKADLEEEPLLHNSKLDKVPGVQGQARKEKAEASNAGAACMGNSQHQGRQMGAAAHPPMILPLPLRKPTTLRQCEVLIRELWNTNLLQTQELQHLKSLLEGSQRPQAVPEEASFPRDQEATHFPKVSTKSLSKKCLLLSPPVAERAILPALKQTPKNNFAERQKRLQAMQKRRLHRSVL

SEQ ID NO: 765815 - protein, 467 aa, Homo sapiens
MSGAGVAAGTRPPSSPTPGSRRRRQRPSVGVQSLRPQSPQLRQSDPQKRNLDLEKSLQFLQQQHSEMLAKLHEEIEHLKRENKDLRYKLIMNQTSQKKDGPSGNHLSRASAPLGARWVCINGVWVEPGGPSPARLKEGSSRTHRPGGKRGRLAGGSADTVRSPADSLSTSSFQSVKSISNSGKARPQPGSFNKQDSKADVPQKADLEEEPLLHNSKLDKVPGVQGQARKEKAEASNAGAACMGNSQHQGRQMGAAAHPPMILPLPLRKPTTLRQCEVLIRELWNTNLLQTQELQHLKSLLEGSQRPQAVPEEASFPRDQEATHFPKVSTKSLSKKWKSHRHGDSGAALQPGPQGGSGEGSVAAQKRSSLRPLCAPVRAMQAALPTHSTREDAHGDSPSTRPQPASEPTCGGACHPARTEADPEEQLCREAEEAAGNAETAPASLGALSYPHLVSARPTNLQLEIGSL

SEQ ID NO: 765816 - protein, 139 aa, Homo sapiens
MGNSQHQGRQMGAAAHPPMILPLPLRKPTTLRQCEVLIRELWNTNLLQTQELQHLKSLLEGSQRPQAVPEEASFPRDQEATHFPKVSTKSLSKKCLLLSPPVAERAILPALKQTPKNNFAERQKRLQAMQKRRLHRSVL

SEQ ID NO: 765817 - protein, 287 aa, Homo sapiens
MSGAGVAAGTRPPSSPTPGSRRRRQRPSVGVQSLRPQSPQLRQSDPQKRNLDLEKSLQFLQQQHSEMLAKLHEEIEHLKRENKDLRYKLIMNQTSQKKDGPSGNHLSRASAPLGARWVCINGVWVEPGGPSPARLKEGSSRTHRPGGKRGRLAGGSADTVRSPADSLSTSSFQSVKSISNSGKARPQPGSFNKQDSKADVPQKADLEEEPLLHNSKLDKVPGVQGQARKEKAEASNAGAACMGNSQHQGRQMGAAAHPPMILPLPLRKPTTLRQCEVLIRELWNTCF

SEQ ID NO: 765818 - protein, 290 aa, Homo sapiens
MNQTSQKKDGPSGNHLSRASAPLGARWVCINGVWVEPGGPSPARLKEGSSRTHRPGGKRGRLAGGSADTVRSPADSLSTSSFQSVKSISNSGKARPQPGSFNKQDSKADVPQKADLEEEPLLHNSKLDKVPGVQGQARKEKAEASNAGAACMGNSQHQGRQMGAAAHPPMILPLPLRKPTTLRQCEVLIRELWNTNLLQTQELQHLKSLLEGSQRPQAVPEEASFPRDQEATHFPKVSTKSLSKKCLLLSPPVAERAILPALKQTPKNNFAERQKRLQAMQKRRLHRSVL

SEQ ID NO: 765819 - protein, 122 aa, Homo sapiens
LSEAPRHNLTPFVHTPGPSLDGWGGVFSPPLNPRSIEGRLKQKVQRAPCVSAAFLTTQVLLFSSEEERGAFVQQLWDFCVRWALGLHVAEMSEKELFRKAVTKQQRERILEIFFRHLFAQVP

SEQ ID NO: 765820 - protein, 293 aa, Homo sapiens
WRDTWLRMPAFLPPPGGGGDGPGGPEPGWVDPRTWLSFQGPPGGPGIGPGVGSGSEVWGIPPCPPLYEFCGGMAYCGPQVGVRLVPQGGLETSQPEGEAGVRVESNSDGTSLEPCTVPPGAVKLEKEKLEQNPQESQNIKALQKELEQFAKLLKQKRITLGYTQADVGLTLGVLFGKVFSQTTICRFEGLQLSFKNMCKLRPLLQKWVEEADNNENLQETCKAETLLQARKRKRTSIENRVRGNLENLFLQCPKPTLQQISHIAQQLGLEKDVVRVWFCNRCQKGKQSSSDYA

SEQ ID NO: 765821 - protein, 65 aa, Homo sapiens
MDPTSNSTNLQKGLGSLVYSSLQSMLFLVPFCLFQPHVLLSRPHPQNWHFLQPSQSVLPHEESEG

SEQ ID NO: 765822 - protein, 235 aa, Homo sapiens
MAKTYDYLFKLLLIGDSGVGKTCLLFRFSEDAFNTTFISTIVRPHKRNKNNPFYYPTKCLLMKQCDVVEQSIGFGITVTYSTVVLGIDFKIRTIELDGKKIKLQIWDTAGQERFRTITTAYYRGAMGIMLVYDITNEKSFDNIKNWIRNIEEHASSDVERMILGNKCDMNDKRQVSKERGEKLAIDYGIKFLETSAKSSANVEEAFLHWHEIYDKPQRKMIDQHSPGAGGPGKLQ

SEQ ID NO: 765823 - protein, 260 aa, Homo sapiens
TGRGAQAFSERRGGAWGGASSGGLAGTPPRPRPPPRLSPPPPLAPRSEGRSEKMAKTYDYLFKLLLIGDSGVGKTCLLFRFSEDAFNTTFISTIGIDFKIRTIELDGKKIKLQIWDTAGQERFRTITTAYYRGAMGIMLVYDITNEKSFDNIKNWIRNIEEHASSDVERMILGNKCDMNDKRQVSKERGEKLAIDYGIKFLETSAKSSANVEEAFFTLARDIMTKLNRKMNDSNSAGAGGPVKITENRSKKTSFFRCSLL

SEQ ID NO: 765824 - protein, 260 aa, Homo sapiens; identical to SEQ ID NO: 765823

SEQ ID NO: 765825 - protein, 260 aa, Homo sapiens; identical to SEQ ID NO: 765823

SEQ ID NO: 765826 - protein, 571 aa, Homo sapiens
MSTIFKLDTFSKGKDNFLETSYYSLFPEKIQAVNAFWMVTKYLLKDKCYDTMYECNSLSNLPLTIWCLNALVYIISGVVCKPKLTYSVVSFYYFVFLTECFALVIFLLSSFVLYGLITSLHELHLKEPVKVKMSLKVLFEVAANWEYMLCYIEINCPCYFLTFSFAEIVYTLSYDLRKFTFCMIKVTQINIPLCLIMYIQCIIFSICEMNLMTIIVCSPLKLKKSSFFVNIFVVLWIRYMKIFAAVLVVQWLHFIISVLIFDSDWTRPFQIESEEYQTVKMCCNYVACKSVDCKTFRWELILAIFYFRQIMINNLPVHQLVGAAGFLTIYRNILCSLCYKFSEDYTLYFEGLFFNYTSFSYTSILIPGRKTVSQPLSIYQNLDSLFCFELKTSLGKVGNISLGYEHTCHIQLHKKSIISLSPLINLAVQYRCVFAEVSSKRLELHFTGSECSESILRLIKFFLCSVSDTFKQTFFSSSRLRFLYKFSSQSLKTTFHYVGYIIINFKHSFLQSGFSEFFFFKQKRHSFFLVTSKGGTGVGGKECLKMKSLDIEGPRRTGYAKIISNSSTILE

SEQ ID NO: 765827 - protein, 260 aa, Homo sapiens; identical to SEQ ID NO: 765823

SEQ ID NO: 765828 - protein, 260 aa, Homo sapiens; identical to SEQ ID NO: 765823

SEQ ID NO: 765829 - protein, 253 aa, Homo sapiens
TGRGAQAFSERRGGAWGGASSGGLAGTPPRPRPPPRLSPPPPLAPRSEGRSEKMAKTYDYLFKLLLIGDSGVGKTCLLFRFSEDAFNTTFISTIGIDFKIRTIELDGKKIKLQIWDTAGQERFRTITTAYYRGAMGIMLVYDITNEKSFDNIKNWIRNIEEHASSDVERMILGNKCDMNDKRQVSKERGEKLAIDYGIKFLETSAKSSANVEEAFFTLARDIMTKLNRKMNDSNSAGAGGPVKITVSERLQHT

SEQ ID NO: 765830 - protein, 260 aa, Homo sapiens; identical to SEQ ID NO: 765823

SEQ ID NO: 765831 - protein, 268 aa, Homo sapiens
MGLSPSAPAVAVQASNASASPPSGCPMHEGKMKGCPVNTEPSGPTCEKKTYSVPAHQERAYEYVECPIRGTAAENKENLDPSNLMPPPNQTPAPDQPFALSTVREESSIPRADSEKKWVYPSEQMFWNAMLKKGWKWKDEDISQKDMYNIIRIHNQNNEQAWKEILKWEALHAAECPCGPSLIRFGGKAKEYSPRARIRSWMGYELPFDRHDWIINRCGTEVRYVIDYYDGGEVNKDYQFTILDVRPALDSLSAVWDRMKVAWWRWTS

SEQ ID NO: 765832 - protein, 174 aa, Homo sapiens
MGLSPSAPAVAVQASNASASPPSGCPMHEGKMKGCPVNTEPSGPTCEKKTYSVPAHQERAYEYVECPIRGTAAENKENLDPSNLMPPPNQTPAPDQPFALSTVREESSIPRADSEKKWVYPSEQMFWNAMLKKGWKWKDEDISQKDMYNIIRIHNQNNEQAWKEILKWEALHAA

SEQ ID NO: 765833 - protein, 268 aa, Homo sapiens; identical to SEQ ID NO: 765831

SEQ ID NO: 765834 - protein, 285 aa, Homo sapiens
SSVLDRFKQKKPGFSYGGNHWSEIQLFSAPIERVRCPAFMVTPFLYLIISGCPVNTEPSGPTCEKKTYSVPAHQERAYEYVECPIRGTAAENKENLDPSNLMPPPNQTPAPDQPFALSTVREESSIPRADSEKKWVYPSEQMFWNAMLKKGWKWKDEDISQKDMYNIIRIHNQNNEQAWKEILKWEALHAAECPCGPSLIRFGGKAKEYSPRARIRSWMGYELPFDRHDWIINRCGTEVRYVIDYYDGGEVNKDYQFTILDVRPALDSLSAVWDRMKVAWWRWTS

SEQ ID NO: 765835 - protein, 268 aa, Homo sapiens; identical to SEQ ID NO: 765831

SEQ ID NO: 765836 - protein, 268 aa, Homo sapiens; identical to SEQ ID NO: 765831

SEQ ID NO: 765837 - protein, 268 aa, Homo sapiens; identical to SEQ ID NO: 765831

SEQ ID NO: 765838 - protein, 116 aa, Homo sapiens
AAAYYYYTARIQASNDVRGHAAECPCGPSLIRFGGKAKEYSPRARIRSWMGYELPFDRHDWIINRCGTEVRYVIDYYDGGEVNKDYQFTILDVRPALDSLSAVWDRMKVAWWRWTS

SEQ ID NO: 765839 - protein, 400 aa, Homo sapiens
MGVLMSKRQTVEQVQKVSLAVSAFKDGLRDRPSIRRTGELPGSRRGTVEGSVQEVQEEKEAEAGTSVVQEESSAGRAAWERLRDGRGVEPEEFDRTSRFTPPAFIRPTRKLDDDKPPEICLEPREPVVNDEMCDVCEVWTAESLFPCRVCTRVFHDGCLRRMGYIQGDSAAEVTEMAHTETGWSCHYCDNINLLLTEEEMYSLTETFQRCKVIPDCSLTLEDFLRYRHQAAKRGDRDRALSEEQEEQAARQFAALDPEHRGHIEWPDFLSHESLLLLQQLRPQNSLLRLLTVKERERARAAFLARGSGSTVSEAECRRAQHSWFCKRFPEAPSCSVSISHVGPIADSSPASSSSKSQDKTLLPTEQESRFVDWPTFLQENVLYILAARPNSAAIHLKPPG

SEQ ID NO: 765840 - protein, 400 aa, Homo sapiens; identical to SEQ ID NO: 765839

SEQ ID NO: 765841 - protein, 400 aa, Homo sapiens; identical to SEQ ID NO: 765839

SEQ ID NO: 765842 - protein, 400 aa, Homo sapiens; identical to SEQ ID NO: 765839

SEQ ID NO: 765843 - protein, 400 aa, Homo sapiens; identical to SEQ ID NO: 765839

SEQ ID NO: 765844 - protein, 400 aa, Homo sapiens; identical to SEQ ID NO: 765839

SEQ ID NO: 765845 - protein, 400 aa, Homo sapiens; identical to SEQ ID NO: 765839

SEQ ID NO: 765846 - protein, 370 aa, Homo sapiens
MGVLMSKRQTVEQVQKVSLAVSAFKDGLRDRPSIRRTGELPGSRRGTVEGSVQEVQEEKEAEAGTSVVQEESSAGRAAWERLRDGRGVEPEEFDRTSRFTPPAFIRPTRKLDDDKPPEICLEPREPVVNDEMCDVCEVWTAESLFPCRVCTRVFHDGCLRRMGYIQGDSAAEVTEMAHTETGWSCHYCDNINLLLTEEEMYSLTETFQRCKVIPDCSLTLEDFLRYRHQAAKRGDRDRALSEEQEEQAARQFAALDPEHRGHIEWPDFLSHESLLLLQQLRPQNSLLRLLTVKERERARAAFLARGSGSTVSEAECRRAQHSWFCKRFPEAPSCSVSISHVGPIADSSPASSSSKSQDKTLLPTEQESRR

SEQ ID NO: 765847 - protein, 400 aa, Homo sapiens; identical to SEQ ID NO: 765839

SEQ ID NO: 765848 - protein, 421 aa, Homo sapiens
MSPKRIAKRRSPPADAIPKSKKVKVSHRSHSTEPGLVLTLGQGDVGQLGLGENVMERKKPALVSIPEDVVQAEAGGMHTVCLSKSGQVYSFGCNDEGALGRDTSVEGSEMVPGKVELQEKVVQVSAGDSHTAALTDDGRVFLWGSFRDNNGVIGLLEPMKKSMVPVQVQLDVPVVKVASGNDHLVMLTADGDLYTLGCGEQGQLGRVPELFANRGGRQGLERLLVPKCVMLKSRGSRGHVRFQDAFCGAYFTFAISHEGHVYGFGLSNYHQLGTPGTESCFIPQNLTSFKNSTKSWVGFSGGQHHTVCMDSEGKAYSLGRAEYGRLGLGEGAEEKSIPTLISRLPAVSSVACGASVGYAVTKDGRVFAWGMGTNYQLGTGQDEDAWSPVEMMGKQLENRVVLSVSSGGQHTVLLVKDKEQS

SEQ ID NO: 765849 - protein, 481 aa, Homo sapiens
SPGARHMQILGWPPGAAGLFVFLSHPGRGQRPAERMLWGSSRPGGERRSSLWPTCTKDRKMSPKRIAKRRSPPADAIPKSKKVKVSHRSHSTEPGLVLTLGQGDVGQLGLGENVMERKKPALVSIPEDVVQAEAGGMHTVCLSKSGQVYSFGCNDEGALGRDTSVEGSEMVPGKVELQEKVVQVSAGDSHTAALTDDGRVFLWGSFRDNNGVIGLLEPMKKSMVPVQVQLDVPVVKVASGNDHLVMLTADGDLYTLGCGEQGQLGRVPELFANRGGRQGLERLLVPKCVMLKSRGSRGHVRFQDAFCGAYFTFAISHEGHVYGFGLSNYHQLGTPGTESCFIPQNLTSFKNSTKSWVGFSGGQHHTVCMDSEGKAYSLGRAEYGRLGLGEGAEEKSIPTLISRLPAVSSVACGASVGYAVTKDGRVFAWGMGTNYQLGTGQDEDAWSPVEMMGKQLENRVVLSVSSGGQHTVLLVKDKEQS

SEQ ID NO: 765850 - protein, 261 aa, Homo sapiens
MVAEAGLRTCTKDRKMSPKRIAKRRSPPADAIPKSKKVKVSHRSHSTEPGLVLTLGQGDVGQLGLGENVMERKKPALVSIPEDVVQAEAGGMHTVCLSKSGQVYSFGCNDEGALGRDTSVEGSEMVPGKVELQEKVVQVSAGDSHTAALTDDGRVFLWGSFRDNNGVIGLLEPMKKSMVPVQVQLDVPVVKVASGNDHLVMLTADGDLYTLGCGEQGQLGRVPELFANRGGRQGLEGILVPSVCCLIPETGALKSGAWGPY

SEQ ID NO: 765851 - protein, 421 aa, Homo sapiens; identical to SEQ ID NO: 765848

SEQ ID NO: 765852 - protein, 421 aa, Homo sapiens; identical to SEQ ID NO: 765848

SEQ ID NO: 765853 - protein, 421 aa, Homo sapiens; identical to SEQ ID NO: 765848

SEQ ID NO: 765854 - protein, 421 aa, Homo sapiens; identical to SEQ ID NO: 765848

SEQ ID NO: 765855 - protein, 452 aa, Homo sapiens
MSPKRIAKRRSPPADAIPKSKKVKDTRAAASRRVPGARSCQGACGPSPPDQKTRPVSHRSHSTEPGLVLTLGQGDVGQLGLGENVMERKKPALVSIPEDVVQAEAGGMHTVCLSKSGQVYSFGCNDEGALGRDTSVEGSEMVPGKVELQEKVVQVSAGDSHTAALTDDGRVFLWGSFRDNNGVIGLLEPMKKSMVPVQVQLDVPVVKVASGNDHLVMLTADGDLYTLGCGEQGQLGRVPELFANRGGRQGLERLLVPKCVMLKSRGSRGHVRFQDAFCGAYFTFAISHEGHVYGFGLSNYHQLGTPGTESCFIPQNLTSFKNSTKSWVGFSGGQHHTVCMDSEGKAYSLGRAEYGRLGLGEGAEEKSIPTLISRLPAVSSVACGASVGYAVTKDGRVFAWGMGTNYQLGTGQDEDAWSPVEMMGKQLENRVVLSVSSGGQHTVLLVKDKEQS

SEQ ID NO: 765856 - protein, 438 aa, Homo sapiens
MSPKRIAKRRSPPADAIPKSKKVKDTRAAASRRVPGARSCQVSHRSHSTEPGLVLTLGQGDVGQLGLGENVMERKKPALVSIPEDVVQAEAGGMHTVCLSKSGQVYSFGCNDEGALGRDTSVEGSEMVPGKVELQEKVVQVSAGDSHTAALTDDGRVFLWGSFRDNNGVIGLLEPMKKSMVPVQVQLDVPVVKVASGNDHLVMLTADGDLYTLGCGEQGQLGRVPELFANRGGRQGLERLLVPKCVMLKSRGSRGHVRFQDAFCGAYFTFAISHEGHVYGFGLSNYHQLGTPGTESCFIPQNLTSFKNSTKSWVGFSGGQHHTVCMDSEGKAYSLGRAEYGRLGLGEGAEEKSIPTLISRLPAVSSVACGASVGYAVTKDGRVFAWGMGTNYQLGTGQDEDAWSPVEMMGKQLENRVVLSVSSGGQHTVLLVKDKEQS

SEQ ID NO: 765857 - protein, 421 aa, Homo sapiens; identical to SEQ ID NO: 765848

SEQ ID NO: 765858 - protein, 449 aa, Homo sapiens
MSPKRIAKRRSPPADAIPKSKKVKVSHRSHSTEPGLVLTLGQGDVGQLGLGENVMERKKPALVSIPEDVVQAEAGGMHTVCLSKSGQVYSFGCNDEGALGRDTSVEGSEMVPGKVELQEKVVQVSAGDSHTAALTDDGRVFLWGSFRHCLFHTSQRLGWGKEVWRQGLSHLRVSKDNNGVIGLLEPMKKSMVPVQVQLDVPVVKVASGNDHLVMLTADGDLYTLGCGEQGQLGRVPELFANRGGRQGLERLLVPKCVMLKSRGSRGHVRFQDAFCGAYFTFAISHEGHVYGFGLSNYHQLGTPGTESCFIPQNLTSFKNSTKSWVGFSGGQHHTVCMDSEGKAYSLGRAEYGRLGLGEGAEEKSIPTLISRLPAVSSVACGASVGYAVTKDGRVFAWGMGTNYQLGTGQDEDAWSPVEMMGKQLENRVVLSVSSGGQHTVLLVKDKEQS

SEQ ID NO: 765859 - protein, 369 aa, Homo sapiens
MSPKRIAKRRSPPADAIPKSKKVKVSHRSHSTEPGLVLTLGQGDVGQLGLGENVMERKKPALVSIPEDVVQAEAGGMHTVCLSKSGQVYSFGCNDEGALGRDTSVEGSEMVPGKVELQEKVVQVSAGDSHTAALTDDGRVFLWGSFRDNNGVIGLLEPMKKSMVPVQVQLDVPVVKVASGNDHLVMLTADGDLYTLGCGEQGQLGRVPELFANRGGRQGLGTPGTESCFIPQNLTSFKNSTKSWVGFSGGQHHTVCMDSEGKAYSLGRAEYGRLGLGEGAEEKSIPTLISRLPAVSSVACGASVGYAVTKDGRVFAWGMGTNYQLGTGQDEDAWSPVEMMGKQLENRVVLSVSSGGQHTVLLVKDKEQS

SEQ ID NO: 765860 - protein, 421 aa, Homo sapiens; identical to SEQ ID NO: 765848

SEQ ID NO: 765861 - protein, 437 aa, Homo sapiens
MSPKRIAKRRSPPADAIPKSKKVKVSHRSHSTEPGLVLTLGQGDVGQLGLGENVMERKKPALVSIPEDVVQAEAGGMHTVCLSKSGQVYSFGCNDEGALGRDTSVEGSEMVPGKVELQEKVVQVSAGDSHTAALTDDGRVFLWGSFRDNNGVIGLLEPMKKSMVPVQVQLDVPVVKVASGNDHLVMLTADGDLYTLGCGEQGQLGRVPELFANRGGRQGLGCCEVKRVNEKKYQADERLLVPKCVMLKSRGSRGHVRFQDAFCGAYFTFAISHEGHVYGFGLSNYHQLGTPGTESCFIPQNLTSFKNSTKSWVGFSGGQHHTVCMDSEGKAYSLGRAEYGRLGLGEGAEEKSIPTLISRLPAVSSVACGASVGYAVTKDGRVFAWGMGTNYQLGTGQDEDAWSPVEMMGKQLENRVVLSVSSGGQHTVLLVKDKEQS

SEQ ID NO: 765862 - protein, 421 aa, Homo sapiens; identical to SEQ ID NO: 765848

SEQ ID NO: 765863 - protein, 293 aa, Homo sapiens
MSPKRIAKRRSPPADAIPKSKKVKDTRAAASRRVPGARSCQVSHRSHSTEPGLVLTLGQGDVGQLGLGENVMERKKPALVSIPEDVVQAEAGGMHTVCLSKSGQVYSFGCNDEGALGRDTSVEGSEMVPGKVELQEKVVQVSAGDSHTAALTDDGRVFLWGSFRDNNGVIGLLEPMKKSMVPVQVQLDVPVVKVASGNDHLVMLTADGDLYTLGCGEQGQLGRVPELFANRGGRQGLVERLLAPSVYAKSGKPGHYPEPRGTTLHQRQEDASNTRDGTSTQQPPRASPPRPPP

SEQ ID NO: 765864 - protein, 442 aa, Homo sapiens
RPVSLANYALEPRRRTLLDRKMSPKRIAKRRSPPADAIPKSKKVKVSHRSHSTEPGLVLTLGQGDVGQLGLGENVMERKKPALVSIPEDVVQAEAGGMHTVCLSKSGQVYSFGCNDEGALGRDTSVEGSEMVPGKVELQEKVVQVSAGDSHTAALTDDGRVFLWGSFRDNNGVIGLLEPMKKSMVPVQVQLDVPVVKVASGNDHLVMLTADGDLYTLGCGEQGQLGRVPELFANRGGRQGLERLLVPKCVMLKSRGSRGHVRFQDAFCGAYFTFAISHEGHVYGFGLSNYHQLGTPGTESCFIPQNLTSFKNSTKSWVGFSGGQHHTVCMDSEGKAYSLGRAEYGRLGLGEGAEEKSIPTLISRLPAVSSVACGASVGYAVTKDGRVFAWGMGTNYQLGTGQDEDAWSPVEMMGKQLENRVVLSVSSGGQHTVLLVKDKEQS

SEQ ID NO: 765865 - protein, 512 aa, Homo sapiens
SPGARHMQILGWPPGAAGLFVFLSHPGRGQRPAERMLWGSSRPGGERRSSLWPTCTKDRKMSPKRIAKRRSPPADAIPKSKKVKDTRAAASRRVPGARSCQGACGPSPPDQKTRPVSHRSHSTEPGLVLTLGQGDVGQLGLGENVMERKKPALVSIPEDVVQAEAGGMHTVCLSKSGQVYSFGCNDEGALGRDTSVEGSEMVPGKVELQEKVVQVSAGDSHTAALTDDGRVFLWGSFRDNNGVIGLLEPMKKSMVPVQVQLDVPVVKVASGNDHLVMLTADGDLYTLGCGEQGQLGRVPELFANRGGRQGLERLLVPKCVMLKSRGSRGHVRFQDAFCGAYFTFAISHEGHVYGFGLSNYHQLGTPGTESCFIPQNLTSFKNSTKSWVGFSGGQHHTVCMDSEGKAYSLGRAEYGRLGLGEGAEEKSIPTLISRLPAVSSVACGASVGYAVTKDGRVFAWGMGTNYQLGTGQDEDAWSPVEMMGKQLENRVVLSVSSGGQHTVLLVKDKEQS

SEQ ID NO: 765866 - protein, 351 aa, Homo sapiens
NFRLGTRPGWWLSKSGQVYSFGCNDEGALGRDTSVEGSEMVPGKVELQEKVVQVSAGDSHTAALTDDGRVFLWGSFRDNNGVIGLLEPMKKSMVPVQVQLDVPVVKVASGNDHLVMLTADGDLYTLGCGEQGQLGRVPELFANRGGRQGLERLLVPKCVMLKSRGSRGHVRFQDAFCGAYFTFAISHEGHVYGFGLSNYHQLGTPGTESCFIPQNLTSFKNSTKSWVGFSGGQHHTVCMDSEGKAYSLGRAEYGRLGLGEGAEEKSIPTLISRLPAVSSVACGASVGYAVTKDGRVFAWGMGTNYQLGTGQDEDAWSPVEMMGKQLENRVVLSVSSGGQHTVLLVKDKEQS

SEQ ID NO: 765867 - protein, 66 aa, Homo sapiens
ILPCAQLVVGAHAPRRKPRPSLVTAYPTEAPQATEGDSSSLENRVVLSVSSGGQHTVLLVKDKEQS

SEQ ID NO: 765868 - protein, 436 aa, Homo sapiens
MVAEAGLRTCTKDRKMSPKRIAKRRSPPADAIPKSKKVKVSHRSHSTEPGLVLTLGQGDVGQLGLGENVMERKKPALVSIPEDVVQAEAGGMHTVCLSKSGQVYSFGCNDEGALGRDTSVEGSEMVPGKVELQEKVVQVSAGDSHTAALTDDGRVFLWGSFRDNNGVIGLLEPMKKSMVPVQVQLDVPVVKVASGNDHLVMLTADGDLYTLGCGEQGQLGRVPELFANRGGRQGLERLLVPKCVMLKSRGSRGHVRFQDAFCGAYFTFAISHEGHVYGFGLSNYHQLGTPGTESCFIPQNLTSFKNSTKSWVGFSGGQHHTVCMDSEGKAYSLGRAEYGRLGLGEGAEEKSIPTLISRLPAVSSVACGASVGYAVTKDGRVFAWGMGTNYQLGTGQDEDAWSPVEMMGKQLENRVVLSVSSGGQHTVLLVKDKEQS

SEQ ID NO: 765869 - protein, 156 aa, Homo sapiens [sequence omitted]

SEQ ID NO: 765870 - protein, 161 aa, Homo sapiens
TKEVVKLKRAERITHEKVPEESEELRSKFKRRTEEGYYEAITAVELKSRKKDESYEELLRKTKDELLHWTKELTEEEKKALAEEGKITIPTFKPDKIELSPSMEAPKIFERIQSQTVGQGSDAHFRVRVVGKPDPECEWYKNGVKIERSDRIYWYWPEDNV

SEQ ID NO: 765871 - protein, 141 aa, Homo sapiens
RARHMEPFMYQMVTATAGFVQFSPSGKFITQWGEESSGSSPLPGQFTVPHSLALVPLLGQLCVADRENGRIQCFKTDTKEFVREIKHSSFGRNVFAISYIPGLLFAVNGKPHFGDQEPVQGFVMNFSNGEIIDIFKPVRSF

SEQ ID NO: 765872 - protein, 277 aa, Homo sapiens
MENTENSVDSKSIKNLEPKIIHGSESMDSGISLDNSYKMDYPEMGLCIIINNKNFHKSTGMTSRSGTDVDAANLRETFRNLKYEVRNKNDLTREEIVELMRDVSKEDHSKRSSFVCVLLSHGEEGIIFGTNGPVDLKKITNFFRGDRCRSLTGKPKLFIIQACRGTELDCGIETDSGVDDDMACHKIPVEADFLYAYSTAPGYYSWRNSKDGSWFIQSLCAMLKQYADKLEFMHILTRVNRKVATEFESFSFDATFHAKKQIPCIVSMLTKELYFYH

SEQ ID NO: 765873 - protein, 277 aa, Homo sapiens; identical to SEQ ID NO: 765872

SEQ ID NO: 765874 - protein, 182 aa, Homo sapiens
MENTENSVDSKSIKNLEPKIIHGSESMDSGISLDNSYKMDYPEMGLCIIINNKNFHKSTGMTSRSGTDVDAANLRETFRNLKYEVRNKNDLTREEIVELMRDVSKEDHSKRSSFVCVLLSHGEEGIIFGTNGPVDLKKITNFFRGDRCRSLTGKPKLFIIQVIILGEIQRMAPGSSSRFVPC

SEQ ID NO: 765875 - protein, 277 aa, Homo sapiens; identical to SEQ ID NO: 765872

SEQ ID NO: 765876 - protein, 277 aa, Homo sapiens; identical to SEQ ID NO: 765872

SEQ ID NO: 765877 - protein, 277 aa, Homo sapiens; identical to SEQ ID NO: 765872

SEQ ID NO: 765878 - protein, 222 aa, Homo sapiens
NTISRSSPKFIGHSPQPLGYDRSSRSSYVDEDCDSLALCDPLQRTNCEVDSLPESCFDSGLSTLRDPNEYDSEVEYKHQRGFQRSHGVQESFGGDASDTDVPDIRDEETFGLEDVASVLDWKPQGSVSEGSIVSSSRKPISALSPQTDLVDDNAKSFSSQKAYKIVLAGDAAVGKSSFLMRLCKNEFRENISATLGVDFQMKTLIVDGERTVLQLWDTAGQE

SEQ ID NO: 765879 - protein, 70 aa, Homo sapiens
FGTEGDLPPPETEEIPLHAERAHQQIQAACETFDVRSQQHIQIPKLYTSNVTWGLHHFRLVQDSQPLDLS

SEQ ID NO: 765880 - protein, 71 aa, Homo sapiens
FILRSLWATPYLDEGFLALGQRNAEVNWPEAGADGCPMQMKVWPVLGHGHSWALSLSETWWKEEGGRDSGL

SEQ ID NO: 765881 - protein, 102 aa, Homo sapiens
SPGATADWGLLDYKTEKWALLAKKGYQERDLEPQISITTKLKGVSVTQIKELGNRLWDVADFVKPPQGENVFFLVTNFLVTPAQDQGRCPEIQGLAMLPRLE

SEQ ID NO: 765882 - protein, 179 aa, Homo sapiens
SLIYGVTSPQRGHSQHSEASQGPLSLDKPLQLPPIFLEGEKGESSVQNEQEGEPSLQSPSLELQSPAWPRHAGVAQEPLKVSSSYLSDTQSSESHVSSVQHPRPEEGSHASLSSGYAGDKEGSDISLVGSHRRVRLNRRLNTQAASNQTSQLGSIDPPSSLKSRLTGPAHSTKQTGGKE

SEQ ID NO: 765883 - protein, 67 aa, Homo sapiens
THRRYPKTTIHSTLFTQCMSVPSTVPGARDRAGLNVIRDTIHIEFLEAPLTEYSVQPADLAVYWQMQ

SEQ ID NO: 765884 - protein, 106 aa, Homo sapiens
ILGEMTSSGEGTELFQKPVEMWEECDAREIINLLALKMERIWEHPQLAARKRAEASALQLQEPELCQWCELPGGSPASDETAAQPTPRFLPRDALSRESSKVIPDF

SEQ ID NO: 765885 - protein, 912 aa, Homo sapiens
MPGKRGLGWWWARLPLCLLLSLYGPWMPSSLGKPKGHPHMNSIRIDGDITLGGLFPVHGRGSEGKPCGELKKEKGIHRLEAMLFALDRINNDPDLLPNITLGARILDTCSRDTHALEQSLTFVQALIEKDGTEVRCGSGGPPIITKPERVVGVIGASGSSVSIMVANILRLFKIPQISYASTAPDLSDNSRYDFFSRVVPSDTYQAQAMVDIVRALKWNYVSTVASEGSYGESGVEAFIQKSREDGGVCIAQSVKIPREPKAGEFDKIIRRLLETSNARAVIIFANEDDIRRVLEAARRANQTGHFFWMGSDSWGSKIAPVLHLEEVAEGAVTILPKRMSVRGFDRYFSSRTLDNNRRNIWFAEFWEDNFHCKLSRHALKKGSHVKKCTNRERIGQDSAYEQEGKVQFVIDAVYAMGHALHAMHRDLCPGRVGLCPRMDPVDGTQLLKYIRNVNFSGIAGNPVTFNENGDAPGRYDIYQYQLRNDSAEYKVIGSWTDHLHLRIERMHWPGSGQQLPRSICSLPCQPGERKKTVKGMPCCWHCEPCTGYQYQVDRYTCKTCPYDMRPTENRTGCRPIPIIKLEWGSPWAVLPLFLAVVGIAATLFVVITFVRYNDTPIVKASGRELSYVLLAGIFLCYATTFLMIAEPDLGTCSLRRIFLGLGMSISYAALLTKTNRIYRIFEQGKRSVSAPRFISPASQLAITFSLISLQLLGICVWFVVDPSHSVVDFQDQRTLDPRFARGVLKCDISDLSLICLLGYSMLLMVTCTVYAIKTRGVPETFNEAKPIGFTMYTTCIVWLAFIPIFFGTSQSADKLYIQTTTLTVSVSLSASVSLGMLYMPKVYIILFHPEQNVPKRKRSLKAVVTAATMSNKFTQKGNFRPNGEAKSELCENLEAPALATKQTYVTYTNHAI

SEQ ID NO: 765886 - protein, 79 aa, Homo sapiens
ITHSHSGCGEQLSEGPGILAQRAVNEEGAVGRRQHVQRGEGGGCVMVDACENGQGMWGWMSQEGMRLRGPGLGRGGCGA

SEQ ID NO: 765887 - protein, 912 aa, Homo sapiens; identical to SEQ ID NO: 765885

SEQ ID NO: 765888 - protein, 662 aa, Homo sapiens
GTVVDPGLLGVRDVGPKKCGQEWGQFRGQTRLGWAGVCSYRRVLEAARRANQTGHFFWMGSDSWGSKIAPVLHLEEVAEGAVTILPKRMSVRGFDRYFSSRTLDNNRRNIWFAEFWEDNFHCKLSRHALKKGSHVKKCTNRERIGQDSAYEQEGKVQFVIDAVYAMGHALHAMHRDLCPGRVGLCPRMDPVDGTQLLKYIRNVNFSGIAGNPVTFNENGDAPGRYDIYQYQLRNDSAEYKVIGSWTDHLHLRIERMHWPGSGQQLPRSICSLPCQPGERKKTVKGMPCCWHCEPCTGYQYQVDRYTCKTCPYDMRPTENRTGCRPIPIIKLEWGSPWAVLPLFLAVVGIAATLFVVITFVRYNDTPIVKASGRELSYVLLAGIFLCYATTFLMIAEPDLGTCSLRRIFLGLGMSISYAALLTKTNRIYRIFEQGKRSVSAPRFISPASQLAITFSLISLQLLGICVWFVVDPSHSVVDFQDQRTLDPRFARGVLKCDISDLSLICLLGYSMLLMVTCTVYAIKTRGVPETFNEAKPIGFTMYTTCIVWLAFIPIFFGTSQSADKLYIQTTTLTVSVSLSASVSLGMLYMPKVYIILFHPEQNVPKRKRSLKAVVTAATMSNKFTQKGNFRPNGEAKSELCENLEAPALATKQTYVTYTNHAI

SEQ ID NO: 765889 - protein, 865 aa, Homo sapiens
MPGKRGLGWWWARLPLCLLLSLYGPWMPSSLGKPKGHPHMNSIRIDGDITLGGLFPVHGRGSEGKPCGELKKEKGIHRLEAMLFALDRINNDPDLLPNITLGARILDTCSRDTHALEQSLTFVQALIEKDGTEVRCGSGGPPIITKPERVVGVIGASGSSVSIMVANILRLFKIPQISYASTAPDLSDNSRYDFFSRVVPSDTYQAQAMVDIVRALKWNYVSTVASEGSYGESGVEAFIQKSREDGGVCIAQSVKIPREPKAGEFDKIIRRLLETSNARAVIIFANEDDIRRVLEAARRANQTGHFFWMGSDSWGSKIAPVLHLEEVAEGAVTILPKRMSVRDRERIGQDSAYEQEGKVQFVIDAVYAMGHALHAMHRDLCPGRVGLCPRMDPVDGTQLLKYIRNVNFSGIAGNPVTFNENGDAPGRYDIYQYQLRNDSAEYKVIGSWTDHLHLRIERMHWPGSGQQLPRSICSLPCQPGERKKTVKGMPCCWHCEPCTGYQYQVDRYTCKTCPYDMRPTENRTGCRPIPIIKLEWGSPWAVLPLFLAVVGIAATLFVVITFVRYNDTPIVKASGRELSYVLLAGIFLCYATTFLMIAEPDLGTCSLRRIFLGLGMSISYAALLTKTNRIYRIFEQGKRSVSAPRFISPASQLAITFSLISLQLLGICVWFVVDPSHSVVDFQDQRTLDPRFARGVLKCDISDLSLICLLGYSMLLMVTCTVYAIKTRGVPETFNEAKPIGFTMYTTCIVWLAFIPIFFGTSQSADKLYIQTTTLTVSVSLSASVSLGMLYMPKVYIILFHPEQNVPKRKRSLKAVVTAATMSNKFTQKGNFRPNGEAKSELCENLEAPALATKQTYVTYTNHAI

SEQ ID NO: 765890 - protein, 929 aa, Homo sapiens
ALQRRALSRHLPFRTAQGTQPTGSRLPFSFSSRTPRSKPRIETKLGSMEPAPARSPRPQQDPARPQEPTMPPPETPSEGRQPSPSPSPTERAPASEEEFQFLRCQQCQAEAKCPKLLPCLHTLCSGCLEASGMQCPICQAPWPLGADTPALDNVFFESLQRRLSVYRQIVDAQAVCTRCKESADFWCFECEQLLCAKCFEAHQWFLKHEARPLAELRNQSVREFLDGTRKTNNIFCSNPNHRTPTLTSIYCRGCSKPLCCSCALLDSSHSELKCDISAEIQQRQEELDAMTQALQEQDSAFGAVHAQMHAAVGQLGRARAETEELIRERVRQVVAHVRAQERELLEAVDARYQRDYEEMASRLGRLDAVLQRIRTGSALVQRMKCYASDQEVLDMHGFLRQALCRLRQEEPQSLQAAVRTDGFDEFKVRLQDLSSCITQGKDAAVSKKASPEAASTPRDPIDVDLPEEAERVKAQVQALGLAEAQPMAVVQSVPGAHPVPVYAFSIKGPSYGEDVSNTTTAQKRKCSQTQCPRKVIKMESEEGKEARLARSSPEQPRPSTSKAVSPPHLDGPPSPRSPVIGSEVFLPNSNHVASGAGEAEERVVVISSSEDSDAENSSSRELDDSSSESSDLQLEGPSTLRVLDENLADPQAEDRPLVFFDLKIDNETQKISQLAAVNRESKFRVVIQPEALFSIYSKAVSLEVGLQHFLSFLSSMRRPILACYKLWGPGLPNFFRALEDINRLWEFQEAISGFLAALPLIRERVPGASSFKLKNLAQTYLARNMSERSAMAAVLAMRDLCRLLEVSPGPQLAQHVYPFSSLQCFASLQPLVQAAVLPRAEARLLALHNVSFMELLSAHRRDRQGGLKKYSRYLSLQTTTLPPAQPAFNLQALGTYFEGLLEGPALARAEGVSTPLAGRGLAERASQQS

SEQ ID NO: 765891 - protein, 876 aa, Homo sapiens
ALQRRALSRHLPFRTAQGTQPTGSRLPFSFSSRTPRSKPRIETKLGSMEPAPARSPRPQQDPARPQEPTMPPPETPSEGRQPSPSPSPTERAPASEEEFQFLRCQQCQAEAKCPKLLPCLHTLCSGCLEASGMQCPICQAPWPLGADTPALDNVFFESLQRRLSVYRQIVDAQAVCTRCKESADFWCFECEQLLCAKCFEAHQWFLKHEARPLAELRNQSVREFLDGTRKTNNIFCSNPNHRTPTLTSIYCRGCSKPLCCSCALLDSSHSELKCDISAEIQQRQEELDAMTQALQEQDSAFGAVHAQMHAAVGQLGRARAETEELIRERVRQVVAHVRAQERELLEAVDARYQRDYEEMASRLGRLDAVLQRIRTGSALVQRMKCYASDQEVLDMHGFLRQALCRLRQEEPQSLQAAVRTDGFDEFKVRLQDLSSCITQGKDAAVSKKASPEAASTPRDPIDVDLPEEAERVKAQVQALGLAEAQPMAVVQSVPGAHPVPVYAFSIKGPSYGEDVSNTTTAQKRKCSQTQCPRKVIKMESEEGKEARLARSSPEQPRPSTSKAVSPPHLDGPPSPRSPVIGSEVFLPNSNHVASGAGEAEERVVVISSSEDSDAENSCMEPMETAEPQSSPAHSSPAHSSPAHSSPVQSLLRAQGASSLPCGTYHPPAWPPHQPAEQAATPDAEPHSEPPDHQERPAVHRGIRYLLYRAQRAIRLRHALRLHPQLHRAPIRTWSPHVVQASTPAITGPLNHPANAQEHPAQLQRGISPPHRIRGAVRSRSRSLRGSSHLSQWLNNFFALPFSSMASQLDMSSVVGAGEGRAQTLGAVVPPGDSVRGSMEASQVQVPLEASPITFPPPCAPERPPISPVPGARQAGL

SEQ ID NO: 765892 - protein, 658 aa, Homo sapiens
ALQRRALSRHLPFRTAQGTQPTGSRLPFSFSSRTPRSKPRIETKLGSMEPAPARSPRPQQDPARPQEPTMPPPETPSEGRQPSPSPSPTERAPASEEEFQFLRCQQCQAEAKCPKLLPCLHTLCSGCLEASGMQCPICQAPWPLGADTPALDNVFFESLQRRLSVYRQIVDAQAVCTRCKESADFWCFECEQLLCAKCFEAHQWFLKHEARPLAELRNQSVREFLDGTRKTNNIFCSNPNHRTPTLTSIYCRGCSKPLCCSCALLDSSHSELKCDISAEIQQRQEELDAMTQALQEQDSAFGAVHAQMHAAVGQLGRARAETEELIRERVRQVVAHVRAQERELLEAVDARYQRDYEEMASRLGRLDAVLQRIRTGSALVQRMKCYASDQEVLDMHGFLRQALCRLRQEEPQSLQAAVRTDGFDEFKVRLQDLSSCITQGKDAAVSKKASPEAASTPRDPIDVDLPEEAERVKAQVQALGLAEAQPMAVVQSVPGAHPVPVYAFSIKGPSYGEDVSNTTTAQKRKCSQTQCPRKVIKMESEEGKEARLARSSPEQPRPSTSKAVSPPHLDGPPSPRSPVIGSEVFLPNSNHVASGAGEAEERVVVISSSEDSDAENSVSGPEVQPRTPASPHFRSQGAQPQQVTLRLALRLGNFPVRH

SEQ ID NO: 765893 - protein, 828 aa, Homo sapiens
ALQRRALSRHLPFRTAQGTQPTGSRLPFSFSSRTPRSKPRIETKLGSMEPAPARSPRPQQDPARPQEPTMPPPETPSEGRQPSPSPSPTERAPASEEEFQFLRCQQCQAEAKCPKLLPCLHTLCSGCLEASGMQCPICQAPWPLGADTPALDNVFFESLQRRLSVYRQIVDAQAVCTRCKESADFWCFECEQLLCAKCFEAHQWFLKHEARPLAELRNQSVREFLDGTRKTNNIFCSNPNHRTPTLTSIYCRGCSKPLCCSCALLDSSHSELKCDISAEIQQRQEELDAMTQALQEQDSAFGAVHAQMHAAVGQLGRARAETEELIRERVRQVVAHVRAQERELLEAVDARYQRDYEEMASRLGRLDAVLQRIRTGSALVQRMKCYASDQEVLDMHGFLRQALCRLRQEEPQSLQAAVRTDGFDEFKVRLQDLSSCITQGKDAAVSKKASPEAASTPRDPIDVDLDVSNTTTAQKRKCSQTQCPRKVIKMESEEGKEARLARSSPEQPRPSTSKAVSPPHLDGPPSPRSPVIGSEVFLPNSNHVASGAGEAEERVVVISSSEDSDAENSCMEPMETAEPQSSPAHSSPAHSSPAHSSPVQSLLRAQGASSLPCGTYHPPAWPPHQPAEQAATPDAEPHSEPPDHQERPAVHRGIRYLLYRAQRAIRLRHALRLHPQLHRAPIRTWSPHVVQASTPAITGPLNHPANAQEHPAQLQRGISPPHRIRGAVRSRSRSLRGSSHLSQWLNNFFALPFSSMASQLDMSSVVGAGEGRAQTLGAVVPPGDSVRGSMEASQVQVPLEASPITFPPPCAPERPPISPVPGARQAGL

SEQ ID NO: 765894 - protein, 632 aa, Homo sapiens
ALQRRALSRHLPFRTAQGTQPTGSRLPFSFSSRTPRSKPRIETKLGSMEPAPARSPRPQQDPARPQEPTMPPPETPSEGRQPSPSPSPTERAPASEEEFQFLRCQQCQAEAKCPKLLPCLHTLCSGCLEASGMQCPICQAPWPLGADTPALDNVFFESLQRRLSVYRQIVDAQAVCTRCKESADFWCFECEQLLCAKCFEAHQWFLKHEARPLAELRNQSVREFLDGTRKTNNIFCSNPNHRTPTLTSIYCRGCSKPLCCSCALLDSSHSELKCDISAEIQQRQEELDAMTQALQEQDSAFGAVHAQMHAAVGQLGRARAETEELIRERVRQVVAHVRAQERELLEAVDARYQRDYEEMASRLGRLDAVLQRIRTGSALVQRMKCYASDQEVLDMHGFLRQALCRLRQEEPQSLQAAVRTDGFDEFKVRLQDLSSCITQGKDAAVSKKASPEAASTPRDPIDVDLDVSNTTTAQKRKCSQTQCPRKVIKMESEEGKEARLARSSPEQPRPSTSKAVSPPHLDGPPSPRSPVIGSEVFLPNSNHVASGAGEAEERVVVISSSEDSDAENSSSRELDDSSSESSDLQLEGPSTLRVLDENLADPQAEDRPLVFFDLKIDNESGFSWGYPHPFLI

SEQ ID NO: 765895 - protein, 482 aa, Homo sapiens
ALQRRALSRHLPFRTAQGTQPTGSRLPFSFSSRTPRSKPRIETKLGSMEPAPARSPRPQQDPARPQEPTMPPPETPSEGRQPSPSPSPTERAPASEEEFQFLRCQQCQAEAKCPKLLPCLHTLCSGCLEASGMQCPICQAPWPLGADTPALDNVFFESLQRRLSVYRQIVDAQAVCTRCKESADFWCFECEQLLCAKCFEAHQWFLKHEARPLAELRNQSVREFLDGTRKTNNIFCSNPNHRTPTLTSIYCRGCSKPLCCSCALLDSSHSELKCDISAEIQQRQEELDAMTQALQEQDSAFGAVHAQMHAAVGQLGRARAETEELIRERVRQVVAHVRAQERELLEAVDARYQRDYEEMASRLGRLDAVLQRIRTGSALVQRMKCYASDQEVLDMHGFLRQALCRLRQEEPQSLQAAVRTDGFDEFKVRLQDLSSCITQGKDAAVSKKASPEAASTPRDPIDVDLLPPPAHALTGPAQSSTH

SEQ ID NO: 765896 - protein, 446 aa, Homo sapiens
MASNSSSCPTPGGGHLNGYPVPPYAFFFPPMLGGLSPPGALTTLQHQLPVSGYSTPSPANAAVSKKASPEAASTPRDPIDVDLDVSNTTTAQKRKCSQTQCPRKVIKMESEEGKEARLARSSPEQPRPSTSKAVSPPHLDGPPSPRSPVIGSEVFLPNSNHVASGAGEAEERVVVISSSEDSDAENSCMEPMETAEPQSSPAHSSPAHSSPAHSSPVQSLLRAQGASSLPCGTYHPPAWPPHQPAEQAATPDAEPHSEPPDHQERPAVHRGIRYLLYRAQRAIRLRHALRLHPQLHRAPIRTWSPHVVQASTPAITGPLNHPANAQEHPAQLQRGISPPHRIRGAVRSRSRSLRGSSHLSQWLNNFFALPFSSMASQLDMSSVVGAGEGRAQTLGAVVPPGDSVRGSMEASQVQVPLEASPITFPPPCAPERPPISPVPGARQAGL

SEQ ID NO: 765897 - protein, 107 aa, Homo sapiens
SVTPSMQDVSNTTTAQKRKCSQTQCPRKVIKMESEEGKEARLARSSPEQPRPSTSWSEAEHFILCTSALPVRMRCSTASRRTSRLAISSSSRWYRALTASSISALEG

SEQ ID NO: 765898 - protein, 688 aa, Homo sapiens
ALQRRALSRHLPFRTAQGTQPTGSRLPFSFSSRTPRSKPRIETKLGSMEPAPARSPRPQQDPARPQEPTMPPPETPSEGRQPSPSPSPTERAPASEEEFQFLRCQQCQAEAKCPKLLPCLHTLCSGCLEASGMQCPICQAPWPLGADTPALDNVFFESLQRRLSVYRQIVDAQAVCTRCKESADFWCFECEQLLCAKCFEAHQWFLKHEARPLAELRNQSVREFLDGTRKTNNIFCSNPNHRTPTLTSIYCRGCSKPLCCSCALLDSSHSELKCDISAEIQQRQEELDAMTQALQEQDSAFGAVHAQMHAAVGQLGRARAETEELIRERVRQVVAHVRAQERELLEAVDARYQRDYEEMASRLGRLDAVLQRIRTGSALVQRMKCYASDQEVLDMHGFLRQALCRLRQEEPQSLQAAVRTDGFDEFKVRLQDLSSCITQGKDAAVSKKASPEAASTPRDPIDVDLPEEAERVKAQVQALGLAEAQPMAVVQSVPGAHPVPVYAFSIKGPSYGEDVSNTTTAQKRKCSQTQCPRKVIKMESEEGKEARLARSSPEQPRPSTSKAVSPPHLDGPPSPRSPVIGSEVFLPNSNHVASGAGEAEERVVVISSSEDSDAENSVSSSPQSEVLYWKVHGAHGDRRATVLASPLLASPLLASPLLASPVSAESTRSLQPALWHIPPPSLASPPAR

SEQ ID NO: 765899 - protein, 470 aa, Homo sapiens
ALQRRALSRHLPFRTAQGTQPTGSRLPFSFSSRTPRSKPRIETKLGSMEPAPARSPRPQQDPARPQEPTMPPPETPSEGRQPSPSPSPTERAPASEEEFQFLRCQQCQAEAKCPKLLPCLHTLCSGCLEASGMQCPICQAPWPLGADTPALDNVFFESLQRRLSVYRQIVDAQAVCTRCKESADFWCFECEQLLCAKCFEAHQWFLKHEARPLAELRNQSVREFLDGTRKTNNIFCSNPNHRTPTLTSIYCRGCSKPLCCSCALLDSSHSELKCDISAEIQQRQEELDAMTQALQEQDSAFGAVHAQMHAAVGQLGRARAETEELIRERVRQVVAHVRAQERELLEAVDARYQRDYEEMASRLGRLDAVLQRIRTGSALVQRMKCYASDQEVLDMHGFLRQALCRLRQEEPQSLQAAVRTDGFDEFKVRLQDLSSCITQGKDAAVSKKASPEAASTPRDPIDVDLRNALW

SEQ ID NO: 765900 - protein, 281 aa, Homo sapiens
DFQRIPRVDLVLDLVLDMHGFLRQALCRLRQEEPQSLQAAVRTDGFDEFKVRLQDLSSCITQGKDAAVSKKASPEAASTPRDPIDVDLPEEAERVKAQVQALGLAEAQPMAVVQSVPGAHPVPVYAFSIKGPSYGEDVSNTTTAQKRKCSQTQCPRKVIKMESEEGKEARLARSSPEQPRPSTSKAVSPPHLDGPPSPRSPVIGSEVFLPNSNHVASGAGEAEERVVVISSSEDSDAENSVSGPEVQPRTPASPHFRSQGAQPQQVTLRLALRLGNFPVRH

SEQ ID NO: 765901 - protein, 339 aa, Homo sapiens
SAGLRSPDVGWGTSPPNGSLQKATASKSSRELDDSSSESSDLQLEGPSTLRVLDENLADPQAEDRPLVFFDLKIDNETQKISQLAAVNRESKFRVVIQPEALFSIYSKAVSLEVGLQHFLSFLSSMRRPILACYKLWGPGLPNFFRALEDINRLWEFQEAISGFLAALPLIRERVPGASSFKLKNLAQTYLARNMSERSAMAAVLAMRDLCRLLEVSPGPQLAQHVYPFSSLQCFASLQPLVQAAVLPRAEARLLALHNVSFMELLSAHRRDRQGGLKKYSRYLSLQTTTLPPAQPAFNLQALGTYFEGLLEGPALARAEGVSTPLAGRGLAERASQQS

SEQ ID NO: 765902 - protein, 292 aa, Homo sapiens
MVSSSPRGPPAPTPELSVTLGPHPALLSCPAQKISQLAAVNRESKFRVVIQPEALFSIYSKAVSLEVGLQHFLSFLSSMRRPILACYKLWGPGLPNFFRALEDINRLWEFQEAISGFLAALPLIRERVPGASSFKLKNLAQTYLARNMSERSAMAAVLAMRDLCRLLEVSPGPQLAQHVYPFSSLQCFASLQPLVQAAVLPRAEARLLALHNVSFMELLSAHRRDRQGGLKKYSRYLSLQTTTLPPAQPAFNLQALGTYFEGLLEGPALARAEGVSTPLAGRGLAERASQQS

SEQ ID NO: 765903 - protein, 204 aa, Homo sapiens [sequence omitted]

SEQ ID NO: 765904 - protein, 566 aa, Homo sapiens
ALQRRALSRHLPFRTAQGTQPTGSRLPFSFSSRTPRSKPRIETKLGSMEPAPARSPRPQQDPARPQEPTMPPPETPSEGRQPSPSPSPTERAPASEEEFQFLRCQQCQAEAKCPKLLPCLHTLCSGCLEASGMQCPICQAPWPLGADTPALDNVFFESLQRRLSVYRQIVDAQAVCTRCKESADFWCFECEQLLCAKCFEAHQWFLKHEARPLAELRNQSVREFLDGTRKTNNIFCSNPNHRTPTLTSIYCRGCSKPLCCSCALLDSSHSELKCDISAEIQQRQEELDAMTQALQEQDSAFGAVHAQMHAAVGQLGRARAETEELIRERVRQVVAHVRAQERELLEAVDARYQRDYEEMASRLGRLDAVLQRIRTGSALVQRMKCYASDQEVLDMHGFLRQALCRLRQEEPQSLQAAVRTDGFDEFKVRLQDLSSCITQGKDAAVSKKASPEAASTPRDPIDVDLPEEAERVKAQVQALGLAEAQPMAVVQSVPGAHPVPVYAFSIKGPSYGEDVSNTTTAQKRKCSQTQCPRKVIKMESEEGKEARLARRQENLNVAIETQSSSS

SEQ ID NO: 765905 - protein, 645 aa, Homo sapiens
ALQRRALSRHLPFRTAQGTQPTGSRLPFSFSSRTPRSKPRIETKLGSMEPAPARSPRPQQDPARPQEPTMPPPETPSEGRQPSPSPSPTERAPASEEEFQFLRCQQCQAEAKCPKLLPCLHTLCSGCLEASGMQCPICQAPWPLGADTPALDNVFFESLQRRLSVYRQIVDAQAVCTRCKESADFWCFECEQLLCAKCFEAHQWFLKHEARPLAELRNQSVREFLDGTRKTNNIFCSNPNHRTPTLTSIYCRGCSKPLCCSCALLDSSHSELKCDISAEIQQRQEELDAMTQALQEQDSAFGAVHAQMHAAVGQLGRARAETEELIRERVRQVVAHVRAQERELLEAVDARYQRDYEEMASRLGRLDAVLQRIRTGSALVQRMKCYASDQEVLDMHGFLRQALCRLRQEEPQSLQAAVRTDGFDEFKVRLQDLSSCITQGKDAAVSKKASPEAASTPRDPIDVDLPEEAERVKAQVQALGLAEAQPMAVVQSVPGAHPVPVYAFSIKGPSYGEDVSNTTTAQKRKCSQTQCPRKVIKMESEEGKEARLARSSPEQPRPSTSKAVSPPHLDGPPSPRSPVIGSEVFLPNSNHVASGAGEAEERVVVISSSEDSDAENSCMEPMETAEPHPRQPTPRQPTPRQSSLC

SEQ ID NO: 765906 - protein, 658 aa, Homo sapiens; identical to SEQ ID NO: 765892

SEQ ID NO: 765907 - protein, 645 aa, Homo sapiens; identical to SEQ ID NO: 765905

SEQ ID NO: 765908 - protein, 680 aa, Homo sapiens
ALQRRALSRHLPFRTAQGTQPTGSRLPFSFSSRTPRSKPRIETKLGSMEPAPARSPRPQQDPARPQEPTMPPPETPSEGRQPSPSPSPTERAPASEEEFQFLRCQQCQAEAKCPKLLPCLHTLCSGCLEASGMQCPICQAPWPLGADTPALDNVFFESLQRRLSVYRQIVDAQAVCTRCKESADFWCFECEQLLCAKCFEAHQWFLKHEARPLAELRNQSVREFLDGTRKTNNIFCSNPNHRTPTLTSIYCRGCSKPLCCSCALLDSSHSELKCDISAEIQQRQEELDAMTQALQEQDSAFGAVHAQMHAAVGQLGRARAETEELIRERVRQVVAHVRAQERELLEAVDARYQRDYEEMASRLGRLDAVLQRIRTGSALVQRMKCYASDQEVLDMHGFLRQALCRLRQEEPQSLQAAVRTDGFDEFKVRLQDLSSCITQGKDAAVSKKASPEAASTPRDPIDVDLPEEAERVKAQVQALGLAEAQPMAVVQSVPGAHPVPVYAFSIKGPSYGEDVSNTTTAQKRKCSQTQCPRKVIKMESEEGKEARLARSSPEQPRPSTSKAVSPPHLDGPPSPRSPVIGSEVFLPNSNHVASGAGEAEERVVVISSSEDSDAENSSSRELDDSSSESSDLQLEGPSTLRVLDENLADPQAEDRPLVFFDLKIDNESGFSWGYPHPFLI

SEQ ID NO: 765909 - protein, 882 aa, Homo sapiens
MEPAPARSPRPQQDPARPQEPTMPPPETPSEGRQPSPSPSPTERAPASEEEFQFLRCQQCQAEAKCPKLLPCLHTLCSGCLEASGMQCPICQAPWPLGADTPALDNVFFESLQRRLSVYRQIVDAQAVCTRCKESADFWCFECEQLLCAKCFEAHQWFLKHEARPLAELRNQSVREFLDGTRKTNNIFCSNPNHRTPTLTSIYCRGCSKPLCCSCALLDSSHSELKCDISAEIQQRQEELDAMTQALQEQDSAFGAVHAQMHAAVGQLGRARAETEELIRERVRQVVAHVRAQERELLEAVDARYQRDYEEMASRLGRLDAVLQRIRTGSALVQRMKCYASDQEVLDMHGFLRQALCRLRQEEPQSLQAAVRTDGFDEFKVRLQDLSSCITQGKDAAVSKKASPEAASTPRDPIDVDLPEEAERVKAQVQALGLAEAQPMAVVQSVPGAHPVPVYAFSIKGPSYGEDVSNTTTAQKRKCSQTQCPRKVIKMESEEGKEARLARSSPEQPRPSTSKAVSPPHLDGPPSPRSPVIGSEVFLPNSNHVASGAGEAEERVVVISSSEDSDAENSSSRELDDSSSESSDLQLEGPSTLRVLDENLADPQAEDRPLVFFDLKIDNETQKISQLAAVNRESKFRVVIQPEALFSIYSKAVSLEVGLQHFLSFLSSMRRPILACYKLWGPGLPNFFRALEDINRLWEFQEAISGFLAALPLIRERVPGASSFKLKNLAQTYLARNMSERSAMAAVLAMRDLCRLLEVSPGPQLAQHVYPFSSLQCFASLQPLVQAAVLPRAEARLLALHNVSFMELLSAHRRDRQGGLKKYSRYLSLQTTTLPPAQPAFNLQALGTYFEGLLEGPALARAEGVSTPLAGRGLAERASQQS

SEQ ID NO: 765910 - protein, 470 aa, Homo sapiens; identical to SEQ ID NO: 765899

SEQ ID NO: 765911 - protein, 882 aa, Homo sapiens; identical to SEQ ID NO: 765909

SEQ ID NO: 765912 - protein, 519 aa, Homo sapiens
TLSLWGTVVDACSPTYFESLQRRLSVYRQIVDAQAVCTRCKESADFWCFECEQLLCAKCFEAHQWFLKHEARPLAELRNQSVREFLDGTRKTNNIFCSNPNHRTPTLTSIYCRGCSKPLCCSCALLDSSHSELKCDISAEIQQRQEELDAMTQALQEQDSAFGAVHAQMHAAVGQLGRARAETEELIRERVRQVVAHVRAQERELLEAVDARYQRDYEEMASRLGRLDAVLQRIRTGSALVQRMKCYASDQEVLDMHGFLRQALCRLRQEEPQSLQAAVRTDGFDEFKVRLQDLSSCITQGKDAAVSKKASPEAASTPRDPIDVDLPEEAERVKAQVQALGLAEAQPMAVVQSVPGAHPVPVYAFSIKGPSYGEDVSNTTTAQKRKCSQTQCPRKVIKMESEEGKEARLARSSPEQPRPSTSKAVSPPHLDGPPSPRSPVIGSEVFLPNSNHVASGAGEAEERVVVISSSEDSDAENSVSGPEVQPRTPASPHFRSQGAQPQQVTLRLALRLGNFPVRH

SEQ ID NO: 765913 - protein, 258 aa, Homo sapiens
MEPMETAEPQSSPAHSSPAHSSPAHSSPVQSLLRAQGASSLPCGTYHPPAWPPHQPAEQAATPDAEPHSEPPDHQERPAVHRGIRYLLYRAQRAIRLRHALRLHPQLHRAPIRTWSPHVVQASTPAITGPLNHPANAQEHPAQLQRGISPPHRIRGAVRSRSRSLRGSSHLSQWLNNFFALPFSSMASQLDMSSVVGAGEGRAQTLGAVVPPGDSVRGSMEASQVQVPLEASPITFPPPCAPERPPISPVPGARQAGL

SEQ ID NO: 765914 - protein, 929 aa, Homo sapiens; identical to SEQ ID NO: 765890

SEQ ID NO: 765915 - protein, 680 aa, Homo sapiens; identical to SEQ ID NO: 765908

SEQ ID NO: 765916 - protein, 169 aa, Homo sapiens
EKRELLLAPGDPYLGHHPIPQHTHSYSVTWSPIRAFPGVLATFPFLVLFYGGARGGLVLNIAVTSLPLLRAKHPSVGPGNCCAACWGGAECGPREGSTKHPLPLSPAGPSGCKYVRCQKRSRRVPVGALLPNESRDVRKRMIEVPRGVAERGIKNCNLKIKALTCSPKD

SEQ ID NO: 765917 - protein, 548 aa, Homo sapiens
MNEGAPGDSDLETEARVPWSIMGHCLRTGQARMSATPTPAGEGARSSSTCSSLSRLFWSQLEHINWDGATAKNFINLREFFSFLLPALRKAQIEIIPCKICGDKSSGIHYGVITCEGCKGFFRRSQQSNATYSCPRQKNCLIDRTSRNRCQHCRLQKCLAVGMSRDAVKFGRMSKKQRDSLYAEVQKHRMQQQQRDHQQQPGEAEPLTPTYNISANGLTELHDDLSNYIDGHTPEGSKADSAVSSFYLDIQPSPDQSGLDINGIKPEPICDYTPASGFFPYCSFTNGETSPTVSMAELEHLAQNISKSHLETCQYLREELQQITWQTFLQEEIENYQNKQREVMWQLCAIKITEAIQYVVEFAKRIDGFMELCQNDQIVLLKAGSLEVVFIRMCRAFDSQNNTVYFDGKYASPDVFKSLGCEDFISFVFEFGKSLCSMHLTEDEIALFSAFVLMSADRSWLQEKVKIEKLQQKIQLALQHVLQKNHREDGILTKLICKVSTLRALCGRHTEKLMAFKAIYPDIVRLHFPPLYKELFTSEFEPAMQIDG

SEQ ID NO: 765918 - protein, 556 aa, Homo sapiens
MNEGAPGDSDLETEARVPWSIMGHCLRTGQARMSATPTPAGEGARRDELFGILQILHQCILSSGDAFVLTGVCCSWRQNGKPPYSQKEDKEVQTGYMNAQIEIIPCKICGDKSSGIHYGVITCEGCKGFFRRSQQSNATYSCPRQKNCLIDRTSRNRCQHCRLQKCLAVGMSRDAVKFGRMSKKQRDSLYAEVQKHRMQQQQRDHQQQPGEAEPLTPTYNISANGLTELHDDLSNYIDGHTPEGSKADSAVSSFYLDIQPSPDQSGLDINGIKPEPICDYTPASGFFPYCSFTNGETSPTVSMAELEHLAQNISKSHLETCQYLREELQQITWQTFLQEEIENYQNKQREVMWQLCAIKITEAIQYVVEFAKRIDGFMELCQNDQIVLLKAGSLEVVFIRMCRAFDSQNNTVYFDGKYASPDVFKSLGCEDFISFVFEFGKSLCSMHLTEDEIALFSAFVLMSADRSWLQEKVKIEKLQQKIQLALQHVLQKNHREDGILTKLICKVSTLRALCGRHTEKLMAFKAIYPDIVRLHFPPLYKELFTSEFEPAMQIDG

SEQ ID NO: 765919 - protein, 386 aa, Homo sapiens
MSRDAVKFGRMSKKQRDSLYAEVQKHRMQQQQRDHQQQPGEAEPLTPTYNISANGLTELHDDLSNYIDGHTPEGSKADSAVSSFYLDIQPSPDQSGLDINGIKPEPICDYTPASGFFPYCSFTNGETSPTVSMAELEHLAQNISKSHLETCQYLREELQQITWQTFLQEEIENYQNKQREVMWQLCAIKITEAIQYVVEFAKRIDGFMELCQNDQIVLLKAGSLEVVFIRMCRAFDSQNNTVYFDGKYASPDVFKSLGCEDFISFVFEFGKSLCSMHLTEDEIALFSAFVLMSADRSWLQEKVKIEKLQQKIQLALQHVLQKNHREDGILTKLICKVSTLRALCGRHTEKLMAFKAIYPDIVRLHFPPLYKELFTSEFEPAMQIDG

SEQ ID NO: 765920 - protein, 579 aa, Homo sapiens
WYHRVALKTEDRGSLGARISSDLYIGKKHGVSSGSPRPRRQRARQQRRGRGRRLQGDPAEPGIRPQERAACPGAQTELFQHQQRYLSNEEDTYMAGMVQSASLHSLAHELVPGPEGPTLEAAQIEIIPCKICGDKSSGIHYGVITCEGCKGFFRRSQQSNATYSCPRQKNCLIDRTSRNRCQHCRLQKCLAVGMSRDAVKFGRMSKKQRDSLYAEVQKHRMQQQQRDHQQQPGEAEPLTPTYNISANGLTELHDDLSNYIDGHTPEGSKADSAVSSFYLDIQPSPDQSGLDINGIKPEPICDYTPASGFFPYCSFTNGETSPTVSMAELEHLAQNISKSHLETCQYLREELQQITWQTFLQEEIENYQNKQREVMWQLCAIKITEAIQYVVEFAKRIDGFMELCQNDQIVLLKAGSLEVVFIRMCRAFDSQNNTVYFDGKYASPDVFKSLGCEDFISFVFEFGKSLCSMHLTEDEIALFSAFVLMSADRSWLQEKVKIEKLQQKIQLALQHVLQKNHREDGILTKLICKVSTLRALCGRHTEKLMAFKAIYPDIVRLHFPPLYKELFTSEFEPAMQIDG

SEQ ID NO: 765921 - protein, 534 aa, Homo sapiens
MTQALRSSWPRSPWFIHIPRKLCSSYCKQTPGGILRSKDLGKVITSFFLDHLLQLMQPKTAISSFTGISVTKKTHTSQIEIIPCKICGDKSSGIHYGVITCEGCKGFFRRSQQSNATYSCPRQKNCLIDRTSRNRCQHCRLQKCLAVGMSRDAVKFGRMSKKQRDSLYAEVQKHRMQQQQRDHQQQPGEAEPLTPTYNISANGLTELHDDLSNYIDGHTPEGSKADSAVSSFYLDIQPSPDQSGLDINGIKPEPICDYTPASGFFPYCSFTNGETSPTVSMAELEHLAQNISKSHLETCQYLREELQQITWQTFLQEEIENYQNKQREVMWQLCAIKITEAIQYVVEFAKRIDGFMELCQNDQIVLLKAGSLEVVFIRMCRAFDSQNNTVYFDGKYASPDVFKSLGCEDFISFVFEFGKSLCSMHLTEDEIALFSAFVLMSADRSWLQEKVKIEKLQQKIQLALQHVLQKNHREDGILTKLICKVSTLRALCGRHTEKLMAFKAIYPDIVRLHFPPLYKELFTSEFEPAMQIDG

SEQ ID NO: 765922 - protein, 551 aa, Homo sapiens
WYHRVALKTEEEGVSELASPAISTLGKNMESAPAAPDPAASEPGSSGADAAAGSRETPLNQESARKSEPPAPVRRQSYSSTSRGISVTKKTHTSQIEIIPCKICGDKSSGIHYGVITCEGCKGFFRRSQQSNATYSCPRQKNCLIDRTSRNRCQHCRLQKCLAVGMSRDAVKFGRMSKKQRDSLYAEVQKHRMQQQQRDHQQQPGEAEPLTPTYNISANGLTELHDDLSNYIDGHTPEGSKADSAVSSFYLDIQPSPDQSGLDINGIKPEPICDYTPASGFFPYCSFTNGETSPTVSMAELEHLAQNISKSHLETCQYLREELQQITWQTFLQEEIENYQNKQREVMWQLCAIKITEAIQYVVEFAKRIDGFMELCQNDQIVLLKAGSLEVVFIRMCRAFDSQNNTVYFDGKYASPDVFKSLGCEDFISFVFEFGKSLCSMHLTEDEIALFSAFVLMSADRSWLQEKVKIEKLQQKIQLALQHVLQKNHREDGILTKLICKVSTLRALCGRHTEKLMAFKAIYPDIVRLHFPPLYKELFTSEFEPAMQIDG

SEQ ID NO: 765923 - protein, 468 aa, Homo sapiens
MMYFVIAAMKAQIEIIPCKICGDKSSGIHYGVITCEGCKGFFRRSQQSNATYSCPRQKNCLIDRTSRNRCQHCRLQKCLAVGMSRDAVKFGRMSKKQRDSLYAEVQKHRMQQQQRDHQQQPGEAEPLTPTYNISANGLTELHDDLSNYIDGHTPEGSKADSAVSSFYLDIQPSPDQSGLDINGIKPEPICDYTPASGFFPYCSFTNGETSPTVSMAELEHLAQNISKSHLETCQYLREELQQITWQTFLQEEIENYQNKQREVMWQLCAIKITEAIQYVVEFAKRIDGFMELCQNDQIVLLKAGSLEVVFIRMCRAFDSQNNTVYFDGKYASPDVFKSLGCEDFISFVFEFGKSLCSMHLTEDEIALFSAFVLMSADRSWLQEKVKIEKLQQKIQLALQHVLQKNHREDGILTKLICKVSTLRALCGRHTEKLMAFKAIYPDIVRLHFPPLYKELFTSEFEPAMQIDG

SEQ ID NO: 765924 - protein, 318 aa, Homo sapiens
WYHRVALKTEEEGVSELASPAISTLGKNMESAPAAPDPAASEPGSSGADAAAGSRETPLNQESARKSEPPAPVRRQSYSSTSRGISVTKKTHTSQIEIIPCKICGDKSSGIHYGVITCEGCKGFFRRSQQSNATYSCPRQKNCLIDRTSRNRCQHCRLQKCLAVGMSRDAVKFGRMSKKQRDSLYAEVQKHRMQQQQRDHQQQPGEAEPLTPTYNISANGLTELHDDLSNYIDGHTPEGSKADSAVSSFYLDIQPSPDQSGLDINGIKPEPICDYTPASGFFPYCSFTNGETSPTVSMAELGNGMHASPGMLYSCPLK

SEQ ID NO: 765925 - protein, 377 aa, Homo sapiens
WYHRVALKTEEEGVSELASPAISTLGKNMESAPAAPDPAASEPGSSGADAAAGSRETPLNQESARKSEPPAPVRRQSYSSTSRGISVTKKTHTSQIEIIPCKICGDKSSGIHYGVITCEGCKGFFRRSQQSNATYSCPRQKNCLIDRTSRNRCQHCRLQKCLAVGMSRDAVKFGRMSKKQRDSLYAEVQKHRMQQQQRDHQQQPGEAEPLTPTYNISANGLTELHDDLSNYIDGHTPEGSKADSAVSSFYLDIQPSPDQSGLDINGIKPEPICDYTPASGFFPYCSFTNGETSPTVSMAELEHLAQNISKSHLETCQYLREELQQITWQTFLQEEIENYQNKQREVMWQLCAIKITEAIQYVVEFAIGRGCTGSIRI

SEQ ID NO: 765926 - protein, 363 aa, Homo sapiens [sequence omitted]

SEQ ID NO: 765927 - protein, 363 aa, Homo sapiens [sequence omitted]

SEQ ID NO: 765928 - protein, 363 aa, Homo sapiens [sequence omitted]

SEQ ID NO: 765929 - protein, 197 aa, Homo sapiens
MSATGDRHPTQGDQEAPVSQEGAQAEAAGAGNQEGGDSGPDSSDVVPAAEVVGVAGPVEGLGEEEGEQAAGLAAVPRGGSAEEDSDIGPATEEEEEEEEGNEAANFDLAVVARRYPAAGIHFVLLDMVHSLLRRLYHNDHIQIANRHLSRLMVGPHAAVPNLWDNPPLLLLSQRLGAGAAAPEGEGLGLIQEAASVQ

SEQ ID NO: 765930 - protein, 872 aa, Homo sapiens
MNLIVKLRRSFRTLIVLLATFCLVSIVISAYFLYSGYKQEMTLIETTAEAECTDIKILPYRSMELKTVKPIDTSKTDPTVLLFVESQYSQLGQDIIAILESSRFQYHMVIAPGKGDIPPLTDNGKGKYTLVIYENILKYVSMDSWNRELLEKYCVEYSVSIIGFHKANENSLPSTQLKGFPLNLFNNLALKDCFVNPQSPLLHITKAPKVEKGPLPGEDWTIFQYNHSTYQPVLLTELQTEKSLSSLSSKTLFATVIQDLGLHDGIQRVLFGNNLNFWLHKLIFIDAISFLSGKRLTLSLDRYILVDIDDIFVGKEGTRMNVKDVKALLETQNLLRTQVANFTFNLGFSGKFYHTGTEEEDEGDDLLLRSVDEFWWFPHMWSHMQPHLFHNESSLVEQMILNKEFALEHGIPINMGYAVAPHHSGVYPVHIQLYAAWKKVWGIQVTSTEEYPHLKPARYRKGFIHNSIMVLPRQTCGLFTHTIFYKEYPGGPQELDKSIRGGELFLTILLNPISIFMTHLSNYGNDRLGLYTFVNLVNFVQSWTNLKLQTLPPVQLAHQYFELFPEQKDPLWQNPCDDKRHKDIWSREKTCDHLPKFLVIGPQKTGTTALYLFLLMHPSIISNLPSPKTFEEVQFFNGNNYHKGIDWYMDFFPTPSNTTSDFLFEKSANYFHSEEAPRRAASLVPKAKIITILIDPSDRAYSWYQHQRSHEDPAALRFNFYEVISTGHWAPSDLKTLQRRCLVPGWYAVHIERWLTYFATSQLLIIDGQQLRSDPATVMDEVQKFLGVTPRYNYSEALTFDPQKGFWCQLLEGGKTKCLGKSKGRKYPPMDPESRTFLSNYYRDHNVELSKLLHRLGQPLPSWLRQELQKVR

SEQ ID NO: 765931 - protein, 71 aa, Homo sapiens
KVCSFTPEPARPRTNQKEETPNTSEHQKEQTPDTPPLRTVTLTGRVRSFILEVSETKNPPIPDTLISHSQK

SEQ ID NO: 765932 - protein, 71 aa, Homo sapiens; identical to SEQ ID NO: 765931

SEQ ID NO: 765933 - protein, 3434 aa, Homo sapiens
RGEGRGGEGARGRGSGARILGGAAVQEAAPGRQRTDRSTAKGARTDGGCPEGIAGLGDSDSDDARPQAPRERALPGGLTAAGRRPSTGRGSPRRAEVREPELEPGPQWDLTQSLRSSWAQSLAWSWSPRHSWTTLVMQKELGIVPSCPGMKSPRPHLLLPLLLLLLLLLGAGVPGAWGQAGSLDLQIDEEQPAGTLIGDISAGLPAGTAAPLMYFISAQEGSGVGTDLAIDEHSGVVRTARVLDREQRDRYRFTAVTPDGATVEVTVRVADINDHAPAFPQARAALQVPEHTAFGTRYPLEPARDADAGRLGTQGYALSGDGAGETFRLETRPGPDGTPVPELVVTGELDRENRSHYMLQLEAYDGGSPPRRAQALLDVTLLDINDHAPAFNQSRYHAVVSESLAPGSPVLQVFASDADAGVNGAVTYEINRRQSEGDGPFSIDAHTGLLQLERPLDFEQRRVHELVVQARDGGAHPELGSAFVTVHVRDANDNQPSMTVIFLSADGSPQVSEAAPPGQLVARISVSDPDDGDFAHVNVSLEGGEGHFALSTQDSVIYLVCVARRLDREERDAYNLRVTATDSGSPPLRAEAAFVLHVTDVNDNAPAFDRQLYRPEPLPEVALPGSFVVRVTARDPDQGTNGQVTYSLAPGAHTHWFSIDPTSGIITTAASLDYELEPQPQLIVVATDGGLPPLASSATVSVALQDVNDNEPQFQRTFYNASLPEGTQPGTCFLQVTATDADSGPFGLLSYSLGAGLGSSGSPPFRIDAHSGDVCTTRTLDRDQGPSSFDFTVTAVDGGGLKSMVYVKVFLSDENDNPPQFYPREYAASISAQSPPGTAVLRLRAHDPDQGSHGRLSYHILAGNSPPLFTLDEQSGLLTVAWPLARRANSVVQLEIGAEDGGGLQAEPSARVDISIVPGTPTPPIFEQLQYVFSVPEDVAPGTSVGIVQAHNPPGRLAPVTLSLSGGDPRGLFSLDAVSGLLQTLRPLDRELLGPVLELEVRAGSGVPPAFAVARVRVLLDDVNDNSPAFPAPEDTVLLPPNTAPGTPIYTLRALDPDSGVNSRVTFTLLAGGGGAFTVDPTTGHVRLMRPLGPSGGPAHELELEARDGGSPPRTSHFRLRVVVQDVGTRGLAPRFNSPTYRVDLPSGTTAGTQVLQVQAQAPDGGPITYHLAAEGASSPFGLEPQSGWLWVRAALDREAQELYILKVMAVSGSKAELGQQTGTATVRVSILNQNEHSPRLSEDPTFLAVAENQPPGTSVGRVFATDRDSGPNGRLTYSLQQLSEDSKAFRIHPQTGEVTTLQTLDREQQSSYQLLVQVQDGGSPPRSTTGTVHVAVLDLNDNSPTFLQASGAAGGGLPIQVPDRVPPGTLVTTLQAKDPDEGENGTILYTLTGPGSELFSLHPHSGELLTAAPLIRAERPHYVLTLSAHDQGSPPRSASLQLLVQVLPSARLAEPPPDLAERDPAAPVPVVLTVTAAEGLRPGSLLGSVAAPEPAGVGALTYTLVGGADPEGTFALDAASGRLYLARPLDFEAGPPWRALTVRAEGPGGAGARLLRVQVQVQDENEHAPAFARDPLALALPENPEPGAALYTFRASDADGPGPNSDVRYRLLRQEPPVPALRLDARTGALSAPRGLDRETTPALLLLVEATDRPANASRRRAARVSARVFVTDENDNAPVFASPSRVRLPEDQPPGPAALHVVARDPDLGEAARVSYRLASGGDGHFRLHSSTGALSVVRPLDREQRAEHVLTVVASDHGSPPRSATQVLTVSVADVNDEAPTFQQQEYSVLLRENNPPGTSLLTLRATDPDVGANGQVTYGGVSSESFSLDPDTGVLTTLRALDREEQEEINLTVYAQDRGSPPQLTHVTVRVAVEDENDHAPTFGSAHLSLEVPEGQDPQTLTMLRASDPDVGANGQLQYRILDGDPSGAFVLDLASGEFGTMRPLDREVEPAFQLRIEARDGGQPALSATLLLTVTVLDANDHAPAFPVPAYSVEVPEDVPAGTLLLQLQAHDPDAGANGHVTYYLGAGTAGAFLLEPSSGELRTAAALDREQCPSYTFSVSAVDGAAAGPLSTTVSVTITVRDVNDHAPTFPTSPLRLRLPRPGPSFSTPTLALATLRAEDRDAGANASILYRLAGTPPPGTTVDSYTGEIRVARSPVALGPRDRVLFIVATDLGRPARSATGVIIVGLQGEAERGPRFPRASSEATIRENAPPGTPIVSPRAVHAGGTNGPITYSILSGNEKGTFSIQPSTGAITVRSAEGLDFEVSPRLRLVLQAESGGAFAFTVLTLTLQDANDNAPRFLRPHYVAFLPESRPLEGPLLQVEADDLDQGSGGQISYSLAASQPARGLFHVDPTTGTITTTAILDREIWAETRLVLMATDRGSPALVGSATLTVMVIDTNDNRPTIPQPWELRVSEDALLGSEIAQVTGNDVDSGPVLWYVLSPSGPQDPFSVGRYGGRVSLTGPLDFEQCDRYQLQLLAHDGPHEGCANLTVLVEDVNDNAPAFSQSLYQVMLLEHTPPGSAILSVSATDRDSGANGHISYHLASPADGFSVDPNNGTLFTIVGTVALGHDGSGAVDVVLEARDHGAPGRAARATVHVQLQDQNDHAPSFTLSHYRVAVTEDLPPGSTLLTLEATDADGSRSHAAVDYSIISGNWGRVFQLEPRLAEAGESAGPGPRALGCLVLLEPLDFESLTQYNLTVAAADRGQPPQSSVVPVTVTVLDVNDNPPVFTRASYRVTVPEDTPVGAELLHVEASDADPGPHGLVRFTVSSGDPSGLFELDESSGTLRLAHALDCETQARHQLVVQAADPAGAHFALAPVTIEVQDVNDHGPAFPLNLLSTSVAENQPPGTLVTTLHAIDGDAGAFGRLRYSLLEAGPGPEGREAFALNSSTGELRARVPFDYEHTESFRLLVGAADAGNLSASVTVSVLVTGEDEYDPVFLAPAFHFQVPEGARRGHSLGHVQATDEDGGADGLVLYSLATSSPYFGINQTTGALYLRVDSRAPGSGTATSGGGGRTRREAPRELRLEVIARGPLPGSRSATVPVTVDITHTALGLAPDLNLLLVGAVAASLGVVVVLALAALVLGLVRARSRKAEAAPGPMSQAAPLASDSLQKLGREPPSPPPSEHLYHQTLPSYGGPGAGGPYPRGGSLDPSHSSGRGSAEAAEDDEIRMINEFPRVASVASSLAARGPDSGIQQDADGLSDTSCEPPAPDTWYKGRKAGLLLPGAGATLYREEGPPATATAFLGGCGLSPAPTGDYGFPADGKPCVAGALTAIVAGEEELRGSYNWDYLLSWCPQFQPLASVFTEIARLKDEARPCPPAPRIDPPPLITAVAHPGAKSVPPKPANTAAARAIFPPASHRSPISHEGSLSSAAMSPSFSPSLSPLAARSPVVSPFGVAQGPSASALSAESGLEPPDDTELHI

SEQ ID NO: 765934 - protein, 3472 aa, Homo sapiens
RGEGRGGEGARGRGSGARILGGAAVQEAAPGRQRTDRSTAKGARTDGGCPEGIAGLGDSDSDDARPQAPRERALPGGLTAAGRRPSTGRGSPRRAEVREPELEPGPQWDLTQSLRSSWAQSLAWSWSPRHSWTTLVMQKELGIVPSCPGMKSPRPHLLLPLLLLLLLLLGAGVPGAWGQAGSLDLQIDEEQPAGTLIGDISAGLPAGTAAPLMYFISAQEGSGVGTDLAIDEHSGVVRTARVLDREQRDRYRFTAVTPDGATVEVTVRVADINDHAPAFPQARAALQVPEHTAFGTRYPLEPARDADAGRLGTQGYALSGDGAGETFRLETRPGPDGTPVPELVVTGELDRENRSHYMLQLEAYDGGSPPRRAQALLDVTLLDINDHAPAFNQSRYHAVVSESLAPGSPVLQVFASDADAGVNGAVTYEINRRQSEGDGPFSIDAHTGLLQLERPLDFEQRRVHELVVQARDGGAHPELGSAFVTVHVRDANDNQPSMTVIFLSADGSPQVSEAAPPGQLVARISVSDPDDGDFAHVNVSLEGGEGHFALSTQDSVIYLVCVARRLDREERDAYNLRVTATDSGSPPLRAEAAFVLHVTDVNDNAPAFDRQLYRPEPLPEVALPGSFVVRVTARDPDQGTNGQVTYSLAPGAHTHWFSIDPTSGIITTAASLDYELEPQPQLIVVATDGGLPPLASSATVSVALQDVNDNEPQFQRTFYNASLPEGTQPGTCFLQVTATDADSGPFGLLSYSLGAGLGSSGSPPFRIDAHSGDVCTTRTLDRDQGPSSFDFTVTAVDGGGLKSMVYVKVFLSDENDNPPQFYPREYAASISAQSPPGTAVLRLRAHDPDQGSHGRLSYHILAGNSPPLFTLDEQSGLLTVAWPLARRANSVVQLEIGAEDGGGLQAEPSARVDISIVPGTPTPPIFEQLQYVFSVPEDVAPGTSVGIVQAHNPPGRLAPVTLSLSGGDPRGLFSLDAVSGLLQTLRPLDRELLGPVLELEVRAGSGVPPAFAVARVRVLLDDVNDNSPAFPAPEDTVLLPPNTAPGTPIYTLRALDPDSGVNSRVTFTLLAGGGGAFTVDPTTGHVRLMRPWLPDSTALPTVWTCPQAPLLELRSCKCRPKHQMGALSPITLQQREQVAPLAWSHRVGWLWVRAALDREAQELYILKVMAVSGSKAELGQQTGTATVRVSILNQNEHSPRLSEDPTFLAVAENQPPGTSVGRVFATDRDSGPNGRLTYSLQQLSEDSKAFRIHPQTGEVTTLQTLDREQQSSYQLLVQVQDGGSPPRSTTGTVHVAVLDLNDNSPTFLQASGAAGGGLPIQVPDRVPPGTLVTTLQAKDPDEGENGTILYTLTGPGSELFSLHPHSGELLTAAPLIRAERPHYVLTLSAHDQGSPPRSASLQLLVQVLPSARLAEPPPDLAERDPAAPVPVVLTVTAAEGLRPGSLLGSVAAPEPAGVGALTYTLVGGADPEGTFALDAASGRLYLARPLDFEAGPPWRALTVRAEGPGGAGARLLRVQVQVQDENEHAPAFARDPLALALPENPEPGAALYTFRASDADGPGPNSDVRYRLLRQEPPVPALRLDARTGALSAPRGLDRETTPALLLLVEATDRPANASRRRAARVSARVFVTDENDNAPVFASPSRVRLPEDQPPGPAALHVVARDPDLGEAARVSYRLASGGDGHFRLHSSTGALSVVRPLDREQRAEHVLTVVASDHGSPPRSATQVLTVSVADVNDEAPTFQQQEYSVLLRENNPPGTSLLTLRATDPDVGANGQVTYGGVSSESFSLDPDTGVLTTLRALDREEQEEINLTVYAQDRGSPPQLTHVTVRVAVEDENDHAPTFGSAHLSLEVPEGQDPQTLTMLRASDPDVGANGQLQYRILDGDPSGAFVLDLASGEFGTMRPLDREVEPAFQLRIEARDGGQPALSATLLLTVTVLDANDHAPAFPVPAYSVEVPEDVPAGTLLLQLQAHDPDAGANGHVTYYLGAGTAGAFLLEPSSGELRTAAALDREQCPSYTFSVSAVDGAAAGPLSTTVSVTITVRDVNDHAPTFPTSPLRLRLPRPGPSFSTPTLALATLRAEDRDAGANASILYRLAGTPPPGTTVDSYTGEIRVARSPVALGPRDRVLFIVATDLGRPARSATGVIIVGLQGEAERGPRFPRASSEATIRENAPPGTPIVSPRAVHAGGTNGPITYSILSGNEKGTFSIQPSTGAITVRSAEGLDFEVSPRLRLVLQAESGGAFAFTVLTLTLQDANDNAPRFLRPHYVAFLPESRPLEGPLLQVEADDLDQGSGGQISYSLAASQPARGLFHVDPTTGTITTTAILDREIWAETRLVLMATDRGSPALVGSATLTVMVIDTNDNRPTIPQPWELRVSEDALLGSEIAQVTGNDVDSGPVLWYVLSPSGPQDPFSVGRYGGRVSLTGPLDFEQCDRYQLQLLAHDGPHEGCANLTVLVEDVNDNAPAFSQSLYQVMLLEHTPPGSAILSVSATDRDSGANGHISYHLASPADGFSVDPNNGTLFTIVGTVALGHDGSGAVDVVLEARDHGAPGRAARATVHVQLQDQNDHAPSFTLSHYRVAVTEDLPPGSTLLTLEATDADGSRSHAAVDYSIISGNWGRVFQLEPRLAEAGESAGPGPRALGCLVLLEPLDFESLTQYNLTVAAADRGQPPQSSVVPVTVTVLDVNDNPPVFTRASYRVTVPEDTPVGAELLHVEASDADPGPHGLVRFTVSSGDPSGLFELDESSGTLRLAHALDCETQARHQLVVQAADPAGAHFALAPVTIEVQDVNDHGPAFPLNLLSTSVAENQPPGTLVTTLHAIDGDAGAFGRLRYSLLEAGPGPEGREAFALNSSTGELRARVPFDYEHTESFRLLVGAADAGNLSASVTVSVLVTGEDEYDPVFLAPAFHFQVPEGARRGHSLGHVQATDEDGGADGLVLYSLATSSPYFGINQTTGALYLRVDSRAPGSGTATSGGGGRTRREAPRELRLEVIARGPLPGSRSATVPVTVDITHTALGLAPDLNLLLVGAVAASLGVVVVLALAALVLGLVRARSRKAEAAPGPMSQAAPLASDSLQKLGREPPSPPPSEHLYHQTLPSYGGPGAGGPYPRGGSLDPSHSSGRGSAEAAEDDEIRMINEFPRVASVASSLAARGPDSGIQQDADGLSDTSCEPPAPDTWYKGRKAGLLLPGAGATLYREEGPPATATAFLGGCGLSPAPTGDYGFPADGKPCVAGALTAIVAGEEELRGSYNWDYLLSWCPQFQPLASVFTEIARLKDEAWPTQEPSLCPPSQQTQLQPGPSSHQLLTAPPSAMKAPCPQLPCPPASHPLCLLWLLAHPLSHHLGWPRVPQPQHSAQSLAWSHLMTRSCTSSCGPGWAPTWDAHSVPNAGPTLSLPWAASDYDWLRGGHHQAPALHPELPSPLRVLGPQKPCCSLTCDQVQCGEKYEGGSSPGFSSVRDPCPAPAP

SEQ ID NO: 765935 - protein, 3394 aa, Homo sapiens
RGEGRGGEGARGRGSGARILGGAAVQEAAPGRQRTDRSTAKGARTDGGCPEGIAGLGDSDSDDARPQAPRERALPGGLTAAGRRPSTGRGSPRRAEVREPELEPGPQWDLTQSLRSSWAQSLAWSWSPRHSWTTLVMQKELGIVPSCPGMKSPRPHLLLPLLLLLLLLLGAGVPGAWGQAGSLDLQIDEEQPAGTLIGDISAGLPAGTAAPLMYFISAQEGSGVGTDLAIDEHSGVVRTARVLDREQRDRYRFTAVTPDGATVEVTVRVADINDHAPAFPQARAALQVPEHTAFGTRYPLEPARDADAGRLGTQGYALSGDGAGETFRLETRPGPDGTPVPELVVTGELDRENRSHYMLQLEAYDGGSPPRRAQALLDVTLLDINDHAPAFNQSRYHAVVSESLAPGSPVLQVFASDADAGVNGAVTYEINRRQSEGDGPFSIDAHTGLLQLERPLDFEQRRVHELVVQARDGGAHPELGSAFVTVHVRDANDNQPSMTVIFLSADGSPQVSEAAPPGQLVARISVSDPDDGDFAHVNVSLEGGEGHFALSTQDSVIYLVCVARRLDREERDAYNLRVTATDSGSPPLRAEAAFVLHVTDVNDNAPAFDRQLYRPEPLPEVALPGSFVVRVTARDPDQGTNGQVTYSLAPGAHTHWFSIDPTSGIITTAASLDYELEPQPQLIVVATDGGLPPLASSATVSVALQDVNDNEPQFQRTFYNASLPEGTQPGTCFLQVTATDADSGPFGLLSYSLGAGLGSSGSPPFRIDAHSGDVCTTRTLDRDQGPSSFDFTVTAVDGGGLKSMVYVKVFLSDENDNPPQFYPREYAASISAQSPPGTAVLRLRAHDPDQGSHGRLSYHILAGNSPPLFTLDEQSGLLTVAWPLARRANSVVQLEIGAEDGGGLQAEPSARVDISIVPGTPTPPIFEQLQYVFSVPEDVAPGTSVGIVQAHNPPGRLAPVTLSLSGGDPRGLFSLDAVSGLLQTLRPLDRELLGPVLELEVRAGSGVPPAFAVARVRVLLDDVNDNSPAFPAPEDTVLLPPNTAPGTPIYTLRALDPDSGVNSRVTFTLLAGGGGAFTVDPTTGHVRLMRPWLPDSTALPTVWTCPQAPLLELRSCKCRPKHQMGALSPITLQQREQVAPLAWSHRVGWLWVRAALDREAQELYILKVMAVSGSKAELGQQTGTATVRVSILNQNEHSPRLSEDPTFLAVAENQPPGTSVGRVFATDRDSGPNGRLTYSLQQLSEDSKAFRIHPQTGEVTTLQTLDREQQSSYQLLVQVQDGGSPPRSTTGTVHVAVLDLNDNSPTFLQASGAAGGGLPIQVPDRVPPGTLVTTLQAKDPDEGENGTILYTLTGPGSELFSLHPHSGELLTAAPLIRAERPHYVLTLSAHDQGSPPRSASLQLLVQVLPSARLAEPPPDLAERDPAAPVPVVLTVTAAEGLRPGSLLGSVAAPEPAGVGALTYTLVGGADPEGTFALDAASGRLYLARPLDFEAGPPWRALTVRAEGPGGAGARLLRVQVQVQDENEHAPAFARDPLALALPENPEPGAALYTFRASDADGPGPNSDVRYRLLRQEPPVPALRLDARTGALSAPRGLDRETTPALLLLVEATDRPANASRRRAARVSARVFVTDENDNAPVFASPSRVRLPEDQPPGPAALHVVARDPDLGEAARVSYRLASGGDGHFRLHSSTGALSVVRPLDREQRAEHVLTVVASDHGSPPRSATQVLTVSVADVNDEAPTFQQQEYSVLLRENNPPGTSLLTLRATDPDVGANGQVTYGGVSSESFSLDPDTGVLTTLRALDREEQEEINLTVYAQDRGSPPQLTHVTVRVAVEDENDHAPTFGSAHLSLEVPEGQDPQTLTMLRASDPDVGANGQLQYRILDGDPSGAFVLDLASGEFGTMRPLDREVEPAFQLRIEARDGGQPALSATLLLTVTVLDANDHAPAFPVPAYSVEVPEDVPAGTLLLQLQAHDPDAGANGHVTYYLGAGTAGAFLLEPSSGELRTAAALDREQCPSYTFSVSAVDGAAAGPLSTTVSVTITVRDVNDHAPTFPTSPLRLRLPRPGPSFSTPTLALATLRAEDRDAGANASILYRLAGTPPPGTTVDSYTGEIRVARSPVALGPRDRVLFIVATDLGRPARSATGVIIVGLQGEAERGPRFPRASSEATIRENAPPGTPIVSPRAVHAGGTNGPITYSILSGNEKGTFSIQPSTGAITVRSAEGLDFEVSPRLRLVLQAESGGAFAFTVLTLTLQDANDNAPRFLRPHYVAFLPESRPLEGPLLQVEADDLDQGSGGQISYSLAASQPARGLFHVDPTTGTITTTAILDREIWAETRLVLMATDRGSPALVGSATLTVMVIDTNDNRPTIPQPWELRVSEDALLGSEIAQVTGNDVDSGPVLWYVLSPSGPQDPFSVGRYGGRVSLTGPLDFEQCDRYQLQLLAHDGPHEGCANLTVLVEDVNDNAPAFSQSLYQVMLLEHTPPGSAILSVSATDRDSGANGHISYHLASPADGFSVDPNNGTLFTIVGTVALGHDGSGAVDVVLEARDHGAPGRAARATVHVQLQDQNDHAPSFTLSHYRVAVTEDLPPGSTLLTLEATDADGSRSHAAVDYSIISGNWGRVFQLEPRLAEAGESAGPGPRALGCLVLLEPLDFESLTQYNLTVAAADRGQPPQSSVVPVTVTVLDVNDNPPVFTRASYRVTVPEDTPVGAELLHVEASDADPGPHGLVRFTVSSGDPSGLFELDESSGTLRLAHALDCETQARHQLVVQAADPAGAHFALAPVTIEVQDVNDHGPAFPLNLLSTSVAENQPPGTLVTTLHAIDGDAGAFGRLRYSLLEAGPGPEGREAFALNSSTGELRARVPFDYEHTESFRLLVGAADAGNLSASVTVSVLVTGEDEYDPVFLAPAFHFQVPEGARRGHSLGHVQATDEDGGADGLVLYSLATSSPYFGINQTTGALYLRVDSRAPGSGTATSGGGGRTRREAPRELRLEVIARGPLPGSRSATVPVTVDITHTALGLAPDLNLLLVGAVAASLGVVVVLALAALVLGLVRARSRKAEAAPGPMSQAAPLASDSLQKLGREPPSPPPSEHLYHQTLPSYGGPGAGGPYPRGGSLDPSHSSGRGSAEAAEDDEIRMINEFPRVASVASSLAARGPDSGIQQDADGLSDTSCEPPAPDTWYKGRKAGLLLPGAGATLYREEGPPATATAFLGGCGLSPAPTGDYGFPADGKPCVAGALTAIVAGEEELRGSYNWDYLLSWCPQFQPLASVFTEIARLKDEARPCPPAPRIDPPPLITAVAHPGAKSVPPKPANTAAARAIFPPASHRSPISHEGSLSSAAMSPSFSPSLSPLAARSPVVSPFGVAQGPSASALSAESGLEPPDDTELHI

SEQ ID NO: 765936 - protein, 2882 aa, Homo sapiens
RGEGRGGEGARGRGSGARILGGAAVQEAAPGRQRTDRSTAKGARTDGGCPEGIAGLGDSDSDDARPQAPRERALPGGLTAAGRRPSTGRGSPRRAEVREPELEPGPQWDLTQSLRSSWAQSLAWSWSPRHSWTTLVMQKELGIVPSCPGMKSPRPHLLLPLLLLLLLLLGAGVPGAWGQAGSLDLQIDEEQPAGTLIGDISAGLPAGTAAPLMYFISAQEGSGVGTDLAIDEHSGVVRTARVLDREQRDRYRFTAVTPDGATVEVTVRVADINDHAPAFPQARAALQVPEHTAFGTRYPLEPARDADAGRLGTQGYALSGDGAGETFRLETRPGPDGTPVPELVVTGELDRENRSHYMLQLEAYDGGSPPRRAQALLDVTLLDINDHAPAFNQSRYHAVVSESLAPGSPVLQVFASDADAGVNGAVTYEINRRQSEGDGPFSIDAHTGLLQLERPLDFEQRRVHELVVQARDGGAHPELGSAFVTVHVRDANDNQPSMTVIFLSADGSPQVSEAAPPGQLVARISVSDPDDGDFAHVNVSLEGGEGHFALSTQDSVIYLVCVARRLDREERDAYNLRVTATDSGSPPLRAEAAFVLHVTDVNDNAPAFDRQLYRPEPLPEVALPGSFVVRVTARDPDQGTNGQVTYSLAPGAHTHWFSIDPTSGIITTAASLDYELEPQPQLIVVATDGGLPPLASSATVSVALQDVNDNEPQFQRTFYNASLPEGTQPGTCFLQVTATDADSGPFGLLSYSLGAGLGSSGSPPFRIDAHSGDVCTTRTLDRDQGPSSFDFTVTAVDGGGLKSMVYVKVFLSDENDNPPQFYPREYAASISAQSPPGTAVLRLRAHDPDQGSHGRLSYHILAGNSPPLFTLDEQSGLLTVAWPLARRANSVVQLEIGAEDGGGLQAEPSARVDISIVPGTPTPPIFEQLQYVFSVPEDVAPGTSVGIVQAHNPPGRLAPVTLSLSGGDPRGLFSLDAVSGLLQTLRPLDRELLGPVLELEVRAGSGVPPAFAVARVRVLLDDVNDNSPAFPAPEDTVLLPPNTAPGTPIYTLRALDPDSGVNSRVTFTLLAGGGGAFTVDPTTGHVRLMRPWLPDSTALPTVWTCPQAPLLELRSCKCRPKHQMGALSPITLQQREQVAPLAWSHRVGWLWVRAALDREAQELYILKVMAVSGSKAELGQQTGTATVRVSILNQNEHSPRLSEDPTFLAVAENQPPGTSVGRVFATDRDSGPNGRLTYSLQQLSEDSKAFRIHPQTGEVTTLQTLDREQQSSYQLLVQVQDGGSPPRSTTGTVHVAVLDLNDNSPTFLQASGAAGGGLPIQVPDRVPPGTLVTTLQAKDPDEGENGTILYTLTGPGSELFSLHPHSGELLTAAPLIRAERPHYVLTLSAHDQGSPPRSASLQLLVQVLPSARLAEPPPDLAERDPAAPVPVVLTVTAAEGLRPGSLLGSVAAPEPAGVGALTYTLVGGADPEGTFALDAASGRLYLARPLDFEAGPPWRALTVRAEGPGGAGARLLRVQVQVQDENEHAPAFARDPLALALPENPEPGAALYTFRASDADGPGPNSDVRYRLLRQEPPVPALRLDARTGALSAPRGLDRETTPALLLLVEATDRPANASRRRAARVSARVFVTDENDNAPVFASPSRVRLPEDQPPGPAALHVVARDPDLGEAARVSYRLASGGDGHFRLHSSTGALSVVRPLDREQRAEHVLTVVASDHGSPPRSATQVLTVSVADVNDEAPTFQQQEYSVLLRENNPPGTSLLTLRATDPDVGANGQVTYGGVSSESFSLDPDTGVLTTLRALDREEQEEINLTVYAQDRGSPPQLTHVTVRVAVEDENDHAPTFGSAHLSLEVPEGQDPQTLTMLRASDPDVGANGQLQYRILDGDPSGAFVLDLASGEFGTMRPLDREVEPAFQLRIEARDGGQPALSATLLLTVTVLDANDHAPAFPVPAYSVEVPEDVPAGTLLLQLQAHDPDAGANGHVTYYLGAGTAGAFLLEPSSGELRTAAALDREQCPSYTFSVSAVDGAAAGPLSTTVSVTITVRDVNDHAPTFPTSPLRLRLPRPGPSFSTPTLALATLRAEDRDAGANASILYRLAGTPPPGTTVDSYTGEIRVARSPVALGPRDRVLFIVATDLGRPARSATGVIIVGLQGEAERGPRFPRASSEATIRENAPPGTPIVSPRAVHAGGTNGPITYSILSGNEKGTFSIQPSTGAITVRSAEGLDFEVSPRLRLVLQAESGGAFAFTVLTLTLQDANDNAPRFLRPHYVAFLPESRPLEGPLLQVEADDLDQGSGGQISYSLAASQPARGLFHVDPTTGTITTTAILDREIWAETRLVLMATDRGSPALVGSATLTVMVIDTNDNRPTIPQPWELRVSEDALLGSEIAQVTGNDVDSGPVLWYVLSPSGPQDPFSVGRYGGRVSLTGPLDFEQCDRYQLQLLAHDGPHEGCANLTVLVEDVNDNAPAFSQSLYQVMLLEHTPPGSAILSVSATDRDSGANGHISYHLASPADGFSVDPNNGTLFTIVGTVALGHDGSGAVDVVLEARDHGAPGRAARATVHVQLQDQNDHAPSFTLSHYRVAVTEDLPPGSTLLTLEATDADGSRSHAAVDYSIISGNWGRVFQLEPRLAEAGESAGPGPRALGCLVLLEPLDFESLTQYNLTVAAADRGQPPQSSVVPVTVTVLDVNDNPPVFTRASYRVTVPEDTPVGAELLHVEASDADPGPHGLVRFTVSSGDPSGLFELDESSGTLRLAHALDCETQARHQLVVQAADPAGAHFALAPVTIEVQDVNDHGPAFPLNLLSTSVAENQPPGTLVTTLHAIDGDAGAFGRLRYSLLEAGPGPEGREAFALNSSTGELRARVPFDYEHTLWRDPQSP

SEQ ID NO: 765937 - protein, 297 aa, Homo sapiens
SIQPSTGAITVRSAEGLDFEVSPRLRLVLQAESGGAFAFTVLTLTLQDAGAFGRLRYSLLEAGPGPEGREAFALNSSTGELRARVPFDYEHTESFRLLVGAADAGNLSASVTVSVLVTGEDEYDPVFLAPAFHFQVPEGARRGHSLGHVQATDEDGGADGLVLYSLATSSPYFGINQTTGALYLRVDSRAPGSGTATSGGGGRTRREAPRELRLEVIARGPLPGSRSATVPVTVDITHTALGLAPDLNLLLVGAVAASLGVVVVLALAALVLGLVRARSGGWGPGHGQAALLWFLGI

SEQ ID NO: 765938 - protein, 690 aa, Homo sapiens
SIQPSTGAITVRSAEGLDFEVSPRLRLVLQAESGGAFAFTVLTLTLQDAGAFGRLRYSLLEAGPGPEGREAFALNSSTGELRARVPFDYEHTESFRLLVGAADAGNLSASVTVSVLVTGEDEYDPVFLAPAFHFQVPEGARRGHSLGHVQATDEDGGADGLVLYSLATSSPYFGINQTTGALYLRVDSRAPGSGTATSGGGGRTRREAPRELRLEVIARGPLPGSRSATVPVTVDITHTALGLAPDLNLLLVGAVAASLGVVVVLALAALVLGLVRARSRKAEAAPGPMSQAAPLASDSLQKLGREPPSPPPSEHLYHQTLPSYGGPGAGGPYPRGGSLDPSHSSGRGSAEAAEDDEIRMINEFPRVASVASSLAARGPDSGIQQDADGLSDTSCEPPAPDTWYKGRKAGLLLPGAGATLYREEGPPATATAFLGGCGLSPAPTGDYGFPADGKPCVAGALTAIVAGEEELRGSYNWDYLLSWCPQFQPLASVFTEIARLKDEAWPTQEPSLCPPSQQTQLQPGPSSHQLLTAPPSAMKAPCPQLPCPPASHPLCLLWLLAHPLSHHLGWPRVPQPQHSAQSLAWSHLMTRSCTSSCGPGWAPTWDAHSVPNAGPTLSLPWAASDYDWLRGGHHQAPALHPELPSPLRVLGPQKPCCSLTCDQVQCGEKYEGGSSPGFSSVRDPCPAPAP

SEQ ID NO: 765939 - protein, 3401 aa, Homo sapiens
RGEGRGGEGARGRGSGARILGGAAVQEAAPGRQRTDRSTAKGARTDGGCPEGIAGLGDSDSDDARPQAPRERALPGGLTAAGRRPSTGRGSPRRAEVREPELEPGPQWDLTQSLRSSWAQSLAWSWSPRHSWTTLVMQKELGIVPSCPGMKSPRPHLLLPLLLLLLLLLGAGVPGAWGQAGSLDLQIDEEQPAGTLIGDISAGLPAGTAAPLMYFISAQEGSGVGTDLAIDEHSGVVRTARVLDREQRDRYRFTAVTPDGATVEVTVRVADINDHAPAFPQARAALQVPEHTAFGTRYPLEPARDADAGRLGTQGYALSGDGAGETFRLETRPGPDGTPVPELVVTGELDRENRSHYMLQLEAYDGGSPPRRAQALLDVTLLDINDHAPAFNQSRYHAVVSESLAPGSPVLQVFASDADAGVNGAVTYEINRRQSEGDGPFSIDAHTGLLQLERPLDFEQRRVHELVVQARDGGAHPELGSAFVTVHVRDANDNQPSMTVIFLSADGSPQVSEAAPPGQLVARISVSDPDDGDFAHVNVSLEGGEGHFALSTQDSVIYLVCVARRLDREERDAYNLRVTATDSGSPPLRAEAAFVLHVTDVNDNAPAFDRQLYRPEPLPEVALPGSFVVRVTARDPDQGTNGQVTYSLAPGAHTHWFSIDPTSGIITTAASLDYELEPQPQLIVVATDGGLPPLASSATVSVALQDVNDNEPQFQRTFYNASLPEGTQPGTCFLQVTATDADSGPFGLLSYSLGAGLGSSGSPPFRIDAHSGDVCTTRTLDRDQGPSSFDFTVTAVDGGGLKSMVYVKVFLSDENDNPPQFYPREYAASISAQSPPGTAVLRLRAHDPDQGSHGRLSYHILAGNSPPLFTLDEQSGLLTVAWPLARRANSVVQLEIGAEDGGGLQAEPSARVDISIVPGTPTPPIFEQLQYVFSVPEDVAPGTSVGIVQAHNPPGRLAPVTLSLSGGDPRGLFSLDAVSGLLQTLRPLDRELLGPVLELEVRAGSGVPPAFAVARVRVLLDDVNDNSPAFPAPEDTVLLPPNTAPGTPIYTLRALDPDSGVNSRVTFTLLAGGGGAFTVDPTTGHVRLMRPWLPDSTALPTVWTCPQAPLLELRSCKCRPKHQMGALSPITLQQREQVAPLAWSHRVGWLWVRAALDREAQELYILKVMAVSGSKAELGQQTGTATVRVSILNQNEHSPRLSEDPTFLAVAENQPPGTSVGRVFATDRDSGPNGRLTYSLQQLSEDSKAFRIHPQTGEVTTLQTLDREQQSSYQLLVQVQDGGSPPRSTTGTVHVAVLDLNDNSPTFLQASGAAGGGLPIQVPDRVPPGTLVTTLQAKDPDEGENGTILYTLTGPGSELFSLHPHSGELLTAAPLIRAERPHYVLTLSAHDQGSPPRSASLQLLVQVLPSARLAEPPPDLAERDPAAPVPVVLTVTAAEGLRPGSLLGSVAAPEPAGVGALTYTLVGGADPEGTFALDAASGRLYLARPLDFEAGPPWRALTVRAEGPGGAGARLLRVQVQVQDENEHAPAFARDPLALALPENPEPGAALYTFRASDADGPGPNSDVRYRLLRQEPPVPALRLDARTGALSAPRGLDRETTPALLLLVEATDRPANASRRRAARVSARVFVTDENDNAPVFASPSRVRLPEDQPPGPAALHVVARDPDLGEAARVSYRLASGGDGHFRLHSSTGALSVVRPLDREQRAEHVLTVVASDHGSPPRSATQVLTVSVADVNDEAPTFQQQEYSVLLRENNPPGTSLLTLRATDPDVGANGQVTYGGVSSESFSLDPDTGVLTTLRALDREEQEEINLTVYAQDRGSPPQLTHVTVRVAVEDENDHAPTFGSAHLSLEVPEGQDPQTLTMLRASDPDVGANGQLQYRILDGDPSGAFVLDLASGEFGTMRPLDREVEPAFQLRIEARDGGQPALSATLLLTVTVLDANDHAPAFPVPAYSVEVPEDVPAGTLLLQLQAHDPDAGANGHVTYYLGAGTAGAFLLEPSSGELRTAAALDREQCPSYTFSVSAVDGAAAGPLSTTVSVTITVRDVNDHAPTFPTSPLRLRLPRPGPSFSTPTLALATLRAEDRDAGANASILYRLAGTPPPGTTVDSYTGEIRVARSPVALGPRDRVLFIVATDLGRPARSATGVIIVGLQGEAERGPRFPRASSEATIRENAPPGTPIVSPRAVHAGGTNGPITYSILSGNEKGTFSIQPSTGAITVRSAEGLDFEVSPRLRLVLQAESGGAFAFTVLTLTLQDANDNAPRFLRPHYVAFLPESRPLEGPLLQVEADDLDQGSGGQISYSLAASQPARGLFHVDPTTGTITTTAILDREIWAETRLVLMATDRGSPALVGSATLTVMVIDTNDNRPTIPQPWELRVSEDALLGSEIAQVTGNDVDSGPVLWYVLSPSGPQDPFSVGRYGGRVSLTGPLDFEQCDRYQLQLLAHDGPHEGCANLTVLVEDVNDNAPAFSQSLYQVMLLEHTPPGSAILSVSATDRDSGANGHISYHLASPADGFSVDPNNGTLFTIVGTVALGHDGSGAVDVVLEARDHGAPGRAARATVHVQLQDQNDHAPSFTLSHYRVAVTEDLPPGSTLLTLEATDADGSRSHAAVDYSIISGNWGRVFQLEPRLAEAGESAGPGPRALGCLVLLEPLDFESLTQYNLTVAAADRGQPPQSSVVPVTVTVLDVNDNPPVFTRASYRVTVPEDTPVGAELLHVEASDADPGPHGLVRFTVSSGDPSGLFELDESSGTLRLAHALDCETQARHQLVVQAADPAGAHFALAPVTIEVQDVNDHGPAFPLNLLSTSVAENQPPGTLVTTLHAIDGDAGAFGRLRYSLLEAGPGPEGREAFALNSSTGELRARVPFDYEHTESFRLLVGAADAGNLSASVTVSVLVTGEDEYDPVFLAPAFHFQVPEGARRGHSLGHVQATDEDGGADGLVLYSLATSSPYFGINQTTGALYLRVDSRAPGSGTATSGGGGRTRREAPRELRLEVIARGPLPGSRSATVPVTVDITHTALGLAPDLNLLLVGAVAASLGVVVVLALAALVLGLVRARSRKAEAAPGPMSQAAPLASDSLQKLGREPPSPPPSEHLYHQTLPSYGGPGAGGPYPRGGSLDPSHSSGRGSAEAAEDDEIRMINEFPRVASVASSLAARGPDSGIQQDADGLSDTSCEPPAPDTWYKGRKAGLLLPGAGATLYREEGPPATATAFLGGCGLSPAPTGDYGFPADGKPCVAGALTAIVAGEEELRGSYNWDYLLSWCPQFQPLASVFTEIARLKDEARPCPPAPRIDPPPLITAVAHPGAKSVPPKPANTAAARAIFPPASHRSPISHEGSLSSAAMSPTLHPELPSPLRVLGPQKPCCSLTCDQVQCGEKYEGGSSPGFSSVRDPCPAPAP

SEQ ID NO: 765940 - protein, 1269 aa, Homo sapiens
RGEGRGGEGARGRGSGARILGGAAVQEAAPGRQRTDRSTAKGARTDGGCPEGIAGLGDSDSDDARPQAPRERALPGGLTAAGRRPSTGRGSPRRAEVREPELEPGPQWDLTQSLRSSWAQSLAWSWSPRHSWTTLVMQKELGIVPSCPGMKSPRPHLLLPLLLLLLLLLGAGVPGAWGQAGSLDLQIDEEQPAGTLIGDISAGLPAGTAAPLMYFISAQEGSGVGTDLAIDEHSGVVRTARVLDREQRDRYRFTAVTPDGATVEVTVRVADINDHAPAFPQARAALQVPEHTAFGTRYPLEPARDADAGRLGTQGYALSGDGAGETFRLETRPGPDGTPVPELVVTGELDRENRSHYMLQLEAYDGGSPPRRAQALLDVTLLDINDHAPAFNQSRYHAVVSESLAPGSPVLQVFASDADAGVNGAVTYEINRRQSEGDGPFSIDAHTGLLQLERPLDFEQRRVHELVVQARDGGAHPELGSAFVTVHVRDANDNQPSMTVIFLSADGSPQVSEAAPPGQLVARISVSDPDDGDFAHVNVSLEGGEGHFALSTQDSVIYLVCVARRLDREERDAYNLRVTATDSGSPPLRAEAAFVLHVTDVNDNAPAFDRQLYRPEPLPEVALPGSFVVRVTARDPDQGTNGQVTYSLAPGAHTHWFSIDPTSGIITTAASLDYELEPQPQLIVVATDGGLPPLASSATVSVALQDVNDNEPQFQRTFYNASLPEGTQPGTCFLQVTATDADSGPFGLLSYSLGAGLGSSGSPPFRIDAHSGDVCTTRTLDRDQGPSSFDFTVTAVDGGGLKSMVYVKVFLSDENDNPPQFYPREYAASISAQSPPGTAVLRLRAHDPDQGSHGRLSYHILAGNSPPLFTLDEQSGLLTVAWPLARRANSVVQLEIGAEDGGGLQAEPSARVDISIVPGTPTPPIFEQLQYVFSVPEDVAPGTSVGIVQAHNPPGRLAPVTLSLSGGDPRGLFSLDAVSGLLQTLRPLDRELLGPVLELEVRAGSGVPPAFAVARVRVLLDDVNDNSPAFPAPEDTVLLPPNTAPGTPIYTLRALDPDSGVNSRVTFTLLAGGGGAFTVDPTTGHVRLMRPWLPDSTALPTVWTCPQAPLLELRSCKCRPKHQMGALSPITLQQREQVAPLAWSHRVGWLWVRAALDREAQELYILKVMAVSGSKAELGQQTGTATVRVSILNQNEHSPRLSEDPTFLAVAENQPPGTSVGRVFATDRDSGPNGRLTYSLQQLSEDSKAFRIHPQTVGSSDKRDCVHSG

SEQ ID NO: 765941 - protein, 234 aa, Homo sapiens
GSLTYWVPERLRQGFCGVGRAAQALVCASAKEGTAFRMEAVQEGAAGVESEQAALGEEAVLLLDDIMAEVEVVAEEEGLVERREEAQRAQQAVPGPGPMTPESALEELLAVQVELEPVNAQARKAFSRQREKMERRRKPHLDRRGRRHPERPWLLGQCCILLSVSSAFLVERCSRGSVSDRWAARRRCDSLGNKGELPRTNVAVESRSRRGYYCPACGRETLGDAEQQTFGASF

SEQ ID NO: 765942 - protein, 77 aa, Homo sapiens
AWISLLLITTTAATPPSHQSQPGVQQPPETTGLSGQCEPHCRSSPCGTSPEALLFRVPIYLGIEELGRNSGLTTPQG

SEQ ID NO: 765943 - protein, 407 aa, Homo sapiens
LLGRCGLAFRPLATEPRGSSPVQLVSSTMSVRTLPLLFLNLGGEMLYILDQRLRAQNIPGDKARKVLNDIISTMFNRKFMEELFKPQELYSKKALRTVYERLAHASIMKLNQASMDKLYDLMTMAFKYQVLLCPRPKDVLLVTFNHLDTIKGFIRDSPTILQQVDETLRQLTEIYGGLSAGEFQLIRQTLLIFFQDLHIRVSMFLKDKVQNNNGRFVLPVSGPVPWGTEVPGLIRMFNNKGEEVKRIEFKHGGNYVPAPKEGSFELYGDRVLKLGTNMYSVNQPVETHVSGSSKNLASWTQESIAPNPLAKEELNFLARLMGGMEIKKPSGPEPGFRLNLFTTDEEEEQAALTRPEELSYEVINIQATQDQQRSEELARIMGEFEITEQPRLSTSKGDDLLAMMDEL

SEQ ID NO: 765944 - protein, 407 aa, Homo sapiens; identical to SEQ ID NO: 765943

SEQ ID NO: 765945 - protein, 384 aa, Homo sapiens
LLGRCGLAFRPLATEPRGSSPVQLVSSTMSVRTLPLLFLNLGGEMLYILDQRLRAQNIPGDKARKVLNDIISTMFNRKFMEELFKPQELYSKKALRTVYERLAHASIMKLNQASMDKLYDLMTMAFKYQVLLCPRPKDVLLVTFNHLDTIKGFIRDSPTILQQVDETLRQLTEIYGGLSAGEFQLIRQTLLIFFQDLHIRVSMFLKDKVQNNNGRFVLPVSGPVPWGTEVPGLIRMFNNKGEEVKRIEFKHGGNYVPAPKEGSFELYGDRVLKLGTNMYSVNQPVETHVSGSSKNLASWTQESIAPNPLAKEELNFLARLMGGMEIKKPSGPEPGFRLNLFTTDEEEEQAALTRPEELSYEVINIQATQSLFSNLATIQGGLTG

SEQ ID NO: 765946 - protein, 261 aa, Homo sapiens
LLGRCGLAFRPLATEPRGSSPVQLVSSTMSVRTLPLLFLNLGGEMLYILDQRLRAQNIPGDKARKDEWTEVDRKRVLNDIISTMFNRKFMEELFKPQELYSKKALRTVYERLAHASIMKLNQASMDKLYDLMTMAFKYQVLLCPRPKDVLLVTFNHLDTIKGFIRDSPTILQQVDETLRQLTEIYGGLSAGEFQLIRQTLLIFFQDLHIRRECFWKHMQETVHSAQCCLPGVGNYMEDRRRRLTFHHVYPFENFEFCTWAK

SEQ ID NO: 765947 - protein, 278 aa, Homo sapiens
LLGRCGLAFRPLATEPRGSSPVQLVSSTMSVRTLPLLFLNLGGEMLYILDQRLRAQNIPGDKARKVLNDIISTMFNRKFMEELFKPQELYSKKALRTVYERLAHASIMKLNQASMDKLYDLMTMAFKYQVLLCPRPKDVLLVTFNHLDTIKGFIRDSPTILQQVDETLRQLTEIYGGLSAGEFQLIRQTLLIFFQDLHIRVSMFLKDKVQNNNGRFVLPVSGPVPWGTEVPGLIRMFNNKGEEVKRIEFKHGGNYVPAPKEGSFELYGDRVLKLGTNM

SEQ ID NO: 765948 - protein, 278 aa, Homo sapiens; identical to SEQ ID NO: 765947

SEQ ID NO: 765949 - protein, 407 aa, Homo sapiens; identical to SEQ ID NO: 765943

SEQ ID NO: 765950 - protein, 284 aa, Homo sapiens
MAFKYQVLLCPRPKDVLLVTFNHLDTIKGFIRDSPTILQQVDETLRQLTEIYGGLSAGEFQLIRQTLLIFFQDLHIRVSMFLKDKVQNNNGRFVLPVSGPVPWGTEVPGLIRMFNNKGEEVKRIEFKHGGNYVPAPKEGSFELYGDRVLKLGTNMYSVNQPVETHVSGSSKNLASWTQESIAPNPLAKEELNFLARLMGGMEIKKPSGPEPGFRLNLFTTDEEEEQAALTRPEELSYEVINIQATQDQQRSEELARIMGEFEITEQPRLSTSKGDDLLAMMDEL

SEQ ID NO: 765951 - protein, 355 aa, Homo sapiens
LLGRCGLAFRPLATEPRGSSPVQLVSSTMSVRTLPLLFLNLGGEMLYILDQRLRAQNIPGDKARKVLNDIISTMFNRKFMEELFKPQELYSKKALRTVYERLAHASIMKLNQASMDKLYDLMTMAFKYQVLLCPRPKDVLLVTFNHLDTIKGFIRDSPTILQQVDETLRQLTEIYGGLSAGEFQLIRQTLLIFFQDLHIRVSMFLKDKVQNNNGRFVLPVSGPVPWGTEVPGLIRMFNNKGEEVKRIEFKHGGNYVPAPKEGSFELYGDRVLKLGTNMYSVNQPVETHVSGSSKNLASWTQESIAPNPLAKEELNFLARLMGGMEIKKPSGPEPGFRLNLFTTDEEEEYVLNLFR

SEQ ID NO: 765952 - protein, 324 aa, Homo sapiens
LLGRCGLAFRPLATEPRGSSPVQLVSSTMSVRTLPLLFLNLGGEMLYILDQRLRAQNIPGDKARKVLNDIISTMFNRKFMEELFKPQELYSKKALRTVYERLAHASIMKLNQASMDKLYDLMTMAFKYQVLLCPRPKDVLLVTFNHLDTIKGFIRDSPTILQQVDETLRQLTEIYGGLSAGEFQLIRQTLLIFFQDLHIRVSMFLKDKVQNNNGRFVLPVSGPVPWGTEVPGLIRMFNNKGEEVKRIEFKHGGNYVPAPKEGSFELYGDRVLKLGTNMYSVNQPVETHVSGSSKNLASWTQVSFCLPCLPSQLLSRYGSLHKER

SEQ ID NO: 765953 - protein, 160 aa, Homo sapiens
GPLLWDTLPSVFSSMRLLQLLFRASPATLLLVLCLQLGANKAQDNTRKIIIKNFDIPKSVRPNDEVTAVLAVQTELKECMVVKTYLISSIPLQGAFNYKYTACLCDDNPKTFYWDFYTNRTVQIAAVVDVIRELGICPDDAAVIPIKNNRFYTIEILKVE

SEQ ID NO: 765954 - protein, 158 aa, Homo sapiens
RAAGIRHEVFSSMRLLQLLFRASPATLLLVLCLQLGANKAQDNTRKIIIKNFDIPKSVRPNDEVTAVLAVQTELKECMVVKTYLISSIPLQGAFNYKYTACLCDDNPKTFYWDFYTNRTVQIAAVVDVIRELGICPDDAAVIPIKNNRFYTIEILKVE

SEQ ID NO: 765955 - protein, 160 aa, Homo sapiens; identical to SEQ ID NO: 765953

SEQ ID NO: 765956 - protein, 158 aa, Homo sapiens; identical to SEQ ID NO: 765954

SEQ ID NO: 765957 - protein, 311 aa, Homo sapiens
MAEASPHPGRYFCHCCSVEIVPRLPDYICPRCESGFIEELPEETRSTENGSAPSTAPTDQSRPPLEHVDQHLFTLPQGYGQFAFGIFDDSFEIPTFPPGAQADDGRDPESRRERDHPSRHRYGARQPRARLTTRRATGRHEGVPTLEGIIQQLVNGIITPATIPSLGPWGVLHSNPMDYAWGANGLDAIITQLLNQFENTGPPPADKEKIQALPTVPVTEEHVGSGLECPVCKDDYALGERVRQLPCNHLFHDGCIVPWLEQHDSCPVCRKSLTGQNTATNPPGLTGVSFSSSSSSSSSSSPSNENATSNS

SEQ ID NO: 765958 - protein, 432 aa, Homo sapiens
MLALPLVLTTDLAGLAPLLCVGRPHPVTGALFSRIIQQLVNGIITPATIPSLGPWGVLHSNPMDYAWGANGLDAIITQVQRGHGPECLLGEGWAAHPWELPHCLDPRSPTKVKGDAGTASTLWRAQGAAPAFLLPFLSLGNFGGSPVFTRNVVAKPRGGLAHSHMVQEATRSLFPRGRALTCFQVPPVSALLRSPWSILSLAGPDPHSSPPAGARPPHSAVRALRSAAPPPIPLSGTQERGPPPIPPFHRQGTQERGGRVGSTVISDPGLGSKGPRAQDKRGLGAFAGPAASRFRAPGRAPEELPALSPLVFQLLNQFENTGPPPADKEKIQALPTVPVTEEHVGSGLECPVCKDDYALGERVRQLPCNHLFHDGCIVPWLEQHDSCPVCRKSLTGQNTATNPPGLTGVSFSSSSSSSSSSSPSNENATSNS

SEQ ID NO: 765959 - protein, 153 aa, Homo sapiens
KPGLVTGSWESSPGNIGRTPTGRISNARQLPRLPKKPHGTEHGHEPPWPHWGELLLLVVIVLLQLAQQRERHKQLVSPRRPSGKHGAFPTHPQPAPHGTHRLGAPAAPRLAGQRCRSRLFQGRTRARPTGPLAWEGVGHMVPSGASPASPSSV

SEQ ID NO: 765960 - protein, 311 aa, Homo sapiens; identical to SEQ ID NO: 765957

SEQ ID NO: 765961 - protein, 365 aa, Homo sapiens
VRERARARRPAREQQTAGGGCRAGGGRRGVGGGGHGRGVAASRTVLLPLLLRGDRPAPAGLYLSKMRVWFYRGASGRDQEHRKWFCPLHSSHRPEPATVGAPPADCTGLSPEVTPPSSPQHVDQHLFTLPQGYGQFAFGIFDDSFEIPTFPPGAQADDGRDPESRRERDHPSRHRYGARQPRARLTTRRATGRHEGVPTLEGIIQQLVNGIITPATIPSLGPWGVLHSNPMDYAWGANGLDAIITQLLNQFENTGPPPADKEKIQALPTVPVTEEHVGSGLECPVCKDDYALGERVRQLPCNHLFHDGCIVPWLEQHDSCPVCRKSLTGQNTATNPPGLTGVSFSSSSSSSSSSSPSNENATSNS

SEQ ID NO: 765962 - protein, 284 aa, Homo sapiens
MAEASPHPGRYFCHCCSVEIVPRLPDYICPRCESGFIEELPEETRSTENGSAPSTAPTDQSRPPLEHVDQHLFTLPQGYGQFAFGIFDDSFEIPTFPPGAQADDGRDPESRRERDHPSRHRIIQQLVNGIITPATIPSLGPWGVLHSNPMDYAWGANGLDAIITQLLNQFENTGPPPADKEKIQALPTVPVTEEHVGSGLECPVCKDDYALGERVRQLPCNHLFHDGCIVPWLEQHDSCPVCRKSLTGQNTATNPPGLTGVSFSSSSSSSSSSSPSNENATSNS

SEQ ID NO: 765963 - protein, 278 aa, Homo sapiens
LAVAGEAGCLTARQPGIISVQDASLVLSRSFRKRPGAQKMVLPPPQLPQTRAGHRWSFEIPTFPPGAQADDGRDPESRRERDHPSRHRYGARQPRARLTTRRATGRHEGVPTLEGIIQQLVNGIITPATIPSLGPWGVLHSNPMDYAWGANGLDAIITQLLNQFENTGPPPADKEKIQALPTVPVTEEHVGSGLECPVCKDDYALGERVRQLPCNHLFHDGCIVPWLEQHDSCPVCRKSLTGQNTATNPPGLTGVSFSSSSSSSSSSSPSNENATSNS

SEQ ID NO: 765964 - protein, 351 aa, Homo sapiens
  misc_feature (208)..(208): Xaa can be any naturally occurring amino acid
  misc_feature (215)..(215): Xaa can be any naturally occurring amino acid
MAEASPHPGRYFCHCCSVEIVPRLPDYICPRCESGFIEELPEETRSTENGSAPSTAPTDQSRPPLEHVDQHLFTLPQGYGQFAFGIFDDSFEIPTFPPGAQADDGRDPESRRERDHPSRHRYGARQPRARLTTRRATGRHEGVPTLEGVSSPESVQSNRIIIQAAGIDHPSSWCRACEEFHATSESAYEELTAMDRAPTVIGMTNQCXHGRLASXDRRLCGTHIPRHRGQRAIISSRNNHKGRFTRDQCPRCGSRSTVRHPGVRSCPRRSNRYKSHALGERVRQLPCNHLFHDGCIVPWLEQHDSCPVCRKSLTGQNTATNPPGLTGVSFSSSSSSSSSSSPSNENATSNS

SEQ ID NO: 765965 - protein, 216 aa, Homo sapiens
MAEASPHPGRYFCHCCSVEIVPRLPDYICPRCESGFIEELPEETRSTENGSAPSTAPTDQSRPPLEHVDQHLFTLPQGYGQFAFGIFDDSFEIPTFPPGAQADDGRDPESRRERDHPSRHRYGARQPRARLTTRRATGRHEGVPTLEGVRGPRGWPRGPHALRSEVLALRIQHGFHGNVASSIGSLERPPGQALQPPVTPHTALRRQKYAGSGCVG

SEQ ID NO: 765966 - protein, 311 aa, Homo sapiens; identical to SEQ ID NO: 765957

SEQ ID NO: 765967 - protein, 334 aa, Homo sapiens
MAEASPHPGRYFCHCCSVEIVPRLPDYICPRCESGFIEELPEETRSTENGSAPSTAPTDQSRPPLEHVDQHLFTLPQGYGQFAFGIFDDSFEIPTFPPGAQADDGRDPESRRERDHPSRHRYGARQPRARLTTRRATGRHEGVPTLEGIIQQLVNGIITPATIPSLGPWGVLHSNPMDYAWGANGLDAIITQLLNQFENTGPPPADKEKIQALPTVPVTEEHVGSGLECPVCKDDYALGERVRQLPCNHLFHDGCIVPWLEQHDSCPVCRKSLTGQNTATNPPGLTGVSFSSSSSSSSSSSPSNENATPLWGVPSLPVLCLTSPSKRSAVERFL

SEQ ID NO: 765968 - protein, 311 aa, Homo sapiens; identical to SEQ ID NO: 765957

SEQ ID NO: 765969 - protein, 334 aa, Homo sapiens; identical to SEQ ID NO: 765967

SEQ ID NO: 765970 - protein, 337 aa, Homo sapiens
MAEASPHPGRYFCHCCSVEIVPRLPDYICPRCESGFIEELPEETRSTENGSAPSTAPTDQSRPPLEHVDQHLFTLPQGYGQFAFGIFDDSFEIPTFPPGAQADDGRDPESRRERDHPSRHRYGARQPRARLTTRRATGRHEGVPTLEGIIQQLVNGIITPATIPSLGPWGVLHSNPMDYAWGANGLDAIITQVLQPRVSEPRAGPPRSSRQLSPLVFQLLNQFENTGPPPADKEKIQALPTVPVTEEHVGSGLECPVCKDDYALGERVRQLPCNHLFHDGCIVPWLEQHDSCPVCRKSLTGQNTATNPPGLTGVSFSSSSSSSSSSSPSNENATSNS

SEQ ID NO: 765971 - protein, 286 aa, Homo sapiens
CWFAREYDIVDPRAPETRSTENGSAPSTAPTDQSRPPLEHVDQHLFTLPQGYGQFAFGIFDDSFEIPTFPPGAQADDGRDPESRRERDHPSRHRYGARQPRARLTTRRATGRHEGVPTLEGIIQQLVNGIITPATIPSLGPCLHSTPVCDIRLREAQRSGLTIDSRKLLNQFENTGPPPADKEKIQALPTVPVTEEHVGSGLECPVCKDDYALGERVRQLPCNHLFHDGCIVPWLEQHDSCPVCRKSLTGQNTATNPPGLTGVSFSSSSSSSSSSSPSNENATSNS

SEQ ID NO: 765972 - protein, 135 aa, Homo sapiens
MPRLLKGKASGRPRTISTEQQWQKYRRHRPPPARPATRTPQATREPTSAVGKARGLSHPPSASATRHPQTGCPGGATLGWSALQVPPVPGQDPGPAHRPPGLGRRGPHGPLWGVPSLPVLCLTSPSKRSAVERFL

SEQ ID NO: 765973 - protein, 132 aa, Homo sapiens
MDSCYDPRKLLTATSVDEHLAAALNTCCESCQNQNGVTNVKKALTKSWWGRPRREDTYACMPDTRKDYKNHSPAQRPSHPYTKNISARTTAQQLPVQPQTGMTFVIDVCSQGELSQNHCDPARFSFKDLCLP

SEQ ID NO: 765974 - protein, 163 aa, Homo sapiens
MPRSSRSPGDPGALLEDVAHNPRPRRIAQRGRNTSRMAEDTSPNMNDNILLPVRNNDQALGLTQCMLGCVSWFTCFACSLRTQAQQVLFNTCRCKLLCQKLMEKTGILLLCAFGVSQGPAQSQVEVSLGPGTDYRTLGKTLHCHVTQFPHLPDGCCCENYEMK

SEQ ID NO: 765975 - protein, 122 aa, Homo sapiens
MPRSSRSPGDPGALLEDVAHNPRPRRIAQRGRNTSRMAEDTSPNMNDNILLPVRNNDQALGLTQCMLGCVYASCCARSSWRRQAFCSSVLSVCPRALPSPRWRYPWALALIIGHWARHCTAT

SEQ ID NO: 765976 - protein, 227 aa, Homo sapiens
MPRSSRSPGDPGALLEDVAHNPRPRRIAQRGRNTSRMAEDTSPNMNDNILLPVRNNDQALGLTQCMLGCVSWFTCFACSLRTQAQQVLFNTCRCKLLCQKLMEKTGILLLCAFGFWMFSIHLPSKMKVWQDDSINGPLQSLRLYQEKVRHHSGEIQDLRGSMNQLIAKLQEMEAMSDEQKMAQKIMKMIHGDYIEKPDFALKSIEGPALTLSTRQSPITMRRPTPTG

SEQ ID NO: 765977 - protein, 179 aa, Homo sapiens
  misc_feature (161)..(161): Xaa can be any naturally occurring amino acid
  misc_feature (177)..(177): Xaa can be any naturally occurring amino acid
FVLKACILGYTLRTLFLPFPPRGKSPDLGQRVPRAYARRHSPLPTPKSAKKRIPLSGVARGRHPSAPSSYAGSACPRTNHTGLILSAPAYSRALQPETQQRGLGDPAHCGPLGACPWMSTLAPDELTVKTKDGVVEITGKHEEAAGTSMATSPGASRGNTXCPPGVDPNQVFLLPCXPE

SEQ ID NO: 765978 - protein, 239 aa, Homo sapiens
GAGTKPKPHWPREPPAPPIRVEEAEAMAETEERSLDNFFAKRDKKKKKERSNRAASAAGAAGSAGGSSGAAGAAGGGAGAGTRPGDGGTASAGAAGPGAATKAVTKDEDEWKELEQKEVDYSGLRVQAMQISSEKEEDDNEKRQDPGDNWEEGGGGGGGMEKSSGPWNKTAPVQAPPAPVIVTETPEPAMTSGVYRPPGARLTTTRKTPQGPPEIYSDTQFPSLQSTAKHVESRNRYLK

SEQ ID NO: 765979 - protein, 365 aa, Homo sapiens
HELARACLFPSGCGESGILLRRRSSSGSPGSLGRQRRRASPRADRTTARQHAGGAARLAAHASATPRGWGVAAPGSVSAEPASTPSSEPRGPRPPPAPPIRVEEAEAMAETEERSLDNFFAKRDKKKKKERSNRAASAAGAAGSAGGSSGAAGAAGGGAGAGTRPGDGGTASAGAAGPGAATKAVTKDEDEWKELEQKEVDYSGLRVQAMQISSEKEEDDNEKRQDPGDNWEEGGGGGGGMEKSSGPWNKTAPVQAPPAPVIVTETPEPAMTSGVYRPPGARLTTTRKTPQGPPEIYSDTQFPSLQSTAKHVESRKDKEMEKSFEVVRHKNRGRDEVSKNQALKLQLDNQYAVLENQKSSHSQYN

SEQ ID NO: 765980 - protein, 156 aa, Homo sapiens
MQISSEKEEDDNEKRQDPGDNWEEGGGGGGGMEKSSGPWNKTAPVQAPPAPVIVTETPEPAMTSGVYRPPGARLTTTRKTPQGPPEIYSDTQFPSLQSTAKHVESRKDKEMEKSFEVVRHKNRGRDEVSKNQALKLQLDNQYAVLENQKSSHSQYN

SEQ ID NO: 765981 - protein, 320 aa, Homo sapiens
HELARACLFPSGCGESGILLRRRSSSGSPGSLGRQRRRASPRADRTTARQHAGGAARLAAHASATPRGWGVAAPGSVSAEPASTPSSEPRGPRPPPAPPIRVEEAEAMAETEERSLDNFFAKRDKKKKKERSNRAASAAGAAGSAGGSSGAAGAAGGGAGAGTRPGDGGTASAGAAGPGAATKAVTKDEDEWKELEQKEVDYSGLRVQAMQISSEKEEDDNEKRQDPGDNWEEGGGGGGGMEKSSGPWNKTAPVQAPPAPVIVTETPEPAMTSGVYRPPGARLTTTRKTPQGPPEIYSDTQFPSLQSTAKHVESRNRYLK

SEQ ID NO: 765982 - protein, 316 aa, Homo sapiens
HELARACLFPSGCGESGILLRRRSSSGSPGSLGRQRRRASPRADRTTARQHAGGAARLAAHASATPRGWGVAAPGSVSAEPASTPSSEPRGPRPPPAPPIRVEEAEAMAETEERSLDNFFAKRDKKKKKERSNRAASAAGAAGSAGGSSGAAGAAGGGAGAGTRPGDGGTASAGAAGPGAATKAVTKDEDEWKELEQKEVDYSGLRVQAMQISSEKEEDDNEKRQDPGDNWEEGGGGGGGMEKSSGPWNKTAPVQAPPAPVIVTETPEPAMTSGVYRPPGARLTTTRKTPQGPPEIYSDTQFPSLQSTAKHVESRK

SEQ ID NO: 765983 - protein, 365 aa, Homo sapiens; identical to SEQ ID NO: 765979

SEQ ID NO: 765984 - protein, 73 aa, Homo sapiens
GYVPEDGLTAQQLFASADGLTYNDFLILSRILLRGGFFLNSRTNIFKNPSEEEIFTDYISFPLGIKKWRRALK

SEQ ID NO: 765985 - protein, 317 aa, Homo sapiens
HELARACLFPSGCGESGILLRRRSSSGSPGSLGRQRRRASPRADRTTARQHAGGAARLAAHASATPRGWGVAAPGSVSAEPASTPSSEPRGPRPPPAPPIRVEEAEAMAETEERSLDNFFAKRDKKKKKERSNRAASAAGAAGSAGGSSGAAGAAGGGAGAGTRPGDGGTASAGAAGPGAATKAVTKDEDEWKELEQKEVDYSGLRVQAMQISSEKEEDDNEKRQDPGDNWEEGGGGGGGMEKSSGPWNKTAPVQAPPAPVIVTETPEPAMTSGVYRPPGARLTTTRKTPQGPPEIYSDTQFPSLQSTAKHVESRKY

SEQ ID NO: 765986 - protein, 320 aa, Homo sapiens; identical to SEQ ID NO: 765981

SEQ ID NO: 765987 - protein, 320 aa, Homo sapiens; identical to SEQ ID NO: 765981

SEQ ID NO: 765988 - protein, 320 aa, Homo sapiens; identical to SEQ ID NO: 765981

SEQ ID NO: 765989 - protein, 320 aa, Homo sapiens; identical to SEQ ID NO: 765981

SEQ ID NO: 765990 - protein, 320 aa, Homo sapiens; identical to SEQ ID NO: 765981

SEQ ID NO: 765991 - protein, 333 aa, Homo sapiens
HELARACLFPSGCGESGILLRRRSSSGSPGSLGRQRRRASPRADRTTARQHAGGAARLAAHASATPRGWGVAAPGSVSAEPASTPSSEPRGPRPPPAPPIRVEEAEAMAETEERSLDNFFAKRDKKKKKERSNRAASAAGAAGSAGGSSGAAGAAGGGAGAGTRPGDGGTASAGAAGPGAATKAVTKDEDEWKELEQKEVDYSGLRVQAMQISSEKEEDDNEKRQDPGDNWEEGGGGGGGMEKSSGPWNKTAPVQAPPAPVIVTETPEPAMTSGVYRPPGARLTTTRKTPQGPPEIYSDTQFPSLQSTAKHVESRNRLLKMNATWLPGVSVYL

SEQ ID NO: 765992 - protein, 296 aa, Homo sapiens
  misc_feature (271)..(271): Xaa can be any naturally occurring amino acid
HELARACLFPSGCGESGILLRRRSSSGSPGSLGRQRRRASPRADRTTARQHAGGAARLAAHASATPRGWGVAAPGSVSAEPASTPSSEPRGPRPPPAPPIRVEEAEAMAETEERSLDNFFAKRDKKKKKERSNRAASAAGAAGSAGGSSGAAGAAGGGAGAGTRPGDGGTASAGAAGPGAATKAVTKDEDEWKELEQKEVDYSGLRVQAMQISSEKEEDDNEKRQDPGDNWEEGGGGGGGMEKSSGPWNKTAPVQAPPAPVIVQNPRPRDXCVIGSWASYHTKNTQGPRISCSIPS

SEQ ID NO: 765993 - protein, 413 aa, Homo sapiens
  misc_feature (10)..(10): Xaa can be any naturally occurring amino acid
KLRLVRGWFXSDEGATQASLESAPRIMRLVAECSRSRARAGELWLPHGTVATPVFMPVGTQATMKGITTEQLDALGCRICLGNTYHLGLRPGPELIQKANGLHGFMNWPHNLLTDSGGFQMVSLVSLSEVTEEGVRFRSPYDGNETLLSPEKSVQIQNALGSDIIMQLDDVVSSTVTGPRVEEAMYRSIRWLDRCIAAHQRPDKQNLFAIIQGGLDADLRATCLEEMTKRDVPGFAIGGLSGGESKSQFWRMVALSTSRLPKDKPRYLMGVGYATDLVVCVALGCDMFDCVFPTRTARFGSALVPTGNLQLRKKVFEKDFGPIDPECTCPTCQKHSRAFLHALLHSDNTAALHHLTVHNIAYQLQLMSAVRTSIVEKRFPDFVRDFMGAMYGDPTLCPTWATDALASVGITLG

SEQ ID NO: 765994 - protein, 187 aa, Homo sapiens
MTKRDVPGFAIGGLSGGESKSQFWRMVALSTSRLPKDKPRYLMGVGYATDLVVCVALGCDMFDCVFPTRTARFGSALVPTGNLQLRKKVFEKDFGPIDPECTCPTCQKHSRAFLHALLHSDNTAALHHLTVHNIAYQLQLMSAVRTSIVEKRFPDFVRDFMGAMYGDPTLCPTWATDALASVGITLG

SEQ ID NO: 765995 - protein, 129 aa, Homo sapiens
LYRIFCALGRRCVWLRRCWGKTEWVLESEALVARPQWRGGGVRPWTHAQDRKAGAEHYPKKDPTEDLWRRRVQQEVTPRRPKAQPAPTCQKHSRAFLHALLHSDNTAALHHLTVHNIAYQVSQCPGQGG

SEQ ID NO: 765996 - protein, 410 aa, Homo sapiens
HVVPTVKMAGAATQASLESAPRIMRLVAECSRSRARAGELWLPHGTVATPVFMPVGTQATMKGITTEQLDALGCRICLGNTYHLGLRPGPELIQKANGLHGFMNWPHNLLTDSGGFQMVSLVSLSEVTEEGVRFRSPYDGNETLLSPEKSVQIQNALGSDIIMQLDDVVSSTVTGPRVEEAMYRSIRWLDRCIAAHQRPDKQNLFAIIQGGLDADLRATCLEEMTKRDVPGFAIGGLSGGESKSQFWRMVALSTSRLPKDKPRYLMGVGYATDLVVCVALGCDMFDCVFPTRTARFGSALVPTGNLQLRKKVFEKDFGPIDPECTCPTCQKHSRAFLHALLHSDNTAALHHLTVHNIAYQLQLMSAVRTSIVEKRFPDFVRDFMGAMYGDPTLCPTWATDALASVGITLG

SEQ ID NO: 765997 - protein, 387 aa, Homo sapiens [sequence omitted]

SEQ ID NO: 765998 - protein, 494 aa, Homo sapiens
HVVPTVKMAGAATQASLESAPRIMRLVAECSRSRARAGELWLPHGTVATPVFMPVGTQATMKGITTEQLDALGCRICLGNTYHLGLRPGPELIQKANGLHGFMNWPHNLLTDSGGFQMVSLVSLSEVTEEGVRFRSPYDGNETLLSPEKSVQIQNALGSDIIMQLDDVVSSTVTGPRVEEAMYRSIRWLDRCIAAHQRPDKQNLFAIIQGGLDADLRATCLEEMTKRDVPGFAIGGLSGGESKSQFWRMVALSTSRLPKDKPRYLMGVGYVVDREARALPVGSGFLGTPYPAWGGGIWGNGHRSDLRRLGRHGCPLGAILREYGPVWGSVRVGRGPGKPLRFSAPSRHGCNPSYATDLVVCVALGCDMFDCVFPTRTARFGSALVPTGNLQLRKKVFEKDFGPIDPECTCPTCQKHSRAFLHALLHSDNTAALHHLTVHNIAYQLQLMSAVRTSIVEKRFPDFVRDFMGAMYGDPTLCPTWATDALASVGITLG

SEQ ID NO: 765999 - protein, 538 aa, Homo sapiens
HVVPTVKMAGAATQASLESAPRIMRLVAECSRSRARAGELWLPHGTVATPVFMPVGTQATMKGITTEQLDALGCRICLGNTYHLGLRPGPELIQKANGLHGFMNWPHNLLTDSGGFQMVSLVSLSEVTEEGVRFRSPYDGNETLLSPEKSVQIQNALGSDIIMQLDDVVSSTVTGPRVEEAMYRSIRWLDRCIAAHQRPDKQNLFAIIQGGLDADLRATCLEEMTKRDVPGFAIGGLSGGESKSQFWRMVALSTSRLPKDKPRYLMGVGYVVDREARALPVGSGFLGTPYPAWGGGIWGNGHRSDLRRLGRHGCPLGAILREYGPVWGSVRVGRGPGKPLRFSAPSRHGCNPSYATDLVVCVALGCDMFDCVFPTRTAAVRLWQKEVRAGDGWGTREARLGVGGGENEALGDAPFPALPLPQRFGSALVPTGNLQLRKKVFEKDFGPIDPECTCPTCQKHSRAFLHALLHSDNTAALHHLTVHNIAYQLQLMSAVRTSIVEKRFPDFVRDFMGAMYGDPTLCPTWATDALASVGITLG

SEQ ID NO: 766000 - protein, 282 aa, Homo sapiens
HVVPTVKMAGAATQASLESAPRIMRLVAECSRSRARAGELWLPHGTVATPVFMPVGTQATMKGITTEQLDALGCRICLGNTYHLGLRPGPELIQKANGLHGFMNWPHNLLTDSGGFQMVSLVSLSEVTEEGVRFRSPYDGNETLLSPEKSVQIQNALGSDIIMQLDDVVSSTVTGPRVEEAMYRSIRWLDRCIAAHQRPDKQNLFAIIQGGLDADLRATCLEEMTKRDVPGFAIGGLSGGESKSQFWRMVALSTSRLPKDKPRYLMGVGALALPWCPLGTCS

SEQ ID NO: 766001 - protein, 362 aa, Homo sapiens
HVVPTVKMAGAATQASLESAPRIMRLVAECSRSRARAGELWLPHGTVATPVFMPVGTQATMKGITTEQLDALGCRICLGNTYHLGLRPGPELIQKANGLHGFMNWPHNLLTDSGGFQMVSLVSLSEVTEEGVRFRSPYDGNETLLSPEKSVQIQNALGSDIIMQLDDVVSSTVTGPRVEEAMYRSIRWLDRCIAAHQRPDKQNLFAIIQGGLDADLRATCLEEMTKRDVPGFAIGGLSGGESKSQFWRMVALSTSRLPKDKPRYLMGVGYATDLVVCVALGCDMFDCVFPTRTASDNTAALHHLTVHNIAYQLQLMSAVRTSIVEKRFPDFVRDFMGAMYGDPTLCPTWATDALASVGITLG

SEQ ID NO: 766002 - protein, 438 aa, Homo sapiens
HVVPTVKMAGAATQASLESAPRIMRLVAECSRSRARAGELWLPHGTVATPVFMPVGTQATMKGITTEQLDALGCRICLGNTYHLGLRPGPELIQKANGLHGFMNWPHNLLTDSGGFQMVSLVSLSEVTEEGVRFRSPYDGNETLLSPEKSVQIQNALGSDIIMQLDDVVSSTVTGPRVEEAMYRSIRWLDRCIAAHQRPDKQNLFAIIQGGLDADLRATCLEGPQSESLKSRTLAGYHSSHLNPSTLGGQEMTKRDVPGFAIGGLSGGESKSQFWRMVALSTSRLPKDKPRYLMGVGYATDLVVCVALGCDMFDCVFPTRTARFGSALVPTGNLQLRKKVFEKDFGPIDPECTCPTCQKHSRAFLHALLHSDNTAALHHLTVHNIAYQLQLMSAVRTSIVEKRFPDFVRDFMGAMYGDPTLCPTWATDALASVGITLG

SEQ ID NO: 766003 - protein, 395 aa, Homo sapiens
HVVPTVKMAGAATQASLESAPRIMRLVAECSRSRARAGELWLPHGTVATPVFMPVGTQATMKGITTEQLDALGCRICLGNTYHLGLRPGPELIQKANGLHGFMNWPHNLLTVTEEGVRFRSPYDGNETLLSPEKSVQIQNALGSDIIMQLDDVVSSTVTGPRVEEAMYRSIRWLDRCIAAHQRPDKQNLFAIIQGGLDADLRATCLEEMTKRDVPGFAIGGLSGGESKSQFWRMVALSTSRLPKDKPRYLMGVGYATDLVVCVALGCDMFDCVFPTRTARFGSALVPTGNLQLRKKVFEKDFGPIDPECTCPTCQKHSRAFLHALLHSDNTAALHHLTVHNIAYQLQLMSAVRTSIVEKRFPDFVRDFMGAMYGDPTLCPTWATDALASVGITLG

SEQ ID NO: 766004 - protein, 492 aa, Homo sapiens
HVVPTVKMAGAATQASLESAPRIMRLVAECSRSRARAGELWLPHGTVATPVFMPVGTQATMKGITTEQLDALGCRICLGNTYHLGLRPVGGLCPRGEAARRRGVGSHGASSRPGHSSQSQSTSCIERPQMTRPCTGRERAAGTKAGQICLPRRAPRDAVTPNLTLSSINPGPELIQKANGLHGFMNWPHNLLTDSGGFQMVSLVSLSEVTEEGVRFRSPYDGNETLLSPEKSVQIQNALGSDIIMQLDDVVSSTVTGPRVEEAMYRSIRWLDRCIAAHQRPDKQNLFAIIQGGLDADLRATCLEEMTKRDVPGFAIGGLSGGESKSQFWRMVALSTSRLPKDKPRYLMGVGYATDLVVCVALGCDMFDCVFPTRTARFGSALVPTGNLQLRKKVFEKDFGPIDPECTCPTCQKHSRAFLHALLHSDNTAALHHLTVHNIAYQLQLMSAVRTSIVEKRFPDFVRDFMGAMYGDPTLCPTWATDALASVGITLG

SEQ ID NO: 766005 - protein, 402 aa, Homo sapiens
QATSCDSAPCIHAVGDPHCNRVRVCRAGAETVAVRLLHCSTPVFMPVGTQATMKGITTEQLDALGCRICLGNTYHLGLRPGPELIQKANGLHGFMNWPHNLLTDSGGFQMVSLVSLSEVTEEGVRFRSPYDGNETLLSPEKSVQIQNALGSDIIMQLDDVVSSTVTGPRVEEAMYRSIRWLDRCIAAHQRPDKQNLFAIIQGGLDADLRATCLEEMTKRDVPGFAIGGLSGGESKSQFWRMVALSTSRLPKDKPRYLMGVGYATDLVVCVALGCDMFDCVFPTRTARFGSALVPTGNLQLRKKVFEKDFGPIDPECTCPTCQKHSRAFLHALLHSDNTAALHHLTVHNIAYQLQLMSAVRTSIVEKRFPDFVRDFMGAMYGDPTLCPTWATDALASVGITLG

SEQ ID NO: 766006 - protein, 195 aa, Homo sapiens
KLKSSQKDKVRQFMIFTQSSEKTADSGGFQMVSLVSLSEVTEEGVRFRSPYDGNETLLSPEKSVQIQNALGSDIIMQLDDVVSSTVTGPRVEEAMYRSIRWLDRCIAAHQRPDKQNLFAIIQGGLDADLRATCLEEMTKRDVPGFAIGGLSGGESKSQFWRMVALSTSRLPKDKPRYLMGVGALALPWCPLGTCS

SEQ ID NO: 766007 - protein, 113 aa, Homo sapiens
HVVPTVKMAGAATQASLESAPRIMRLVAECSRSRARAGELWLPHGTVATPVFMPVGTQATMKGITTEQLDALGCRICLGNTYHLGLRPGPELIQKANGLHGFMNWPHNLLTVS

SEQ ID NO: 766008 - protein, 91 aa, Homo sapiens
LAVLSCPLPLYRHSRAFLHALLHSDNTAALHHLTVHNIAYQLQLMSAVRTSIVEKRFPDFVRDFMGAMYGDPTLCPTWATDALASVGITLG

SEQ ID NO: 766009 - protein, 527 aa, Homo sapiens
MSLCGARANAKMMAAYNGGTSAAAAGHHHHHHHHLPHLPPPHLHHHHHPQHHLHPGSAAAVHPVQQHTSSAAAAAAAAAAAAAMLNPGQQQPYFPSPAPGQAPGPAAAAPAQVQAAAAATVKAHHHQHSHHPQQQLDIEPDRPIGYGAFGVVWSVTDPRDGKRVALKKMPNVFQNLVSCKRVFRELKMLCFFKHDNVLSALDILQPPHIDYFEEIYVVTELMQSDLHKIIVSPQPLSSDHVKVFLYQILRGLKYLHSAGILHRDIKPGNLLVNSNCVLKICDFGLARVEELDESRHMTQEVVTQYYRAPEILMGSRHYSNAIDIWSVGCIFAELLGRRILFQAQSPIQQLDLITDLLGTPSLEAMRTACEGAKAHILRGPHKQPSLPVLYTLSSQATHEAVHLLCRMLVFDPSKRISAKDALAHPYLDEGRLRYHTCMCKCCFSTSTGRVYTSDFEPVTNPKFDDTFEKNLSSVRQVKEIIHQFILEQQKGNRVPLCINPQSAAFKSFISSTVAQPSEMPPSPLVWE

SEQ ID NO: 766010 - protein, 128 aa, Homo sapiens
VCAGHHPLSPPTLLSRSSRRRGQESARFRPYPARLPGLLFFGPGTLTFSRGGSLRLGVRALPTSFIPPCTSFPSLLPRLSFSSLSCCRLLSSLQPPSLAYSAQESLEPPPPLPNQVNLTRSRGRCRKA

SEQ ID NO: 766011 - protein, 128 aa, Homo sapiens; identical to SEQ ID NO: 766010

SEQ ID NO: 766012 - protein, 527 aa, Homo sapiens; identical to SEQ ID NO: 766009

SEQ ID NO: 766013 - protein, 124 aa, Homo sapiens
VSDAGSALSGFARGAAAAAAAAAAAAMLNPGQQQPYFPSPAPGQAPGPAAAAPAQVQAAAAATVKAHHHQHSHHPQQQLDIEPDRPIGYGAFGVVWLRICSTEKFLHYQPRLTATAGFFGGSAL

SEQ ID NO: 766014 - protein, 144 aa, Homo sapiens
QAVNVSFERSYVDSHFICSVDVLVSNLFQSKRISAKDALAHPYLDEGRLRYHTCMCKCCFSTSTGRVYTSDFEPVTNPKFDDTFEKNLSSVRQVKEIIHQFILEQQKGNRVPLCINPQSAAFKSFISSTVAQPSEMPPSPLVWE

SEQ ID NO: 766015 - protein, 100 aa, Homo sapiens
TFPAVVAMVRDAFLLEKGRGKSKGDFVLQLEYQLSHSGIEHQVGFQGSHFQTSSPVWHFCTRPGPERNALLRKKRLSIGGSKAVVTIGFEQEPVLGWLRI

SEQ ID NO: 766016 - protein, 119 aa, Homo sapiens
GKDPFWRAVGVAQKAAAVVACGAASPYRNRADVSVSDHSQSREGVQVILRRVRLSRVQDADLLDFCKPLEATYSFLMTALHLCWKNTHCDNCCLCLVCPGALPTSMFAEKPTLFLLAAM

SEQ ID NO: 766017 - protein, 247 aa, Homo sapiens
GKDPFWRAVGVAQKAAAVVACGAASPYRNRADVSVSDHSQSRGPGGLSLSGGTVCDMGKKTKRTADSSSSEDEEEYVVEKVLDRRVVKGQVEYLLKWKGFSEEHNTWEPEKNLDCPELISEFMKKYKKMKEGENNKPREKSESNKRKSNFSNSADDIKSKKKREQSNDIARGFERGLEPEKIIGATDSCGDLMFLMKWKDTDEADLVLAKEANVKCPQIVIAFYEERLTWHAYPEDAENKEKETAKS

SEQ ID NO: 766018 - protein, 224 aa, Homo sapiens
WEGRPLLLAQRERKNWGDPGPGGLSLSGGTVCDMGKKTKRTADSSSSEDEEEYVVEKVLDRRVVKGQVEYLLKWKGFSEEHNTWEPEKNLDCPELISEFMKKYKKMKEGENNKPREKSESNKRKSNFSNSADDIKSKKKREQSNDIARGFERGLEPEKIIGATDSCGDLMFLMKWKDTDEADLVLAKEANVKCPQIVIAFYEERLTWHAYPEDAENKEKETAKS

SEQ ID NO: 766019 - protein, 251 aa, Homo sapiens
  misc_feature (249)..(249): Xaa can be any naturally occurring amino acid
GKDPFWRAVGVAQKAAAVVACGAASPYRNRADVSVSDHSQSRGPGGLSLSGGTVCDMGKKTKRTADSSSSEDEEEYVVEKVLDRRVVKGQVEYLLKWKGFSEEHNTWEPEKNLDCPELISEFMKKYKKMKEGENNKPREKSESNKRKSNFSNSADDIKSKKKREQSNDIARGFERGLEPEKIIGATDSCGDLMFLMKWKDTDEADLVLAKEANVKCPQIVIAFYEERLTWHAYPEDADSLTYTFTLLLXSS

SEQ ID NO: 766020 - protein, 159 aa, Homo sapiens
GKDPFWRAVGVAQKAAAVVACGAASPYRNRADVSVSDHSQSRGPGGLSLSGGTVCDMGKKTKRTADSSSSEDEEEYVVEKVLDRRVVKGQVEYLLKWKGFSEEHNTWEPEKNLDCPELISEFMKKYKKMKEGENDQCPLRQSSPRHRQGRAKRFVREIK

SEQ ID NO: 766021 - protein, 47 aa, Homo sapiens
MGKKTKRTADSSSSEDEEEYVVEKVLDRRVVKVNLQEDRSFLPDHYG

SEQ ID NO: 766022 - protein, 1026 aa, Homo sapiens
MPRISIRVDKNRTKIGQSSSGGDMGLLICRKWQPIQVAQCMPPSSSGHVNCSDLIFKTKNLVCGQRTCQYLVLRLVLRNLGHVAAVVIGNIYDIHKNLIFFYRNNPSIIYYLPSVNRLYSVFFVFGFIVLSAAKTTFVLFLPTCSWFYRNVGSQRPVLISALSTKEIRCLLPAFVSVEVDVLALEELQPQTETCFMELSPLRRVNSEELSTLKHQVSNAKNLFFLCLVLFQDIFLSLSVINIKRSPFLQSYSTALPSRGYQGQLSSPLIAGLGRWPSSLDQMPGKSAYMGAPILNLERTMMFSSSNNNLVFFPPVLKLYCLSDKYNFYLKLEHTIFMLSKLNLHLDFLLSRSQRRSYIGSRFKFNSVFYFFSYVFYQLLLPFQIRIFFRRLFYLSTDCIFSFLIRSPGEMADILPWMILGGSLKNSKVIVCLLLVLILMQTFTSIIYLFFLDRVSLCHQAGVQWHNLGLLYPPPPGFKRFSCLSLSSSWDYRCVPPCPANFCIFGRDGVLPCLPGWSRFPDLGSAHLGLPKCWNYRHEPPCLATSIKFLWTKIKLSLFVCSHGALSVIQFFLNSSALFVALSSVIPDFAKDLGVVSEEGQVMGRQDEKSPGLACLRRLPTTSSLRLLEFLSPKQASVFCSQCYISKFFLNYWKQSLALLSLVWGHCWYQKSKSYSFDVGHESSITGVLESLTTIHWGAILRRIFGYLYSLQLVDDCFLVYQLHLYLLFCSWKILYLLGFFVCLFVFPTYSKYKWSEVILVFLRGLPCVKVDFLLLIYSHYRQNSGEQCCHGQNPVLVHSGEHLDLWCFLQLKVRWSLTVPQPYCILLCAFYFVSLMKDWFCPCNLGIYYSYSSFLFCSHPAVHFPYVQAKPQGIGEGFWDFLIEILLNLYFTPAFLRYSEGLEGSVFGPGSNCLYLKVQFSGHKILLCNVMRTPLDLKCGNGFSQFKGENPLCTHDPIILVEILELKNISVEIRTFVIRPPSMPVARQRGKVWSQCIAVSCYLYLLIIKIMFSKVDDTSLTPKNMF

SEQ ID NO: 766023 - protein, 991 aa, Homo sapiens
MPRISIRVDKNRTKIGQSSSGGDMGLLICRKWQPIQVAQCMPPSSSGHVNCSDLIFKTKNLVCGQRTCQYLVLRLVLRNLGHVAAVVIGNIYDIHKNLIFFYRNNPSIIYYLPSVNRLYSVFFVFGFIVLSAAKTTFVLFLPTCSWFYRNVGSQRPVLISALSTKEIRCLLPAFVSVEVDVLALEELQPQTETCFMELSPLRRVNSEELSTLKHQVSNAKNLFFLCLVLFQDIFLSLSVINIKRSPFLQSYSTALPSRGYQGQLSSPLIAGLGRWPSSLDQMPGKSAYMGAPILNLERTMMFSSSNNNLVFFPPVLKLYCLSDKYNFYLKLEHTIFMLSKLNLHLDFLLSRSQRRSYIGSRFKFNSVFYFFSYVFYQLLLPFQIRIFFRRLFYLSTDCIFSFLIRSPGEMADILPWMILGGSLKNSKVIVCLLLVLILMQTFTSIIYLFFLDRVSLCHQAGVQWHNLGLLYPPPPGFKRFSCLSLSSSWDYRCVPPCPANFCIFGRDGVLPCLPGWSRFPDLGSAHLGLPKCWNYRHEPPCLATSIKFLWTKIKLSLFVCSHGALSVIQFFLNSSALFVALSSVIPDFAKDLGVVSEEGQVMGRQDEKSPGLACLRRLPTTSSLRLLEFLSPKQASVFCSQCYISKFFLNYWKQSLALLSLVWGHCWYQKSKSYSFDVGHEIINNFILVYDELTINSLSAYKLCFCSKKKYVWYNKCYKPIHISDLGAETDWLMLYSLLPWSKKLTLISAYMWKRPITLGELSQLAIEHKNIFQEINIAGGLEMLLLLREKTGELGLRTPDFHPWFEILGQSSGRVNLCLWKALTMLQIQLCYIIVGSITTYSSWTLYQSCSHLFQFLIPFGGMNMRLNCLYSLKRTCFPMTRDFLKRSLGAHLLIPEHLLCSSAVLFNTGERVISFFLRRSLALSPRLECSGAISAHCKLHLPGSRHSPASASRGAGTTGAGHHARLIFVFLVETGFHLVSQDGLNLLTS

SEQ ID NO: 766024 - protein, 1026 aa, Homo sapiens; identical to SEQ ID NO: 766022

SEQ ID NO: 766025 - protein, 995 aa, Homo sapiens
MPIQVAQCMPPSSSGHVNCSDLIFENQKPSMWTKNMTIFGTEIGSEKPGACGCCGYKVIFEDIHKNLIFFYRNNPSIIYYLPSVNRLYSVFFVFGFIVLSAAKTTFVLFLPTCSWFYRNVGSQRPVLISALSTKEIRCLLPAFVSVEVDVLALEELQPQTETCFMELSPLRRVNSEELSTLKHQVSNAKNLFFLCLVLFQDIFLSLSVINIKRSPFLQSYSTALPSRGYQGQLSSPLIAGLGRWPSSEDQMPGKSAYMGAPILNLERTMMFSSSNNNLVFFPPVLKLYCLSDKYNFYLKLEHTIFMLSKLNLHLDFTPQRSQRRSYIGSRFKFNSVFYFFSYVFYQLLLPFQIRIFFRRLFYLSTDCIFSFLIRSPGEMADILPWMILGGSLKNSKVIVCLLLVLILMQTFTSIIYLFFLDRVSLCHQAGVQWHNLGLLYPPPPGFKRFSCLSLSSSWDYRCVPPCPANFCIFGRDGVLPCLPGWSRFPDLGSAHLGLPKCWNYRHEPPCLATSIKFLWTKIKLSLFVCSHGALSVIQFFLNSSALFVALSSVIPDFAKDLRGGFRGGSGDGKEDEKSPGLACLRRLPTTSSLRLLEFLSPKQASVFCSQCYISKFFLNYWKQSLALLSLVWGHCWYQKSKSYSFDVGHESSITGVLESLTTIHWGAILRRIFGYLYSLQLVDDCFLVYQLHLYLLFCSWKILYLLGFFVCLFVFPTYSKYKWSEVILVFLRGLPCVKVDFLLLIYSHYRQNSGEQCCHGQNPVLVHSGEHLDLWCFLQLKVRWSLTVPQPYCILLCAFYFVSLMKDWFCPCNLGIYYSYSSFLFCSHPAVHFPYVQAKPQGIGEGFWDFLIEILLNLEFTPAFLRYSEGLEGSVFGPGSNCLYLKVQFCGHKILLCNVMRTPLDLKCGNGFSQFKGENPLCTHDPIILVEILELKNISVEIRTFVIRPPSMPVARQRGKVWSQCIAVSCYLYLLIIKIMFSKVDDTSLTPKNMF

SEQ ID NO: 766026 - protein, 1111 aa, Homo sapiens
MTDWNNEAFWFKSARKILLNGNVIGQELINHTSSGWEFYLYIPSLSEGIKGLDQCWIIDNCLYLICSVSKRRKGWSGNIYHKCSQGYQLEVDKNRTKIGQSSSGGDMGLLICRKGQPIQVAQCMPPSSSGHVNCSDLIFKTKNLVCGQRTCQYLVLRLVLRNLGHVAAVVIGNIEDIHKNLIFFYRNNPSIIYYLPSVNRLYSVFFVFGFIVLSAAKTTFVLFLPTCSWFYRNVGSQRPVLISALSTKEIRCLLPAFVSVEVDVLALEELQPQTETCFMELSPLRRVNSEELSTLKHLSPNAKNLFFLCLVLFQDIFLSLSVINIKRSPFLQSYSTALPSRGYQGQLSSPLIAGLEQMAFKLRSNAGKISLHGSTHFKPGENHDVFFFKYQSSFFSPSTKIVLSFRQYNFYLKLEHTIFMLSKLNLHLDFLLSRSQRRSYIGSRFKFNSVFYFFSYVFYQLLLPFQIRIFFRRLFYLSTDCIFSFLIRSPGYMADILPWMILGGSLKNSKVIVCLLLVLILMQTFTSIIYLFFLDRVSLCHQAGVQWHNLGLLYPPPPGFKRFSCLSLSSSWDYRCVPPCPANFCIFGRDGVLPCLPGWSRFPDLGSAHLGLPKCWNYRHEPPCLATSIKFLWTKIKLSLFVCSHGALSVIQFFLNSSCPLCALSSVIPDFAKDLRGGFRGGSGDGKEDEKSPGLACLRRLPTTSSLRLLEFLSPKQASVFCSQCYISKFFLNYWKQSLALLSLVWGHCWYQKSKSYSFDVGHESSITGVLESLTTIHWGAILRRIFGYLYSLQLVDDCFLVYQLHLYLLFCSWKILYLLGFFVCLFVFPTYSKYKWSEVILVFLRGLPCVKVDFLLLIYSHYRQNSGEQCCHGQNPVLVHSGEHLDLLVLLTIKSLDGPVTVPQPYCILLCAFYFVSLMKDWFCPCNLGIYYSSTLHFLFCSHPAVHFPYVQAKPQGIGEGFWDFLIEILLNLEFTPAFLRYSEGLEGSVFGPGSNCLYLKVQFSGHKILLCNVMRTPLDLKCGNGFSQFKGENPLCTHDPIILVEILELKNISVEIRTFVIRPPSMPVARQRGKVWSQCIAVSCYLYLLIIKIMFSKVDDTSLTPKNMF

SEQ ID NO: 766027 - protein, 1026 aa, Homo sapiens; identical to SEQ ID NO: 766022

SEQ ID NO: 766028 - protein, 917 aa, Homo sapiens
MARAPEEVIWVSLFAENDSLIQVAQCMPPSSSGHVNCSDLIFKTKNLVCGQRTCQYLVLRLVLRNLGHVAAVVIGNIEDIHKNLIFFYRNNPSIIYYLPSVNRLYSVFFVFGFIVLSAAKTTFVLFLPTCSWFYRNVGSQRPVLISALSTKEIRCLLPAFVSVEVDVLALEELQPQTETCFMELSPLRRVNSEELSTLKHQVSNAKNLFFLCLVLFQDIFLSLSVINIKRSPFLQSYSTALPSRGYQGQLSSPLIAGLEQMAFKLRSNAGKISLHGSTHFKPGENHDVFFFKEQSSFFSPSTKIVLSFRQYNFYLKLEHTIFMLSKLNLHLDFLLSRSQRRSYIGSRFKFNSVFYFFSYVFYQLLLPFQIRIFFRRLFYLSTDCIFSFLIRSPGEMADILPWMILGGSLRFQSDCLSSSCLDPNADIHLYYLFIFFRQSLALSPGWSAVAQSWLTVPSTSWVQAILLPQPLEYAGTTGVCHHAQLIFVFLVEMGFYHVCQDGLDFLTLGSAHLGLPKCWNYRHEPPCLATSIKFLWTKIKLSLFVCSHGALSVIQFFLNSSALFVALSSVIPDFAKDLRGGFRGGSGDGKEDEKSPGLACLRRLPTTSSLRLLEFLSPKQASVFCSQCYISKFFLNYWKQSLALLSLVWGHCWYQKSKSYSFDVGHESSITGVLESLTTIHWGAILRRIFGYLYSLQLVDDCFLVYQLHLYLLFCSWKILYLLGFFVCLFVFPTYSKYKWSEVILVFLRGLPCVKVDFLLLIYSHYRQNSGEQCCHGQNPVLVHSGEHLDLWCFLQLKVRWSLTVPQPYCILLCAFYFVSLMKDWFCPCNLGIYYSSTLHSCSVATQQSIFPMFRPNHRALGKVFGIFLLNFVESVVYPSFPKVTVRGWRDLCLARGAIVSTLRFSFEGIKYYFAMS

SEQ ID NO: 766029 - protein, 247 aa, Homo sapiens; identical to SEQ ID NO: 766017

SEQ ID NO: 766030 - protein, 879 aa, Homo sapiens
MVGSQRPVLISALSTKEIRCLLPAFVSVEVDVLALEELQPQTETCFMELSPLRRVNSYELSTLKHLKSQMLKIYFFLCLVLFQDIFLSLSVINIKRSPFLQSYSTALPSRGYQGQLSSPLIAGLGRWPSSYDQMPGKSAYMGAPILNLERTMMFSSSNNNLVFFPPVLKLYCLSDKYNFYLKLEHTIFMLSKLNLHLDFSSSVDPREEADIGSRFKFNSVFYFFSYVFYQLLLPFQIRIFFRRLFYLSTDCIFSFLIRSPGYMADILPWMILGGSLKNSKVIVCLLLVLILMQTFTSIIYLFFLDRVSLCHQAGVQWHNLGLLYPPPPGFKRFSCLSLSSSWDYRCVPPCPANFCIFGRDGVLPCLPGWSRFPDLGSAHLGLPKCWNYRHEPPCLATSIKFLWTKIKLSLFVCSHGALSVIQFFLNSSALFVALSSVIPDFAKDLRGGFRGGSGDGKEDEKSPGLACLRRLPTTSSLRLLEFLSPKQASVFCSQCYISKFFLNYWKQSLALLSLVWGHCWYQKSKSYSFDVGHESSITGVLESLTTIHWGAILRRIFGYLYSLQLVDDCFLVYQLHLYLLFCSWKILYLLGFFVCLFVFPTYSKYKWSEVILVFLRGLPCVKVDFLLLIYSHYRQNSGEQCCHGQNPVLVHSGEHLDLWCFLQLKVRWSLTVPQPYCILLCAFYFVSLMKDWFCPCNLGIYYFNSSFLFCSHPAVHFPYVQAKPQGIGEGFWDFLIEILLNLYFTPAFLRYSEGLEGSVFGPGSNCLYLKVQFSGHKILLCNVMRTPLDLKCGNGFSQFKGENPLCTHDPIILVEILELKNISVEIRTFVIRPPSMPVARQRGKVWSQCIAVSCYLYLLIIKIMFSKVDDTSLTPKNMF

SEQ ID NO: 766031 - protein, 872 aa, Homo sapiens
MWTKNMTIFGTEIGSEKPGACGCCGYEVIFEDIHKNLIFFYRNNPSIIYYLPSVNRLYSVFFVFGFIVLSAAKTTFVLFLPTCSWFYRNVGSQRPVLISALSTKEIRCLLPAFVSVEVDVLALEELQPQTETCFMELSPLRRVNSEELSTLKHLKSQMLKIYFFLCLVLFQDIFLSLSVINIKRSPFLQSYSTALPSRGYQGQLSSPLIAGLGRWPSSLDQMPGKSAYMGAPILNLERTMMFSSSNNNLVFFPPVLKLYCLSDKYNFYLKLEHTIFMLSKLNLHLDFSSSVDPREEADIGSRFKFNSVFYFFSYVFYQLLLPFQIRIFFRRLFYLSTDCIFSFLIRSPGEMADILPWMILGGSLKNSKVIVCLLLVLILMQTFTSIIYLFFLDRVSLCHQAGVQWHNLGLLYPPPPGFKRFSCLSLSSSWDYRCVPPCPANFCIFGRDGVLPCLPGWSRFPDLGSAHLGLPKCWNYRHEPPCLATSIKFLWTKIKLSLFVCSHGALSVIQFFLNSSALFVALSSVIPDFAKDLRGGFRGGSGDGKEDEKSPGLACLRRLPTTSSLRLLEFLSPKQASVFCSQCYISKFFLNYWKQSLALLSLVWGHCWYQKSKSYSFDVGHESSITGVLESLTTIHWGAILRRIFGYLYSLQLVDDCFLVYQLHLYLLFCSWKILYLLGFFVCLFVFPTYSKYKWSEVILVFLRGLPCVKVDFLLLIYSHYRQNSGEQCCHGQNPVLVHSGEHLDLWCFLQLKVRWSLTVPQPYCILLCAFYFVSLMKDWFCPCNLGIYYFLTLHSCSVATQQSIFPMFRPNHRALGKVFGIFLLNFVESVVYPSFPKVTVRGWRDLCLARGAIVSTLRFSFEGIKYYFAMS

SEQ ID NO: 766032 - protein, 820 aa, Homo sapiens
MLSTLKHQVSNAKNLFFLCLVLFQDIFLSLSVINIKRSPFLQSYSTALPSRGYQGQLSSPLIAGLEQMAFKLRSNAGKISLHGSTHFKPGENHDVFFFKYQSSFFSPSTKIVLSFRQYNFYLKLEHTIFMLSKLNLHLDFLLSRSQRRSYIGSRFKFNSVFYFFSYVFYQLLLPFQIRIFFRRLFYLSTDCIFSFLIRSPGEMADILPWMILGGSLKNSKVIVCLLLVLILMQTFTSIIYLFFLDRVSLCHQAGVQWHNLGLLYPPPPGFKRFSCLSLSSSWDYRCVPPCPANFCIFGRDGVLPCLPGWSRFPDLGSAHLGLPKCWNYRHEPPCLATSIKFLWTKIKLSLFVCSHGALSVIQFFLNSSALFVALSSVIPDFAKDLRGGFRGGSGDGKEDEKSPGLACLRRLPTTSSLRLLEFLSPKQASVFCSQCYISKFFLNYWKQSLALLSLVWGHCWYQKSKSYSFDVGHESSITELLESLTTIHWGAILRRIFGYLYSLQLVDDCFLVYQLHLYLLFCSWKILYLLGFFVCLFVFPTYSKKKWSEVILVFLRGLPCVKVDFLLLIYSHYRQNSGEQCCHGQNPVLVHSGEHLDLLVLLTIKSLDGPVTVPQPYCILLCAFYFVSLMKDWFCPCNLGIYYSYSSFLFCSHPAVHFPYVQAKPQGIGEGFWDFLIEILLNLYFTPAFLRYSEGLEGSVFGPGSNCLYLKVQFSGHKILLCNVMRTPLDLKCGNGFSQFKGENPLCTHDPIILVEILELKNISVEIRTFVIRPPSMPVARQRGKVWSQCIAVSCYLYLLIIKIMFSKVDDTSLTPKNMF

SEQ ID NO: 766033 - protein, 247 aa, Homo sapiens; identical to SEQ ID NO: 766017

SEQ ID NO: 766034 - protein, 998 aa, Homo sapiens
MAQVAMSTLPVEDEESSESRMVVTFLMSALESMCKELAKSKAEVACIAVYETDVFVVGTERGRAFVNTRKDFQKDFVKYCVEEEEKAAEMHKMKSTTQANRMSVDAVEIETLRKTVEDYFCFCYGKALGKSTVVPVPYEKMLRDQSAVVVQGLPEGVAFKHPENYDLATLKWILENKAGISFIIKRPFLEPKKHVGGRVMVTDADRSILSPGGSCGPIKVKTEPTEDSGISLEMAAVTVKEESEDPDYYQYNIQAGPSETDDVDEKQPLSKPLQGSHHSSEGNEGTEMEVPAEDSTQHVPSETSEDPEVEVTIEDDDYSPPSKRPKANELPQPPVPEPANAGKRKVREFNFEKWNARITDLRKQVEELFERKYAQAIKAKGPVTIPYPLFQSHVEDLYVEGLPEGIPFRRPSTYGIPRLERILLAKERIRFVIKKHELLNSTREDLQLDKPASGVKEEWYARITKLRKMVDQLFCKKFAEALGSTEAKAVPYQKFEAHPNDLYVEGLPENIPFRSPSWYGIPRLEKIIQVGNRIKFVIKRPELLTHSTTEVTQPRTNTPVKEDWNVRITKLRKQVEEIFNLKFAQALGLTEAVKVPYPVFESNPEFLYVEGLPEGIPFRSPTWFGIPRLERIVRGSNKIKFVVKKPELVISYLPPGMASKINTKALQSPKRPRSPGSNSKVPEIEVTVEGPNNNNPQTSAVRTPTQTNGSNVPFKPRGREFSFEAWNAKITDLKQKVENLFNEKCGEALGLKQAVKVPFALFESFPEDFYVEGLPEGVPFRRPSTFGIPRLEKILRNKAKIKFIIKKPEMFETAIKESTSSKSPPRKINSSPNVNTTASGVEDLNIIQVTIPDDDNERLSKVEKARQLREQVNDLFSRKFGEAIGMGFPVKVPYRKITINPGCVVVDGMPPGVSFKAPSYLEISSMRRILDSAEFIKFTVIRPFPGLVINNQLVDQSESEGPVIQESAEPSQLEVPATEEIKETDGSSQIKQEPDPTW

SEQ ID NO: 766035 - protein, 978 aa, Homo sapiens
MAQVAMSTLPVEDEESSESRMVVTFLMSALESMCKELAKSKAEVACIAVYETDVFVVGTERGRAFVNTRKDFQKDFVKYCVEEEEKAAEMHKMKSTTQANRMSVDAVEIETLRKTVEDYFCFCYGKALGKSTVVPVPYEKMLRDQSAVVVQGLPEGVAFKHPENYDLATLKWILENKAGISFIIKRPFLEPKKHVGGRVMVTDADRSILSPGGSCGPIKVKTEPTEDSGISLEMAAVTVKEESEDPDYYQYNIQGSHHSSEGNEGTEMEVPAEDSTQHVPSETSEDPEVEVTIEDDDYSPPSKRPKANELPQPPVPEPANAGKRKVREFNFEKWNARITDLRKQVEELFERKYAQAIKAKGPVTIPYPLFQSHVEDLYVEGLPEGIPFRRPSTYGIPRLERILLAKERIRFVIKKHELLNSTREDLQLDKPASGVKEEWYARITKLRKMVDQLFCKKFAEALGSTEAKAVPYQKFEAHPNDLYVEGLPENIPFRSPSWYGIPRLEKIIQVGNRIKFVIKRPELLTHSTTEVTQPRTNTPVKEDWNVRITKLRKQVEEIFNLKFAQALGLTEAVKVPYPVFESNPEFLYVEGLPEGIPFRSPTWFGIPRLERIVRGSNKIKFVVKKPELVISYLPPGMASKINTKALQSPKRPRSPGSNSKVPEIEVTVEGPNNNNPQTSAVRTPTQTNGSNVPFKPRGREFSFEAWNAKITDLKQKVENLFNEKCGEALGLKQAVKVPFALFESFPEDFYVEGLPEGVPFRRPSTFGIPRLEKILRNKAKIKFIIKKPEMFETAIKESTSSKSPPRKINSSPNVNTTASGVEDLNIIQVTIPDDDNERLSKVEKARQLREQVNDLFSRKFGEAIGMGFPVKVPYRKITINPGCVVVDGMPPGVSFKAPSYLEISSMRRILDSAEFIKFTVIRPFPGLVINNQLVDQSESEGPVIQESAEPSQLEVPATEEIKETDGSSQIKQEPDPTW

SEQ ID NO: 766036 - protein, 537 aa, Homo sapiens
MAQVAMSTLPVEDEESSESRMVVTFLMSALESMCKELAKSKAEVACIAVYETDVFVVGTERGRAFVNTRKDFQKDFVKYCVEEEEKAAEMHKMKSTTQANRMSVDAVEIETLRKTVEDYFCFCYGKALGKSTVVPVPYEKMLRDQSAVVVQGLPEGVAFKHPENYDLATLKWILENKAGISFIIKRPFLEPKKHVGGRVMVTDADRSILSPGGSCGPIKVKTEPTEDSGISLEMAAVTVKEESEDPDYYQYNIQGSHHSSEGNEGTEMEVPAEDDDYSPPSKRPKANELPQPPVPEPANAGKRKVREFNFEKWNARITDLRKQVEELFERKYAQAIKAKGPVTIPYPLFQSHVEDLYVEGLPEGIPFRRPSTYGIPRLERILLAKERIRFVIKKHELLNSTREDLQLDKPASGVKEEWYARITKLRKMVDQLFCKKFAEALGSTEAKAVPYQKFEAHPNDLYVEGLPENIPFRSPSWYGIPRLEKIIQVGNRIKFVIKRPELLTHSTTEVTQPRTNTPEIKETDGSSQIKQEPDPTW

SEQ ID NO: 766037 - protein, 957 aa, Homo sapiens
MAQVAMSTLPVEDEESSESRMVVTFLMSALESMCKELAKSKAEVACIAVYETDVFVVGTERGRAFVNTRKDFQKDFVKYCVEEEEKAAEMHKMKSTTQANRMSVDAVEIETLRKTVEDYFCFCYGKALGKSTVVPVPYEKMLRDQSAVVVQGLPEGVAFKHPENYDLATLKWILENKAGISFIIKRPFLEPKKHVGGRVMVTDADRSILSPGGSCGPIKVKTEPTEDSGISLEMAAVTVKEESEDPDYYQYNIQGSHHSSEGNEGTEMEVPAEDDDYSPPSKRPKANELPQPPVPEPANAGKRKVREFNFEKWNARITDLRKQVEELFERKYAQAIKAKGPVTIPYPLFQSHVEDLYVEGLPEGIPFRRPSTYGIPRLERILLAKERIRFVIKKHELLNSTREDLQLDKPASGVKEEWYARITKLRKMVDQLFCKKFAEALGSTEAKAVPYQKFEAHPNDLYVEGLPENIPFRSPSWYGIPRLEKIIQVGNRIKFVIKRPELLTHSTTEVTQPRTNTPVKEDWNVRITKLRKQVEEIFNLKFAQALGLTEAVKVPYPVFESNPEFLYVEGLPEGIPFRSPTWFGIPRLERIVRGSNKIKFVVKKPELVISYLPPGMASKINTKALQSPKRPRSPGSNSKVPEIEVTVEGPNNNNPQTSAVRTPTQTNGSNVPFKPRGREFSFEAWNAKITDLKQKVENLFNEKCGEALGLKQAVKVPFALFESFPEDFYVEGLPEGVPFRRPSTFGIPRLEKILRNKAKIKFIIKKPEMFETAIKESTSSKSPPRKINSSPNVNTTASGVEDLNIIQVTIPDDDNERLSKVEKARQLREQVNDLFSRKFGEAIGMGFPVKVPYRKITINPGCVVVDGMPPGVSFKAPSYLEISSMRRILDSAEFIKFTVIRPFPGLVINNQLVDQSESEGPVIQESAEPSQLEVPATEEIKETDGSSQIKQEPDPTW

SEQ ID NO: 766038 - protein, 977 aa, Homo sapiens
MAQVAMSTLPVEDEESSESRMVVTFLMSALESMCKELAKSKAEVACIAVYETDVFVVGTERGRAFVNTRKDFQKDFVKYCVEEEEKAAEMHKMKSTTQANRMSVDAVEIETLRKTVEDYFCFCYGKALGKSTVVPVPYEKMLRDQSAVVVQGLPEGVAFKHPENYDLATLKWILENKAGISFIIKRPFLEPKKHVGGRVMVTDADRSILSPGGSCGPIKVKTEPTEDSGISLEMAAVTVKEESEDPDYYQYNIQAGPSETDDVDEKQPLSKPLQGSHHSSEGNEGTEMEVPAEDDDYSPPSKRPKANELPQPPVPEPANAGKRKVREFNFEKWNARITDLRKQVEELFERKYAQAIKAKGPVTIPYPLFQSHVEDLYVEGLPEGIPFRRPSTYGIPRLERILLAKERIRFVIKKHELLNSTREDLQLDKPASGVKEEWYARITKLRKMVDQLFCKKFAEALGSTEAKAVPYQKFEAHPNDLYVEGLPENIPFRSPSWYGIPRLEKIIQVGNRIKFVIKRPELLTHSTTEVTQPRTNTPVKEDWNVRITKLRKQVEEIFNLKFAQALGLTEAVKVPYPVFESNPEFLYVEGLPEGIPFRSPTWFGIPRLERIVRGSNKIKFVVKKPELVISYLPPGMASKINTKALQSPKRPRSPGSNSKVPEIEVTVEGPNNNNPQTSAVRTPTQTNGSNVPFKPRGREFSFEAWNAKITDLKQKVENLFNEKCGEALGLKQAVKVPFALFESFPEDFYVEGLPEGVPFRRPSTFGIPRLEKILRNKAKIKFIIKKPEMFETAIKESTSSKSPPRKINSSPNVNTTASGVEDLNIIQVTIPDDDNERLSKVEKARQLREQVNDLFSRKFGEAIGMGFPVKVPYRKITINPGCVVVDGMPPGVSFKAPSYLEISSMRRILDSAEFIKFTVIRPFPGLVINNQLVDQSESEGPVIQESAEPSQLEVPATEEIKETDGSSQIKQEPDPTW

SEQ ID NO: 766039 - protein, 121 aa, Homo sapiens [sequence omitted]

SEQ ID NO: 766040 - protein, 71 aa, Homo sapiens
ELWPTFADQESTLALIREPLVCGNCQSADVKRVPDWVMVSPEVAPQLCHSVSTATSLILTSHGEVRFLQGK

SEQ ID NO: 766041 - protein, 494 aa, Homo sapiens [sequence omitted]

SEQ ID NO: 766042 - protein, 494 aa, Homo sapiens [sequence omitted]

SEQ ID NO: 766043 - protein, 494 aa, Homo sapiens [sequence omitted]

SEQ ID NO: 766044 - protein, 371 aa, Homo sapiens
MRQAGEVTYADAHKGRKNEGVIEFVSYSDMKRALEKLDGTEVNGRKIRLVEDKPGSRRRRSYSRSRSHSRSRSRSRHSRKSRSRSGSSKSSHSKSRSRSRSGSRSRSKSRSRSQSRSRSKKEKSRSPSKDKSRSRSHSAGKSRSKSKDQAEEKIQNNDNVGKPKSRSPSRHKSKSKSRSRSQERRVEEEKRGSVSRGRSQEKSLRQSRSRSRSKAGSRSRSRSRSKSKDKRKSRKRSREESRSRSRSRSKSERSRKRGSKRDSKAGSSKKKKKEDTDRSQSRSPSRSVSKEREHAKSESSQREGRGESENAGTNQETRSRSRSNSKSKPNLPSESRSRSKSASKTRSRSKSRSRSASRSPSRSRSRSHSRS

SEQ ID NO: 766045 - protein, 371 aa, Homo sapiens; identical to SEQ ID NO: 766044

SEQ ID NO: 766046 - protein, 371 aa, Homo sapiens; identical to SEQ ID NO: 766044

SEQ ID NO: 766047 - protein, 464 aa, Homo sapiens [sequence omitted]

SEQ ID NO: 766048 - protein, 317 aa, Homo sapiens
MSRGEAGCKSAEGRPRSRSRSRHSRKSRSRSGSSKSSHSKSRSRSRSGSRSRSKSRSRSQSRSRSKKEKSRSPSKDKSRSRSHSAGKSRSKSKDQAEEKIQNNDNVGKPKSRSPSRHKSKSKSRSRSQERRVEEEKRGSVSRGRSQEKSLRQSRSRSRSKAGSRSRSRSRSKSKDKRKSRKRSREESRSRSRSRSKSERSRKRGSKRDSKAGSSKKKKKEDTDRSQSRSPSRSVSKEREHAKSESSQREGRGESENAGTNQETRSRSRSNSKSKPNLPSESRSRSKSASKTRSRSKSRSRSASRSPSRSRSRSHSRS

SEQ ID NO: 766049 - protein, 341 aa, Homo sapiens
MRQAGEVTYADAHKGRKNEGVIEFVSYSDMKRALEKLDGTEVNGRKIRLVEDKPGSRRRRSYSRSRSHSRSGSRSRSKSRSRSQSRSRSKKEKSRSPSKDKSRSRSHSAGKSRSKSKDQAEEKIQNNDNVGKPKSRSPSRHKSKSKSRSRSQERRVEEEKRGSVSRGRSQEKSLRQSRSRSRSKAGSRSRSRSRSKSKDKRKSRKRSREESRSRSRSRSKSERSRKRGSKRDSKAGSSKKKKKEDTDRSQSRSPSRSVSKEREHAKSESSQREGRGESENAGTNQETRSRSRSNSKSKPNLPSESRSRSKSASKTRSRSKSRSRSASRSPSRSRSRSHSRS

SEQ ID NO: 766050 - protein, 442 aa, Homo sapiens
MPRVYIGRLSYQARERDVERFFKGYGKILEVDLKNGYGFVEFDDLRDADDAVYELNGKDLCGERVIVEHARGPRRDGSYGSGRSGYGYRRSGRDKYGPPTRTEYRLIVENLSSRCSWQDLKDYMRQAGEVTYADAHKGRKNEGVIEFVSYSDMKRALEKLDGTEVNGRKIRLVEDKPGSRRRRSYSRSRSHSRSRSRSRHSRKSRSRSGSSKSSHSKSRSRSRSGSRSRSKSRSRSQSRSRSKKEKSRSPSKDKSRSRSHSAGKSRSKSKDQAEEKIQNNDNVGKPKSRSPSRHKSKSKSRSRSQERRVEEEKRGSVSRGRSQEKSLRQSRSRSRSKAGSRSRSRSRSKSKDKRKSRKRSREESRSRSRSRSKSERSRKRGSKRDSKAGSSKKKKKEDTDRSQSRSPSRSVSKEREHAKFFCTCLVAVAQVIGVEHVTAVHF

SEQ ID NO: 766051 - protein, 366 aa, Homo sapiens
MPRVYIGRLSYQARERDVERFFKGYGKILEVDLKNGYGFVEFDDLRDADDAVYELNGKDLCGERVIVEHARGPRRDGSYGSGRSGYGYRRSGRDKYGPPTRTEYRLIVENLSSRCSWQDLKDYMRQAGEVTYADAHKGRKNEGVIEFVSYSDMKRALEKLDGTEVNGRKIRLVEDKPGSRRRRSYSRSRSHSRSRSRSRHSRKSRSRSGSSKSSHSKSRSRSRSGSRSRSKSRSRSQSRSRSKKEKSRSPSKDKSRSRSHSAGKSRSKSKDQAEEKIQNNDNVGKPKSRSPSRHKSTRARTRGRAGREAERRAAVAVAAAARVRGAESEAASETARRAAGPEQEPQQEQGQEEEQEEKQRGEPQSI

SEQ ID NO: 766052 - protein, 71 aa, Homo sapiens; identical to SEQ ID NO: 766040

SEQ ID NO: 766053 - protein, 208 aa, Homo sapiens
RVQKAVAQADCRLHMFKTGEGPGLLRFARSCSLGDLVSHLTLQALACLTCQGRYPPNQAAGEEEGSREWSRKRSREESRSRSRSRSKSERSRKRGSKRDSKAGSSKKKKKEDTDRSQSRSPSRSVSKEREHAKSESSQREGRGESENAGTNQETRSRSRSNSKSKPNLPSESRSRSKSASKTRSRSKSRSRSASRSPSRSRSRSHSRS

SEQ ID NO: 766054 - protein, 415 aa, Homo sapiens
MPRVYIGRLSYQARERDVERFFKGYGKILEVDLKNGYGFVEFDDLRDADDAVYELNGKDLCGERVIVEHARGPRRDGSYGSGRSGYGYRRSGRDKYGPPTRTEYRLIVENLSSRCSWQDLKDYMRQAGEVTYADAHKGRKNEGVIEFVSYSDMKRALEKLDGTEVNGRKIRLVEDKPGSRRRRSYSRSRSHSRSRSRSRHSRKSRSRSGSSKSSHSKSRSRSRSGSRSRSKSRSRSQSRSRSKKEKSRSPSKDKSRSRSHSAGKSRSKSKDQAEEKIQNNDNVGKPKSRSPSRHKSKSKSRSRSQERRVEEEKRGSVSRGRSQEKSLRQSRSRSRSKAGSRSRSRSRSKSKDKRKSRKRSREESRSRSRSRSKSERSRKRGSKRDSKAGSSKKKKKEDTDRSQSQVGEEVPSRRR

SEQ ID NO: 766055 - protein, 262 aa, Homo sapiens
MPRVYIGRLSYQARERDVERFFKGYGKILEVDLKNGYGFVEFDDLRDADDAVYELNGKDLCGERVIVEHARGPRRDGSYGSGRSGYGYRRSGRDKYGPPTRTEYRLIVENLSSRCSWQDLKDYMRQAGEVTYADAHKGRKNEGVIEFVSYSDMKRALEKLDGTEVNGRKIRLVEDKPGSRRRRSYSRSRSHSRSRSRSRHSRKSRSRSGSSKSSHSKSRSRSRSGSRSRSKSRSRSQSRSRSKKEKSRSPSSCTSPVDCFLG

SEQ ID NO: 766056 - protein, 119 aa, Homo sapiens
MKLVRFLMKLSHETVTIELKNGTQVHGTITGVDVSMNTHLKAVKMTLKNREPVQLETLSIRGNNIRYFILPDSLPLDTLLVDVEPKVKSKKREAVAGRGRGRGRGRGRGRGRGRGGPRR

SEQ ID NO: 766057 - protein, 119 aa, Homo sapiens; identical to SEQ ID NO: 766056

SEQ ID NO: 766058 - protein, 119 aa, Homo sapiens; identical to SEQ ID NO: 766056

SEQ ID NO: 766059 - protein, 119 aa, Homo sapiens; identical to SEQ ID NO: 766056

SEQ ID NO: 766060 - protein, 105 aa, Homo sapiens
MAEAVKHGTQVHGTITGVDVSMNTHLKAVKMTLKNREPVQLETLSIRGNNIRYFILPDSLPLDTLLVDVEPKVKSKKREAVAGRGRGRGRGRGRGRGRGRGGPRR

SEQ ID NO: 766061 - protein, 200 aa, Homo sapiens
GGAVCGLSARQARTQLHTRLSRHLRPGFTQSSGEPRIHWRKALSVSRGNSQGYSEVCLGSLSCSSGTLMPRMILSNTTAVTPFLTKLWQETVQQGGNMSGLARRSPRSGDGKLEALYVLMVLGFFGFFTLGIMLSYIRSKKLEHSNDPFNVYIESDAWQEKDKAYVQARVLESYRSCYVVENHLAIEQPNTHLPETKPSP

SEQ ID NO: 766062 - protein, 103 aa, Homo sapiens
AGAEVSGGDPDSASGSAMGQRSQEPEPLGQRRLCSQRPLASVLSKPSELQGRLKSLTHQTLGRDRARNPREFSLGSDSKTNDSSPARSPSLAVVSGHLTCSSQ

SEQ ID NO: 766063 - protein, 250 aa, Homo sapiens
MSIFTPTNQIRLTNVAVVRMKRAGKRFEIACYKNKVVGWRSGVEKDLDEVLQTHSVFVNVSKGQVAKKEDLISAFGTDDQTEICKQILTKGEVQVSDKERHTQLEQMFRDIATIVADKCVNPETKRPYTVILIERAMKDIHYSVKTNKSTKQQALEVIKQLKEKMKIERAHMRLRFILPVNEGKKLKEKLKPLIKVIESEDYGQQLEIVCLIDPGCFREIDELIKKETKGKGSLEVLNLKDVEEGDEKFE

SEQ ID NO: 766064 - protein, 250 aa, Homo sapiens; identical to SEQ ID NO: 766063

SEQ ID NO: 766065 - protein, 225 aa, Homo sapiens
MSKFQVYSHRTFSPALTREKDLDEVLQTHSVFVNVSKGQVAKKEDLISAFGTDDQTEICKQILTKGEVQVSDKERHTQLEQMFRDIATIVADKCVNPETKRPYTVILIERAMKDIHYSVKTNKSTKQQALEVIKQLKEKMKIERAHMRLRFILPVNEGKKLKEKLKPLIKVIESEDYGQQLEIVCLIDPGCFREIDELIKKETKGKGSLEVLNLKDVEEGDEKFE

SEQ ID NO: 766066 - protein, 120 aa, Homo sapiens
  misc_feature (16)..(16): Xaa can be any naturally occurring amino acid
VCLPVISAENWKPATXTDQVIQSLIALVNDPQPEHPLRADLAEEYSKDRKKFCKNAEDVNVPLIKVIESEDYGQQLEIVCLIDPGCFREIDELIKKETKGKGSLEVLNLKDVEEGDEKFE

SEQ ID NO: 766067 - protein, 207 aa, Homo sapiens
MSIFTPTNQIRLTNVAVVRMKRAGKRFEIACYKNKVVGWRSGVEKDLDEVLQTHSVFVNVSKGQVAKKEDLISAFGTDDQTEICKQIVSKGEVQVFTIQKDKTHQQNGETGMVWGEPLGTKLVGLDPHMVVDASLDTIKQEPITPVESFDLERSPRHSANIPRKYGTATTLRRQGPKNQHAHVQDVILDEITTRNSNQHKGTPNKAL

SEQ ID NO: 766068 - protein, 152 aa, Homo sapiens
MSIFTPTNQIRLTNVAVVRMKRAGKRFEIACYKNKVVGWRSGVEKDLDEVLQTHSVFVNVSKGQVAKKEDLISAFGTDDQTEICKQILTKGEVQVSDKERHTQLEQMFRDIATIVADKCVNPETKRPYTVILIERAMKDIIIVNHRYNSSLE

SEQ ID NO: 766069 - protein, 250 aa, Homo sapiens; identical to SEQ ID NO: 766063

SEQ ID NO: 766070 - protein, 278 aa, Homo sapiens
MSIFTPTNQIRLTNVAVVRMKRAGKRFEIACYKNKVVGWRSGVEKDLDEVLQTHSVFVNVSKGQVAKKEDLISAFGTDDQTEICKQILTKGEVQVSDKERHTQLEQMFRDIATIVADKCVNPETKRPYTVILIERAMKDIHYSVKTNKSTKQQALEVIKQLKEKMKIERAHMRLRFILPVNEGKKLKEKLKPLIKVIESEDYGQQLEIVCLIDPGCFREIDELIKKETNCKTAFGRSLVVFRDKALSSGDDSSHTCYFLALEDLAVGQYVEVEDPDPG

SEQ ID NO: 766071 - protein, 69 aa, Homo sapiens
EVQVSDKERHTQLEQMFRDIATIVADKCVNPETKRPYTVILIERAMKDIHYSVKTNKSTKQQVSGFSCH

SEQ ID NO: 766072 - protein, 198 aa, Homo sapiens
MHNFEEELTCPICYSIFEDPRVLPCSHTFCRNCLENILQASGNFYIWRPLRIPLKCPNCRSITEIAPTGIESLPVNFALRAIIEKYQQEDHPDIVTCPEHYRQPLNVYCLLDKKLVCGHCLTIGQHHGHPIDDLQSAYLKEKDTPQKLLEQLTDTHWTDLTHLIEKLKEQKSHSEKMIQGDKEAVLQYFKELNDTLEQ

SEQ ID NO: 766073 - protein, 198 aa, Homo sapiens; identical to SEQ ID NO: 766072

SEQ ID NO: 766074 - protein, 198 aa, Homo sapiens; identical to SEQ ID NO: 766072

SEQ ID NO: 766075 - protein, 213 aa, Homo sapiens
ASFTQWLLHRGCRWSCLPVPRCGPVLLSPWVVDGTGRRGAGGCTRRVGSSAAQEPTERGRLRHGGLQVSSPVPQGGSQGPVTNRVQCPWASTAGGPSTHSAAAGPGAKPLIALGQQGRPAAPSAGPTKPTPTRNSSWPASPTRSPGSRWRFFLHTSLQAEGAGSSLGQPRKGLPQCSGGLKGSSSATKVGAQAEEALRASQGCEDCQHSVTSQ

SEQ ID NO: 766076 - protein, 271 aa, Homo sapiens
MAKVPDMFEDLKNCYSENEEDSSSIDHLSLNQKSFYHVSYGPLHEGCMDQSVSLSISETSKTSKLTFKESMVVVATNGKVLKKRRLSLSQSITDDDLEAIANDSEEEIIKPRSAPFSFLSNVKYNFMRIIKYEFILNDALNQSIIRANDQYLTAAALHNLDEAVKFDMGAYKSSKDDAKITVILRISKTQLYVTAQDEDQPVLLKEMPEIPKTITGSETNLLFFWETHGTKNYFTSVAHPNLFIATKQDYWVCLAGGPPSITDFQILENQA

SEQ ID NO: 766077 - protein, 271 aa, Homo sapiens; identical to SEQ ID NO: 766076

SEQ ID NO: 766078 - protein, 271 aa, Homo sapiens; identical to SEQ ID NO: 766076

SEQ ID NO: 766079 - protein, 531 aa, Homo sapiens [sequence omitted]

SEQ ID NO: 766080 - protein, 424 aa, Homo sapiens
MISPDPRPSPGLARWAESYEAKCERRQEIRESRRCRPNVTTCRQVGKTLRIQQREQLQRARLQQFFRRRNLELEEKGKAQHPQAREQGPSRRPGQVTVLKEPLSCARRISSPREQVTGTSSEVFPAQHPPPSGICRDLSDHLSSQAGGLPPQDTPIKKPPKHHRGTQTKAEGPTIKNDASQQTNYGVAVLDKEIIQLSDYLKEALQRELVLKQKMVILQDLLSTLIQASDSSWKGQLNEDKLKGKLRSLENQLYTCTQKYSPWGMKKVLLEMEDQKNSYEQKAKESLQKVLEEKMNAEQQLQSTQRSLALAEQKCEEWRSQYEALKEDWRTLGTQHRELESQLHVLQSKLQGADSRDLQMNQALRFLENEHQELQAKIECLQGDRDLCSLDTQDLQDQLKRSEAEKLTLVTRVQQLQEAAGWTT

SEQ ID NO: 766081 - protein, 446 aa, Homo sapiens
MISPDPRPSPGLARWAESYEAKCERRQEIRESRRCRPNVTTCRQVGKTLRIQQREQLQRARLQQFFRRRNLELEEKGKAQHPQAREQGPSRRPGQVTVLKEPLSCARRISSPREQVTGTSSEVFPAQHPPPSGICRDLSDHLSSQAGGLPPQDTPIKKPPKHHRGTQTKAEGPTIKNDASQQTNYGVAVLDKEIIQLSDYLKEALQRELVLKQKMVILQDLLSTLIQASDSSWKGQLNEDKLKGKLRSLENQLYTCTQKYSPWGMKKVLLEMEDQKNSYEQKAKESLQKVLEEKMNAEQQLQSTQRSLALAEQKCEEWRSQYEALKEDWRTLGTQHRELESQLHVLQSKLQGADSRDLQMNQALRFLENEHQELQAKIECLQGDRDLCSLDTQDLQDQLKRSEAEKLTLVTRVQQLQGLLQNQSLQLQEQEKLLTKKGQQIYYHKF

SEQ ID NO: 766082 - protein, 449 aa, Homo sapiens
MISPDPRPSPGLARWAESYEAKCERRQEIRESRRCRPNVTTCRQVGKTLRIQQREQLQRARLQQFFRRRNLELEEKGKAQHPQAREQGPSRRPGQVTVLKEPLSCARRISSPREQVTGTSSEVFPAQHPPPSGICRDLSDHLSSQAGGLPPQDTPIKKPPKHHRGTQTKAEGPTIKNDASQQTNYGVAVLDKEIIQLSDYLKEALQRELVLKQKMVILQDLLSTLIQASDSSWKGQLNEDKLKGKLRSLENQLYTCTQKYSPWGMKKVLLEMEDQKNSYEQKAKESLQKVLEEKMNAEQQLQSTQRSLALAEQKCEEWRSQYEALKEDWRTLGTQHRELESQLHVLQSKLQGADSRDLQMNQALRFLENEHQELQAKIECLQGDRDLCSLDTQDLQDQLKRSEAEKLTLVTRVQQLQGLLQNQSLQLQEQEKLLTKKVQRTAFRIRQPQ

SEQ ID NO: 766083 - protein, 253 aa, Homo sapiens
EQRDELWAGASVVRWWCFWRADQRQGKTTQKQELKTSDRHQGQLNEDKLKGKLRSLENQLYTCTQKYSPWGMKKVLLEMEDQKNSYEQKAKESLQKVLEEKMNAEQQLQSTQRSLALAEQKCEEWRSQYEALKEDWRTLGTQHRELESQLHVLQSKLQGADSRDLQMNQALRFLENEHQELQAKIECLQGDRDLCSLDTQDLQDQLKRSEAEKLTLVTRVQQLQGLLQNQSLQLQEQEKLLTKKGQQIYYHKF

SEQ ID NO: 766084 - protein, 424 aa, Homo sapiens; identical to SEQ ID NO: 766080

SEQ ID NO: 766085 - protein, 531 aa, Homo sapiens
MISPDPRPSPGLARWAESYEAKCERRQEIRESRRCRPNVTTCRQVGKTLRIQQREQLQRARLQQFFRRRNLELEEKGKAQHPQAREQGPSRRPGQVTVLKEPLSCARRISSPREQVTGTSSEVFPAQHPPPSGICRDLSDHLSSQAGGLPPQDTPIKKPPKHHRGTQTKAEGPTIKNDASQQTNYGVAVLDKEIIQLSDYLKEALQRELVLKQKMVILQDLLSTLIQASDSSWKGQLNEDKLKGKLRSLENQLYTCTQKYSPWGMKKVLLEMEDQKNSYEQKAKESLQKVLEEKMNAEQQLQSTQRSLALAEQKCEEWRSQYEALKEDWRTLGTQHRELESQLHVLQSKLQGADSRDLQMNQALRFLENEHQELQAKIECLQGDRDLCSLDTQDLQDQLKRSEAEKLTLVTRVQQLQDQALPVWSPKSFPNEVEPEGTGKEKDWDLRDQLQKKTLQLQAKEKECRELHSELDNLSDEYLSCLRKLQHCREELNQSQQLPPRRQCGRWLPVLMVVIAAALAVFLANKDNLMI

SEQ ID NO: 766086 - protein, 424 aa, Homo sapiens; identical to SEQ ID NO: 766080

SEQ ID NO: 766087 - protein, 425 aa, Homo sapiens
MISPDPRPSPGLARWAESYEAKCERRQEIRESRRCRPNVTTCRQVGKTLRIQQREQLQRARLQQFFRRRNLELEEKGKAQHPQAREQGPSRRPGQVTVLKEPLSCARRISSPREQVTGTSSEVFPAQHPPPSGICRDLSDHLSSQAGGLPPQDTPIKKPPKHHRGTQTKAEGPTIKNDASQQTNYGVAVLDKEIIQLSDYLKEALQRELVLKQKMVILQDLLSTLIQASDSSWKGQLNEDKLKGKLRSLENQLYTCTQKYSPWGMKKVLLEMEDQKNSYEQKAKESLQKVLEEKMNAEQQLQSTQRSLALAEQKCEEWRSQYEALKEDWRTLGTQHRELESQLHVLQSKLQGADSRDLQMNQALRFLENEHQELQAKIECLQGDRDLCSLDTQDLQGLLQNQSLQLQEQEKLLTKKGQQIYYHKF

SEQ ID NO: 766088 - protein, 106 aa, Homo sapiens
QRARLQQFFRRRNLELEEKGKAQHPQAREQGPSRRPGQVTVLKEPLSCARRISSPREQVGRVKGHTAVCSGTLSGQGGWVGSRSLKSDLNQVLLPQSYSKVAKSYL

SEQ ID NO: 766089 - protein, 84 aa, Homo sapiens
CIKFTEILPLGNEKSTTGDGRPELDNLSDEYLSCLRKLQHCREELNQSQQLPPRRQCGRWLPVLMVVIAAALAVFLANKDNLMI

SEQ ID NO: 766090 - protein, 446 aa, Homo sapiens; identical to SEQ ID NO: 766081

SEQ ID NO: 766091 - protein, 129 aa, Homo sapiens
MSSPNPLSKLHPKKASSSELPTVGKERMSLIYLQGADSRDLQMNQALRFLENEHQELQAKIECLQGDRDLCSLDTQDLQDQLKRSEAEKLTLVTRVQQLQGLLQNQSLQLQEQEKLLTKKGQQIYYHKF

SEQ ID NO: 766092 - protein, 551 aa, Homo sapiens [sequence omitted]

SEQ ID NO: 766093 - protein, 449 aa, Homo sapiens; identical to SEQ ID NO: 766082

SEQ ID NO: 766094 - protein, 106 aa, Homo sapiens
MRAYWPDVIHSFPNRSRFWKHEWEKHGTCAAQVDALNSQKKYFGRSLELYRELDLNRWVRPSPGCTSQWGSLLSPKPDSWIQGSGCRPHCPPAASACALFGYWDHS

SEQ ID NO: 766095 - protein, 88 aa, Homo sapiens
SILVFRFACFCVLIPPPLRLEDEEVQTIGQIELCLTKQDQQLQNCTEPGEQPSPKQEVWLANGAAESRGLRVCEDGPVFYPPPKKTKH

SEQ ID NO: 766096 - protein, 256 aa, Homo sapiens
MRPAALRGALLGCLCLALLCLGGADKRLRDNHEWKKLIMVQHWPETVCEKIQNDCRDPPDYWTIHGLWPDKSEGCNRSWPFNLEEIKDLLPEMRAYWPDVIHSFPNRSRFWKHEWEKHGTCAAQVDALNSQKKYFGRSLELYRELDLNSVLLKLGIKPSINYYQVADFKDALARVYGVIPKIQCLPPSQDEEVQTIGQIELCLTKQDQQLQNCTEPGEQPSPKQEVWLANGAAESRGLRVCEDGPVFYPPPKKTKH

SEQ ID NO: 766097 - protein, 164 aa, Homo sapiens
MRAYWPDVIHSFPNRSRFWKHEWEKHGTCAAQVDALNSQKKYFGRSLELYRELDLNSVLLKLGIKPSINYYQVADFKDALARVYGVIPKIQCLPPSQDEEVQTIGQIELCLTKQDQQLQNCTEPGEQPSPKQEVWLANGAAESRGLRVCEDGPVFYPPPKKTKH

SEQ ID NO: 766098 - protein, 164 aa, Homo sapiens; identical to SEQ ID NO: 766097

SEQ ID NO: 766099 - protein, 198 aa, Homo sapiens
MRPAALRGALLGCLCLALLCLGGADKRLRDNHEWKKLIMVQHWPETVCEKIQNDCRDPPDYWTIHGLWPDKSEGCNRSWPFNLEEIKDLLPEMRAYWPDVIHSFPNRSRFWKHEWEKHGTCAAQVDALNSQKKYFGRSLELYRELDLNRWVRPSPGCTSQWGSLLSPKPDSWIQGSGCRPHCPPAASACALFGYWDHS

SEQ ID NO: 766100 - protein, 162 aa, Homo sapiens
MRPAALRGALLGCLCLALLCLGGADKRLRDNHEWKKLIMVQHWPETVCEKIQNDCRDPPDYWTIHGLWPDKSEGCNRSWPFNLEEIKDLLPEMRAYWPDVIHSFPNRSRFWKHEWEKHGTCAAQVDALNSQKKYFGRSLELYRELDLNRLQILKMPLPEYME

SEQ ID NO: 766101 - protein, 158 aa, Homo sapiens
MRPAALRGALLGCLCLALLCLGGADKRLRDNHEWKKLIMVQHWPETVCEKIQNDCRDPPDYWTIHGLWPDKSEGCNRSWPFNLEEIKDLLPEMRAYWPDVIHSFPNRSRFWKHEWEKHGTCAAQVDALNSQKKYFGRSLELYRELDLNRMRKYRQLVR

SEQ ID NO: 766102 - protein, 203 aa, Homo sapiens
MRPAALRGALLGCLCLALLCLGGADKRLRDNHEWKKLIMVQHWPETVCEKIQNDCRDPPDYWTIHGLWPDKSEGCNRSWPFNLEEIKDLLPEMRAYWPDVIHSFPNRSRFWKHEWEKHGTCAAQVDALNSQKKYFGRSLELYRELDLNSVLLKLGIKPSINYYQVSLAFASFLVCLSRGPPVGPFQPLSQWAVNCPSANPLPT

SEQ ID NO: 766103 - protein, 169 aa, Homo sapiens
MRPAALRGALLGCLCLALLCLGGADKRLRDNHEWKKLIMVQHWPETVCEKIQNDCRDPPDYWTIHGLWPDKSEGCNRSWPFNLEEIKDLLPEMRAYWPDVIHSFPNRSRFWKHEWEKHGTCAAQVDALNSQKKYFGRSLELYRELDLNSVLLKLGIKPSINYYQELKAA

SEQ ID NO: 766104 - protein, 172 aa, Homo sapiens
MRPAALRGALLGCLCLALLCLGGADKRLRDNHEWKKLIMVQHWPETVCEKIQNDCRDPPDYWTIHGLWPDKSEGCNRSWPFNLEEIKDLLPEMRAYWPDVIHSFPNRSRFWKHEWEKHGTCAAQVDALNSQKKYFGRSLELYRELDLNSHQGRTIYCPVLKGVPPRSGRTFV

SEQ ID NO: 766105 - protein, 106 aa, Homo sapiens; identical to SEQ ID NO: 766094

SEQ ID NO: 766106 - protein, 111 aa, Homo sapiens
MRAYWPDVIHSFPNRSRFWKHEWEKHGTCAAQVDALNSQKKYFGRSLELYRELDLNSVLLKLGIKPSINYYQVSLAFASFLVCLSRGPPVGPFQPLSQWAVNCPSANPLPT

SEQ ID NO: 766107 - protein, 256 aa, Homo sapiens; identical to SEQ ID NO: 766096

SEQ ID NO: 766108 - protein, 256 aa, Homo sapiens; identical to SEQ ID NO: 766096

SEQ ID NO: 766109 - protein, 584 aa, Homo sapiens
SSESLPPGGSGRGQISFWGKPLTLAPCHRPGSVPPSFHFPPSLPPVPQPLAERRVLPAGIAGNTKRWFLFFKTSVSWEGVWRGRMSNSVPLLCFWSLCYCFAAGSPVPFGPEGRLEDKLHKPKATQTEVKPSVRFNLRTSKDPEHEGCYLSVGHSQPLEDCSFNMTAKTFFIIHGWTMSGIFENWLHKLVSALHTREKDANVVVVDWLPLAHQLYTDAVNNTRVVGHSIARMLDWLQEKDDFSLGNVHLIGYSLGAHVAGYAGNFVKGTVGRITGLDPAGPMFEGADIHKRLSPDDADFVDVLHTYTRSFGLSIGIQMPVGHIDIYPNGGDFQPGCGLNDVLGSIAYGTITEVVKCEHERAVHLFVDSLVNQDKPSFAFQCTDSNRFKKGICLSCRKNRCNSIGYNAKKMRNKRNSKMYLKTRAGMPFRVYHYQMKIHVFSYKNMGEIEPTFYVTLYGTNADSQTLPLEIVERIEQNATNTFLVYTEEDLGDLLKIQLTWEGASQSWYNLWKEFRSYLSQPRNPGRELNIRRIRVKSGETQRKLTFCTEDPENTSISPGRELWFRKCRDGWRMKNETSPTVELP

SEQ ID NO: 766110 - protein, 175 aa, Homo sapiens
MRNKRNSKMYLKTRAGMPFRVYHYQMKIHVFSYKNMGEIEPTFYVTLYGTNADSQTLPLEIVERIEQNATNTFLVYTEEDLGDLLKIQLTWEGASQSWYNLWKEFRSYLSQPRNPGRELNIRRIRVKSGETQRKLTFCTEDPENTSISPGRELWFRKCRDGWRMKNETSPTVELP

SEQ ID NO: 766111 - protein, 284 aa, Homo sapiens
SSESLPPGGSGRGQISFWGKPLTLAPCHRPGSVPPSFHFPPSLPPVPQPLAERRVLPAGIAGNTKRWFLFFKTSVSWEGVWRGRMSNSVPLLCFWSLCYCFAAGSPVPFGPEGRLEDKLHKPKATQTEVKPSVRFNLRTSKDPEHEGCYLSVGHSQPLEDCSFNMTAKTFFIIHGWTMSGIFENWLHKLVSALHTREKDANVVVVDWLPLAHQLYTDAVNNTRVVGHSIARMLDWLQVLGDERESPVTSRISNPIFLRNAGHASVAMNFWSLIKIFEIKSFIEL

SEQ ID NO: 766112 - protein, 161 aa, Homo sapiens [sequence omitted]

SEQ ID NO: 766113 - protein, 386 aa, Homo sapiens [sequence omitted]

SEQ ID NO: 766114 - protein, 130 aa, Homo sapiens
QHQQYCPGSWCFLRMRWAQPGGAAFSLAYAGLVALLVAAIFLCNGSVTLSLCRMYRQQKRHQGSLGPRPRTGEDEVDHLILLALMTVVMAVCSLPLTVSPLRSWEEWGEEEGSSVGCAHVTDGETEAQKR

SEQ ID NO: 766115 - protein, 290 aa, Homo sapiens
MMPQEQYTHHRSTMPGSVGPQVYKVGIYGWRKRCLYFFVLLLMILILVNLAMTIWILKVMNFTIDGMGNLRITEKGLKLEGDSEFLQPLYAKEIQSRPGNALYFKSARNVTVNILNDQTKVLTQLITGPKAVEAYGKKFEVKTVSGKLLFSADNNEVVVGAERLRVLGAEGTVFPKSIETPNVRADPFKELRLESPTRSLVMEAPKGVEINAEAGNMEATCRTELRLESKDGEIKLDAAKIRLPRLPHGSYTPTGTRQKVFEICVCANGRLFLSQAGAGSTCQINTSVCL

SEQ ID NO: 766116 - protein, 256 aa, Homo sapiens
MMPQEQYTHHRSTMPGSVGPQVYKVGIYGWRKRCLYFFVLLLMILILVNLAMTIWILKVMNFTIDGMGNLRITEKGLKLEGDSEFLQPLYAKEIQSRPGNALYFKSARNVTVNILNDQTKVLTQLITGPKAVEAYGKKFEVKTVSGKLLFSADNNEVVVGAERLRVLGAEGTVFPKSIETPNVRADPFKELRLESPTRSLVMEAPKGVEINAEAGNMEATCRTELRLESKDGEVRDEKDRSSKSYSFNRPTLPITG

SEQ ID NO: 766117 - protein, 290 aa, Homo sapiens; identical to SEQ ID NO: 766115

SEQ ID NO: 766118 - protein, 294 aa, Homo sapiens
MMPQEQYTHHRSTMPGSVGPQVYKVGIYGWRKRCLYFFVLLLMILILVNLAMTIWILKVMNFTISIHLLLRFKLAIQMLWNELRGARTRSQVTQIPVPTLLLDGMGNLRITEKGLKLEGDSEFLQPLYAKEIQSRPGNALYFKSARNVTVNILNDQTKVLTQLITGPKAVEAYGKKFEVKTVSGKLLFSADNNEVVVGAERLRVLGAEGTVFPKSIETPNVRADPFKELRLESPTRSLVMEAPKGVEINAEAGNMEATCRTELRLESKDGEVRDEKDRSSKSYSFNRPTLPITG

SEQ ID NO: 766119 - protein, 78 aa, Homo sapiens
KPQAPWLASAKVAVGCPQASAWPPPPISYQEELYDFPSCGKWRARSQGSAEASQWPAPAAAPAAHSPHLSLGGKFFQG

SEQ ID NO: 766120 - protein, 78 aa, Homo sapiens; identical to SEQ ID NO: 766119

SEQ ID NO: 766121 - protein, 84 aa, Homo sapiens
LRLGTRLGGCFSMASASCSPGGALASPEPGRKILPRMISHSELRKLFYSADAVCFDVDSTVISEEGIGCFHWIWRKCDQATSQG

SEQ ID NO: 766122 - protein, 78 aa, Homo sapiens; identical to SEQ ID NO: 766119

SEQ ID NO: 766123 - protein, 397 aa, Homo sapiens
MNCISDFFTYETTKSVVVKSWTIGIINRVVQLLIISYFVGWVFLHEKAYQVRDTAIESSVVTKVKGSGLYANRVMDVSDYVTPPQGTSVFVIITKMIVTENQMQGFCPESEEKYRCVSDSQCGPERLPGGGILTGRCVNYSSVLRTCEIQGWCPTEVDTVETPIMMEAENFTIFIKNSIRFPLFNFEKGNLLPNLTARDMKTCRFHPDKDPFCPILRVGDVVKFAGQDFAKLARTGGVLGIKIGWVCDLDKAWDQCIPKYSFTRLDSVSEKSSVSPGYNFRFAKYYKMENGSEYRTLLKAFGIRFDVLVYGNAGKFNIIPTIISSVAAFTSVGVGTVLCDIILLNFLKGADQYKAKKFEEVNETTLKIAALTNPVYPSDQTTAEKQSTDSGAFSIGH

SEQ ID NO: 766124 - protein, 419 aa, Homo sapiens
MASIFSKLLTGRNASLLFATMGTSVLTTGYLLNRQKVCAEVREQPRLFPPSADYPDLRKHNNCMAECLTPAIYAKLRNKVTPNGYTLDQCIQTGVDNPGHPFIKTVGMVAGDEESYEVFADLFDPVIKLRHNGYDPRVMKHTTDLDASKITQGQFDEHYVLSSRVRTGRSIRGLSLPPACTRAERREVENVAITALEGLKGDLAGRYYKLSEMTEQDQQRLIDDHFLFDKPVSPLLTCAGMARDWPDARGIWHNYDKTFLIWINEEDHTRVISMEKGGNMKRVFERFCRGLKEVERLIQERGWEFMWNERLGYILTCPSNLGTGLRAGVHVRIPKLSKDPRFSKILENLRLQKRGTGGVDTAAVADVYDISNIDRIGRSEVELVQIVIDGVNYLVDCEKKLERGQDIKVPPPLPQFGKK

SEQ ID NO: 766125 - protein, 446 aa, Homo sapiens
LHTLLGCVRSAGRGRLRLQGDTHPRGRMASIFSKLLTGRNASLLFATMGTSVLTTGYLLNRQKVCAEVREQPRLFPPSADYPDLRKHNNCMAECLTPAIYAKLRNKVTPNGYTLDQCIQTGVDNPGHPFIKTVGMVAGDEESYEVFADLFDPVIKLRHNGYDPRVMKHTTDLDASKITQGQFDEHYVLSSRVRTGRSIRGLSLPPACTRAERREVENVAITALEGLKGDLAGRYYKLSEMTEQDQQRLIDDHFLFDKPVSPLLTCAGMARDWPDARGIWHNYDKTFLIWINEEDHTRVISMEKGGNMKRVFERFCRGLKEVERLIQERGWEFMWNERLGYILTCPSNLGTGLRAGVHVRIPKLSKDPRFSKILENLRLQKRGTGGVDTAAVADVYDISNIDRIGRSEVELVQIVIDGVNYLVDCEKKLERGQDIKVPPPLPQFGKK

SEQ ID NO: 766126 - protein, 427 aa, Homo sapiens
LHTLLGCVRSAGRGRLRLQGDTHPRGRMASIFSKLLTGRNASLLFATMGTSVLTTGYLLNRQKVCAEVREQPRLFPPSADYPDLRKHNNCMAECLTPAIYAKLRNKVTPNGYTLDQCIQTGVDNPGHPFIKTVGMVAGDEESYEVFADLFDPVIKLRHNGYDPRVMKHTTDLDASKITQGQFDEHYVLSSRVRTGRSIRGLSLPPACTRAERREVENVAITALEGLKGDLAGRYYKLSEMSPLLTCAGMARDWPDARGIWHNYDKTFLIWINEEDHTRVISMEKGGNMKRVFERFCRGLKEVERLIQERGWEFMWNERLGYILTCPSNLGTGLRAGVHVRIPKLSKDPRFSKILENLRLQKRGTGGVDTAAVADVYDISNIDRIGRSEVELVQIVIDGVNYLVDCEKKLERGQDIKVPPPLPQFGKK

SEQ ID NO: 766127 - protein, 373 aa, Homo sapiens
LHTLLGCVRSAGRGRLRLQGDTHPRGRMASIFSKLLTGRNASLLFATMGTSVLTTGYLLNRQKVCAEVREQPRLFPPSADYPDLRKHNNCMAECLTPAIYAKLRNKVTPNGYTLDQCIQTGVDNPGHPFIKTVGMVAGDEESYEVFADLFDPVIKLRHNGYDPRVMKHTTDLDASKITQGQFDEHYVLSSRVRTGRSIRGLSLPPACTRAERREVENVAITALEGLKGDLAGRYYKLSEMTEQDQQRLIDDHFLFDKPVSPLLTCAGMARDWPDARGIWHNYDKTFLIWINEEDHTRVISMEKGGNMKRVFERFCRGLKEVERLIQERGWEFMWNERLGYILTCPSNLGTGLRAGVHVRIPKLSKVLLCAQWP

SEQ ID NO: 766128 - protein, 414 aa, Homo sapiens
LHTLLGCVRSAGRGRLRLQGDTHPRGRMASIFSKLLTGRNASLLFATMGTSVLTTGYLLNRQKVCAEVREQPRLFPPSADYPDLRKHNNCMAECLTPAIYAKLRNKVTPNGYTLDQCIQTGVDNPGHPFIKTVGMVAGDEESYEVFADLFDPVIKLRHNGYDPRVMKHTTDLDASKITQGQFDEHYVLSSRVRTGRSIRGLSLPPACTRAERREVENVAITALEGLKGDLAGRYYKLSEMTEQDQQRLIDDHFLFDKPVSPLLTCAGMARDWPDARGIWHNYDKTFLIWINEEDHTRVISMEKGGNMKRVFERFCRGLKEVERLIQERGWEFMWNERLGYILTCPSNLGTGLRAGVHVRIPKLSKDPRFSKILENLRLQKRGTGGVDTAAVADVYDISNIDRIGRSEVTSLSLS

SEQ ID NO: 766129 - protein, 331 aa, Homo sapiens
LHTLLGCVRSAGRGRLRLQGDTHPRGRMASIFSKLLTGRNASLLFATMGTSVLTTGYLLNRQKVCAEVREQPRLFPPSADYPDLRKHNNCMAECLTPAIYAKLRNKVTPNGYTLDQCIQTGVDNPGHPFIKTVGMVAGDEESYEVFADLFDPVIKLRHNGYDPRVMKHTTDLDASKITQGQFDEHYVLSSRVRTGRSIRGLSLPPACTRAERREVENVAITALEGLKGDLAGRYYKLSEMTEQDQQRLIDDHFLFDKPVSPLLTCAGMARDWPDARGIWHNYDKTFLIWINEEDHTRVISMEKGGNMKRVFERFCRGLKEVRCYLRFLDIY

SEQ ID NO: 766130 - protein, 251 aa, Homo sapiens
LHTLLGCVRSAGRGRLRLQGDTHPRGRMASIFSKLLTGRNASLLFATMGTSVLTTGYLLNRQKVCAEVREQPRLFPPSADYPDLRKHNNCMAECLTPAIYAKLRNKVTPNGYTLDQCIQTGVDNPGHPFIKTVGMVAGDEESYEVFADLFDPVIKLRHNGYDPRVMKHTTDLDASKITQGQFDEHYVLSSRVRTGRSIRGLSLPPACTRAERREVENVAITALEGLKGDLAGRYYKLSEMTEQDQQRLIDA

SEQ ID NO: 766131 - protein, 874 aa, Homo sapiens
HPQLQHRAADQPVDMMSIKAFTLVSAVERELLMGDKERVNIECVECCGRDLYVGTNDCFVYHFLLEERPVPAGPATFTATKQLQRHLGFKKPVNELRAASALNRLLVLCDNSISLVNMLNLEPVPSGARIKGAATFALNENPVSGDPFCVEVCIISVKRRTIQMFLVYEDRVQIVKEVSTAEQPLAVAVDGHFLCLALTTQYIIHNYSTGVSQDLFPYCSEERPPIVKRIGRQEFLLAGPGGLGMFATVAGISQRAPVHWSENVIGAAVSFPYVIALDDEFITVHSMLDQQQKQTLPFKEGHILQDFEGRVIVATSKGVYILVPLPLEKQIQDLLASRRVEEALVLAKGARRNIPKEKFQVMYRRILQQAGFIQFAQLQFLEAKELFRSGQLDVRELISLYPFLLPTSSSFTRSHPPLHEYADLNQLTQGDQEKMAKCKRFLMSYLNEVRSTEVANGYKEDIDTALLKLYAEADHDSLLDLLVTENFCLLTDSAAWLEKHKKYFALGLLYHYNNQDAAAVQLWVNIVNGDVQDSTRSDLYEYIVDFLTYCLDEELVWAYADWVLQKSEEVGVQVFTKRPLDEQQKNSFNPDDIINCLKKYPKALVKYLEHLVIDKRLQKEEYHTHLAVLYLEEVLLQRASASGKGAEATETQAKLRRLLQKSDLYRVHFLLERLQGAGLPMESAILHGKLGEHEKALHILVHELQDFAAAEDYCLWCSEGRDPPHRQQLFHTLLAIYLHAGPTAHELAVAAVDLLNRHATEFDAAQVLQMLPDTWSVQLLCPFLMGAMRDSIHARRTMQVALGLARSENLIYTYDKMKLKGSSIQLSDKKLCQICQNPFCEPVFVRYPNGGLVHTHCAASRHTNPSSSSPGTRT

SEQ ID NO: 766132 - protein, 630 aa, Homo sapiens
MFATVAGISQRAPVHWSENVIGAAVSFPYVIALDDEFITVHSMLDQQQKQTLPFKEGHILQDFEGRVIVATSKGVYILVPLPLEKQIQDLLASRRVEEALVLAKGARRNIPKEKFQVMYRRILQQAGFIQFAQLQFLEAKELFRSGQLDVRELISLYPFLLPTSSSFTRSHPPLHEYADLNQLTQGDQEKMAKCKRFLMSYLNEVRSTEVANGYKEDIDTALLKLYAEADHDSLLDLLVTENFCLLTDSAAWLEKHKKYFALGLLYHYNNQDAAAVQLWVNIVNGDVQDSTRSDLYEYIVDFLTYCLDEELVWAYADWVLQKSEEVGVQVFTKRPLDEQQKNSFNPDDIINCLKKYPKALVKYLEHLVIDKRLQKEEYHTHLAVLYLEEVLLQRASASGKGAEATETQAKLRRLLQKSDLYRVHFLLERLQGAGLPMESAILHGKLGEHEKALHILVHELQDFAAAEDYCLWCSEGRDPPHRQQLFHTLLAIYLHAGPTAHELAVAAVDLLNRHATEFDAAQVLQMLPDTWSVQLLCPFLMGAMRDSIHARRTMQVALGLARSENLIYTYDKMKLKGSSIQLSDKKLCQICQNPFCEPVFVRYPNGGLVHTHCAASRHTNPSSSSPGTRT

SEQ ID NO: 766133 - protein, 874 aa, Homo sapiens; identical to SEQ ID NO: 766131

SEQ ID NO: 766134 - protein, 892 aa, Homo sapiens
SPGAAGRSGAAGPQAAGRRGTAGAGAADQPVDMMSIKAFTLVSAVERELLMGDKERVNIECVECCGRDLYVGTNDCFVYHFLLEERPVPAGPATFTATKQLQRHLGFKKPVNELRAASALNRLLVLCDNSISLVNMLNLEPVPSGARIKGAATFALNENPVSGDPFCVEVCIISVKRRTIQMFLVYEDRVQIVKEVSTAEQPLAVAVDGHFLCLALTTQYIIHNYSTGVSQDLFPYCSEERPPIVKRIGRQEFLLAGPGGLGMFATVAGISQRAPVHWSENVIGAAVSFPYVIALDDEFITVHSMLDQQQKQTLPFKEGHILQDFEGRVIVATSKGVYILVPLPLEKQIQDLLASRRVEEALVLAKGARRNIPKEKFQVMYRRILQQAGFIQFAQLQFLEAKELFRSGQLDVRELISLYPFLLPTSSSFTRSHPPLHEYADLNQLTQGDQEKMAKCKRFLMSYLNEVRSTEVANGYKEDIDTALLKLYAEADHDSLLDLLVTENFCLLTDSAAWLEKHKKYFALGLLYHYNNQDAAAVQLWVNIVNGDVQDSTRSDLYEYIVDFLTYCLDEELVWAYADWVLQKSEEVGVQVFTKRPLDEQQKNSFNPDDIINCLKKYPKALVKYLEHLVIDKRLQKEEYHTHLAVLYLEEVLLQRASASGKGAEATETQAKLRRLLQKSDLYRVHFLLERLQGAGLPMESAILHGKLGEHEKALHILVHELQDFAAAEDYCLWCSEGRDPPHRQQLFHTLLAIYLHAGPTAHELAVAAVDLLNRHATEFDAAQVLQMLPDTWSVQLLCPFLMGAMRDSIHARRTMQVALGLARSENLIYTYDKMKLKGSSIQLSDKKLCQICQNPFCEPVFVRYPNGGLVHTHCAASRHTNPSSSSPGTRT

SEQ ID NO: 766135 - protein, 275 aa, Homo sapiens
SPGAAGRSGAAGPQAAGRRGTAGAGAADQPVDMMSIKAFTLVSAVERELLMGDKERVNIECVECCGRDLYVGTNDCFVYHFLLEERPVPAGPATFTATKQLQRHLGFKKPVNELRAASALNRLLVLCDNSISLVNMLNLEPVPSGARIKGAATFALNENPVSGDPFCVEVCIISVKRRTIQMFLVYEDRVQIVKEVSTAEQPLAVAVDGHFLCLALTTQYIIHNYSTGVSQDLFPYCSEERPPIVKRIGRQEFLLAGPGGLGEEDAFVRLIFLGG

SEQ ID NO: 766136 - protein, 892 aa, Homo sapiens; identical to SEQ ID NO: 766134

SEQ ID NO: 766137 - protein, 874 aa, Homo sapiens; identical to SEQ ID NO: 766131

SEQ ID NO: 766138 - protein, 892 aa, Homo sapiens; identical to SEQ ID NO: 766134

SEQ ID NO: 766139 - protein, 125 aa, Homo sapiens
MCHFPQVLRTLKPWREMHLELFTFRQSSSGCLQLVTRWPIVLPCFSPLSLGQVVSLINPNHENSLLKEFTLKMPQNRQWKNEMNKCESIILLRFWKNAGFQLLENSHKTSVLFYIFICFHSSFLL

SEQ ID NO: 766140 - protein, 419 aa, Homo sapiens
FIKDSLLQPLTLTLLRSNSAHLRVSSRQLWKELCVSPAMHLLAILFCALWSAVLAENSDDYDLMYVNLDNEIDNGLHPTEDPTPCDCGQEHSEWDKLFIMLENSQMRERMLLQATDDVLRGELQRLREELGRLAESLARPCAPGAPAEARLTSALDELLQATRDAGRRLARMEGAEAQRPEEAGRALAAVLEELRQTRADLHAVQGWAARSWLPAGCETAILFPMRSKKIFGSVHPVRPMRLESFSACIWVKATDVLNKTILFSYGTKRNPYEIQLYLSYQSIVFVVGGEENKLVAEAMVSLGRWTHLCGTWNSEEGLTSLWVNGELAATTVEMATGHIVPEGGILQIGQEKNGCCVGGGFDETLAFSGRLTGFNIWDSVLSNEEIRETGGAESCHIRGNIVGWGVTEIQPHGGAQYVS

SEQ ID NO: 766141 - protein, 411 aa, Homo sapiens
AGTVWDLGINSAHLRVSSRQLWKELCVSPAMHLLAILFCALWSAVLAENSDDYDLMYVNLDNEIDNGLHPTEDPTPCDCGQEHSEWDKLFIMLENSQMRERMLLQATDDVLRGELQRLREELGRLAESLARPCAPGAPAEARLTSALDELLQATRDAGRRLARMEGAEAQRPEEAGRALAAVLEELRQTRADLHAVQGWAARSWLPAGCETAILFPMRSKKIFGSVHPVRPMRLESFSACIWVKATDVLNKTILFSYGTKRNPYEIQLYLSYQSIVFVVGGEENKLVAEAMVSLGRWTHLCGTWNSEEGLTSLWVNGELAATTVEMATGHIVPEGGILQIGQEKNGCCVGGGFDETLAFSGRLTGFNIWDSVLSNEEIRETGGAESCHIRGNIVGWGVTEIQPHGGAQYVS

SEQ ID NO: 766142 - protein, 296 aa, Homo sapiens
FIKDSLLQPLTLTLLRSNSAHLRVSSRQLWKELCVSPAMHLLAILFCALWSAVLAENSDDYDLMYVNLDNEIDNGLHPTEDPTPCDCGQEHSEWDKLFIMLENSQMRERMLLQATDDVLRGELQRLREELGRLAESLARPCAPGAPAEARLTSALDELLQATRDAGRRLARMEGAEAQRPEEAGRALAAVLEELRQTRADLHAVQGWAARSWLPAGCETAILFPMRSKKIFGSVHPVRPMRLESFSACIWVKATDVLNKTILFSYGTKRNPYEIQLYLSYQSIFFFFFLYYNKLFS

SEQ ID NO: 766143 - protein, 457 aa, Homo sapiens
GAALRNKVEAQSAGLHPGAPGLVLAVGAVAVDERHRRESEMAWFALYLLSLLWATAGTSTQTQSSCSVPSAQEPLVNGIQVLMENSVTSSAYPNPSILIAMNLAGAYNLKAQKLLTYQLMSSDNNDLTIGQLGLTIMALTSSCRDPGDKVSILQRQMENWAPSSPNAEASAFYGPSLAILALCQKNSEATLPIAVRFAKTLLANSSPFNVDTGAMATLALTCMYNKIPVGSEEGYRSLFGQVLKDIVEKISMKIKDNGIIGDIYSTGLAMQALSVTPEPSKKEWNCKKTTDMILNEIKQGKFHNPMSIAQILPSLKGKTYLDVPQVTCSPDHEVQPTLPSNPGPGPTSASNITVIYTINNQLRGVELLFNETINVSVKSGSVLLVVLEEAQRKNPMFKFETTMTSWGLVVSSINNIAENVNHKTYWQFLSGVTPLNEGVADYIPFNHEHITANFTQY

SEQ ID NO: 766144 - protein, 192 aa, Homo sapiens
MQALSVTPEPSKKEWNCKKTTDMILNEIKQGKFHNPMSIAQILPSLKGKTYLDVPQVTCSPDHEVQPTLPSNPGPGPTSASNITVIYTINNQLRGVELLFNETINVSVKSGSVLLVVLEEAQRKNPMFKFETTMTSWGLVVSSINNIAENVNHKTYWQFLSGVTPLNEGEGRKDIGVIFHSLKATFFNYFFI

SEQ ID NO: 766145 - protein, 259 aa, Homo sapiens
MRIPMRDASINVDTGAMATLALTCMYNKIPVGSEEGYRSLFGQVLKDIVEKISMKIKDNGIIGDIYSTGLAMQALSVTPEPSKKEWNCKKTTDMILNEIKQGKFHNPMSIAQILPSLKGKTYLDVPQVTCSPDHEVQPTLPSNPGPGPTSASNITVIYTINNQLRGVELLFNETINVSVKSGSVLLVVLEEAQRKNPMFKFETTMTSWGLVVSSINNIAENVNHKTYWQFLSGVTPLNEGVADYIPFNHEHITANFTQY

SEQ ID NO: 766146 - protein, 128 aa, Homo sapiens
CVRVHVRVCVSGADPGCEDGLPILPFSWLPYPSLLLAASHCDMDFSLIFLSLLPLQHERPSTCKTTRLHHSPERPVLPLRKGLDQRKSHHHDVPNCSARVCVGYFQLSPAKPASSPPPEPCGVSGASP

SEQ ID NO: 766147 - protein, 107 aa, Homo sapiens
LPIGGTKEDRKAVGGNRELLLPILSVAPAGIYCHVVYSSITGCLQLSSFFHHSQDQLLCNLSEAPAPARWHPPLDSDSQTLLQPPEVVQETSGTLRVLRPSLAGLLL

SEQ ID NO: 766148 - protein, 157 aa, Homo sapiens
MSKSCGNNLAAISVGISLLLLLVVCGIGCVWHWKHRVATRFTLPRFLQRRSSRRKVCTKTFLGPRIIGLRHEISVETQDHKSAVRGNNTHDNYENVEAGPPKAKGKTDKELYENTGQSNFEEHIYGNETSSDYYNFQKPRPSEVPQDEDIYILPDSY

SEQ ID NO: 766149 - protein, 157 aa, Homo sapiens; identical to SEQ ID NO: 766148

SEQ ID NO: 766150 - protein, 139 aa, Homo sapiens
MSKSCGNNLAAISVGISLLLLLVVCGIGCVWHWKHRVATRFTLPRFLQRRSSRRKVCTNQDHKSAVRGNNTHDNYENVEAGPPKAKGKTDKELYENTGQSNFEEHIYGNETSSDYYNFQKPRPSEVPQDEDIYILPDSY

SEQ ID NO: 766151 - protein, 157 aa, Homo sapiens; identical to SEQ ID NO: 766148

SEQ ID NO: 766152 - protein, 157 aa, Homo sapiens; identical to SEQ ID NO: 766148

SEQ ID NO: 766153 - protein, 235 aa, Homo sapiens
MVGERHAGDLMVPLGPRLQAYPEELIRQRPGHDGHPEYLIRWSVLKCGEVGKVGVEEGKAEHILMWLSAPEVYANCPGLLGERALSKGLQHEPAGVSGSFPRDPGGLDEVAMGEMEADVQALVRRAARQLAESGTPSLTAAVLHTIHVLSAYASIGPLTGVFRETGALDLLMHMLCNPEPQIRRSAGKMLQALAAHDAGSRAHVLLSLSQQDGIEQHMDFDQSLTLAGSCLQKPH

SEQ ID NO: 766154 - protein, 86 aa, Homo sapiens
TESRSVTRLVCSGAISAHCNLRFPGSSNSPASASRVAGITGPCHHAQLIFLFLVETRFHHVGQAGLDLMTSWIHPPQPPKVLGLQA

SEQ ID NO: 766155 - protein, 1008 aa, Homo sapiens
IWEEKENVGSFTNRMTPEKHLNSLRNLAKSLDAEQDTTNPKPFWNMGENSKQLPGPQKLSDPRLWQESFWKNYSQLFWGLPSLHSESLVANAWVTDRSYTLQSPPFLFNEMSNVCPIQRETTMSPLLFQAQPLSHLGPECQPFISSTPQFRPTPMAQAEAQAHLQSSFPVLSPAFPSLIQNTGVACPASQNKVQALSLPETQHPEWPLLRRQLEGRLALPSRVQKSQDVFSVSTPNLPQESLTSILPENFPVSPELRRQLEQHIKKWIIQHWGNLGRIQESLDLMQLQDESPGTSQAKGKPSPWQSSMSTGESSKEAQKVKFQLERDPCPHLGQILGETPQNLSRDMKSFPRKVLGVTSEELERNLRKPLRSDSGSDLLRCTERTHIENILKAHMGRNLGQTNEGLIPVRVRRSWLAVNQALPVSNTHVKTSNLAAPKSGKACVNTAQVLSFLEPCTQQGLGAHIVRFWAKHRWGLPLRVLKPIQCFKLEKVSSLSLTQLAGPSSATCESGAGSEVEVDMFLRKPPMASLRKQVLTKASDHMPESLLASSPAWKQFQRAPRGIPSWNDHEPLKPPPAGQEGRWPSKPLTYSLTGSTQQSRSLGAQSSKAGETREAVPQCRVPLETCMLANLQATSEDVHGFEAPGTSKSSLHPRVSVSQDPRKLCLMEEVVSEFEPGMATKSETQPQVCAAVVLLPDGQASVVPHASENLVSQVPQGHLQSMPTGNMRASQELHDLMAARRSKLVHEEPRKPNCQGSCKSQRPMFPPIHKSEKFRKPNLEKHEERLEGLRTPQLTPVRKTEDTHQDEGVQLLPSKKQPPSVSPFGENIKQIFQWIFSKKKSKPAPVTAESQKTVKNRSCVYSSSAEAQGLMTAVGQMLDEKMSLCHARHASKVNQHKQKFQAPVCGFPCNHRHLFYSEHGRILSYAASSQQATLKSQGCPNRDRQIRNQQPLKSVRCNNEQWGLRHPQILHPKKAVSPVSPPQHWPKTSGASSHHHHCPRHCLLWEGI

SEQ ID NO: 766156 - protein, 176 aa, Homo sapiens
NRTESSPSCVRQLLWKPHGQEAPGQHILSACVCCTSSGTGAMSPHLTALLGLVLCLAQTIHTQEGALPRPSISAEPGTVISPGSHVTFMCRGPVGVQTFRLEREDRAKYKDSYNVFRLGPSESEARFHIDSVSEGNAGLYRCLYYKPPGWSEHSDFLELLVKGTVPGTEASGFDAP

SEQ ID NO: 766157 - protein, 193 aa, Homo sapiens
NRTESSPSCVRQLLWKPHGQEAPGQHILSACVCCTSSGTGAMSPHLTALLGLVLCLAQTIHTQEGALPRPSISAEPGTVISPGSHVTFMCRGPVGVQTFRLEREDRAKYKDSYNVFRLGPSESEARFHIDSVSEGNAGLYRCLYYKPPGWSEHSDFLELLVKESSGGPDSPDTEPGSSAGTVPGTEASGFDAP

SEQ ID NO: 766158 - protein, 851 aa, Homo sapiens
RLPPPPLGPAPRPLRGPRPPACPPPPWRPGSPLHGATRTLGVPSPPPPCPLSRRADPGVLGAQLLSSRPQAGGGGGEERGPWDPRPPHPAAPAPRDPEKMSSRTVLAPGNDRNSDTHGTLGSGRSSDKGPSWSSRSLGARCRNSIASCPEEQPHVGNYRLLRTIGKGNFAKVKLARHILTGREVAIKIIDKTQLNPSSLQKLFREVRIMKGLNHPNIVKLFEVIETEKTLYLVMEYASAGEVFDYLVSHGRMKEKEARAKFRQIVSAVHYCHQKNIVHRDLKAENLLLDAEANIKIADFGFSNEFTLGSKLDTFCGSPPYAAPELFQGKKYDGPEVDIWSLGVILYTLVSGSLPFDGHNLKELRERVLRGKYRVPFYMSTDCESILRRFLVLNPAKRCTLEQIMKDKWINIGYEGEELKPYTEPEEDFGDTKRIEVMVGMGYTREEIKESLTSQKYNEVTATYLLLGRKTEEGGDRGAPGLALARVRAPSDTTNGTSSSKGTSHSKGQRSSSSTYHRQRRHSDFCGPSPAPLHPKRSPTSTGEAELKEERLPGRKASCSTAGSGSRGLPPSSPMVSSAHNPNKAEIPERRKDSTSTPNNLPPSMMTRRNTYVCTERPGAERPSLLPNGKENSSGTPRVPPASPSSHSLAPPSGERSRLARGSTIRSTFHGGQVRDRRAGGGGGGGVQNGPPASPTLAHEAAPLPAGRPRPTTNLFTKLTSKLTRRVADEPERIGGPEVTSCHLPWDQTETAPRLLRFPWSVKLTSSRPPEALMAALRQATAAARCRCRQPQPFLLACLHGGAGGPEPLSHFEVEVCQLPRPGLRGVLFRRVAGTALAFRTLVTRISNDLEL

SEQ ID NO: 766159 - protein, 351 aa, Homo sapiens
MVGMGYTREEIKESLTSQKYNEVTATYLLLGRKTEEGGDRGAPGLALARVRAPSDTTNGTSSSKGTSHSKGQRSSSSTYHRQRRHSDFCGPSPAPLHPKRSPTSTGEAELKEERLPGRKASCSTAGSGSRGLPPSSPMVSSAHNPNKAEIPERRKDSTSTPNNLPPSMMTRRNTYVCTERPGAERPSLLPNGKENSSGTPRVPPASPSSHSLAPPSGERSRLARGSTIRSTFHGGQVRDRRAGGGGGGGVQNGPPASPTLAHEAAPLPAGRPRPTTNLFTKLTSKLTRRVTLDPSKRQNSNRCVSGASLPQGSKIRSQTNLRESGDLRSQVAIYLGIKRKPPPGCSDSPGV

SEQ ID NO: 766160 - protein, 140 aa, Homo sapiens
  misc_feature (2)..(3): Xaa can be any naturally occurring amino acid
VXXSSSADLQTDPKVADEPERIGGPEVTSCHLPWDQTETAPRLLRFPWSVKLTSSRPPEALMAALRQATAAARCRCRQPQPFLLACLHGGAGGPEPLSHFEVEVCQLPRPGLRGVLFRRVAGTALAFRTLVTRISNDLEL

SEQ ID NO: 766161 - protein, 65 aa, Homo sapiens
NLEVILTDIVRMAHTEIATHVRNSQVPTIPQSQFWVSVVMPALNGTPSPRWPIPCTPAPQTQPDE

SEQ ID NO: 766162 - protein, 787 aa, Homo sapiens
RLPPPPLGPAPRPLRGPRPPACPPPPWRPGSPLHGATRTLGVPSPPPPCPLSRRADPGVLGAQLLSSRPQAGGGGGEERGPWDPRPPHPAAPAPRDPEKMSSRTVLAPGNDRNSDTHGTLGSGRSSDKGPSWSSRSLGARCRNSIASCPEEQPHVGNYRLLRTIGKGNFAKVKLARHILTGREVAIKIIDKTQLNPSSLQKLFREVRIMKGLNHPNIVKLFEVIETEKTLYLVMEYASAGEVFDYLVSHGRMKEKEARAKFRQIVSAVHYCHQKNIVHRDLKAENLLLDAEANIKIADFGFSNEFTLGSKLDTFCGSPPYAAPELFQGKKYDGPEVDIWSLGVILYTLVSGSLPFDGHNLKELRERVLRGKYRVPFYMSTDCESILRRFLVLNPAKRCTLEQIMKDKWINIGYEGEELKPYTEPEEDFGDTKRIEVMVGMGYTREEIKESLTSQKYNEVTATYLLLGRKTEEGGDRGAPGLALARVRAPSDTTNGTSSSKGTSHSKGQRSSSSTYHRQRRHSDFCGPSPAPLHPKRSPTSTGEAELKEERLPGRKASCSTAGSGSRGLPPSSPMVSSAHNPNKAEIPERRKDSTSTPNNLPPSMMTRRNTYVCTERPGAERPSLLPNGKENSSGTPRVPPASPSSHSLAPPSGERSRLARGSTIRSTFHGGQVRDRRAGGGGGGGVQNGPPASPTLAHEAAPLPAGRPRPTTNLFTKLTSKLTRRVTLDPSKRQNSNRCVSGASLPQGSKIRSQTNLRESGDLRSQVAIYLGIKRKPPPGCSDSPGV

SEQ ID NO: 766163 - protein, 670 aa, Homo sapiens
RLPPPPLGPAPRPLRGPRPPACPPPPWRPGSPLHGATRTLGVPSPPPPCPLSRRADPGVLGAQLLSSRPQAGGGGGEERGPWDPRPPHPAAPAPRDPEKMSSRTVLAPGNDRNSDTHGTLGSGRSSDKGPSWSSRSLGARCRNSIASCPEEQPHVGNYRLLRTIGKGNFAKVKLARHILTGREVAIKIIDKTQLNPSSLQKLFREVRIMKGLNHPNIVKLFEVIETEKTLYLVMEYASAGEVFDYLVSHGRMKEKEARAKFRQIVSAVHYCHQKNIVHRDLKAENLLLDAEANIKIADFGFSNEFTLGSKLDTFCGSPPYAAPELFQGKKYDGPEVDIWSLGVILYTLVSGSLPFDGHNLKELRERVLRGKYRVPFYMSTDCESILRRFLVLNPAKRCTLEQIMKDKWINIGYEGEELKPYTEPEEDFGDTKRIEVMVGMGYTREEIKESLTSQKYNEVTATYLLLGRKTEEGGDRGAPGLALARVRAPSDTTNGTSSSKGTSHSKGQRSSSSTYHRQRRHSDFCGPSPAPLHPKRSPTSTGEAELKEERLPGRKASCSTAGSGSRGLPPSSPMVSSAHNPNKAEIPERRKDSTSTPNNLPPSMMTRRVTLDPSKRQNSNRCVSGASLPQGSKIRSQTNLRESGDLRSQVAIYLGIKRKPPPGCSDSPGV

SEQ ID NO: 766164 - protein, 467 aa, Homo sapiens
RLPPPPLGPAPRPLRGPRPPACPPPPWRPGSPLHGATRTLGVPSPPPPCPLSRRADPGVLGAQLLSSRPQAGGGGGEERGPWDPRPPHPAAPAPRDPEKMSSRTVLAPGNDRNSDTHGTLGSGRSSDKGPSWSSRSLGARCRNSIASCPEEQPHVGNYRLLRTIGKGNFAKVKLARHILTGREVAIKIIDKTQLNPSSLQKLFREVRIMKGLNHPNIVKLFEVIETEKTLYLVMEYASAGEVFDYLVSHGRMKEKEARAKFRQIVSAVHYCHQKNIVHRDLKAENLLLDAEANIKIADFGFSNEFTLGSKLDTFCGSPPYAAPELFQGKKYDGPEVDIWSLGVILYTLVSGSLPFDGHNLKELRERVLRGKYRVPFYMSTDCESILRRFLVLNPAKRCTLEQIMKDKWINIGYEGEELKPYTEPEEDFGDTKRIEVMVGMGYTREEIKESLTTCCPINLGESPPPQC

SEQ ID NO: 766165 - protein, 110 aa, Homo sapiens
SARGATSRPRLFPVRGSCHFRLFPPRVPISCVCSRVPETAPKMNTRGFRVGTNLKRQWPALSGLRWLLRLGLLLRLQGRPLHGFLPSQVSRGQLLPGGARNRILSGAAAC

SEQ ID NO: 766166 - protein, 110 aa, Homo sapiens; identical to SEQ ID NO: 766165

SEQ ID NO: 766167 - protein, 42 aa, Homo sapiens
LHTGPHPSGTSNANVPSAIPDCKFEMSLPAITEEAKVHSGCM

SEQ ID NO: 766168 - protein, 475 aa, Homo sapiens
AGGGGLLAGPAQRKSQASMSGTRASNDRPPGAGGVKRGRLQQEAAATGSRVTVVLGAQWGDEGKGKVVDLLATDADIISRCQGGNNAGHTVVVDGKEYDFHLLPSGIINTKAVSFIGNGVVIHLPGLFEEAEKNEKKGLKDWEKRLIISDRAHLVFDFHQAVDGLQEVQRQAQEGKNIGTTKKGIGPTYSSKAARTGLRICDLLSDFDEFSSRFKNLAHQHQSMFPTLEIDIEGQLKRLKGFAERIRPMVRDGVYFMYEALHGPPKKILVEGANAALLDIDFGTYPFVTSSNCTVGGVCTGLGIPPQNIGDVYGVVKAYTTRVGIGAFPTEQINEIGGLLQTRGHEWGVTTGRKRRCGWLDLMILRYAHMVNGFTALALTKLDILDVLGEVKVGVSYKLNGKRIPYFPANQEMLQKVEVEYETLPGWKADTTGARRWEDLPPQAQNYIRFVENHVGVAVKWVGVGKSRESMIQLF

SEQ ID NO: 766169 - protein, 504 aa, Homo sapiens
RGVGMVGRSCGVATQRQGGGQRPTNLALTLSSSPAHSTALPWLPPRSLQLLSGHSVPAQPTPHLPSACGGPTRVTLGEERAWRSHGSNAGGHTCLPRRTAGAGSLTPGGERGGNNAGHTVVVDGKEYDFHLLPSGIINTKAVSFIGNGVVIHLPGLFEEAEKNEKKGLKDWEKRLIISDRAHLVFDFHQAVDGLQEVQRQAQEGKNIGTTKKGIGPTYSSKAARTGLRICDLLSDFDEFSSRFKNLAHQHQSMFPTLEIDIEGQLKRLKGFAERIRPMVRDGVYFMYEALHGPPKKILVEGANAALLDIDFGTYPFVTSSNCTVGGVCTGLGIPPQNIGDVYGVVKAYTTRVGIGAFPTEQINEIGGLLQTRGHEWGVTTGRKRRCGWLDLMILRYAHMVNGFTALALTKLDILDVLGEVKVGVSYKLNGKRIPYFPANQEMLQKVEVEYETLPGWKADTTGARRWEDLPPQAQNYIRFVENHVGVAVKWVGVGKSRESMIQLF

SEQ ID NO: 766170 - protein, 475 aa, Homo sapiens; identical to SEQ ID NO: 766168

SEQ ID NO: 766171 - protein, 475 aa, Homo sapiens; identical to SEQ ID NO: 766168

SEQ ID NO: 766172 - protein, 486 aa, Homo sapiens
AGGGGLLAGPAQRKSQASMSGTRASNDRPPGAGGVKRGRLQQEAAATGSRVTVVLGAQWGDEGKGKVVDLLATDADIISRCQGGNNAGHTVVVDGKEYDFHLLPSGIINTKAVSFIGNGVVIHLPGLFEEAEKNEKKGLKDWEKRLIISDRAHLVFDFHQAVDGLQEVQRQAQEGKNIGTTKKGIGPTYSSKAARTGLRICDLLSDFDEFSSRFKNLAHQHQSMFPTLEIDIEGQLKRLKGFAERIRPMVRDGVYFMYEALHGPPKKILVEGANAALLDIDFGTYPFVTSSNCTVGGVCTGLGIPPQNIGDVYGVVKAYTTRVGIGAFPTEQINEIGGLLQTRGHEWGVTTGRKRRCGWLDLMILRYAHMVNGFTALALTKLDILDVLGEVKVGVSYKLNGKRIPYFPANQEMLQKVEVEYETLPGWKADTTGARRWEDLPPQAQNYIRFVENHVGVAVCIITVFSALSVKWVGVGKSRESMIQLF

SEQ ID NO: 766173 - protein, 526 aa, Homo sapiens
MSTPGVNSSASLSPDRLNSPVTIPAVMFIFGVVGNLVAIVVLCKSRKEQKETTFYTLVCGLAVTDLLGTLLVSPVTIATYMKGQWPGGQPLCEYSTFILLFFSLSGLSIICAMSVERYLAINHAYFYSHYVDKRLAGLTLFAVYASNVLFCALPNMGLGSSRLQYPDTWCFIDWTTNVTAHAAYSYMYAGFSSFLILATVLCNVLVCGALLRMHRQFMRRTSLGTEQHHAAAAASVASRGHPAASPALPRLSDFRRRRSFRRIAGAEIQMVILLIATSLVVLICSIPLVICFCLLKANWKWSHKTTDGMSDECEDTSIHTREMPQIWVRVFVNQLYQPSLEREVSKNPDLQAIRIASVNPILDPWIYILLRKTVLSKAIEKIKCLFCRIGGSRRERSGQHCSDSQRTSSAMSGHSRSFISRELKEISSTSQTLLPDLSLPDLSENGLGGRNLLPGVPGMGLAQEDTTSLRTLRISETSDSSQGQDSESVLLVDEAGGSGRAGPAPKGSSLQVTFPSETLNLSEKCI

SEQ ID NO: 766174 - protein, 488 aa, Homo sapiens
MSTPGVNSSASLSPDRLNSPVTIPAVMFIFGVVGNLVAIVVLCKSRKEQKETTFYTLVCGLAVTDLLGTLLVSPVTIATYMKGQWPGGQPLCEYSTFILLFFSLSGLSIICAMSVERYLAINHAYFYSHYVDKRLAGLTLFAVYASNVLFCALPNMGLGSSRLQYPDTWCFIDWTTNVTAHAAYSYMYAGFSSFLILATVLCNVLVCGALLRMHRQFMRRTSLGTEQHHAAAAASVASRGHPAASPALPRLSDFRRRRSFRRIAGAEIQMVILLIATSLVVLICSIPLVVRVFVNQLYQPSLEREVSKNPDLQAIRIASVNPILDPWIYILLRKTVLSKAIEKIKCLFCRIGGSRRERSGQHCSDSQRTSSAMSGHSRSFISRELKEISSTSQTLLPDLSLPDLSENGLGGRNLLPGVPGMGLAQEDTTSLRTLRISETSDSSQGQDSESVLLVDEAGGSGRAGPAPKGSSLQVTFPSETLNLSEKCI

SEQ ID NO: 766175 - protein, 415 aa, Homo sapiens
MQVSPGGKLPGIPQGNLGAAVSPTSIHTDKSTNSPPPKSKDEVAQPLNLSAKPKTSDGKSPTSPTSPHMPALRINSGAGPLKASVPAALASPSARVSTIGYLNDHDAVTKAIQEARQMKEQLRREQQVLDGKVAVVNSLGLNNCRTEKEKTTLESLTQQLAVKQNEEGKFSHAMMDFNLSGDSDGSAGVSESRIYRESRGRGSNEPHIKRPMNAFMVWAKDERRKILQAFPDMHNSNISKILGSRWKAMTNLEKQPYYEEQARLSKQHLEKYPDYKYKPRPKRTCLVDGKKLRIGEYKAIMRNRRQEMRQYFNVGQQAQIPIATAGVVYPGAIAMAGMPSPHLPSEHSSVSSSPEPGMPVIQSTYGVKGEEPHIKEEIQAEDINGEIYDEYDEEEDDPDVDYGSDSENHIAGQAN

SEQ ID NO: 766176 - protein, 167 aa, Homo sapiens
MTNLEKQPYYEEQARLSKQHLEKYPDYKYKPRPKRTCLVDGKKLRIGEYKAIMRNRRQEMRQYFNVGQQAQIPIATAGVVYPGAIAMAGMPSPHLPSEHSSVSSSPEPGMPVIQSTYGVKGEEPHIKEEIQAEDINGEIYDEYDEEEDDPDVDYGSDSENHIAGQAN

SEQ ID NO: 766177 - protein, 277 aa, Homo sapiens
MKEQLRREQQEKTTLESLTQQLAVKQNEEGKFSHAMMDFNLSGDSDGSAGVSESRIYRESRGRGSNEPHIKRPMNAFMVWAKDERRKILQAFPDMHNSNISKILGSRWKAMTNLEKQPYYEEQARLSKQHLEKYPDYKYKPRPKRTCLVDGKKLRIGEYKAIMRNRRQEMRQYFNVGQQAQIPIATAGVVYPGAIAMAGMPSPHLPSEHSSVSSSPEPGMPVIQSTYGVKGEEPHIKEEIQAEDINGEIYDEYDEEEDDPDVDYGSDSENHIAGQAN

SEQ ID NO: 766178 - protein, 134 aa, Homo sapiens
ASPAHYTSTTGSCNFETSSGNWTTACSLTQDSEDDLDWAIGSRIPAKALIPDSDHTPGSGQHFLYVNSSGSKEGSVARITTSKSFPASLGMCTVRFWFYMIDPRSMGILKVYTIEESGLNILVWSVIGNKRTGW

SEQ ID NO: 766179 - protein, 421 aa, Homo sapiens
MGFLSPIYVIFFFFGVKVHCQYETYQWDEDYDQEPDDDYQTGFPFRQNVDYGVPFHQYTLGCVSECFCPTNFPSSMYCDNRKLKTIPNIPMHIQQLYLQFNEIEAVTANSFINATHLKEINLSHNKIKSQKIDYGVFAKLPNLLQLHLEHNNLEEFPFPLPKSLERLLLGYNEISKLQTNAMDGLVNLTMLDLCYNYLHDSLLKDKIFAKMEKLMQLNLCSNRLESMPPGLPSSLMYLSLENNSISSIPEKYFDKLPKLHTLRMSHNKLQDIPYNIFNLPNIVELSVGHNKLKQAFYIPRNLEHLYLQNNEIEKMNLTVMCPSIDPLHYHHLTYIRVDQNKLKEPISSYIFFCFPHIHTIYYGEQRSTNGQTIQLKTQVFRRFPDDDDESEDHDDPDNAHESPEQEGAEGHFDLHYYENQE

SEQ ID NO: 766180 - protein, 421 aa, Homo sapiens; identical to SEQ ID NO: 766179

SEQ ID NO: 766181 - protein, 421 aa, Homo sapiens; identical to SEQ ID NO: 766179

SEQ ID NO: 766182 - protein, 244 aa, Homo sapiens
ASPCRGRSRAAHPGRRRGRRRGPRSGPVCEAPGRRRSGRIVERGGGARPRAPARSSEGFPAPTACGMARGSALPRRPLLCIPAVWAAAALLLSVSRTSGEVEVLDPNDPLGPLDGQDGPIPTLKGYFLNFLEPVNNITIVQGQTAILHCKVAGNPPPNVRWLKNDAPVVQEPRRIIIRKTEYGSRLRIQDLDTTDTGYYQCVATNGMKTITATGVLFVRLGPTHSPNHNFQDGVSLCCPDSGDK

SEQ ID NO: 766183 - protein, 1009 aa, Homo sapiens
ASPCRGRSRAAHPGRRRGRRRGPRSGPVCEAPGRRRSGRIVERGGGARPRAPARSSEGFPAPTACGMARGSALPRRPLLCIPAVWAAAALLLSVSRTSGEVEVLDPNDPLGPLDGQDGPIPTLKGYFLNFLEPVNNITIVQGQTAILHCKVAGNPPPNVRWLKNDAPVVQEPRRIIIRKTEYGSRLRIQDLDTTDTGYYQCVATNGMKTITATGVLFVRLGPTHSPNHNFQDDYHEDGFCQPYRGIACARFIGNRTIYVDSLQMQGEIENRITAAFTMIGTSTHLSDQCSQFAIPSFCHFVFPLCDARSRAPKPRELCRDECEVLESDLCRQEYTIARSNPLILMRLQLPKCEALPMPESPDAANCMRIGIPAERLGRYHQCYNGSGMDYRGTASTTKSGHQCQPWALQHPHSHHLSSTDFPELGGGHAYCRNPGGQMEGPWCFTQNKNVRMELCDVPSCSPRDSSKMGILYILVPSIAIPLVIACLFFLVCMCRNKQKASASTPQRRQLMASPSQDMEMPLINQHKQAKLKEISLSAVRFMEELGEDRFGKVYKGHLFGPAPGEQTQAVAIKTLKDKAEGPLREEFRHEAMLRARLQHPNVVCLLGVVTKDQPLSMIFSYCSHGDLHEFLVMRSPHSDVGSTDDDRTVKSALEPPDFVHLVAQIAAGMEYLSSHHVVHKDLATRNVLVYDKLNVKISDLGLFREVYAADYYKLLGNSLLPIRWMAPEAIMYGKFSIDSDIWSYGVVLWEVFSYGLQPYCGYSNQDVVEMIRNRQVLPCPDDCPAWVYALMIECWNEFPSRRPRFKDIHSRLRAWGNLSNYNSSAQTSGASNTTQTSSLSTSPVSNVSNARYVGPKQKAPPFPQPQFIPMKGQIRPMVPPPQLYVPVNGYQPVPAYGAYLPNFYPVQIPMQMAPQQVPPQMVPKPSSHHSGSGSTSTGYVTTAPSNTSMADRAALLSEGADDTQNAPEDGAQSTVQEAEEEEEGSVPETELLGDCDTLQVDEAQVQLEA

SEQ ID NO: 766184 - protein, 104 aa, Homo sapiens
ASPCRGRSRAAHPGRRRGRRRGPRSGPVCEAPGRRRSGRIVERGGGARPRAPARSSEGFPAPTACGMARGSALPRRPLLCIPAVWAAAALLLSVSRTSGATQDS

SEQ ID NO: 766185 - protein, 945 aa, Homo sapiens
MKSDEMNKLSDSHPVEEIELHPQFLCSFLDLVFQGEVEVLDPNDPLGPLDGQDGPIPTLKGYFLNFLEPVNNITIVQGQTAILHCKVAGNPPPNVRWLKNDAPVVQEPRRIIIRKTEYGSRLRIQDLDTTDTGYYQCVATNGMKTITATGVLFVRLGPTHSPNHNFQDDYHEDGFCQPYRGIACARFIGNRTIYVDSLQMQGEIENRITAAFTMIGTSTHLSDQCSQFAIPSFCHFVFPLCDARSRAPKPRELCRDECEVLESDLCRQEYTIARSNPLILMRLQLPKCEALPMPESPDAANCMRIGIPAERLGRYHQCYNGSGMDYRGTASTTKSGHQCQPWALQHPHSHHLSSTDFPELGGGHAYCRNPGGQMEGPWCFTQNKNVRMELCDVPSCSPRDSSKMGILYILVPSIAIPLVIACLFFLVCMCRNKQKASASTPQRRQLMASPSQDMEMPLINQHKQAKLKEISLSAVRFMEELGEDRFGKVYKGHLFGPAPGEQTQAVAIKTLKDKAEGPLREEFRHEAMLRARLQHPNVVCLLGVVTKDQPLSMIFSYCSHGDLHEFLVMRSPHSDVGSTDDDRTVKSALEPPDFVHLVAQIAAGMEYLSSHHVVHKDLATRNVLVYDKLNVKISDLGLFREVYAADYYKLLGNSLLPIRWMAPEAIMYGKFSIDSDIWSYGVVLWEVFSYGLQPYCGYSNQDVVEMIRNRQVLPCPDDCPAWVYALMIECWNEFPSRRPRFKDIHSRLRAWGNLSNYNSSAQTSGASNTTQTSSLSTSPVSNVSNARYVGPKQKAPPFPQPQFIPMKGQIRPMVPPPQLYVPVNGYQPVPAYGAYLPNFYPVQIPMQMAPQQVPPQMVPKPSSHHSGSGSTSTGYVTTAPSNTSMADRAALLSEGADDTQNAPEDGAQSTVQEAEEEEEGSVPETELLGDCDTLQVDEAQVQLEA

SEQ ID NO: 766186 - protein, 789 aa, Homo sapiens
MILRPPQPCELDDYHEDGFCQPYRGIACARFIGNRTIYVDSLQMQGEIENRITAAFTMIGTSTHLSDQCSQFAIPSFCHFVFPLCDARSRAPKPRELCRDECEVLESDLCRQEYTIARSNPLILMRLQLPKCEALPMPESPDAANCMRIGIPAERLGRYHQCYNGSGMDYRGTASTTKSGHQCQPWALQHPHSHHLSSTDFPELGGGHAYCRNPGGQMEGPWCFTQNKNVRMELCDVPSCSPRDSSKMGILYILVPSIAIPLVIACLFFLVCMCRNKQKASASTPQRRQLMASPSQDMEMPLINQHKQAKLKEISLSAVRFMEELGEDRFGKVYKGHLFGPAPGEQTQAVAIKTLKDKAEGPLREEFRHEAMLRARLQHPNVVCLLGVVTKDQPLSMIFSYCSHGDLHEFLVMRSPHSDVGSTDDDRTVKSALEPPDFVHLVAQIAAGMEYLSSHHVVHKDLATRNVLVYDKLNVKISDLGLFREVYAADYYKLLGNSLLPIRWMAPEAIMYGKFSIDSDIWSYGVVLWEVFSYGLQPYCGYSNQDVVEMIRNRQVLPCPDDCPAWVYALMIECWNEFPSRRPRFKDIHSRLRAWGNLSNYNSSAQTSGASNTTQTSSLSTSPVSNVSNARYVGPKQKAPPFPQPQFIPMKGQIRPMVPPPQLYVPVNGYQPVPAYGAYLPNFYPVQIPMQMAPQQVPPQMVPKPSSHHSGSGSTSTGYVTTAPSNTSMADRAALLSEGADDTQNAPEDGAQSTVQEAEEEEEGSVPETELLGDCDTLQVDEAQVQLEA

SEQ ID NO: 766187 - protein, 191 aa, Homo sapiens
ASPCRGRSRAAHPGRRRGRRRGPRSGPVCEAPGRRRSGRIVERGGGARPRAPARSSEGFPAPTACGMARGSALPRRPLLCIPAVWAAAALLLSVSRTSGEVEVLDPNDPLGPLDGQDGPIPTLKGYFLNFLEPVNNITIVQGQTAILHCKVAGNPPPNVRWLKNDAPVVQRTAQIITFSKYLFSPSHVLLL

SEQ ID NO: 766188 - protein, 123 aa, Homo sapiens
GWRRAGGAFRPRSARDLWGSPEAPGMCETLLTSKWASVSPIPALLQEGENRDSRRLGDALLFLRPAGSCALQVSWPAALAGPRSHTGQLTQHFCHLKNDTCIPPSLGPPRNSGSLESLRSKRY

SEQ ID NO: 766189 - protein, 968 aa, Homo sapiens
MCETLLTSKWASVSPIPALLQEGENRDSRRLGDALLFLRPAGSCALQVSWPAALAGQGEVEVLDPNDPLGPLDGQDGPIPTLKGYFLNFLEPVNNITIVQGQTAILHCKVAGNPPPNVRWLKNDAPVVQEPRRIIIRKTEYGSRLRIQDLDTTDTGYYQCVATNGMKTITATGVLFVRLGPTHSPNHNFQDDYHEDGFCQPYRGIACARFIGNRTIYVDSLQMQGEIENRITAAFTMIGTSTHLSDQCSQFAIPSFCHFVFPLCDARSRAPKPRELCRDECEVLESDLCRQEYTIARSNPLILMRLQLPKCEALPMPESPDAANCMRIGIPAERLGRYHQCYNGSGMDYRGTASTTKSGHQCQPWALQHPHSHHLSSTDFPELGGGHAYCRNPGGQMEGPWCFTQNKNVRMELCDVPSCSPRDSSKMGILYILVPSIAIPLVIACLFFLVCMCRNKQKASASTPQRRQLMASPSQDMEMPLINQHKQAKLKEISLSAVRFMEELGEDRFGKVYKGHLFGPAPGEQTQAVAIKTLKDKAEGPLREEFRHEAMLRARLQHPNVVCLLGVVTKDQPLSMIFSYCSHGDLHEFLVMRSPHSDVGSTDDDRTVKSALEPPDFVHLVAQIAAGMEYLSSHHVVHKDLATRNVLVYDKLNVKISDLGLFREVYAADYYKLLGNSLLPIRWMAPEAIMYGKFSIDSDIWSYGVVLWEVFSYGLQPYCGYSNQDVVEMIRNRQVLPCPDDCPAWVYALMIECWNEFPSRRPRFKDIHSRLRAWGNLSNYNSSAQTSGASNTTQTSSLSTSPVSNVSNARYVGPKQKAPPFPQPQFIPMKGQIRPMVPPPQLYVPVNGYQPVPAYGAYLPNFYPVQIPMQMAPQQVPPQMVPKPSSHHSGSGSTSTGYVTTAPSNTSMADRAALLSEGADDTQNAPEDGAQSTVQEAEEEEEGSVPETELLGDCDTLQVDEAQVQLEA

SEQ ID NO: 766190 - protein, 110 aa, Homo sapiens [sequence omitted]

SEQ ID NO: 766191 - protein, 301 aa, Homo sapiens
RVGQEKMATVWDEAEQDGIGEEVLKMSTEEIIQRTRLLDSEIKIMKSEVLRVTHELQAMKDKIKENSEKIKVNKTLPYLVSNVIELLDVDPNDQEEDGANIDLDSQRKGKCAVIKTSTRQTYFLPVIGLVDAEKLKPGDLVGVNKDSYLILETLPTEYDSRVKAMEVDERPTEQYSDIGGLDKQIQELVEAIVLPMNHKEKFENLGIQPPKGVLMYGPPGTGKTLLARACAAQTKATFLKLAGPQLVQMFIGDGAKLVRDAFALAKEKAPSIIFIDELDAIGTKRSRLKCAIKDDLGSLQK

SEQ ID NO: 766192 - protein, 290 aa, Homo sapiens
RVGQEKMATVWDEAEQDGIGEEVLKMSTEEIIQRTRLLDSEIKIMKSEVLRVTHELQAMKDKIKENSEKIKVNKTLPYLVSNVIELLDVDPNDQEEDGANIDLDSQRKGKCAVIKTSTRQTYFLPVIGLVDAEKLKPGDLVGVNKDSYLILETLPTEYDSRVKAMEVDERPTEQYSDIGGLDKQIQELVEAIVLPMNHKEKFENLGIQPPKGVLMYGPPGTGKTLLARACAAQTKATFLKLAGPQLVQMFIGGAGQEESQPTILRLGAHRPAPVSRLKCAIKDDLGSLQK

SEQ ID NO: 766193 - protein, 429 aa, Homo sapiens
RVGQEKMATVWDEAEQDGIGEEVLKMSTEEIIQRTRLLDSEIKIMKSEVLRVTHELQAMKDKIKENSEKIKVNKTLPYLVSNVIELLDVDPNDQEEDGANIDLDSQRKGKCAVIKTSTRQTYFLPVIGLVDAEKLKPGDLVGVNKDSYLILETLPTEYDSRVKAMEVDERPTEQYSDIGGLDKQIQELVEAIVLPMNHKEKFENLGIQPPKGVLMYGPPGTGKTLLARACAAQTKATFLKLAGPQLVQMFIGDGAKLVRDAFALAKEKAPSIIFIDELDAIGTKRFDSEKAGDREVQRTMLELLNQLDGFQPNTQVKVIAATNRVDILDPALLRSGRLDRKIEFPMPNEEARARIMQIHSRKMNVSPDVNYEELARCTDDFNGAQCKAVCVEAGMIALRRGATELTHEDYMEGILEVQAKKKANLQYYA

SEQ ID NO: 766194 - protein, 239 aa, Homo sapiens
RVGQEKMATVWDEAEQDGIGEEVLKMSTEEIIQRTRLLDSEIKIMKSEVLRVTHELQAMKDKIKENSEKIKVNKTLPYLVSNVIELLDVDPNDQEEDGANIDLDSQRKGKCAVIKTSTRQTYFLPVIGLVDAEKLKPGDLVGVNKDSYLILETLPTEYDSRVKAMEVDERPTEQYSDIGGLDKQIQELVEAIVLPMNHKEKFENLGIQPPKGVLMYGPPGTGKTLLARACAAQTKMVPS

SEQ ID NO: 766195 - protein, 435 aa, Homo sapiens
MKRRASDRGAGETSARAKALGSGISGNNAKRAGPFILGPRLGNSPVPSIVQCLARKDGTDDFYQLKILTLEERGDQGIESQEERQGKMLLHTEYSLLSLLHTQDGVVHHHGLFQDRTCEIVEDTESSRMVKKMKKRICLVLDCLCAHDFSDKTADLINLQHYVIKEKRLSERETVVIFYDVVRVVEALHQKNIVHRDLKLGNMVLNKRTHRITITNFCLGKHLVSEGDLLKDQRGSPAYISPDVLSGRPYRGKPSDMWALGVVLFTMLYGQFPFYDSIPQELFRKIKAAEYTIPEDGRVSENTVCLIRKLLVLDPQQRLAAADVLEALSAIIASWQSLSSLSGPLQVVPDIDDQMSNADSSQEAKVTEECSQYEFENYMRQQLLLAEEKSSIHDARSWVPKRQFGSAPPVRRLGHDAQPMTSLDTAILAQRYLRK

SEQ ID NO: 766196 - protein, 417 aa, Homo sapiens
MKRRASDRGAGETSARAKALGSGISGNNAKRAGPFILGPRLGNSPVPSIVQCLARKDGTDDFYQLKILTLEERGDQGIESQEERQGKMLLHTEYSLLSLLHTQDGVVHHHGLFQDRTCEIVEDTESSRMVKKMKKRICLVLDCLCAHDFSDKTADLINLQHYVIKEKRLSERETVVIFYDVVRVVEALHQKNIVHRDLKLGNMVLNKRTHRITITNFCLGKHLVSEGDLLKDQRGSPAYISPDVLSGRPYRGKPSDMWALGVVLFTMLYGQFPFYDSIPQELFRKIKAAEYTIPEDGRVSENTVCLIRKLLVLDPQQRLAAADVLEALSAIIASWQSLSSLSGPLQVVPDIDDQMSNADSSQEVSWGGQMGHYPAPRDRLLGAGRARAEVAATRRPQSFLGLLPQPWGGKGRLQSSA

SEQ ID NO: 766197 - protein, 446 aa, Homo sapiens
MTVTSWREELRMKRRASDRGAGETSARAKALGSGISGNNAKRAGPFILGPRLGNSPVPSIVQCLARKDGTDDFYQLKILTLEERGDQGIESQEERQGKMLLHTEYSLLSLLHTQDGVVHHHGLFQDRTCEIVEDTESSRMVKKMKKRICLVLDCLCAHDFSDKTADLINLQHYVIKEKRLSERETVVIFYDVVRVVEALHQKNIVHRDLKLGNMVLNKRTHRITITNFCLGKHLVSEGDLLKDQRGSPAYISPDVLSGRPYRGKPSDMWALGVVLFTMLYGQFPFYDSIPQELFRKIKAAEYTIPEDGRVSENTVCLIRKLLVLDPQQRLAAADVLEALSAIIASWQSLSSLSGPLQVVPDIDDQMSNADSSQEAKVTEECSQYEFENYMRQQLLLAEEKSSIHDARSWVPKRQFGSAPPVRRLGHDAQPMTSLDTAILAQRYLRK

SEQ ID NO: 766198 - protein, 435 aa, Homo sapiens; identical to SEQ ID NO: 766195

SEQ ID NO: 766199 - protein, 435 aa, Homo sapiens; identical to SEQ ID NO: 766195

SEQ ID NO: 766200 - protein, 179 aa, Homo sapiens
MWALGVVLFTMLYGQFPFYDSIPQELFRKIKAAEYTIPEDGRVSENTVCLIRKLLVLDPQQRLAAADVLEALSAIIASWQSLSSLSGPLQVVPDIDDQMSNADSSQEAKVTEECSQYEFENYMRQQLLLAEEKSSIHDARSWVPKRQFGSAPPVRRLGHDAQPMTSLDTAILAQRYLRK

SEQ ID NO: 766201 - protein, 102 aa, Homo sapiens
VEGHSNVWSRAEVAAPQPWREAAAAAAAARVAALGGGGERLARLQPGPGPPGGRAEQPRLCATCGNNSLSRGHQHCCHFFQPQPKAWLSGLGPVVLDSPGPQ

SEQ ID NO: 766202 - protein, 435 aa, Homo sapiens; identical to SEQ ID NO: 766195

SEQ ID NO: 766203 - protein, 435 aa, Homo sapiens; identical to SEQ ID NO: 766195

SEQ ID NO: 766204 - protein, 300 aa, Homo sapiens
MKRRASDRGAGETSARAKALGSGISGNNAKRAGPFILGPRLGNSPVPSIVQCLARKDGTDDFYQLKILTLEERGDQGIESQEERQGKMLLHTEYSLLSLLHTQDGVVHHHGLFQDRTCEIVEDTESSRMVKKMKKRICLVLDCLCAHDFSDKTADLINLQHYVIKEKRLSERETVVIFYDVVRVVEALHQKNIVHRDLKLGNMVLNKRTHRITITNFCLGKHLVSEGDLLKDQRGSPAYISPDVLSGRPYRGKPSDMWALGVVLFTMLYGQFPFYDSIPQELFRKIKAAEYTIPDAVHAR

SEQ ID NO: 766205 - protein, 265 aa, Homo sapiens
MNRFLLLMSLYLLGSARGTSSQPNELSGSIDHQTSVQQLPGEFFSLENPSDAEALYETSSGLNTLSEHGSSEHGSSKHTVAEHTSGEHAESEHASGEPAATEHAEGEHTVGEQPSGEQPSGEHLSGEQPLSELESGEQPSDEQPSGEHGSGEQPSGEQASGEQPSGEHASGEQASGAPISSTSTGTILNCYTCAYMNDQGKCLRGEGTCITQNSQQCMLKKIFEGGKLQFMVQGCENMCPSMNLFSHGTRMQIICCRNQSFCNKI

SEQ ID NO: 766206 - protein, 170 aa, Homo sapiens
MNRFLLLMSLYLLGSARGTSSQPNELSGSIDHQTSVQQLPGEQPSDEQPSGEHGSGEQPSGEQASGEQPSGEHASGEQASGAPISSTSTGTILNCYTCAYMNDQGKCLRGEGTCITQNSQQCMLKKIFEGGKLQFMVQGCENMCPSMNLFSHGTRMQIICCRNQSFCNKI

SEQ ID NO: 766207 - protein, 195 aa, Homo sapiens
MNRFLLLMSLYLLGSARGTSSQPNELSGSIDHQTSVQQLPGEQPSGEQPSGEHLSGEQPLSELESGEQPSDEQPSGEHGSGEQPSGEQASGEQPSGEHASGEQASGAPISSTSTGTILNCYTCAYMNDQGKCLRGEGTCITQNSQQCMLKKIFEGGKLQFMVQGCENMCPSMNLFSHGTRMQIICCRNQSFCNKI

SEQ ID NO: 766208 - protein, 246 aa, Homo sapiens
MNRFLLLMSLYLLGSARGTSSQPNELSGSIDHQTSVQQLPGEFFSLENPSDAEALYETSSGLNTLSEHGSSEHGSSKHTVAEHTSGEHAESEHASGEPAATEHAEGEHTVGEQPSGEQPSGEHLSGEQPLSELESGEQPSDEQPSGEHGSGEQPSGEQASGEQPSGTILNCYTCAYMNDQGKCLRGEGTCITQNSQQCMLKKIFEGGKLQFMVQGCENMCPSMNLFSHGTRMQIICCRNQSFCNKI

SEQ ID NO: 766209 - protein, 210 aa, Homo sapiens
MNRFLLLMSLYLLGSARGTSSQPNELSGSIDHQTSVQQLPGEPAATEHAEGEHTVGEQPSGEQPSGEHLSGEQPLSELESGEQPSDEQPSGEHGSGEQPSGEQASGEQPSGEHASGEQASGAPISSTSTGTILNCYTCAYMNDQGKCLRGEGTCITQNSQQCMLKKIFEGGKLQFMVQGCENMCPSMNLFSHGTRMQIICCRNQSFCNKI

SEQ ID NO: 766210 - protein, 121 aa, Homo sapiens
MNRFLLLMSLYLLGSARGTSSQPNELSGSIDHQTSVQQLPGTILNCYTCAYMNDQGKCLRGEGTCITQNSQQCMLKKIFEGGKLQFMVQGCENMCPSMNLFSHGTRMQIICCRNQSFCNKI

SEQ ID NO: 766211 - protein, 155 aa, Homo sapiens
MNRFLLLMSLYLLGSARGTSSQPNELSGSIDHQTSVQQLPGEQPSGEQPSGEHLSGEQPLSELESGEQPSDEQPSGEHGSGEQPSGEQASGEQPSGEHASGEQASGAPISSTSTGGKLQFMVQGCENMCPSMNLFSHGTRMQIICCRNQSFCNKI

SEQ ID NO: 766212 - protein, 142 aa, Homo sapiens
EGRVGPAQVLSPPRPAMPTGPKRMQDPPRDSAPNPTHARHHSNCDSGGPCRGEGGASGDRQGGHVPSSCGRSWDALVAPGGTCPHTHTDTHTHTHTRDFGKLCLRDRGWGWGFFFHYLSSFESSLPFLFLSISLLSSFFKKI

SEQ ID NO: 766213 - protein, 1494 aa, Homo sapiens
MENRPGSFQYVPVQLQGGAPWGFTLKGGLEHCEPLTVSKIEDGGKAALSQKMRTGDELVNINGTPLYGSRQEALILIKGSFRILKLIVRRRNAPVSRPHSWHVAKLLEGCPEAATTMHFPSEAFSLSWHSGCNTSDVCVQWCPLSRHCSTEKSSSIGSMESLEQPGQATYESHLLPIDQNMYPNQRDSAYSSFSASSNASDCALSLRPEEPASTDCIMQGPGPTKAPSGRPNVAETSGGSRRTNGGHLTPSSQMSSRPQEGYQSGPAKAVRGPPQPPVRRDSLQASRAQLLNGEQRRASEPVVPLPQKEKLSLEPVLPARNPNRFCCLSGHDQVTSEGHQNCEFSQPPESSQQGSEHLLMQASTKAVGSPKACDRASSVDSNPLNEASAELAKASFGRPPHLIGPTGHRHSAPEQLLASHLQHVHLDTRGSKGMELPPVQDGHQWTLSPLHSSHKGKKSPCPPTGGTHDQSSKERKTRQVDDRSLVLGHQSQSSPPHGEADGHPSEKGFLDPNRTSRAASELANQQPSASGSLVQQATDCSSTTKAASGTEAGEEGDSEPKECSRMGGRRSGGTRGRSIQNRRKSERFATNLRNEIQRRKAQLQKSKGPLSQLCDTKEPVEETQEPPESPPLTASNTSLLSSCKKPPSPRDKLFNKSMMLRARSSECLSQAPESHESRTGLEGRISPGQRPGQSSLGLNTWWKAPDPSSSDPEKAHAHCGVRGGHWRWSPEHNSQPLVAAAMEGPSNPGDNKELKASTAQAGEDAILLPFADRRKFFEESSKSLSTSHLPGLTTHSNKTFTQRPKPIDQNFQPMSSSCRELRRHPMDQSYHSADQPYHATDQSYHSMSPLQSETPTYSECFASKGLENSMCCKPLHCGDFDYHRTCSYSCSVQGALVHDPCIYCSGEICPALLKRNMMPNCYNCRCHHHQCIRCSVCYHNPQHSALEDSSLAPGNTWKPRKLTVQEFPGDKWNPITGNRKTSQSGREMAHSKTSFSWATPFHPCLENPALDLSSYRAISSLDLLGDFKHALKKSEETSVYEEGSSLASMPHPLRSRAFSESHISLAPQSTRAWGQHRRELFSKGDETQSDLLGARKKAFPPPRPPPPNWEKYRLFRAAQQAESSNSSSRSNKEEEEEEEEEEEEEEEEEEEEAEEEEEELPPQYFSSETSGSCALNPEEVLEQPQPLSFGHLEGSRQGSQSVPAEQESFALHSSDFLPPIRGHLGSQPEQAQPPCYYGIGGLWRTSGQEATESAKQEFQHFSPPSGAPGIPTSYSAYYNISVAKAELLNKLKDQPEMAEIGLGEEEVDHELAQKKIQLIESISRKLSVLREAQRGLLEDINANSALGEEVEANLKAVCKSNEFEKYHLFVGDLDKVVNLLLSLSGRLARVENALNSIDSEANQEKLVLIEKKQQLTGQLADAKELKEHVDRREKLVFGMVSRYLPQDQLQDYQHFVKMKSALIIEQRELEEKIKLGEEQLKCLRESLLLGPSNF

SEQ ID NO: 766214 - protein, 106 aa, Homo sapiens
MENRPGSFQYVPVQLQGGAPWGFTLKGGLEHCEPLTVSKIEDGGKAALSQKMRTGDELVNINGTPLYGSRQEALILIKGSFRILKLIVRRLSLLAPGIKHSPKRRP

SEQ ID NO: 766215 - protein, 1476 aa, Homo sapiens
MENRPGSFQYVPVQLQGGAPWGFTLKGGLEHCEPLTVSKIEDGGKAALSQKMRTGDELVNINGTPLYGSRQEALILIKGSFRILKLIVRRRNAPVSRPHSWHVAKLLEGCPEAATTMHFPSEAFSLSWHSGCNTSDVCVQWCPLSRHCSTEKSSSIGSMESLEQPGQATYESHLLPIDQNMYPNQRDSAYSSFSASSNASDCALSLRPEEPASTDCIMQGPGPTKAPSGRPNVAETSGGSRRTNGGHLTPSSQMSSRPQEGYQSGPAKAVRGPPQPPVRRDSLQASRAQLLNGEQRRASEPVVPLPQKEKLSLEPVLPARNPNRFCCLSGHDQVTSEGHQNCEFSQPPESSQQGSEHLLMQASTKAVGSPKACDRASSGRPPHLIGPTGHRHSAPEQLLASHLQHVHLDTRGSKGMELPPVQDGHQWTLSPLHSSHKGKKSPCPPTGGTHDQSSKERKTRQVDDRSLVLGHQSQSSPPHGEADGHPSEKGFLDPNRTSRAASELANQQPSASGSLVQQATDCSSTTKAASGTEAGEEGDSEPKECSRMGGRRSGGTRGRSIQNRRKSERFATNLRNEIQRRKAQLQKSKGPLSQLCDTKEPVEETQEPPESPPLTASNTSLLSSCKKPPSPRDKLFNKSMMLRARSSECLSQAPESHESRTGLEGRISPGQRPGQSSLGLNTWWKAPDPSSSDPEKAHAHCGVRGGHWRWSPEHNSQPLVAAAMEGPSNPGDNKELKASTAQAGEDAILLPFADRRKFFEESSKSLSTSHLPGLTTHSNKTFTQRPKPIDQNFQPMSSSCRELRRHPMDQSYHSADQPYHATDQSYHSMSPLQSETPTYSECFASKGLENSMCCKPLHCGDFDYHRTCSYSCSVQGALVHDPCIYCSGEICPALLKRNMMPNCYNCRCHHHQCIRCSVCYHNPQHSALEDSSLAPGNTWKPRKLTVQEFPGDKWNPITGNRKTSQSGREMAHSKTSFSWATPFHPCLENPALDLSSYRAISSLDLLGDFKHALKKSEETSVYEEGSSLASMPHPLRSRAFSESHISLAPQSTRAWGQHRRELFSKGDETQSDLLGARKKAFPPPRPPPPNWEKYRLFRAAQQAESSNSSSRSNEEEEEEEEEEEEEEEEEEEEEAEEEEEELPPQYFSSETSGSCALNPEEVLEQPQPLSFGHLEGSRQGSQSVPAEQESFALHSSDFLPPIRGHLGSQPEQAQPPCYYGIGGLWRTSGQEATESAKQEFQHFSPPSGAPGIPTSYSAYYNISVAKAELLNKLKDQPEMAEIGLGEEEVDHELAQKKIQLIESISRKLSVLREAQRGLLEDINANSALGEEVEANLKAVCKSNEFEKYHLFVGDLDKVVNLLLSLSGRLARVENALNSIDSEANQEKLVLIEKKQQLTGQLADAKELKEHVDRREKLVFGMVSRYLPQDQLQDYQHFVKMKSALIIEQRELEEKIKLGEEQLKCLRESLLLGPSNF

SEQ ID NO: 766216 - protein, 1378 aa, Homo sapiens
MHFPSEAFSLSWHSGCNTSDVCVQWCPLSRHCSTEKSSSIGSMESLEQPGQATYESHLLPIDQNMYPNQRDSAYSSFSASSNASDCALSLRPEEPASTDCIMQGPGPTKAPSGRPNVAETSGGSRRTNGGHLTPSSQMSSRPQEGYQSGPAKAVRGPPQPPVRRDSLQASRAQLLNGEQRRASEPVVPLPQKEKLSLEPVLPARNPNRFCCLSGHDQVTSEGHQNCEFSQPPESSQQGSEHLLMQASTKAVGSPKACDRASSVDSNPLNEASAELAKASFGRPPHLIGPTGHRHSAPEQLLASHLQHVHLDTRGSKGMELPPVQDGHQWTLSPLHSSHKGKKSPCPPTGGTHDQSSKERKTRQVDDRSLVLGHQSQSSPPHGEADGHPSEKGFLDPNRTSRAASELANQQPSASGSLVQQATDCSSTTKAASGTEAGEEGDSEPKECSRMGGRRSGGTRGRSIQNRRKSERFATNLRNEIQRRKAQLQKSKGPLSQLCDTKEPVEETQEPPESPPLTASNTSLLSSCKKPPSPRDKLFNKSMMLRARSSECLSQAPESHESRTGLEGRISPGQRPGQSSLGLNTWWKAPDPSSSDPEKAHAHCGVRGGHWRWSPEHNSQPLVAAAMEGPSNPGDNKELKASTAQAGEDAILLPFADRRKFFEESSKSLSTSHLPGLTTHSNKTFTQRPKPIDQNFQPMSSSCRELRRHPMDQSYHSADQPYHATDQSYHSMSPLQSETPTYSECFASKGLENSMCCKPLHCGDFDYHRTCSYSCSVQGALVHDPCIYCSGEICPALLKRNMMPNCYNCRCHHHQCIRCSVCYHNPQHSALEDSSLAPGNTWKPRKLTVQEFPGDKWNPITGNRKTSQSGREMAHSKTSFSWATPFHPCLENPALDLSSYRAISSLDLLGDFKHALKKSEETSVYEEGSSLASMPHPLRSRAFSESHISLAPQSTRAWGQHRRELFSKGDETQSDLLGARKKAFPPPRPPPPNWEKYRLFRAAQQAESSNSSSRSNEEEEEEEEEEEEEEEEEEEEEAEEEEEELPPQYFSSETSGSCALNPEEVLEQPQPLSFGHLEGSRQGSQSVPAEQESFALHSSDFLPPIRGHLGSQPEQAQPPCYYGIGGLWRTSGQEATESAKQEFQHFSPPSGAPGIPTSYSAYYNISVAKAELLNKLKDQPEMAEIGLGEEEVDHELAQKKIQLIESISRKLSVLREAQRGLLEDINANSALGEEVEANLKAVCKSNEFEKYHLFVGDLDKVVNLLLSLSGRLARVENALNSIDSEANQEKLVLIEKKQQLTGQLADAKELKEHVDRREKLVFGMVSRYLPQDQLQDYQHFVKMKSALIIEQRELEEKIKLGEEQLKCLRESLLLGPSNF

SEQ ID NO: 766217 - protein, 251 aa, Homo sapiens
MELLIMINACKIASASRVTAVIPCFPYARQDKKDKSRSPISAKLVANMLSIAGADHIITMDLHASQIQGFFDIPVDNLYAEPTVLKWIRENIPEWKNCIIVSPDAGGAKRVTSIADQLNVDFALIHKERKKANEVDCIVLVGDVNDRVAILVDDMADTCVTICLAADKLLSAGATRVYAILTHGIFSGPAISRINTACFEAVVVTNTIPQDEKMKHCSKIRVIDISMILAEAIRRTHNGESVSYLFSHVPL

SEQ ID NO: 766218 - protein, 137 aa, Homo sapiens
PKHQSSDIHCRSKMGLRVLPFLAYLLSLHRFCESPPTHKRSFFLRAPLTRHKCLSYKVFRCTLVFMSPGFFTKLCDSWALSPPSSYMQRLSQSRLIFVEGSCGSALRATGRTPLIQPYRGRCGSRHWLPCPPLVSLS

SEQ ID NO: 766219 - protein, 82 aa, Homo sapiens
PAGTCECWCLEGGPGCAELWGAGPHSSPDRAPGASSINQGSVLPARFEGFLLGVWVLSASCCVWRLLSTGCPSRVWVPGQPS

SEQ ID NO: 766220 - protein, 70 aa, Homo sapiens
AAAYYYYCSEFKLLTMYGPMLMPRVTLATRWAPKPPLPLFLPPIPHLVLTNPASLSGPGCRDLGSLSPSL

SEQ ID NO: 766221 - protein, 205 aa, Homo sapiens
NKNVWLGTRLGGLIGRGAASPLDHAERAEEQHEKYRPSQDQGLPASRCLRCCDPGTSMYPATAVPQINITILKGEKGDRGDRGLQGKYGKTGSAGARGHTGPKGQKGSMGAPGERCKSHYAAFSVGRKKPMHSNHYYQTVIFDTEFVNLYDHFNMFTGKFYCYVPGLYFFSLNVHTWNQKETYLHILQSSKEENEKQKRDKEDNQ

SEQ ID NO: 766222 - protein, 122 aa, Homo sapiens
GAHTVNPPRLLFGRKALGVLEAPRCSHLAGLRSLRVCPTFSLSSFTFEKPRFRFWSQRPRRPRRGDGGAVGGGDLWLLVPPPTLLFCTAVLRKTFSPALFPSPSLCIAPDLAGRRLGRREML

SEQ ID NO: 766223 - protein, 103 aa, Homo sapiens
GAHTVNPPRLLFGRKALGVLEAPRCSHLAGLRSLRVCPTFSLSSFTFEKPRFRFWSQRPRRPRRGDGGAVGGGDLWLLVPPPTLLFCTAVLRKTFSPALFPSL

SEQ ID NO: 766224 - protein, 281 aa, Homo sapiens
MGSRGQGLLLAYCLLLAFASGLVLSRVPHVQGEQQEWEGTEELPSPPDHAERAEEQHEKYRPSQDQGLPASRCLRCCDPGTSMYPATAVPQINITILKGEKGDRGDRGLQGKYGKTGSAGARGHTGPKGQKGSMGAPGERCKSHYAAFSVGRKKPMHSNHYYQTVIFDTEFVNLYDHFNMFTGKFYCYVPGLYFFSLNVHTWNQKETYLHIMKNEEEVVILFAQVGDRSIMQSQSLMLELREQDQVWVRLYKGERENAIFSEELDTYITFSGYLVKHATEP

SEQ ID NO: 766225 - protein, 281 aa, Homo sapiens; identical to SEQ ID NO: 766224

SEQ ID NO: 766226 - protein, 281 aa, Homo sapiens; identical to SEQ ID NO: 766224

SEQ ID NO: 766227 - protein, 281 aa, Homo sapiens; identical to SEQ ID NO: 766224

SEQ ID NO: 766228 - protein, 281 aa, Homo sapiens; identical to SEQ ID NO: 766224

SEQ ID NO: 766229 - protein, 122 aa, Homo sapiens
RKGGVVALAPLPRGPHGALLPFGSSVAPGPKGQETTSGLILLSHVGTFLRDRWTLTSLWPCPRALLVFLSHSCEVMGAGAPGVSLPEGQLSPLPWLQVGRSSRRAPDSGQGPLGPPGLQMFL

SEQ ID NO: 766230 - protein, 281 aa, Homo sapiens; identical to SEQ ID NO: 766224

SEQ ID NO: 766231 - protein, 82 aa, Homo sapiens
ESRKLSARYEAWVVLTSLWPCPRALLVFLSHSCEVMGAGAPGVSLPEGQLSPLPWLQVGRSSRRAPDSGQGPLGPPGLQMFL

SEQ ID NO: 766232 - protein, 281 aa, Homo sapiens; identical to SEQ ID NO: 766224

SEQ ID NO: 766233 - protein, 281 aa, Homo sapiens; identical to SEQ ID NO: 766224

SEQ ID NO: 766234 - protein, 281 aa, Homo sapiens; identical to SEQ ID NO: 766224

SEQ ID NO: 766235 - protein, 181 aa, Homo sapiens
MGSRGQGLLLAYCLLLAFASGLVLSRVPHVQGEQQEWEGTEELPSPPDHAERAEEQHEKYRPSQDQGLPASRCLRCCDPGTSMYPATAVPQINITILKGEKGDRGDRGLQGKYGKTGSAGARGHTGPKGQKGSMGAPGERCKSHCKVMYGVQLLAEDGVLTFALVEAYPHLVLLSQLQHQA

SEQ ID NO: 766236 - protein, 142 aa, Homo sapiens
PDQPPHSPWLKKKEHLLSHCTPSPPRIVAHIPKMWKDFSFPSGTCSSPPFGDLTIAAKAMHPVGLRKPQCLQPCLRAAASLIFHHLPCLQGYLLTGLECKFQRLLLKIPQVKQARCLDLLLSLTCNILFRGSEHLLGCYLMC

SEQ ID NO: 766237 - protein, 461 aa, Homo sapiens
FVDTEEMTGTHLHRTIKTYLQQIGVDMDKIHGQAYDSTTNLKIKFNKIAAEFKKEEPRALYIHCYAHFLDLSIIRFCKEVKELRSALKTLSSLFNTICMSGEMLANFRNIYRLSQNKTCKKHISQSCWTVHDRTLLSVIDSLPEIIETLEVIASHSSNTSFADELSHLLTLVSKFEFVFCLKFLYRVLSVTGILSKELQNKTIDIFSLSSKIEAILECLSSERNDVYFKTIWDGTEEICQKITCKGFKVEKPSLQKRRKIQKSVDLGNSDNMFFPTSTEEQYKINIYYQGLDTILQNLKLCFSEFDYCKIKQISELLFKWNEPLNETTAKHVQEFYKLDEDIIPELRFYRHYAKLNFVIDDSCINFVSLGCLFIQHGLHSNIPCLSKLLYIALSWPITSASTENSFSTLPRLKTYLCNTMGQEKLTGPALMAVEQELVNKLMEPERLNEIVEKFISQMKEI

SEQ ID NO: 766238 - protein, 461 aa, Homo sapiens; identical to SEQ ID NO: 766237

SEQ ID NO: 766239 - protein, 533 aa, Homo sapiens
MNESPDPTDLAGVIIELGPNDSPQTSEFKGATEEAPAKESVLARLSKFEVEDAENVASYDSKIKKIVHSIVSSFAFGLFGVFLVLLDVTLILADLIFTDSKLYIPLEYRSISLAIALFFLMDVLLRVFVERRQQYFSDLFNILDTAIIVILLLVDVVYIFFDIKLLRNIPRWTHLLRLLRLIILLRIFHLFHQKRQLEKLIRRRVSENKRRYTRDGFDLDLTYVTERIIAMSFPSSGRQSFYRNPIKEVVRFLDKKHRNHYRVYNLCSERAYDPKHFHNRVVRIMIDDHNVPTLHQMVVFTKEVNEWMAQDLENIVAIHCKGGTDRTGTMVCAFLIASEICSTAKESLYYFGERRTDKTHSEKFQGVETPSQKRYVAYFAQVKHLYNWNLPPRRILFIKHFIIYSIPRYVRDLKIQIEMEKKVVFSTISLGKCSVLDNITTDKILIDVFDGPPLYDDVKVQFFSSNLPTYYDNCSFYFWLHTSFIENNRLYLPKNELDNLHKQKARRIYPSDFAVEILFGEKMTSSDVVAGSD

SEQ ID NO: 766240 - protein, 551 aa, Homo sapiens
MNESPDPTDLAGVIIELGPNDSPQTSEFKGATEEAPAKESPHTSEFKGAARVSPISESVLARLSKFEVEDAENVASYDSKIKKIVHSIVSSFAFGLFGVFLVLLDVTLILADLIFTDSKLYIPLEYRSISLAIALFFLMDVLLRVFVERRQQYFSDLFNILDTAIIVILLLVDVVYIFFDIKLLRNIPRWTHLLRLLRLIILLRIFHLFHQKRQLEKLIRRRVSENKRRYTRDGFDLDLTYVTERIIAMSFPSSGRQSFYRNPIKEVVRFLDKKHRNHYRVYNLCSERAYDPKHFHNRVVRIMIDDHNVPTLHQMVVFTKEVNEWMAQDLENIVAIHCKGGTDRTGTMVCAFLIASEICSTAKESLYYFGERRTDKTHSEKFQGVETPSQKRYVAYFAQVKHLYNWNLPPRRILFIKHFIIYSIPRYVRDLKIQIEMEKKVVFSTISLGKCSVLDNITTDKILIDVFDGPPLYDDVKVQFFSSNLPTYYDNCSFYFWLHTSFIENNRLYLPKNELDNLHKQKARRIYPSDFAVEILFGEKMTSSDVVAGSD

SEQ ID NO: 766241 - protein, 487 aa, Homo sapiens
MNESPDPTDLAGVIIELGPNDSPQTSEFKGATEEAPAKESPHTSEFKGAARVSPISESVLARLSKFEVEDAENVASYDSKIKKIVHSIVSSFAFGLFGVFLVLLDVTLILADLIFTDSKLYIPLEYRSISLAIALFFLMDVLLRVFVERRQQYFSDLFNILDTAIIVILLLVDVVYIFFDIKLLRNIPRWTHLLRLLRLIILLRIFHLFHQKRQLEKLIRRRVSENKRRYTRDGFDLDLTYVTERIIAMSFPSSGRQSFYRNPIKEVVRFLDKKHRNHYRVYNLCSERAYDPKHFHNRVVRIMIDDHNVPTLHQMVVFTKEVNEWMAQDLENIVAIHCKGGTDRTGTMVCAFLIASEICSTAKESLYYFGERRTDKTHSEKFQGVETPSQKRYVAYFAQVKHLYNWNLPPRRILFIKHFIIYSIPRYVRDLKIQIEMEKKVVFSTISLGKCSVLDNITTDKILIDVFDGPPLYDDVKVQFFSSSLPT

SEQ ID NO: 766242 - protein, 483 aa, Homo sapiens
MSTARTENPVIMGLSSQNGQLRGPVKPTGGPGGGGTQTQQQMNQLKNTNTINNGTQQQAQSMTTTIKPGDDWKKTLKLPPKDLRIKTSDVTSTKGNEFEDYCLKRELLMGIFEMGWEKPSPIQEESIPIALSGRDILARAKNGTGKSGAYLIPLLERLDLKKDNIQAMVIVPTRELALQVSQICIQVSKHMGGAKVMATTGGTNLRDDIMRLDDTVHVVIATPGRILDLIKKGVAKVDHVQMIVLDEADKLLSQDFVQIMEDIILTLPKNRQILLYSATFPLSVQKFMNSHLQKPYEINLMEELTLKGVTQYYAYVTERQKVHCLNTLFSRLQINQSIIFCNSSQRVELLAKKISQLGYSCFYIHAKMRQEHRNRVFHDFRNGLCRNLVCTDLFTRGIDIQAVNVVINFDFPKLAETYLHRIGRSGRFGHLGLAINLITYDDRFNLKSIEEQLGTEIKPIPSNIDKSLYVAEYHSEPVEDEKP

SEQ ID NO: 766243 - protein, 483 aa, Homo sapiens; identical to SEQ ID NO: 766242

SEQ ID NO: 766244 - protein, 483 aa, Homo sapiens; identical to SEQ ID NO: 766242

SEQ ID NO: 766245 - protein, 483 aa, Homo sapiens; identical to SEQ ID NO: 766242

SEQ ID NO: 766246 - protein, 483 aa, Homo sapiens; identical to SEQ ID NO: 766242

SEQ ID NO: 766247 - protein, 483 aa, Homo sapiens; identical to SEQ ID NO: 766242

SEQ ID NO: 766248 - protein, 316 aa, Homo sapiens
MVIVPTRELALQVSQICIQVSKHMGGAKVMATTGGTNLRDDIMRLDDTVHVVIATPGRILDLIKKGVAKVDHVQMIVLDEADKLLSQDFVQIMEDIILTLPKNRQILLYSATFPLSVQKFMNSHLQKPYEINLMEELTLKGVTQYYAYVTERQKVHCLNTLFSRLQINQSIIFCNSSQRVELLAKKISQLGYSCFYIHAKMRQEHRNRVFHDFRNGLCRNLVCTDLFTRGIDIQAVNVVINFDFPKLAETYLHRIGRSGRFGHLGLAINLITYDDRFNLKSIEEQLGTEIKPIPSNIDKSLYVAEYHSEPVEDEKP

SEQ ID NO: 766249 - protein, 287 aa, Homo sapiens
MATTGGTNLRDDIMRLDDTVHVVIATPGRILDLIKKGVAKVDHVQMIVLDEADKLLSQDFVQIMEDIILTLPKNRQILLYSATFPLSVQKFMNSHLQKPYEINLMEELTLKGVTQYYAYVTERQKVHCLNTLFSRLQINQSIIFCNSSQRVELLAKKISQLGYSCFYIHAKMRQEHRNRVFHDFRNGLCRNLVCTDLFTRGIDIQAVNVVINFDFPKLAETYLHRIGRSGRFGHLGLAINLITYDDRFNLKSIEEQLGTEIKPIPSNIDKSLYVAEYHSEPVEDEKP

SEQ ID NO: 766250 - protein, 303 aa, Homo sapiens [sequence omitted]

SEQ ID NO: 766251 - protein, 249 aa, Homo sapiens
MSTARTENPVIMGLSSQNGQLRGPVKPTGGPGGGGTQTQQQMNQLKNTNTINNGTQQQAQSMTTTIKPGDDWKKTLKLPPKDLRIKTSDVTSTKGNEFEDYCLKRELLMGIFEMGWEKPSPIQEESIPIALSGRDILARAKNGTGKSGAYLIPLLERLDLKKDNIQAMVIVPTRELALQVSQICIQVSKHMGGAKVMATTGGTNLRDDIMRLDDTVHVVIATPGRILDLIKKGVAKVDHVQMIVLDEAR

SEQ ID NO: 766252 - protein, 76 aa, Homo sapiens
FTLIFIFYSLKFLNTCFLGRFGHLGLAINLITYDDRFNLKSIEEQLGTEIKPIPSNIDKSLYVAEYHSEPVEDEKP

SEQ ID NO: 766253 - protein, 227 aa, Homo sapiens [sequence omitted]

SEQ ID NO: 766254 - protein, 478 aa, Homo sapiens
MGRCCFYTAGTLSLLLLVTSVTLLVARVFQKAVDQSIEKKIVLRNGTEAFDSWEKPPLPVYTQFYFFNVTNPEEILRGETPRVEEVGPYTYRELRNKANIQFGDNGTTISAVSNKAYVFERDQSVGDPKIDLIRTLNIPVLTVIEWSQVHFLREIIEAMLKAYQQKLFVTHTVDELLWGYKDEILSLIHVFRPDISPYFGLFYEKNGTNDGDYVFLTGEDSYLNFTKIVEWNGKTSLDWWITDKCNMINGTDGDSFHPLITKDEVLYVFPSDFCRSVYITFSDYESVQGLPAFRYKVPAEILANTSDNAGFCIPEGNCLGSGVLNVSICKNGAPIIMSFPHFYQADERFVSAIEGMHPNQEDHETFVDINPLTGIILKAAKRFQINIYVKKLDDFVETGDIRTMVFPVMYLNESVHIDKETASRLKSMINTTLIITNIPYIIMALGVFFGLVFTWLACKGQGSMDEGTADERAPLIRT

SEQ ID NO: 766255 - protein, 478 aa, Homo sapiens; identical to SEQ ID NO: 766254

SEQ ID NO: 766256 - protein, 478 aa, Homo sapiens; identical to SEQ ID NO: 766254

SEQ ID NO: 766257 - protein, 320 aa, Homo sapiens
MLKAYQQKLFVTHTVDELLWGYKDEILSLIHVFRPDISPYFGLFYEKNGTNDGDYVFLTGEDSYLNFTKIVEWNGKTSLDWWITDKCNMINGTDGDSFHPLITKDEVLYVFPSDFCRSVYITFSDYESVQGLPAFRYKVPAEILANTSDNAGFCIPEGNCLGSGVLNVSICKNGAPIIMSFPHFYQADERFVSAIEGMHPNQEDHETFVDINPLTGIILKAAKRFQINIYVKKLDDFVETGDIRTMVFPVMYLNESVHIDKETASRLKSMINTTLIITNIPYIIMALGVFFGLVFTWLACKGQGSMDEGTADERAPLIRT

SEQ ID NO: 766258 - protein, 478 aa, Homo sapiens; identical to SEQ ID NO: 766254

SEQ ID NO: 766259 - protein, 301 aa, Homo sapiens
EIFIYDNCEKKEKGLRRTDSLLEPAKQKNGTNDGDYVFLTGEDSYLNFTKIVEWNGKTSLDWWITDKCNMINGTDGDSFHPLITKDEVLYVFPSDFCRSVYITFSDYESVQGLPAFRYKVPAEILANTSDNAGFCIPEGNCLGSGVLNVSICKNGAPIIMSFPHFYQADERFVSAIEGMHPNQEDHETFVDINPLTGIILKAAKRFQINIYVKKLDDFVETGDIRTMVFPVMYLNESVHIDKETASRLKSMINTTLIITNIPYIIMALGVFFGLVFTWLACKGQGSMDEGTADERAPLIRT

SEQ ID NO: 766260 - protein, 478 aa, Homo sapiens; identical to SEQ ID NO: 766254

SEQ ID NO: 766261 - protein, 478 aa, Homo sapiens; identical to SEQ ID NO: 766254

SEQ ID NO: 766262 - protein, 478 aa, Homo sapiens; identical to SEQ ID NO: 766254

SEQ ID NO: 766263 - protein, 421 aa, Homo sapiens
MGRCCFYTAGTLSLLLLVTSVTLLVARVFQKAVDQSIEKKIVLRNGTEAFDSWEKPPLPVYTQFYFFNVTNPEEILRGETPRVEEVGPYTYRELRNKANIQFGDNGTTISAVSNKAYVFERDQSVGDPKIDLIRTLNIPVLTVIEWSQVHFLREIIEAMLKAYQQKLFVTHTVDELLWGYKDEILSLIHVFRPDISPYFGLFYEKNGTNDGDYVFLTGEDSYLNFTKIVEWNGKTSLDWWITDKCNMINGTDGDSFHPLITKDEVLYVFPSDFCRSVYITFSDYESVQGLPAFRYKVPAEILANTSDNAGFCIPEGNCLGSGVLNVSICKNGKNSERGHDRGVKNAEGLEFNKEYVAGHSGAHLQSQLLRMLRWDDHLSPGVLKSILGNMARPLSLKNKTNKKEYIVSPIERSVSFKNNVS

SEQ ID NO: 766264 - protein, 137 aa, Homo sapiens
MGRCCFYTAGTLSLLLLVTSVTLLVARVFQKAVDQSIEKKIVLRNGTEAFDSWEKPPLPVYTQFYFFNVTNPEEILRGETPRVEEVGPYTYRELRNKANIQFGDNGTTISAVSNKAYVFERDQSVGSPYRRTNVVTK

SEQ ID NO: 766265 - protein, 478 aa, Homo sapiens; identical to SEQ ID NO: 766254

SEQ ID NO: 766266 - protein, 478 aa, Homo sapiens; identical to SEQ ID NO: 766254

SEQ ID NO: 766267 - protein, 486 aa, Homo sapiens
TQYNSVLPFKLSASLNFCGHGTKNAIFSFTKEKSCNIFDPQHGAQEAKIVLRNGTEAFDSWEKPPLPVYTQFYFFNVTNPEEILRGETPRVEEVGPYTYRELRNKANIQFGDNGTTISAVSNKAYVFERDQSVGDPKIDLIRTLNIPVLTVIEWSQVHFLREIIEAMLKAYQQKLFVTHTVDELLWGYKDEILSLIHVFRPDISPYFGLFYEKNGTNDGDYVFLTGEDSYLNFTKIVEWNGKTSLDWWITDKCNMINGTDGDSFHPLITKDEVLYVFPSDFCRSVYITFSDYESVQGLPAFRYKVPAEILANTSDNAGFCIPEGNCLGSGVLNVSICKNGAPIIMSFPHFYQADERFVSAIEGMHPNQEDHETFVDINPLTGIILKAAKRFQINIYVKKLDDFVETGDIRTMVFPVMYLNESVHIDKETASRLKSMINTTLIITNIPYIIMALGVFFGLVFTWLACKGQGSMDEGTADERAPLIRT

SEQ ID NO: 766268 - protein, 297 aa, Homo sapiens
LTIDNIRKRKTYLQQLSYFPPLHKNGTNDGDYVFLTGEDSYLNFTKIVEWNGKTSLDWWITDKCNMINGTDGDSFHPLITKDEVLYVFPSDFCRSVYITFSDYESVQGLPAFRYKVPAEILANTSDNAGFCIPEGNCLGSGVLNVSICKNGAPIIMSFPHFYQADERFVSAIEGMHPNQEDHETFVDINPLTGIILKAAKRFQINIYVKKLDDFVETGDIRTMVFPVMYLNESVHIDKETASRLKSMINTTLIITNIPYIIMALGVFFGLVFTWLACKGQGSMDEGTADERAPLIRT

SEQ ID NO: 766269 - protein, 153 aa, Homo sapiens
DLLEVSHTTPTGLPYTVLGSSHLCWEDDWYTQHSVLDHETFVDINPLTGIILKAAKRFQINIYVKKLDDFVETGDIRTMVFPVMYLNESVHIDKETASRLKSMINTTLIITNIPYIIMALGVFFGLVFTWLACKGQGSMDEGTADERAPLIRT

SEQ ID NO: 766270 - protein, 478 aa, Homo sapiens; identical to SEQ ID NO: 766254

SEQ ID NO: 766271 - protein, 273 aa, Homo sapiens
RPGSHGGGAAAGAGSARPFLPPPPRTAPRRAGRCQLPQRPAEARCMLSRCRSRLLHVLGLSFLLQTRRPILLCSPRLMKPLVVFVLGGPGAGKGTQCARIVEKYGYTHLSAGELLRDERKNPDSQYGELIEKYIKEGKIVPVEITISLLKREMDQTMAANAQKNKFLIDGFPRNQDNLQGWNKTMDGKADVSFVLFFDCNNEICIERCLERGKSSGRSDDNRESLEKRIQTYLQSTKPIIDLYEEMGKVKKIDASKSVDEVFDEVVQIFDKEG

SEQ ID NO: 766272 - protein, 213 aa, Homo sapiens
RPGSHGGGAAAGAGSARPFLPPPPRPAPRRAGRCQLPQRPAEARCMLSRCRSRLLHVLGLSFLLQTRRPILLCSPRLMKPLVVFVLGGPGAGKGTQCARIVEKYGYTHLSAGELLRDERKNPDSQYGELIEKYIKEGKIVPVEITISLLKREMDQTMAANAQKNKFLIDGFPRNQDNLQGWNKTMDGKADVSFVLFFDCNNEVMKIFICPHRL

SEQ ID NO: 766273 - protein, 273 aa, Homo sapiens; identical to SEQ ID NO: 766271

SEQ ID NO: 766274 - protein, 273 aa, Homo sapiens; identical to SEQ ID NO: 766271

SEQ ID NO: 766275 - protein, 273 aa, Homo sapiens; identical to SEQ ID NO: 766271

SEQ ID NO: 766276 - protein, 273 aa, Homo sapiens; identical to SEQ ID NO: 766271

SEQ ID NO: 766277 - protein, 273 aa, Homo sapiens; identical to SEQ ID NO: 766271

SEQ ID NO: 766278 - protein, 94 aa, Homo sapiens
RLPSIFRTLRRLLTNETWLVERTVVCRRETTTLVCMRTLTDKRESLEKRIQTYLQSTKPIIDLYEEMGKVKKIDASKSVDEVFDEVVQIFDKEG

SEQ ID NO: 766279 - protein, 273 aa, Homo sapiens; identical to SEQ ID NO: 766271

SEQ ID NO: 766280 - protein, 103 aa, Homo sapiens
RPGSHGGGAAAGAGSARPFLPPPPRPAPRRAGRCQLPQRPAEARCMLSRCRSRLLHVLGLSFLLQTRRPILLCSPRLMKPLVVFVLGGPGAGKGTQCARIVEG

SEQ ID NO: 766281 - protein, 273 aa, Homo sapiens; identical to SEQ ID NO: 766271

SEQ ID NO: 766282 - protein, 273 aa, Homo sapiens; identical to SEQ ID NO: 766271

SEQ ID NO: 766283 - protein, 147 aa, Homo sapiens
RPGSHGGGAAAGAGSARPFLPPPPRTAPRRAGRCQLPQRPAEARCMLSRCRSRLLHVLGLSFLLQTRRPILLCSPRLMKPLVVFVLGGPGAGKGTQCARIVEKYGYTHLSAGELLRDERKNPDSQYGELIEKKWIRQWLPMLRRINS

SEQ ID NO: 766284 - protein, 237 aa, Homo sapiens
RPGSHGGGAAAGAGSARPFLPPPPRTAPRRAGRCQLPQRPAEARCMLSRCRSRLLHVLGLSFLLQTRRPILLCSPRLMKPLVVFVLGGPGAGKGTQCARIVEKYGYTHLSAGELLRDERKNPDSQYGELIEKYIKEGKIVPVEITISLLKREMDQTMAANAQKNKFLIDGFPRNQDNLQGWNKTMDGKADVSFVLFFDCNNEICIERCLERGKSSGRSDDNRESLEKSREFSSSRRP

SEQ ID NO: 766285 - protein, 183 aa, Homo sapiens
QHGHKFPGCSFCLVYPRVEEASNLKMPMDTDKGSLNKSLPSKAKRPKKRQNRKTKNFLNNNHTRPAKYHRGKQTNKQNWLQLHSCQQRSSVEPRLLHSCGCNDATQYPLPRWCQRRPRMELSFSYPLTSKEPPLTLGFSRVHMESLAFHTHPRVTRGPSSSQWGWCQRGLQQLDMHAQKEKIK

SEQ ID NO: 766286 - protein, 377 aa, Homo sapiens
MKTLPLFVCICALSACFSFSEGRERDHELRHRRHHHQSPKSHFELPHYPGLLAHQKPFIRKSYKCLHKRCRPKLPPSPNNPPKFPNPHQPPKHPDKNSSVVNPTLVATTQIPSVTFPSASTKITTLPNVTFLPQNATTISSRENVNTSSSVATLAPVNSPAPQDTTAAPPTPSATTPAPPSSSAPPETTAAPPTPSATTQAPPSSSAPPETTAAPPTPPATTPAPPSSSAPPETTAAPPTPSATTPAPLSSSAPPETTAVPPTPSATTLDPSSASAPPETTAAPPTPSATTPAPPSSPAPQETTAAPITTPNSSPTTLAPDTSETSAAPTHQTTTSVTTQTTTTKQPTSAPGQNKISRFLLYMKNLLNRIIDDMVEQ

SEQ ID NO: 766287 - protein, 38 aa, Homo sapiens
MPQRRARAFNTVACGESGHAGPLCGRPSSAAAHIVRTS

SEQ ID NO: 766288 - protein, 38 aa, Homo sapiens; identical to SEQ ID NO: 766287

SEQ ID NO: 766289 - protein, 69 aa, Homo sapiens
CFFSGKGSGGLNLGNFFASRKGYSRKGFDRLSTEGSDQEKEDDGVNQKRSIQHLCLRSHLPPPENQALI

SEQ ID NO: 766290 - protein, 78 aa, Homo sapiens
VNIPVDVTANSLHQVPDTSLGRGGKGGSSGTDCLGWRSDLPKVVSNYLCDLEQSTELHLCKMGRIIILLHRIVIRYKR

SEQ ID NO: 766291 - protein, 64 aa, Homo sapiens
LPTSVSLFDDEDEEDNLFGRTAAKRQTLCLQAQREEKAKASELSKKKASALLFSSDEEVSSGFC

SEQ ID NO: 766292 - protein, 857 aa, Homo sapiens
MESEDLSGRELTIDSIMNKVRDIKNKFKNEDLTDELSLNKISADTTDNSGTVNQIMMMANNPEDWLSLLLKLEKNSVPLSDALLNKLIGRYSQAIEALPPDKYGQNESFARIQVRFAELKAIQEPDDARDYFQMARANCKKFAFVHISFAQFELSQGNVKKSKQLLQKAVERGAVPLEMLEIALRNLNLQKKQLLSEEEKKNLSASTVLTAQESFSGSLGHLQNRNNSCDSRGQTTKARFLYGENMPPQDAEIGYRNSLRQTNKTKQSCPFGRVPVNLLNSPDCDVKTDDSVVPCFMKRQTSRSECRDLVVPGSKPSGNDSCELRNLKSVQNSHFKEPLVSDEKSSELIITDSITLKNKTESSLLAKLEETKEYQEPEVPESNQKQWQAKRKSECINQNPAASSNHWQIPELARKVNTEQKHTTFEQPVFSVSKQSPPISTSKWFDPKSICKTPSSNTLDDYMSCFRTPVVKNDFPPACQLSTPYGQPACFQQQQHQILATPLQNLQVLASSSANECISVKGRIYSILKQIGSGGSSKVFQVLNEKKQIYAIKYVNLEEADNQTLDSYRNEIAYLNKLQQHSDKIIRLYDYEITDQYIYMVMECGNIDLNSWLKKKKSIDPWERKSYWKNMLEAVHTIHQHGIVHSDLKPANFLIVDGMLKLIDFGIANQMQPDTTSVVKDSQVGTVNYMPPEAIKDMSSSRENGKSKSKISPKSDVWSLGCILYYMTYGKTPFQQIINQISKLHAIIDPNHEIEFPDIPEKDLQDVLKCCLKRDPKQRISIPELLAHPYVQIQTHPVNQMAKGTTEEMKYVLGQLVGLNSPNSILKAAKTLYEHYSGGESHNSSSSKTFEKKRGKK

SEQ ID NO: 766293 - protein, 119 aa, Homo sapiens [sequence omitted]

SEQ ID NO: 766294 - protein, 103 aa, Homo sapiens
MWSVCALGCSTAMGMNSLLRHTSTWVASGTLRQAGDARHRVHPERVCSCPSSETQEATCAVAAHGDASFLVHPTALIAVRDPLPESPCCQPLPFQGALWTLLP

SEQ ID NO: 766295 - protein, 437 aa, Homo sapiens
MACVGFFLVQRAGPHVGGQDKPFLSAWPSAVVPRGGHVTLRCHYRHRFNNFMLYKEDRIHVPIFHGRLFQESFNMSPVTTAHAGNYTCRGSHPHSPTGWSAPSNPVVIMVTGNHRKPSLLAHPGPLVKSGERVILQCWSDIMFEHFFLHKEGISKDPSRLVGQIHDGVSKANFSIGPMMLALAGTYRCYGSVTHTPYQLSAPSDPLDIVVTGPYEKPSLSAQPGPKVQAGESVTLSCSSRSSYDMYHLSREGGAHERRLPAVRKVNRTFQADFPLGPATHGGTYRCFGSFRHSPYEWSDPSDPLLVSVTGNPSSSWPSPTEPSSKSGNPRHLHILIGTSVVIILFILLLFFLLHLWCSNKKNAAVMDQEPAGNRTANSEDSDEQDPEEVTYAQLDHCVFTQRKITRPSQRPKTPPTDTILYTELPNAKPRSKVVSCP

SEQ ID NO: 766296 - protein, 427 aa, Homo sapiens
MLLMVVSMACVGFFLVQRAGPHVGGQDKPFLSAWPSAVVPRGGHVTLRCHYRHRFNNFMLYKEDRIHVPIFHGRLFQESFNMSPVTTAHAGNYTCRGSHPHSPTGWSAPSNPVVIMVTGNHRKPSLLAHPGPLVKSGERVILQCWSDIMFEHFFLHKEGISKDPSRLVGQIHDGVSKANFSIGPMMLALAGTYRCYGSVTHTPYQLSAPSDPLDIVVTGPYEKPSLSAQPGPKVQAGESVTLSCSSRSSYDMYHLSREGGAHERRLPAVRKVNRTFQADFPLGPATHGGTYRCFGSFRHSPYEWSDPSDPLLVSVTGNPRHLHILIGTSVVIILFILLLFFLLHLWCSNKKNAAVMDQEPAGNRTANSEDSDEQDPEEVTYAQLDHCVFTQRKITRPSQRPKTPPTDTILYTELPNAKPRSKVVSCP

SEQ ID NO: 766297 - protein, 349 aa, Homo sapiens
MLLMVVSMACVGFFLVQRAGPHVGNHRKPSLLAHPGPLVKSGERVILQCWSDIMFEHFFLHKEGISKDPSRLVGQIHDGVSKANFSIGPMMLALAGTYRCYGSVTHTPYQLSAPSDPLDIVVTGPYEKPSLSAQPGPKVQAGESVTLSCSSRSSYDMYHLSREGGAHERRLPAVRKVNRTFQADFPLGPATHGGTYRCFGSFRHSPYEWSDPSDPLLVSVTGNPSSSWPSPTEPSSKSGNPRHLHILIGTSVVIILFILLLFFLLHLWCSNKKNAAVMDQEPAGNRTANSEDSDEQDPEEVTYAQLDHCVFTQRKITRPSQRPKTPPTDTILYTELPNAKPRSKVVSCP

SEQ ID NO: 766298 - protein, 1020 aa, Homo sapiens
MGRGAGREYSPAATTAENGGGKKKQKEKELDELKKEVAMDDHKLSLDELGRKYQVDLSKGLTNQRAQDVLARDGPNALTPPPTTPEWVKFCRQLFGGFSILLWIGAILCFLAYGIQAAMEDEPSNDNLYLGVVLAAVVIVTGCFSYYQEAKSSKIMDSFKNMVPQQALVIREGEKMQINAEEVVVGDLVEVKGGDRVPADLRIISSHGCKVDNSSLTGESEPQTRSPEFTHENPLETRNICFFSTNCVEGTARGIVIATGDRTVMGRIATLASGLEVGRTPIAMEIEHFIQLITGVAVFLGVSFFVLSLILGYSWLEAVIFLIGIIVANVPEGLLATVTVCLTLTAKRMARKNCLVKNLEAVETLGSTSTICSDKTGTLTQNRMTVAHMWFDNQIHEADTTEDQSGATFDKRSPTWTALSRIAGLCNRAVFKAGQENISVSKRDTAGDASESALLKCIELSCGSVRKMRDRNPKVAEIPFNSTNKYQLSIHEREDSPQSHVLVMKGAPERILDRCSTILVQGKEIPLDKEMQDAFQNAYMELGGLGERVLGFCQLNLPSGKFPRGFKFDTDELNFPTEKLCFVGLMSMIDPPRAAVPDAVGKCRSAGIKVIMVTGDHPITAKAIAKGVGIISEGNETVEDIAARLNIPMSQVNPREAKACVVHGSDLKDMTSEQLDEILKNHTEIVFARTSPQQKLIIVEGCQRQGAIVAVTGDGVNDSPALKKADIGIAMGISGSDVSKQAADMILLDDNFASIVTGVEEGRLIFDNLKKSIAYTLTSNIPEITPFLLFIIANIPLPLGTVTILCIDLGTDMVPAISLAYEAAESDIMKRQPRNSQTDKLVNERLISMAYGQIGMIQALGGFFTYFVILAENGFLPSRLLGIRLDWDDRTMNDLEDSYGQEWTYEQRKVVEFTCHTAFFASIVVVQWADLIICKTRRNSVFQQGMKNKILIFGLLEETALAAFLSYCPGMGVALRMYPLKVTWWFCAFPYSLLIFIYDEVRKLILRRYPGGWVEKETYY

SEQ ID NO: 766299 - protein, 983 aa, Homo sapiens
MGMVTGWVGSGCVPLRLSLLPQGLTNQRAQDVLARDGPNALTPPPTTPEWVKFCRQLFGGFSILLWIGAILCFLAYGIQAAMEDEPSNDNLYLGVVLAAVVIVTGCFSYYQEAKSSKIMDSFKNMVPQQALVIREGEKMQINAEEVVVGDLVEVKGGDRVPADLRIISSHGCKVDNSSLTGESEPQTRSPEFTHENPLETRNICFFSTNCVEGTARGIVIATGDRTVMGRIATLASGLEVGRTPIAMEIEHFIQLITGVAVFLGVSFFVLSLILGYSWLEAVIFLIGIIVANVPEGLLATVTVCLTLTAKRMARKNCLVKNLEAVETLGSTSTICSDKTGTLTQNRMTVAHMWFDNQIHEADTTEDQSGATFDKRSPTWTALSRIAGLCNRAVFKAGQENISVSKRDTAGDASESALLKCIELSCGSVRKMRDRNPKVAEIPFNSTNKYQLSIHEREDSPQSHVLVMKGAPERILDRCSTILVQGKEIPLDKEMQDAFQNAYMELGGLGERVLGFCQLNLPSGKFPRGFKFDTDELNFPTEKLCFVGLMSMIDPPRAAVPDAVGKCRSAGIKVIMVTGDHPITAKAIAKGVGIISEGNETVEDIAARLNIPMSQVNPREAKACVVHGSDLKDMTSEQLDEILKNHTEIVFARTSPQQKLIIVEGCQRQGAIVAVTGDGVNDSPALKKADIGIAMGISGSDVSKQAADMILLDDNFASIVTGVEEGRLIFDNLKKSIAYTLTSNIPEITPFLLFIIANIPLPLGTVTILCIDLGTDMVPAISLAYEAAESDIMKRQPRNSQTDKLVNERLISMAYGQIGMIQALGGFFTYFVILAENGFLPSRLLGIRLDWDDRTMNDLEDSYGQEWTYEQRKVVEFTCHTAFFASIVVVQWADLIICKTRRNSVFQQGMKNKILIFGLLEETALAAFLSYCPGMGVALRMYPLKVTWWFCAFPYSLLIFIYDEVRKLILRRYPGGWVEKETYY

SEQ ID NO: 766300 - protein, 1003 aa, Homo sapiens
MGRGAGREYSPAATTAENGGGKKKQKEKELDELKKEVAMDDHKLSLDELGRKYQVDLSKGLTNQRAQDVLARDGPNALTPPPTTPEWVKFCRQLFGGFSILLWIGAILCFLAYGIQAAMEDEPSNDNLYLGVVLAAVVIVTGCFSYYQEAKSSKIMDSFKNMVPQQALVIREGEKMQINAEEVVVGDLVEVKGGDRVPADLRIISSHGCKVDNSSLTGESEPQTRSPEFTHENPLETRNICFFSTNCVEGTARGIVIATGDRTVMGRIATLASGLEVGRTPIAMEIEHFIQLITGVAVFLGVSFFVLSLILGYSWLEAVIFLIGIIVANVPEGLLATVTVCLTLTAKRMARKNCLVKNLEAVETLGSTSTICSDKTGTLTQNRMTVAHMWFDNQIHEADTTEDQSGATFDKRSPTWTALSRIAGLCNRAVFKAGQENISVSKRDTAGDASESALLKCIELSCGSVRKMRDRNPKVAEIPFNSTNKYQLSIHEREDSPQSHVLVMKGAPERILDRCSTILVQGKEIPLDKEMQDAFQNAYMELGGLGERVLGFCQLNLPSGKFPRGFKFDTDELNFPTEKLCFVGLMSMIDPPRAAVPDAVGKCRSAGIKVIMVTGDHPITAKAIAKGVGIISEGNETVEDIAARLNIPMSQVNPREAKACVVHGSDLKDMTSEQLDEILKNHTEIVFARTSPQQKLIIVEGCQRQGAIVAVTGDGVNDSPALKKADIGIAMGISGSDVSKQAADMILLDDNFASIVTGVEEGRLIFDNLKKSIAYTLTSNIPEITPFLLFIIANIPLPLGTVTILCIDLGTDMVPAISLAYEAAESDIMKRQPRNSQTDKLVNERLISMAYGQIENGFLPSRLLGIRLDWDDRTMNDLEDSYGQEWTYEQRKVVEFTCHTAFFASIVVVQWADLIICKTRRNSVFQQGMKNKILIFGLLEETALAAFLSYCPGMGVALRMYPLKVTWWFCAFPYSLLIFIYDEVRKLILRRYPGGWVEKETYY

SEQ ID NO: 766301 - protein, 418 aa, Homo sapiens
MGEVSTEERRTEATGEAGSAGSLQAAVVKRGRGQEGLVQVPGVSCLCPHPPSREAKACVVHGSDLKDMTSEQLDEILKNHTEIVFARTSPQQKLIIVEGCQRQGAIVAVTGDGVNDSPALKKADIGIAMGISGSDVSKQAADMILLDDNFASIVTGVEEGRLIFDNLKKSIAYTLTSNIPEITPFLLFIIANIPLPLGTVTILCIDLGTDMVPAISLAYEAAESDIMKRQPRNSQTDKLVNERLISMAYGQIGMIQALGGFFTYFVILAENGFLPSRLLGIRLDWDDRTMNDLEDSYGQEWTYEQRKVVEFTCHTAFFASIVVVQWADLIICKTRRNSVFQQGMKNKILIFGLLEETALAAFLSYCPGMGVALRMYPLKVTWWFCAFPYSLLIFIYDEVRKLILRRYPGGWVEKETYY

SEQ ID NO: 766302 - protein, 1020 aa, Homo sapiens; identical to SEQ ID NO: 766298

SEQ ID NO: 766303 - protein, 1020 aa, Homo sapiens; identical to SEQ ID NO: 766298

SEQ ID NO: 766304 - protein, 1020 aa, Homo sapiens; identical to SEQ ID NO: 766298

SEQ ID NO: 766305 - protein, 257 aa, Homo sapiens
MGRGAGREYSPAATTAENGGGKKKQKEKELDELKKEVAMDDHKLSLDELGRKYQVDLSKGLTNQRAQDVLARDGPNALTPPPTTPEWVKFCRQLFGGFSILLWIGAILCFLAYGIQAAMEDEPSNDNLYLGVVLAAVVIVTGCFSYYQEAKSSKIMDSFKNMVPQQALVIREGEKMQINAEEVVVGDLVEVKGGDRVPADLRIISSHGCKVDNSSLTGESEPQTRSPEFTHENPLETRNICFFSTNCVEGEKPGCPL

SEQ ID NO: 766306 - protein, 164 aa, Homo sapiens
  misc_feature (125)..(125): Xaa can be any naturally occurring amino acid
  misc_feature (127)..(127): Xaa can be any naturally occurring amino acid
  misc_feature (136)..(136): Xaa can be any naturally occurring amino acid
  misc_feature (156)..(156): Xaa can be any naturally occurring amino acid
MGRGAGREYSPAATTAENGGGKKKQKEKELDELKKEVAMDDHKLSLDELGRKYQVDLSKGLTNQRAQDVLARDGPNALTPPPTTPEWVKFCRQLFGGFSILLWIGAILCFWSLPGPAASFLATTXSXFPFTGQLLXGLATLAWLSFLHFQFPLPHXFPGLALFR

SEQ ID NO: 766307 - protein, 1020 aa, Homo sapiens; identical to SEQ ID NO: 766298

SEQ ID NO: 766308 - protein, 500 aa, Homo sapiens
RYPPDQPDREMQDAFQNAYMELGGLGERVLGFCQLNLPSGKFPRGFKFDTDELNFPTEKLCFVGLMSMIDPPRAAVPDAVGKCRSAGIKVIMVTGDHPITAKAIAKGVGIISEGNETVEDIAARLNIPMSQVNPREAKACVVHGSDLKDMTSEQLDEILKNHTEIVFARTSPQQKLIIVEGCQRQGAIVAVTGDGVNDSPALKKADIGIAMGISGSDVSKQAADMILLDDNFASIVTGVEEGRLIFDNLKKSIAYTLTSNIPEITPFLLFIIANIPLPLGTVTILCIDLGTDMVPAISLAYEAAESDIMKRQPRNSQTDKLVNERLISMAYGQIGMIQALGGFFTYFVILAENGFLPSRLLGIRLDWDDRTMNDLEDSYGQEWTYEQRKVVEFTCHTAFFASIVVVQWADLIICKTRRNSVFQQGMKNKILIFGLLEETALAAFLSYCPGMGVALRMYPLKVTWWFCAFPYSLLIFIYDEVRKLILRRYPGGWVEKETYY

SEQ ID NO: 766309 - protein, 1020 aa, Homo sapiens; identical to SEQ ID NO: 766298

SEQ ID NO: 766310 - protein, 165 aa, Homo sapiens
MIQALGGFFTYFVILAENGFLPSRLLGIRLDWDDRTMNDLEDSYGQEWTYEQRKVVEFTCHTAFFASIVVVQWADLIICKTRRNSVFQQGMKNKILIFGLLEETALAAFLSYCPGMGVALRMYPLKVTWWFCAFPYSLLIFIYDEVRKLILRRYPGGWVEKETYY

SEQ ID NO: 766311 - protein, 1061 aa, Homo sapiens
MGRGAGREYSPAATTAENGGGKKKQKEKELDELKKEVAMDDHKLSLDELGRKYQVDLSKGLTNQRAQDVLARDGPNALTPPPTTPEWVKFCRQLFGGFSILLWIGAILCFLAYGIQAAMEDEPSNDNLYLGVVLAAVVIVTGCFSYYQEAKSSKIMDSFKNMVPQQALVIREGEKMQINAEEVVVGDLVEVKGGDRVPADLRIISSHGCKVDNSSLTGESEPQTRSPEFTHENPLETRNICFFSTNCVEGTARGIVIATGDRTVMGRIATLASGLEVGRTPIAMEIEHFIQLITGVAVFLGVSFFVLSLILGYSWLEAVIFLIGIIVANVPEGLLATVTVCLTLTAKRMARKNCLVKNLEAVETLGSTSTICSDKTGTLTQNRMTVAHMWFDNQIHEADTTEDQSGATFDKRSPTWTALSRIAGLCNRAVFKAGQENISVSKRDTAGDASESALLKCIELSCGSVRKMRDRNPKVAEIPFNSTNKYQLSIHEREDSPQSHVLVMKGAPERILDRCSTILVQGKEIPLDKEMQDAFQNAYMELGGLGERVLGFCQLNLPSGKFPRGFKFDTDELNFPTEKLCFVGLMSMIDPPRAAVPDAVGKCRSAGIKVIMVTGDHPITAKAIAKGVGIISEGNETVEDIAARLNIPMSQVNPREAKACVVHGSDLKDMTSEQLDEILKNHTEIVFARTSPQQKLIIVEGCQRQGAIVAVTGDGVNDSPALKKADIGIAMGISGSDVSKQAADMILLDDNFASIVTGVEEGRLIFDNLKKSIAYTLTSNIPEITPFLLFIIANIPLPLGTVTILCIDLGTDMVPAISLAYEAAESDIMKRQPRNSQTDKLVNERLISMAYGQIGMIQALGGFFTYFVILAENGFLPSRLLGIRLDWDDRTMNDLEDSYGQEWTYEQRKVVEFTCHTAFFASIVVVQWADLIICKTRRNSVFQQGMKNKILIFGLLEETALAAFLSYCPGMGVALRMYPLKVTWWFCAFPYSLLIFIYDEVRKLILRRYPGGKPLHIPPSKVQAPPPAPPSRTTRRLHSHYWFLLLFLNTLRSWGPRSQEP

SEQ ID NO: 766312 - protein, 109 aa, Homo sapiens
ASAEAQASRYWPPILPSILASPMPEFKELQWLLPWKGPGHGGLLPTDSEKKLSICKERPTPALGHSPLSLLLREASVPCPSSPSLAQLFVPSACVPFHSDLKHNLALLS

SEQ ID NO: 766313 - protein, 224 aa, Homo sapiens
MESGAYGAAKAGGSFDLRRFLTQPQVVARAVCLVFALIVFSCIYGEGYSNAHESKQMYCVFNRNEDACRYGSAIGVLAFLASAFFLVVDAYFPQISNATDRKYLVIGDLLFSALWTFLWFVGFCFLTNQWAVTNPKDVLVGADSVRAAITFSFFSIFSWGVLASLAYQRYKAGVDDFIQNYVDPTPDPNTAYASYPGASVDNYQQPPFTQNAETTEGYQPPPVY

SEQ ID NO: 766314 - protein, 168 aa, Homo sapiens
MYCVFNRNEDACRYGSAIGVLAFLASAFFLVVDAYFPQISNATDRKYLVIGDLLFSALWTFLWFVGFCFLTNQWAVTNPKDVLVGADSVRAAITFSFFSIFSWGVLASLAYQRYKAGVDDFIQNYVDPTPDPNTAYASYPGASVDNYQQPPFTQNAETTEGYQPPPVY

SEQ ID NO: 766315 - protein, 253 aa, Homo sapiens
GHAPGGWSRAGRRAGSSAFRGGGSGGDGDMESGAYGAAKAGGSFDLRRFLTQPQVVARAVCLVFALIVFSCIYGEGYSNAHESKQMYCVFNRNEDACRYGSAIGVLAFLASAFFLVVDAYFPQISNATDRKYLVIGDLLFSALWTFLWFVGFCFLTNQWAVTNPKDVLVGADSVRAAITFSFFSIFSWGVLASLAYQRYKAGVDDFIQNYVDPTPDPNTAYASYPGASVDNYQQPPFTQNAETTEGYQPPPVY

SEQ ID NO: 766316 - protein, 253 aa, Homo sapiens; identical to SEQ ID NO: 766315

SEQ ID NO: 766317 - protein, 159 aa, Homo sapiens
MSTHASGMSGAYGAAKAGGSFDLRRFLTQPQVVARAVCLVFALIVFSCIYGEGYSNAHESKQMYCVFNRNEDACRYGSAIGVLAFLASAFFLVVDAYFPQISNATDRKYLVIGDLLFSGICLWHLHLILGEALTLGFRSWEGLGLSGRGREQLTPPGHF

SEQ ID NO: 766318 - protein, 203 aa, Homo sapiens
MESGAYGAAKAGGSFDLRRFLTQPQVVARAVCLEAEDAVSRDRTIALQPGQQEQDSISNNNKNPKGDSSSGRGQHLYTPSGSPLCVPLRRHQPYQVLPSRQVFALIVFSCIYGEGYSNAHESKQMYCVFNRNEDACRYGSAIGVLAFLASAFFLVVDAYFPQISNATDRKYLVIGDLLFSGCAGLPGLPALQGWRGRLHPELR

SEQ ID NO: 766319 - protein, 215 aa, Homo sapiens
MESGAYGAAKAGGSFDLRRFLTQPQVVARAVCLVFALIVFSCIYGEGYSNAHESKQMYCVFNRNEDACRYGSAIGVLAFLASAFFLVVDAYFPQISNATDRKYLVIGDLLFSALWTFLWFVGFCFLTNQWAVTNPKDVLVGADSVRAAITFSFFSIFSWRYKAGVDDFIQNYVDPTPDPNTAYASYPGASVDNYQQPPFTQNAETTEGYQPPPVY

SEQ ID NO: 766320 - protein, 105 aa, Homo sapiens
MIWGPPPCAGGLWAASRGVRAGLVLMALPPCSHPWQQGRALPDNTQLYVNILQLLLRKPGEGRGAPWLPDSVCAECIIKSWGRCPAWDAVWRRNKCFLIQSPVIG

SEQ ID NO: 766321 - protein, 105 aa, Homo sapiens; identical to SEQ ID NO: 766320

SEQ ID NO: 766322 - protein, 253 aa, Homo sapiens; identical to SEQ ID NO: 766315

SEQ ID NO: 766323 - protein, 105 aa, Homo sapiens; identical to SEQ ID NO: 766320

SEQ ID NO: 766324 - protein, 105 aa, Homo sapiens; identical to SEQ ID NO: 766320

SEQ ID NO: 766325 - protein, 164 aa, Homo sapiens
GHAPGGWSRAGRRAGSSAFRGGGSGGDGDMESGAYGAAKAGGSFDLRRFLTQPQVVARAVCLVFALIVFSCIYGEGYSNAHESKQMYCVFNRNEDACRYGSAIGVLAFLASAFFLVVDAYFPQISNATDRKYLVIGDLLFSGCAGLPGLPALQGWRGRLHPELR

SEQ ID NO: 766326 - protein, 253 aa, Homo sapiens; identical to SEQ ID NO: 766315

SEQ ID NO: 766327 - protein, 253 aa, Homo sapiens; identical to SEQ ID NO: 766315

SEQ ID NO: 766328 - protein, 240 aa, Homo sapiens
MESGAYGAAKAGGSFDLRRFLTQPQVVARAVCLVFALIVFSCIYGEGYSNAHESKQMYCVFNRNEDACRYGSAIGVLAFLASAFFLVVDAYFPQISNATDRKYLVIGDLLFSALWTFLWFVGFCFLTNQWAVTNPKDVLVGADSVRAAITFSFFSIFSWVLLEKKLKVMAALTESAFTSTSFGFGDCPGLGEEAETSRTTGQGPRDAETAARDTHRQGNVRLADVPTSGQTTQAYDQKAR

SEQ ID NO: 766329 - protein, 169 aa, Homo sapiens
MESGAYGAAKAGGSFDLRRFLTQPQVVARAVCLVFALIVFSCIYGEGYSNAHESKQMYCVFNRNEDACRYGSAIGVLAFLASAFFLVVDAYFPQISNATDRKYLVIGDLLFSALWTFLWFVGFCFLTNQWAVTNPKDVLVGADSVRAAITFSFFSIFSWRSSAKLLRVS

SEQ ID NO: 766330 - protein, 253 aa, Homo sapiens; identical to SEQ ID NO: 766315

SEQ ID NO: 766331 - protein, 230 aa, Homo sapiens
MSTHASGMSGAYGAAKAGGSFDLRRFLTQPQVVARAVCLVFALIVFSCIYGEGYSNAHESKQMYCVFNRNEDACRYGSAIGVLAFLASAFFLVVDAYFPQISNATDRKYLVIGDLLFSALWTFLWFVGFCFLTNQWAVTNPKDVLVGADSVRAAITFSFFSIFSWGVLASLAYQRYKAGVDDFIQNYVDPTPDPNTAYASYPGASVDNYQQPPFTQNAETTEGYQPPPVY

SEQ ID NO: 766332 - protein, 253 aa, Homo sapiens; identical to SEQ ID NO: 766315

SEQ ID NO: 766333 - protein, 164 aa, Homo sapiens; identical to SEQ ID NO: 766325

SEQ ID NO: 766334 - protein, 305 aa, Homo sapiens
GHAPGGWSRAGRRAGSSAFRGGGSGGDGDMESGAYGAAKAGGSFDLRRFLTQPQVVARAVCLVFALIVFSCIYGEGYSNAHESKQMYCVFNRNEDACRYGSAIGVLAFLASAFFLVVDAYFPQISNATDRKYLVIGDLLFSALWTFLWFVGFCFLTNQWAVTNPKDVLVGADSVRAAITFSFFSIFSWWVGWPGAGSWVKGGGGWGPPATCTLLCSPCRVCWPPWPTSATRLAWTTSSRITLTPLRTPTLPTPPTQVHLWTTTNSHPSPRTRRPPRATSRPLCTERRLAWEGGQRGPSPLPWTFP

SEQ ID NO: 766335 - protein, 253 aa, Homo sapiens; identical to SEQ ID NO: 766315

SEQ ID NO: 766336 - protein, 253 aa, Homo sapiens; identical to SEQ ID NO: 766315

SEQ ID NO: 766337 - protein, 253 aa, Homo sapiens; identical to SEQ ID NO: 766315

SEQ ID NO: 766338 - protein, 253 aa, Homo sapiens; identical to SEQ ID NO: 766315

SEQ ID NO: 766339 - protein, 253 aa, Homo sapiens; identical to SEQ ID NO: 766315

SEQ ID NO: 766340 - protein, 164 aa, Homo sapiens; identical to SEQ ID NO: 766325

SEQ ID NO: 766341 - protein, 219 aa, Homo sapiens
MESGAYGAAKAGGSFDLRRFLTQPQVVARAVCLVFALIVFSCIYGEGYSNAHESKQMYCVFNRNEDACRYGSAIGVLAFLASAFFLVVDAYFPQISNATDRKYLVIGDLLFSALWTFLWFVGFCFLTNQWAVTNPKDVLVGADSVRAAITFSFFSIFSWGVLASLAYQRYKAGVDDFIQNYVDPTPDPNTAYASYPGASVDNYQQPPFTQSVKDPVITT

SEQ ID NO: 766342 - protein, 170 aa, Homo sapiens
MESGAYGAAKAGGSFDLRRFLTQPQVVARAVCLVFALIVFSCIYGEGYSNAHESKQMYCVFNRNEDACRYGSAIGVLAFLASAFFLVVDAYFPQISNATDRKYLVIGDLLFSALWTFLWFVGFCFLTNQWAVTNPKDVLVGADSVRAAITFSFFSIFSWTPKQWTGSSKY

SEQ ID NO: 766343 - protein, 62 aa, Homo sapiens
MKFLVFAFILALMVSMIGADSSEEKFLRRIGRFGYGYGPYQPVPEQPLYPQPYQPQYQQYTF

SEQ ID NO: 766344 - protein, 82 aa, Homo sapiens
  misc_feature (1)..(1): Xaa can be any naturally occurring amino acid
XLPMALSPNLCTKKFLVFAFILALMVSMMELIHKKRNFCVELEDSVMGMALISQFQNNHYTHNHTNHNTNNIPFNIISNCRT

SEQ ID NO: 766345 - protein, 74 aa, Homo sapiens
SPGSAEAALQETMGCGGDFRVSEKGKQKDWEARVASPSHSADPAGPRPKLLEPELEEGHLHVLGAVFPVQNEIG

SEQ ID NO: 766346 - protein, 33 aa, Homo sapiens
LLGWDGFIQEQFLSNLPWARRRSPRDQDKIFVK

SEQ ID NO: 766347 - protein, 83 aa, Homo sapiens
NCPSPVLGHDHGEQVHCLPCVVHRGGSDSILKDDKKTGQDMSLRIQVMGVEPTGLQPHTAGLEAQTEYLLFYGLGGSRHRAPY

SEQ ID NO: 766348 - protein, 110 aa, Homo sapiens
GRCSLGLVPIYSGLRMAAARLCLSLLLLSTCVALLLQPLLGAQGAPLEPVYPGDNATPEQMAQYAADLRRYINMLTRPRYGKRHKEDTLAFSEWGSPHAAVPRELSPLDL

SEQ ID NO: 766349 - protein, 94 aa, Homo sapiens
GRCSLGLVPIYSGLRMAAARLCLSLLLLSTCVALLLQPLLGAQGAPLEPVYPGDNATPEQMAQYAADLRRYINMLTRPRPRPMCPGQDGAYRQI

SEQ ID NO: 766350 - protein, 109 aa, Homo sapiens
  misc_feature (12)..(12): Xaa can be any naturally occurring amino acid
GAARQRVGFSQXLRLDSALPGLSLLLLSTCVALLLQPLLGAQGAPLEPVYPGDNATPEQMAQYAADLRRYINMLTRPRYGKRHKEDTLAFSEWGSPHAAVPRELSPLDL

SEQ ID NO: 766351 - protein, 120 aa, Homo sapiens
GRCSLGLVPIYSGLRMAAARLCLSLLLLSTCVALLLQPLLGAQGAPLEPVYPGDNATPEQMAQYAADLRRYINMLTRPSACPCCLFPPRYGKRHKEDTLAFSEWGSPHAAVPRELSPLDL

SEQ ID NO: 766352 - protein, 107 aa, Homo sapiens
MLWPASQVNDFGSARRKIEVRPKEELSACYGRAPGARRRGQPSPGQGSSHRSWICFSSSVCPVGPSPQAAVLDLTGEGAGGRGRTPSPGPTAALASPPLSPSVGASL

SEQ ID NO: 766353 - protein, 110 aa, Homo sapiens
RHERASTGSPARAAPCSPGSPGGRGGGGDHKMADLSLLQEDLQEDADGFGVDDYSSESDVIIIPSALDFVSQDEMLTPLGRLDKYAASENIFNRYVHILFVKVEVEGWFY

SEQ ID NO: 766354 - protein, 964 aa, Homo sapiens
RHERASTGSPARAAPCSPGSPGGRGGGGDHKMADLSLLQEDLQEDADGSLDFVSQDEMLTPLGRLDKYAASENIFNRQMVARSLLDTLREVCDDERDCIAVLERISRLADDSEPTVRAELMEQVPHIALFCQENRPSIPYAFSKFLLPIVVRYLADQNNQVRKTSQAALLALLEQELIERFDVETKVCPVLIELTAPDSNDDVKTEAVAIMCKMAPMVGKDITERLILPRFCEMCCDCRMFHVRKVCAANFGDICSVVGQQATEEMLLPRFFQLCSDNVWGVRKACAECFMAVSCATCQEIRRTKLSALFINLISDPSRWVRQAAFQSLGPFISTFANPSSSGQYFKEESKSSEEMSVENKNRTRDQEAPEDVQVRPEDTPSDLSVSNSSVILENTMEDHAAEASGKPLGEISVPLDSSLLCTLSSESHQEAASNENDKKPGNYKSMLRPEVGTTSQDSALLDQELYNSFHFWRTPLPEIDLDIELEQNSGGKPSPEGPEEESEGPVPSSPNITMATRKELEEMIENLEPHIDDPDVKAQVEVLSAALRASSLDAHEETISIEKRSDLQDELDINELPNCKINQEDSVPLISDAVENMDSTLHYIHSDSDLSNNSSFSPDEERRTKVQDVVPQALLDQYLSMTDPSRAQTVDTEIAKHCAYSLPGVALTLGRQNWHCLRETYETLASDMQWKVRRTLAFSIHELAVILGDQLTAADLVPIFNGFLKDLDEVRIGVLKHLHDFLKLLHIDKRREYLYQLQEFLVTDNSRNWRFRAELAEQLILLLELYSPRDVYDYLRPIALNLCADKVSSVRWISYKLVSEMVKKLHAATPPTFGVDLINELVENFGRCPKWSGRQAFVFVCQTVIEDDCLPMDQFAVHLMPHLLTLANDRVPNVRVLLAKTLRQTLLEKDYFLASASCHQEAVEQTIMALQMDRDSDVKYFASIHPASTKISEDAMSTASSTY

SEQ ID NO: 766355 - protein, 981 aa, Homo sapiens
RHERASTGSPARAAPCSPGSPGGRGGGGDHKMADLSLLQEDLQEDADGFGVDDYSSESDVIIIPSALDFVSQDEMLTPLGRLDKYAASENIFNRQMVARSLLDTLREVCDDERDCIAVLERISRLADDSEPTVRAELMEQVPHIALFCQENRPSIPYAFSKFLLPIVVRYLADQNNQVRKTSQAALLALLEQELIERFDVETKVCPVLIELTAPDSNDDVKTEAVAIMCKMAPMVGKDITERLILPRFCEMCCDCRMFHVRKVCAANFGDICSVVGQQATEEMLLPRFFQLCSDNVWGVRKACAECFMAVSCATCQEIRRTKLSALFINLISDPSRWVRQAAFQSLGPFISTFANPSSSGQYFKEESKSSEEMSVENKNRTRDQEAPEDVQVRPEDTPSDLSVSNSSVILENTMEDHAAEASGKPLGEISVPLDSSLLCTLSSESHQEAASNENDKKPGNYKSMLRPEVGTTSQDSALLDQELYNSFHFWRTPLPEIDLDIELEQNSGGKPSPEGPEEESEGPVPSSPNITMATRKELEEMIENLEPHIDDPDVKAQVEVLSAALRASSLDAHEETISIEKRSDLQDELDINELPNCKINQEDSVPLISDAVENMDSTLHYIHSDSDLSNNSSFSPDEERRTKVQDVVPQALLDQYLSMTDPSRAQTVDTEIAKHCAYSLPGVALTLGRQNWHCLRETYETLASDMQWKVRRTLAFSIHELAVILGDQLTAADLVPIFNGFLKDLDEVRIGVLKHLHDFLKLLHIDKRREYLYQLQEFLVTDNSRNWRFRAELAEQLILLLELYSPRDVYDYLRPIALNLCADKVSSVRWISYKLVSEMVKKLHAATPPTFGVDLINELVENFGRCPKWSGRQAFVFVCQTVIEDDCLPMDQFAVHLMPHLLTLANDRVPNVRVLLAKTLRQTLLEKDYFLASASCHQEAVEQTIMALQMDRDSDVKYFASIHPASTKISEDAMSTASSTY

SEQ ID NO: 766356 - protein, 161 aa, Homo sapiens
MDSTLHYIHSDSDLSNNSSFSPDEERRTKVQDVVPQALLDQYLSMTDPSRAQTVDTEIAKHCAYSLPGVALTLGRQNWHCLRETYETLASDMQWKVRRTLAFSIHELAVILGDQLTAADLVPIFNGFLKDLDEVRIGVLKHLHDFLKLLILPQRDIFITSR

SEQ ID NO: 766357 - protein, 93 aa, Homo sapiens
RHERASTGSPARAAPCSPGSPGGRGGGGDHKMADLSLLQEDLQEDADGSLDFVSQDEMLTPLGRLDKYAASENIFNRYVHILFVKVEVEGWFY

SEQ ID NO: 766358 - protein, 103 aa, Homo sapiens
GGPSLPASQAPPYTGMHHTHPTCLLYVLVPHHMPGMCVFCSAHIQTCVYVHFTVHIHACSSLFLTAYYTGIHTCTPPHTYCAHIYHTTVPTRGCSCLGPRAQV

SEQ ID NO: 766359 - protein, 964 aa, Homo sapiens; identical to SEQ ID NO: 766354

SEQ ID NO: 766360 - protein, 964 aa, Homo sapiens
ARPGSGTRRRVPAGGRLRAPVRSARREGGSGGGYLSLLQEDLQEDADGSLDFVSQDEMLTPLGRLDKYAASENIFNRQMVARSLLDTLREVCDDERDCIAVLERISRLADDSEPTVRAELMEQVPHIALFCQENRPSIPYAFSKFLLPIVVRYLADQNNQVRKTSQAALLALLEQELIERFDVETKVCPVLIELTAPDSNDDVKTEAVAIMCKMAPMVGKDITERLILPRFCEMCCDCRMFHVRKVCAANFGDICSVVGQQATEEMLLPRFFQLCSDNVWGVRKACAECFMAVSCATCQEIRRTKLSALFINLISDPSRWVRQAAFQSLGPFISTFANPSSSGQYFKEESKSSEEMSVENKNRTRDQEAPEDVQVRPEDTPSDLSVSNSSVILENTMEDHAAEASGKPLGEISVPLDSSLLCTLSSESHQEAASNENDKKPGNYKSMLRPEVGTTSQDSALLDQELYNSFHFWRTPLPEIDLDIELEQNSGGKPSPEGPEEESEGPVPSSPNITMATRKELEEMIENLEPHIDDPDVKAQVEVLSAALRASSLDAHEETISIEKRSDLQDELDINELPNCKINQEDSVPLISDAVENMDSTLHYIHSDSDLSNNSSFSPDEERRTKVQDVVPQALLDQYLSMTDPSRAQTVDTEIAKHCAYSLPGVALTLGRQNWHCLRETYETLASDMQWKVRRTLAFSIHELAVILGDQLTAADLVPIFNGFLKDLDEVRIGVLKHLHDFLKLLHIDKRREYLYQLQEFLVTDNSRNWRFRAELAEQLILLLELYSPRDVYDYLRPIALNLCADKVSSVRWISYKLVSEMVKKLHAATPPTFGVDLINELVENFGRCPKWSGRQAFVFVCQTVIEDDCLPMDQFAVHLMPHLLTLANDRVPNVRVLLAKTLRQTLLEKDYFLASASCHQEAVEQTIMALQMDRDSDVKYFASIHPASTKISEDAMSTASSTY

SEQ ID NO: 766361 - protein, 981 aa, Homo sapiens; identical to SEQ ID NO: 766355

SEQ ID NO: 766362 - protein, 911 aa, Homo sapiens
RHERASTGSPARAAPCSPGSPGGRGGGGDHKMADLSLLQEDLQEDADGSLDFVSQDEMLTPLGRLDKYAASENIFNRQMVARSLLDTLREVCDDERDCIAVLERISRLADDSEPTVRAELMEQVPHIALFCQENRPSIPYAFSKFLLPIVVRYLADQNNQVRKTSQAALLALLEQELIERFDVETKVCPVLIELTAPDSNDDVKTEAVAIMCKMAPMVGKDITERLILPRFCEMCCDCRMFHVRKVCAANFGDICSVVGQQATEEMLVRQAAFQSLGPFISTFANPSSSGQYFKEESKSSEEMSVENKNRTRDQEAPEDVQVRPEDTPSDLSVSNSSVILENTMEDHAAEASGKPLGEISVPLDSSLLCTLSSESHQEAASNENDKKPGNYKSMLRPEVGTTSQDSALLDQELYNSFHFWRTPLPEIDLDIELEQNSGGKPSPEGPEEESEGPVPSSPNITMATRKELEEMIENLEPHIDDPDVKAQVEVLSAALRASSLDAHEETISIEKRSDLQDELDINELPNCKINQEDSVPLISDAVENMDSTLHYIHSDSDLSNNSSFSPDEERRTKVQDVVPQALLDQYLSMTDPSRAQTVDTEIAKHCAYSLPGVALTLGRQNWHCLRETYETLASDMQWKVRRTLAFSIHELAVILGDQLTAADLVPIFNGFLKDLDEVRIGVLKHLHDFLKLLHIDKRREYLYQLQEFLVTDNSRNWRFRAELAEQLILLLELYSPRDVYDYLRPIALNLCADKVSSVRWISYKLVSEMVKKLHAATPPTFGVDLINELVENFGRCPKWSGRQAFVFVCQTVIEDDCLPMDQFAVHLMPHLLTLANDRVPNVRVLLAKTLRQTLLEKDYFLASASCHQEAVEQTIMALQMDRDSDVKYFASIHPASTKISEDAMSTASSTY

SEQ ID NO: 766363 - protein, 964 aa, Homo sapiens; identical to SEQ ID NO: 766354

SEQ ID NO: 766364 - protein, 1006 aa, Homo sapiens
RHERASTGSPARAAPCSPGSPGGRGGGGDHKMADLSLLQEDLQEDADGSLDFVSQDEMLTPLGRLDKYAASENIFNRQMVARSLLDTLREVCDDERDCIAVLERISRLADDSEPTVRAELMEQVPHIALFCQENRPSIPYAFSKFLLPIVVRYLADQNNQVRKTSQAALLALLEQELIERFDVETKVCPVLIELTAPDSNDDVKTEAVAIMCKMAPMVGKDITERLILPRFCEMCCDCRMFHVRKVCAANFGDICSVVGQQATEEMLLPRFFQLCSDNVWGVRKACAECFMAVSCATCQEIRRTKLSALFINLISDPSRWVRQAAFQSLGPFISTFANPSSSGQYFKEESKSSEEMSVENKNRTRDQEAPEDVQVRPEDTPSDLSVSNSSVILENTMEDHAAEASGKPLGEISVPLDSSLLCTLSSESHQEAASNENDKKPGNYKSMLRPEVGTTSQDSALLDQELYNSFHFWRTPLPEIDLDIELEQNSGGKPSPEGPEEESEGPVPSSPNITMATRKELEEMIENLEPHIDDPDVKAQVEVLSAALRASSLDAHEETISIEKRSDLQDELDINELPNCKINQEDSVPLISDAVERCFVSDRTISLQQATQYSEQKIVDLRPCCGGPVTLSGLWSVRNMDSTLHYIHSDSDLSNNSSFSPDEERRTKVQDVVPQALLDQYLSMTDPSRAQTVDTEIAKHCAYSLPGVALTLGRQNWHCLRETYETLASDMQWKVRRTLAFSIHELAVILGDQLTAADLVPIFNGFLKDLDEVRIGVLKHLHDFLKLLHIDKRREYLYQLQEFLVTDNSRNWRFRAELAEQLILLLELYSPRDVYDYLRPIALNLCADKVSSVRWISYKLVSEMVKKLHAATPPTFGVDLINELVENFGRCPKWSGRQAFVFVCQTVIEDDCLPMDQFAVHLMPHLLTLANDRVPNVRVLLAKTLRQTLLEKDYFLASASCHQEAVEQTIMALQMDRDSDVKYFASIHPASTKISEDAMSTASSTY

SEQ ID NO: 766365 - protein, 988 aa, Homo sapiens
RHERASTGSPARAAPCSPGSPGGRGGGGDHKMADLSLLQEDLQEDADGSLDFVSQDEMLTPLGRLDKYAASENIFNRQMVARSLLDTLREVCDDERDCIAVLERISRLADDSEPTVRAELMEQVPHIALFCQENRPSIPYAFSKFLLPIVVRYLADQNNQVRKTSQAALLALLEQELIERFDVETKVCPVLIELTAPDSNDDVKTEAVAIMCKMAPMVGKDITERLILPRFCEMCCDCRMFHVRKVCAANFGDICSVVGQQATEEMLLPRFFQLCSDNVWGVRKACAECFMAVSCATCQEIRRTKLSALFINLISDPSRWVRQAAFQSLGPFISTFANPSSSGQYFKEESKSSEEMSVENKNRTRDQEAPEDVQVRPEDTPSDLSVSNSSVILENTMEDHAAEASGKPLGEISVPLDSSLLCTLSSESHQEAASNENDKKPGNYKSMLRPEVGTTSQDSALLDQELYNSFHFWRTPLPEIDLDIELEQNSGGKPSPEGPEEESEGPVPSSPNITMATRKELEEMIENLEPHIDDPDVKAQVEVLSAALRASSLDAHEETISIEKRSDLQDELDINELPNCKINQEDSVPLISDAVERCFVSDRTISLQQATQYSEQKIVDLRPCCGGPVTLSGLWSVRNMDSTLHYIHSDSDLSNNSSFSPDEVSMTDPSRAQTVDTEIAKHCAYSLPGVALTLGRQNWHCLRETYETLASDMQWKVRRTLAFSIHELAVILGDQLTAADLVPIFNGFLKDLDEVRIGVLKHLHDFLKLLHIDKRREYLYQLQEFLVTDNSRNWRFRAELAEQLILLLELYSPRDVYDYLRPIALNLCADKVSSVRWISYKLVSEMVKKLHAATPPTFGVDLINELVENFGRCPKWSGRQAFVFVCQTVIEDDCLPMDQFAVHLMPHLLTLANDRVPNVRVLLAKTLRQTLLEKDYFLASASCHQEAVEQTIMALQMDRDSDVKYFASIHPASTKISEDAMSTASSTY

SEQ ID NO: 766366 - protein, 367 aa, Homo sapiens
MDSTLHYIHSDSDLSNNSSFSPDEERRTKVQDVVPQALLDQYLSMTDPSRAQTVDTEIAKHCAYSLPGVALTLGRQNWHCLRETYETLASDMQWKVRRTLAFSIHELAVILGDQLTAADLVPIFNGFLKDLDEVRIGVLKHLHDFLKLLHIDKRREYLYQLQEFLVTDNSRNWRFRAELAEQLILLLELYSPRDVYDYLRPIALNLCADKVSSVRWISYKLVSEMVKKLHAATPPTFGVDLINELVENFGRCPKWSGRQAFVFVCQTVIEDDCLPMDQFAVHLMPHLLTLANDRVPNVRVLLAKTLRQTLLEKDYFLASASCHQEAVEQTIMALQMDRDSDVKYFASIHPASTKISEDAMSTASSTY

SEQ ID NO: 766367 - protein, 964 aa, Homo sapiens; identical to SEQ ID NO: 766354

SEQ ID NO: 766368 - protein, 995 aa, Homo sapiens
RHERASTGSPARAAPCSPGSPGGRGGGGDHKMADLSLLQEDLQEDADGSLDFVSQDEMLTPLGRLDKYAASENIFNRQMVARSLLDTLREVCDDERDCIAVLERISRLADDSEPTVRAELMEQVPHIALFCQENRPSIPYAFSKFLLPIVVRYLADQNNQVRKTSQAALLALLEQELIERFDVETKVCPVLIELTAPDSNDDVKTEAVAIMCKMAPMVGKDITERLILPRFCEMCCDCRMFHVRKVCAANFGDICSVVGQQATEEMLLPRFFQLCSDNVWGVRKACAECFMAVSCATCQEIRRTKLSALFINLISDPSRWVRQAAFQSLGPFISTFANPSSSGQYFKEESKSSEEMSVENKNRTRDQEAPEDVQVRPEDTPSDLSVSNSSVILENTMEDHAAEASGKPLGEISVPLDSSLLCTLSSESHQEAASNENDKKPGNYKSMLRPEVGTTSQDSALLDQELYNSFHFWRTPLPEIDLDIELEQNSGGKPSPEGPEEESEGPVPSSPNITMATRKELEEMIENLEPHIDDPDVKAQVEVLSAALRASSLDAHEETISIEKRSDLQDELDINELPNCKINQEDSVPLISDAVENMDSTLHYIHSDSDLSNNSSFSPDEERRTKVQDVVPQALLDQYLSMTDPSRAQTVDTEIAKHCAYSLPGVALTLGRQNWHCLRETYETLASDMQWKVRRTLAFSIHELAVILGDQLTAADLVPIFNGFLKDLDEVRIGVLKHLHDFLKLLHIDKRREYLYQLQEFLVTDNSRNWRFRAELAEQLILLLELYSPRDVYDYLRPIALNLCADKVSSVRWISYKLVCIELLEILDQQTLRSSEWKLFLISPCSPSQVSEMVKKLHAATPPTFGVDLINELVENFGRCPKWSGRQAFVFVCQTVIEDDCLPMDQFAVHLMPHLLTLANDRVPNVRVLLAKTLRQTLLEKDYFLASASCHQEAVEQTIMALQMDRDSDVKYFASIHPASTKISEDAMSTASSTY

SEQ ID NO: 766369 - protein, 949 aa, Homo sapiens
RHERASTGSPARAAPCSPGSPGGRGGGGDHKMADLSLLQEDLQEDADGSLDFVSQDEMLTPLGRLDKYAASENIFNRQMVARSLLDTLREVCDDERDCIAVLERISRLADDSEPTVRAELMEQVPHIALFCQENRPSIPYAFSKFLLPIVVRYLADQNNQVRKTSQAALLALLEQELIERFDVETKVCPVLIELTAPDSNDDVKTEAVAIMCKMAPMVGKDITERLILPRFCEMCCDCRMFHVRKVCAANFGDICSVVGQQATEEMLLPRFFQLCSDNVWGVRKACAECFMAVSCATCQEIRRTKLSALFINLISDPSRWVRQAAFQSLGPFISTFANPSSSGQYFKEESKSSEEMSVENKNRTRDQEAPEDVQVRPEDTPSDLSVSNSSVILENTMEDHAAEASGKPLGEISVPLDSSLLCTLSSESHQEAASNENDKKPGNYKSMLRPEVGTTSQDSALLDQELYNSFHFWRTPLPEIDLDIELEQNSGGKPSPEGPEEESEGPVPSSPNITMATRKELEEMIENLEPHIDDPDVKAQVEVLSAALRASSLDAHEETISIEKRSDLQDELDINELPNCKINQEDSVPLISDAVENMDSTLHYIHSDSDLSNNSSFSPDEERRTKVQDVVPQALLDQYLSMTDPSRAQTVDTEIAKHCAYSLPGVALTLGRQNWHCLRETYETLASDMQWKVRRTLAFSIHELAVILGDQLTAADLVPIFNGFLKDLDEVRIGVLKHLHDFLKLLHIDKRREYLYQLQEFLVTDNSRNWRFRAELAEQLILLLELYSPRDVYDYLRPIALNLCADKVSSVRWISYKLVSEMVKKLHAATPPTFGVDLINELVENFGRCPKWSGRQAFVFVCQTVIEDDCLPMDQFAVHLMPHLLTLANDRVPNVRVLLAKTLRQTLLEKAATRRLWSRPSWLFRWTVTAMSSILQASTLPVPKSPKMP

SEQ ID NO: 766370 - protein, 964 aa, Homo sapiens; identical to SEQ ID NO: 766354

SEQ ID NO: 766371 - protein, 116 aa, Homo sapiens
GLSYEAAVKSAEGLQTVIEDDCLPMDQFAVHLMPHLLTLANDRVPNVRVLLAKTLRQTLLEKDYFLASASCHQEAVEQTIMALQMDRDSDVKYFASIHPASTKISEDAMSTASSTY

SEQ ID NO: 766372 - protein, 93 aa, Homo sapiens
LSTGEDSKTLGHLLTLANDRVPNVRVLLAKTLRQTLLEKDYFLASASCHQEAVEQTIMALQMDRDSDVKYFASIHPASTKISEDAMSTASSTY

SEQ ID NO: 766373 - protein, 794 aa, Homo sapiens
RHERASTGSPARAAPCSPGSPGGRGGGGDHKMADLSLLQEDLQEDADGSLDFVSQDEMLTPLGRLDKYAASENIFNRQMVARSLLDTLREVCDDERDCIAVLERISRLADDSEPTVRAELMEQVPHIALFCQENRPSIPYAFSKFLLPIVVRYLADQNNQVRKTSQAALLALLEQELIERFDVETKVCPVLIELTAPDSNDDVKTEAVAIMCKMAPMVGKDITERLILPRFCEMCCDCRMFHVRKVCAANFGDICSVVGQQATEEMLLPRFFQLCSDNVWGVRKACAECFMAVSCATCQEIRRTKLSALFINLISDPSRWVRQAAFQSLGPFISTFANPSSSGQYFKEESKSSEEMSVENKNRTRDQEAPEDVQVRPEDTPSDLSVSNSSVILENTMEDHAAEASGKPLGEISVPLDSSLLCTLSSESHQEAASNENDKKPGNYKSMLRPEVGTTSQDSALLDQELYNSFHFWRTPLPEIDLDIELEQNSGGKPSPEGPEEESEGPVPSSPNITMATRKELEEMIENLEPHIDDPDVKAQVEVLSAALRASSLDAHEETISIEKRSDLQDELDINELPNCKINQEDSVPLISDAVENMDSTLHYIHSDSDLSNNSSFSPDEERRTKVQDVVPQALLDQYLSMTDPSRAQTVDTEIAKHCAYSLPGVALTLGRQNWHCLRETYETLASDMQWKVRRTLAFSIHELAVILGDQLTAADLVPIFNGFLKDLDEVRIGVLKHLHDFLKLLHIDKRREYLYQLQEFLVTDNSRNWRFRAELAEQLILLLEYMPLQRGSS

SEQ ID NO: 766374 - protein, 602 aa, Homo sapiens
RHERASTGSPARAAPCSPGSPGGRGGGGDHKMADLSLLQEDLQEDADGSLDFVSQDEMLTPLGRLDKYAASENIFNRQMVARSLLDTLREVCDDERDCIAVLERISRLADDSEPTVRAELMEQVPHIALFCQENRPSIPYAFSKFLLPIVVRYLADQNNQVRKTSQAALLALLEQELIERFDVETKVCPVLIELTAPDSNDDVKTEAVAIMCKMAPMVGKDITERLILPRFCEMCCDCRMFHVRKVCAANFGDICSVVGQQATEEMLLPRFFQLCSDNVWGVRKACAECFMAVSCATCQEIRRTKLSALFINLISDPSRWVRQAAFQSLGPFISTFANPSSSGQYFKEESKSSEEMSVENKNRTRDQEAPEDVQVRPEDTPSDLSVSNSSVILENTMEDHAAEASGKPLGEISVPLDSSLLCTLSSESHQEAASNENDKKPGNYKSMLRPEVGTTSQDSALLDQELYNSFHFWRTPLPEIDLDIELEQNSGGKPSPEGPEEESEGPVPSSPNITMATRKELEEMIENLEPHIDDPDVKAQVEVLSAALRASSLDAHEETISIEKRSDLQDELDINELPNCKINQEDLVLIRDCYEALRPRYL

SEQ ID NO: 766375 - protein, 355 aa, Homo sapiens
RHERASTGSPARAAPCSPGSPGGRGGGGDHKMADLSLLQEDLQEDADGSLDFVSQDEMLTPLGRLDKYAASENIFNRQMVARSLLDTLREVCDDERDCIAVLERISRLADDSEPTVRAELMEQVPHIALFCQENRPSIPYAFSKFLLPIVVRYLADQNNQVRKTSQAALLALLEQELIERFDVETKVCPVLIELTAPDSNDDVKTEAVAIMCKMAPMVGKDITERLILPRFCEMCCDCRMFHVRKVCAANFGDICSVVGQQATEEMLLPRFFQLCSDNVWGVRKACAECFMAVSCATCQEIRRTKLSALFINLISDPSRWVRQAAFQSLGPFISTFANPSSSGQYFKEDMKGPRD

SEQ ID NO: 766376 - protein, 551 aa, Homo sapiens
RHERASTGSPARAAPCSPGSPGGRGGGGDHKMADLSLLQEDLQEDADGSLDFVSQDEMLTPLGRLDKYAASENIFNRQMVARSLLDTLREVCDDERDCIAVLERISRLADDSEPTVRAELMEQVPHIALFCQENRPSIPYAFSKFLLPIVVRYLADQNNQVRKTSQAALLALLEQELIERFDVETKVCPVLIELTAPDSNDDVKTEAVAIMCKMAPMVGKDITERLILPRFCEMCCDCRMFHVRKVCAANFGDICSVVGQQATEEMLLPRFFQLCSDNVWGVRKACAECFMAVSCATCQEIRRTKLSALFINLISDPSRWVRQAAFQSLGPFISTFANPSSSGQYFKEESKSSEEMSVENKNRTRDQEAPEDVQVRPEDTPSDLSVSNSSVILENTMEDHAAEASGKPLGEISVPLDSSLLCTLSSESHQEAASNENDKKPGNYKSMLRPEVGTTSQDSALLDQELYNSFHFWRTPLPEIDLDIELEQNSGGKPSPEGPEEESEGPVPSSPNITMATRKELEEMIENLEPHIDDPDVKGMEVNQVIYSEID

SEQ ID NO: 766377 - protein, 346 aa, Homo sapiens
RHERASTGSPARAAPCSPGSPGGRGGGGDHKMADLSLLQEDLQEDADGSLDFVSQDEMLTPLGRLDKYAASENIFNRQMVARSLLDTLREVCDDERDCIAVLERISRLADDSEPTVRAELMEQVPHIALFCQENRPSIPYAFSKFLLPIVVRYLADQNNQVRKTSQAALLALLEQELIERFDVETKVCPVLIELTAPDSNDDVKTEAVAIMCKMAPMVGKDITERLILPRFCEMCCDCRMFHVRKVCAANFGDICSVVGQQATEEMLLPRFFQLCSDNVWGVRKACAECFMAVSCATCQEIRRTKLSALFINLISDPSRWSPSSFSVSGPEEADLESTLNARGDPK

SEQ ID NO: 766378 - protein, 567 aa, Homo sapiens
LVADILFLSGCPWPGFCNACVGRRWRCWESAEEMLSPVSRDASDALQGRKCLRPRSRRLPLPAAVRAHGPMAELTDSARGCVVFEDVFVYFSREEWELLDDAQRLLYHDVMLENFALLASLGIAFSRSRAVMKLERGEEPWVYDQVDMTSATEREAQRGLRPGCWHGVEDEEVSSEQSIFVAGVSEVRTLMAELESHPCDICGPILKDTLHLAKYHGGKARQKPYLCGACGKQFWFSTDFDQHQNQPNGGKLFPRKEGRDSVKSCRVHVPEKTLTCGKGRRDFSATSGLLQHQASLSSMKPHKSTKLVSGFLMGQRYHRCGECGKAFTRKDTLARHQRIHTGERPYECNECGKFFSQSYDLFKHQTVHTGERPYECSECGKFFRQISGLIEHRRVHTGERLYQCGKCGKFFSSKSNLIRHQEVHTGARPYVCSECGKEFSRKHTLVLHQRTHTGERPYECSECGKAFSQSSHLNVHWRIHSSDYECSRCGKAFSCISKLIQHQKVHSGEKPYECSKCGKAFTQRPNLIRHWKVHTGERPYVCSECGREFIRKQTLVLHQRVHAGEKL

SEQ ID NO: 766379 - protein, 457 aa, Homo sapiens
MLENFALLASLGIAFSRSRAVMKLERGEEPWVYDQVDMTSATEREAQRGLRPGCWHGVEDEEVSSEQSIFVAGVSEVRTLMAELESHPCDICGPILKDTLHLAKYHGGKARQKPYLCGACGKQFWFSTDFDQHQNQPNGGKLFPRKEGRDSVKSCRVHVPEKTLTCGKGRRDFSATSGLLQHQASLSSMKPHKSTKLVSGFLMGQRYHRCGECGKAFTRKDTLARHQRIHTGERPYECNECGKFFSQSYDLFKHQTVHTGERPYECSECGKFFRQISGLIEHRRVHTGERLYQCGKCGKFFSSKSNLIRHQEVHTGARPYVCSECGKEFSRKHTLVLHQRTHTGERPYECSECGKAFSQSSHLNVHWRIHSSDYECSRCGKAFSCISKLIQHQKVHSGEKPYECSKCGKAFTQRPNLIRHWKVHTGERPYVCSECGREFIRKQTLVLHQRVHAGEKL

SEQ ID NO: 766380 - protein, 457 aa, Homo sapiens; identical to SEQ ID NO: 766379

SEQ ID NO: 766381 - protein, 144 aa, Homo sapiens
MADQLTEEQIAEFKEAFSLFDKDGDGTITTKELGTVMRSLGQNPTEAELQDMINEVDADGNGTIDFPEFLTMMARKMKDTDSEEEIREAFRVFDKDGNGYISAAELRHVMTNLGEKLTSLSPCPSSLPFALASSIHVFQGLMHS

SEQ ID NO: 766382 - protein, 64 aa, Homo sapiens
MGPTTLSRERTCNKTVLSASCPGDGSYSSLCVLVRQHLPLLRGDLAPLPHICRTARGISKVDCR

SEQ ID NO: 766383 - protein, 105 aa, Homo sapiens
EPGPGVEREGNGTIDFPEFLTMMARKMKDTDSEEEIREAFRVFDKDGNGYISAAELRHVMTNLGEKLTREIKRTGIASCPGGLHFAVIICDKLFIIDLAISIDVS

SEQ ID NO: 766384 - protein, 83 aa, Homo sapiens
DPLCFPGEVMPALLRLTLGALHHCPEPTVELGTVMRSLGQNPTEAELQDMINEVDADGNGTIDFPEFLTMMARKMKDTYYVVP

SEQ ID NO: 766385 - protein, 98 aa, Homo sapiens
SPSFPHLPGNGTIDFPEFLTMMARKMKDTDSEEEIREAFRVFDKDGNGYISAAELRHVMTNLGEKLTDEEVDEMIREADIDGDGQVNYEEFVQMMTAK

SEQ ID NO: 766386 - protein, 97 aa, Homo sapiens
AVAFPLSTASSSSSWLGSRPLAFHPPINPTHCPSAMFCCRPPPRSPHAVAQLLWKLVAPTARNRAASQKGVDACISSSGRPEAFCSLPSSSQPANPG

SEQ ID NO: 766387 - protein, 229 aa, Homo sapiens
KGEKTQTTELPTLTYLSQRRKSEARARFMLSAGGVWGQAGGRGKGSECGGADARRSWNCCSCCRRRRNLDPRAPDTPGLAMADQLTEEQIAEFKEAFSLFDKDGDGTITTKELGTVMRSLGQNPTEAELQDMINEVDADGNGTIDFPEFLTMMARKMKDTDSEEEIREAFRVFDKDGNGYISAAELRHVMTNLGEKLTDEEVDEMIREADIDGDGQVNYEEFVQMMTAK

SEQ ID NO: 766388 - protein, 187 aa, Homo sapiens
RYLEIRVIPFARRSWNCCSCCRRRRNLDPRAPDTPGLAMADQLTEEQIAEFKEAFSLFDKDGDGTITTKELGTVMRSLGQNPTEAELQDMINEVDADGNGTIDFPEFLTMMARKMKDTDSEEEIREAFRVFDKDGNGYISAAELRHVMTNLGEKLTDEEVDEMIREADIDGDGQVNYEEFVQMMTAK

SEQ ID NO: 766389 - protein, 149 aa, Homo sapiens [sequence omitted]

SEQ ID NO: 766390 - protein, 149 aa, Homo sapiens [sequence omitted]

SEQ ID NO: 766391 - protein, 149 aa, Homo sapiens [sequence omitted]

SEQ ID NO: 766392 - protein, 149 aa, Homo sapiens [sequence omitted]

SEQ ID NO: 766393 - protein, 113 aa, Homo sapiens
MRSLGQNPTEAELQDMINEVDADGNGTIDFPEFLTMMARKMKDTDSEEEIREAFRVFDKDGNGYISAAELRHVMTNLGEKLTDEEVDEMIREADIDGDGQVNYEEFVQMMTAK

SEQ ID NO: 766394 - protein, 149 aa, Homo sapiens [sequence omitted]

SEQ ID NO: 766395 - protein, 149 aa, Homo sapiens [sequence omitted]

SEQ ID NO: 766396 - protein, 149 aa, Homo sapiens [sequence omitted]

SEQ ID NO: 766397 - protein, 97 aa, Homo sapiens
SAGPGVERNGTIDFPEFLTMMARKMKDTDSEEEIREAFRVFDKDGNGYISAAELRHVMTNLGEKLTDEEVDEMIREADIDGDGQVNYEEFVQMMTAK

SEQ ID NO: 766398 - protein, 149 aa, Homo sapiens [sequence omitted]

SEQ ID NO: 766399 - protein, 149 aa, Homo sapiens [sequence omitted]

SEQ ID NO: 766400 - protein, 163 aa, Homo sapiens
KGEKTQTTELPTLTYLSQRRKSEARARFMLSAGGVWGQAGGRGKGSECGGADARRSWNCCSCCRRRRNLDPRAPDTPGLAMADQLTEEQIAEFKEAFSLFDKDGDGTITTKELGTVMRSLGQNPTEAELQDMINEVDADGWEWLHQRRRAASRNDEPGGEADR

SEQ ID NO: 766401 - protein, 149 aa, Homo sapiens [sequence omitted]

SEQ ID NO: 766402 - protein, 149 aa, Homo sapiens [sequence omitted]

SEQ ID NO: 766403 - protein, 68 aa, Homo sapiens
LDTRAVSAGDIDRDGQLNYEVCTDDDCKVKAPRAAGDARSLDLSLLARALSLQHSPAYPGSSKHQLID

SEQ ID NO: 766404 - protein, 149 aa, Homo sapiens [sequence omitted]

SEQ ID NO: 766405 - protein, 149 aa, Homo sapiens [sequence omitted]

SEQ ID NO: 766406 - protein, 149 aa, Homo sapiens [sequence omitted]

SEQ ID NO: 766407 - protein, 149 aa, Homo sapiens [sequence omitted]

SEQ ID NO: 766408 - protein, 149 aa, Homo sapiens [sequence omitted]

SEQ ID NO: 766409 - protein, 98 aa, Homo sapiens
MGSGHRMNKRQIQSFNPGPCSIYSVFDGNGYISAAELRHVMTNLGEKLTDEEVDEMIREADIDGDGQVNYEVAGWGLLIWPLCRLDLPAFLKRSRAVL

SEQ ID NO: 766410 - protein, 149 aa, Homo sapiens [sequence omitted]

SEQ ID NO: 766411 - protein, 149 aa, Homo sapiens [sequence omitted]

SEQ ID NO: 766412 - protein, 99 aa, Homo sapiens
FSEIPKTRLPRLYCKFNTSPSLNRETPAEYFPPLVHKKTGSTEKNPRKHLWPLSIYNPLFPPTQKKSPRNFFFFFFFFFFFSFPSMALKTFILFRTMLG

SEQ ID NO: 766413 - protein, 149 aa, Homo sapiens [sequence omitted]

SEQ ID NO: 766414 - protein, 120 aa, Homo sapiens
MADQLTEEQIAEFKEAFSLFDKDGDGTITTKELGTVMRSLGQNPTEAELQDMINEVDADGNGTIDFPEFLTMMARKMKDTDSEEEIREAFRVFDKMGMAPSATQRATRCASPSATQRATK

SEQ ID NO: 766415 - protein, 78 aa, Homo sapiens
RYLEIRVIPFARRSWNCCSCCRRRRNLDPRAPDTPGLAMADQLTEEQIAEFKEAFSLFDKDGDGTITTKEFVQMMTAK

SEQ ID NO: 766416 - protein, 78 aa, Homo sapiens; identical to SEQ ID NO: 766415

SEQ ID NO: 766417 - protein, 112 aa, Homo sapiens
GCSRGSQLRGELQDMINEVDADGNGTIDFPEFLTMMARKMKDTDSEEEIREAFRVFDKDGNGYISAAELRHVMTNLGEKLTDEEVDEMIREADIDGDGQVNYEEFVQMMTAK

SEQ ID NO: 766418 - protein, 33 aa, Homo sapiens
MWGWSLCNVLVLFFFLSPLWPCFIRCDLLSYHG

SEQ ID NO: 766419 - protein, 74 aa, Homo sapiens
  misc_feature (62)..(62): Xaa can be any naturally occurring amino acid
MADQLTEEQIAEFKEAFSLFDKDGDGTITTKELGTVMRSLGQNPTEAELQDMINEVDADGTXTIDFPEEENIRV

SEQ ID NO: 766420 - protein, 149 aa, Homo sapiens [sequence omitted]

SEQ ID NO: 766421 - protein, 149 aa, Homo sapiens [sequence omitted]

SEQ ID NO: 766422 - protein, 149 aa, Homo sapiens [sequence omitted]

SEQ ID NO: 766423 - protein, 149 aa, Homo sapiens [sequence omitted]

SEQ ID NO: 766424 - protein, 149 aa, Homo sapiens [sequence omitted]

SEQ ID NO: 766425 - protein, 149 aa, Homo sapiens [sequence omitted]

SEQ ID NO: 766426 - protein, 113 aa, Homo sapiens; identical to SEQ ID NO: 766393

SEQ ID NO: 766427 - protein, 104 aa, Homo sapiens
MGELQDTINEVDADGNGTIDFPEFLTMMARKMKDTDSEEEIREAFRVFDKDGNGYISAAELRHVMTNLGEKLTDEEVDEMIREADIDGDGQVNYEEFVQMMTAK

SEQ ID NO: 766428 - protein, 80 aa, Homo sapiens
GTLLVFAGVFADSEEEIREAFRVFDKDGNGYISAAELRHVMTNLGEKLTDEEVDEMIREADIDGDGQVNYEEFVQMMTAK

SEQ ID NO: 766429 - protein, 77 aa, Homo sapiens
DASLQSILGPMEKRRDAFRVFDKDGNGYISAAELRHVMTNLGEKLTDEEVDEMIREADIDGDGQVNYEEFVQMMTAK

SEQ ID NO: 766430 - protein, 149 aa, Homo sapiens [sequence omitted]

SEQ ID NO: 766431 - protein, 108 aa, Homo sapiens
  misc_feature (5)..(5): Xaa can be any naturally occurring amino acid
AGDHXHTLEVYGRALQIKKKLAKKKKKNSRLDLSLFSHFGLFPLVCHLILGAGVAASPVPGPAGRDKRPSPRQKSMPFAVACNQPCDSTCRSQQPVGAGVPREAFQKD

SEQ ID NO: 766432 - protein, 167 aa, Homo sapiens
MADQLTEEQIAEFKEAFSLFDKDGDGTITTKELGTVMRSLGQNPTEAELQDMINEVDADGNGTIDFPEFLTMMARKMKDTDSEEEIREAFRVFDKDGNGYISAAELRHVMTNLGEKLTDEEVDEMIREADIDGDGQVNYEVAGWGLLIWPLCRLDLPAFLKRSRAVL

SEQ ID NO: 766433 - protein, 149 aa, Homo sapiens [sequence omitted]

SEQ ID NO: 766434 - protein, 149 aa, Homo sapiens [sequence omitted]

SEQ ID NO: 766435 - protein, 149 aa, Homo sapiens [sequence omitted]

SEQ ID NO: 766436 - protein, 149 aa, Homo sapiens [sequence omitted]

SEQ ID NO: 766437 - protein, 149 aa, Homo sapiens [sequence omitted]

SEQ ID NO: 766438 - protein, 149 aa, Homo sapiens [sequence omitted]

SEQ ID NO: 766439 - protein, 107 aa, Homo sapiens
MADQLTEEQIAEFKEAFSLFDKDGDGTITTKELGTVMRSLGQNPTEAELQDMINEVDADGNGTIDFPEFLTMMARKMKDTRPSQELRVRAGRREAVDIFGMFWFCFF

SEQ ID NO: 766440 - protein, 1265 aa, Homo sapiens [sequence omitted]

SEQ ID NO: 766441 - protein, 416 aa, Homo sapiens
MIGTFLILLPQVKAPQGKNQKSFVFILEPKQQGDPPVEFATDRVEELFEWFQSIREITWKIDTKENNMKYWEKNQSIAIELSDLVVYCKPTSKTKDNLENPDFREIRSFVETKADSIIRQKPVDLLKYNQKGLTRVYPKGQRVDSSNYDPFRLWLCGSQMVALNFQTADKYMQMNHALFSLNGRTGYVLQPESMRTEKYDPMPPESQRKILMTLTVKVLGARHLPKLGRSIACPFVEVEICGAEYDNNKFKTTVVNDNGLSPIWAPTQEKVTFEIYDPNLAFLRFVVYEEDMFSDPNFLAHATYPIKAVKSGFRSVPLKNGYSEDIELASLLVFCEMRPVLESEEELYSSCRQLRRRQEELNNQLFLYDTHQNLRNANRDALVKEFSVNENQLQLYQEKCNKRLREKRVSNSKFYS

SEQ ID NO: 766442 - protein, 332 aa, Homo sapiens
MRHRSTDDLFSLCAENPDFREIRSFVETKADSIIRQKPVDLLKYNQKGLTRVYPKGQRVDSSNYDPFRLWLCGSQMVALNFQTADKYMQMNHALFSLNGRTGYVLQPESMRTEKYDPMPPESQRKILMTLTVKVLGARHLPKLGRSIACPFVEVEICGAEYDNNKFKTTVVNDNGLSPIWAPTQEKVTFEIYDPNLAFLRFVVYEEDMFSDPNFLAHATYPIKAVKSGFRSVPLKNGYSEDIELASLLVFCEMRPVLESEEELYSSCRQLRRRQEELNNQLFLYDTHQNLRNANRDALVKEFSVNENQLQLYQEKCNKRLREKRVSNSKFYS

SEQ ID NO: 766443 - protein, 208 aa, Homo sapiens
MDVCIHELQVLGARHLPKLGRSIACPFVEVEICGAEYDNNKFKTTVVNDNGLSPIWAPTQEKVTFEIYDPNLAFLRFVVYEEDMFSDPNFLAHATYPIKAVKSGFRSVPLKNGYSEDIELASLLVFCEMRPVLESEEELYSSCRQLRRRQEELNNQLFLYDTHQNLRNANRDALVKEFSVNENQLQLYQEKCNKRLREKRVSNSKFYS

SEQ ID NO: 766444 - protein, 984 aa, Homo sapiens
MSTTVNVDSLAEYEKSQIKRALELGTVMTVFSFRKSTPERRTVQVIMETRQVAWSKTADKIEGFLDIMEIKEIRPGKNSKDFERAKAVRQKEDCCFTILYGTQFVLSTLSLAADSKEDAVNWLSGLKILHQEAMNASTPTIIESWLRKQIYSVDQTRRNSISLRELKTILPLINFKVSSAKFLKDKFVEIGAHKDELSFEQFHLFYKKLMFEQQKSILDEFKKDSSVFILGNTDRPDASAVYLRDFQRFLIHEQQEHWAQDLNKVRERMTKFIDDTMRETAEPFLFVDEFLTYLFSRENSIWDEKYDAVDMQDMNNPLSHYWISSSHNTYLTGDQLRSESSPEAYIRCLRMGCRCIELDCWDGPDGKPVIYHGWTRTTKIKFDDVVQAIKDHAFVTSSFPVILSIEEHCSVEQQRHMAKAFKEVFGDLLLTKPTEASADQLPSPSQLREKIIIKHKKLGPRGDVDVNMEDKKDEHKQQGELYMWDSIDQKWTRHYCAIADAKLSFSDDIEQTMEEEVPQDIPPTELHFGEKWFHKKVEKRTSAEKLLQEYCMETGGKDGTFLVRESETFPNDYTLSFWRSGRVQHCRIRSTMEGGTLKYYLTDNLTFSSIYALIQHYRETHLRCAEFELRLTDPVPNPNPHESKPWYYDSLSRGEAEDMLMRIPRDGAFLIRKREGSDSYAITFRARGKVKHCRINRDGRHFVLGTSAYFESLVELVSYYEKHSLYRKMRLRYPVTPELLERYNMERDINSLYDVSRMYVDPSEINPSMPQRTVKALYDYKAKRSDELSFCRGALIHNVSKEPGGWWKGDYGTRIQQYFPSNYVEDISTADFEELEKQIIEDNPLGSLCRGILDLNTYNVVKAPQGKNQKSFVFILEPKQQGDPPVEFATDRVEELFEWFQSIREITWKIDTKENNMKYWEKNQSIAIELSDLVVYCKPTSKTKDNLENPDFREIRSFVETKADSIIRQKPVDLLKYNQKGTKS

SEQ ID NO: 766445 - protein, 975 aa, Homo sapiens
  misc_feature (915)..(915): Xaa can be any naturally occurring amino acid
MSTTVNVDSLAEYEKSQIKRALELGTVMTVFSFRKSTPERRTVQVIMETRQVAWSKTADKIEGFLDIMEIKEIRPGKNSKDFERAKAVRQKEDCCFTILYGTQFVLSTLSLAADSKEDAVNWLSGLKILHQEAMNASTPTIIESWLRKQIYSVDQTRRNSISLRELKTILPLINFKVSSAKFLKDKFVEIGAHKDELSFEQFHLFYKKLMFEQQKSILDEFKKDSSVFILGNTDRPDASAVYLRDFQRFLIHEQQEHWAQDLNKVRERMTKFIDDTMRETAEPFLFVDEFLTYLFSRENSIWDEKYDAVDMQDMNNPLSHYWISSSHNTYLTGDQLRSESSPEAYIRCLRMGCRCIELDCWDGPDGKPVIYHGWTRTTKIKFDDVVQAIKDHAFVTSSFPVILSIEEHCSVEQQRHMAKAFKEVFGDLLLTKPTEASADQLPSPSQLREKIIIKHKKLGPRGDVDVNMEDKKDEHKQQGELYMWDSIDQKWTRHYCAIADAKLSFSDDIEQTMEEEVPQDIPPTELHFGEKWFHKKVEKRTSAEKLLQEYCMETGGKDGTFLVRESETFPNDYTLSFWRSGRVQHCRIRSTMEGGTLKYYLTDNLTFSSIYALIQHYRETHLRCAEFELRLTDPVPNPNPHESKPWYYDSLSRGEAEDMLMRIPRDGAFLIRKREGSDSYAITFRARGKVKHCRINRDGRHFVLGTSAYFESLVELVSYYEKHSLYRKMRLRYPVTPELLERYNMERDINSLYDVSRMYVDPSEINPSMPQRTVKALYDYKAKRSDELSFCRGALIHNVSKEPGGWWKGDYGTRIQQYFPSNYVEDISTADFEELEKQIIEDNPLGSLCRGILDLNTYNVVKAPQGKNQKSFVFILEPKQQGDPPVEFATDRVEELFRKWLSKSNPEKGISTPGXGKLWERTEREGKPKPKFGNNGVKPGGGKGKKGKTQGVTANSGAPPKFREGAPFIPEFVPF

SEQ ID NO: 766446 - protein, 117 aa, Homo sapiens
MFHSERKKREGQGCLQERKTFNHIKDPSVQESKVGMEEEKCRASWEDGISRGRALKTVNSKQENNMKYWEKNQSIAIELSDLVVYCKPTSKTKDNLGNIFPKNMPYNSNENLTSFRV

SEQ ID NO: 766447 - protein, 243 aa, Homo sapiens
MNHALFSLNGRTGYVLQPESMRTEKYDPMPPESQRKILMTLTVKVLGARHLPKLGRSIACPFVEVEICGAEYDNNKFKTTVVNDNGLSPIWAPTQEKVTFEIYDPNLAFLRFVVYEEDMFSDPNFLAHATYPIKAVKSGFRSVPLKNGYSEDIELASLLVFCEMRPVLESEEELYSSCRQLRRRQEELNNQLFLYDTHQNLRNANRDALVKEFSVNENQLQLYQEKCNKRLREKRVSNSKFYS

SEQ ID NO: 766448 - protein, 1265 aa, Homo sapiens [sequence omitted]

SEQ ID NO: 766449 - protein, 1051 aa, Homo sapiens
MSTTVNVDSLAEYEKSQIKRALELGTVMTVFSFRKSTPERRTVQVIMETRQVAWSKTADKIEGFLDIMEIKEIRPGKNSKDFERAKAVRQKEDCCFTILYGTQFVLSTLSLAADSKEDAVNWLSGLKILHQEAMNASTPTIIESWLRKQIYSVDQTRRNSISLRELKTILPLINFKVSSAKFLKDKFVEIGAHKDELSFEQFHLFYKKLMFEQQKSILDEFKKDSSVFILGNTDRPDASAVYLRDFQRFLIHEQQEHWAQDLNKVRERMTKFIDDTMRETAEPFLFVDEFLTYLFSRENSIWDEKYDAVDMQDMNNPLSHYWISSSHNTYLTGDQLRSESSPEAYIRCLRMGCRCIELDCWDGPDGKPVIYHGWTRTTKIKFDDVVQAIKDHAFVTSSFPVILSIEEHCSVEQQRHMAKAFKEVFGDLLLTKPTEASADQLPSPSQLREKIIIKHKKLGPRGDVDVNMEDKKDEHKQQGELYMWDSIDQKWTRHYCAIADAKLSFSDDIEQTMEEEVPQDIPPTELHFGEKWFHKKVEKRTSAEKLLQEYCMETGGKDGTFLVRESETFPNDYTLSFWRSGRVQHCRIRSTMEGGTLKYYLTDNLTFSSIYALIQHYRETHLRCAEFELRLTDPVPNPNPHESKPWYYDSLSRGEAEDMLMRIPRDGAFLIRKREGSDSYAITFRARGKVKHCRINRDGRHFVLGTSAYFESLVELVSYYEKHSLYRKMRLRYPVTPELLERYNMERDINSLYDVSRMYVDPSEINPSMPQRTVKALYDYKAKRSDELSFCRGALIHNVSKEPGGWWKGDYGTRIQQYFPSNYVEDISTADFEELEKQIIEDNPLGSLCRGILDLNTYNVVKAPQGKNQKSFVFILEPKQQGDPPVEFATDRVEELFEWFQSIREITWKIDTKENNMKYWEKNQSIAIELSDLVVYCKPTSKTKDNLENPDFREIRSFVETKADSIIRQKPVDLLKYNQKGLTRVYPKGQRVDSSNYDPFRLWLCGSQMVALNFQTAGKGRLKVVPSLQGGGCSHSRPSHLGSAIPCGVQE

SEQ ID NO: 766450 - protein, 197 aa, Homo sapiens
RRTALVLTASAPEGRAPELAQFPSAVPAPHPPPVSLPSPTAAPGSAMGNVPSAVKHCLSYQQLLREHLWIGDSVAGALDPAQETSQLSGLPEFVKIVEVGPRDGLQNEKVIVPTDIKIEFINRLSQTGLSVIEVTSFVSSRWVPQVAAGATEISVFGAASESFSKKNINCSIEESMGKFEEVVKSARHMNIPARGYL

SEQ ID NO: 766451 - protein, 354 aa, Homo sapiens
RRTALVLTASAPEGRAPELAQFPSAVPAPHPPPVSLPSPTAAPGSAMGNVPSAVKHCLSYQQLLREHLWIGDSVAGALDPAQETSQLSGLPEFVKIVEVGPRDGLQNEKVIVPTDIKIEFINRLSQTGLSVIEVTSFVSSRWVPQVAAGATEISVFGAASESFSKKNINCSIEESMGKFEEVVKSARHMNIPARGYVSCALGCPYEGSITPQKVTEVSKRLYGMGCYEISLGDTIGVGTPGSMKRMLESVMKEIPPGALAVHCHDTYGQALANILTALQMGINVVDSAVSGLGGCPYAKGASGNVATEDLIYMLNGLGLNTGVNLYKVMEAGDFICKAVNKTTNSKVAQASFNA

SEQ ID NO: 766452 - protein, 155 aa, Homo sapiens
RRTALVLTASAPEGRAPELAQFPSAVPAPHPPPVSLPSPTAAPGSAMGNVPSAVKHCLSYQQLLREHLWIGDSVAGALDPAQETSQLSGLPEFVKIVEVGPRDGLQNEKVIVPTDIKIEFINRLSQTGLSVIEVTSFVSSRWVPQVCVLCSGLSI

SEQ ID NO: 766453 - protein, 386 aa, Homo sapiens
RRTALVLTASAPEGRAPELAQFPSAVPAPHPPPVSLPSPTAAPGSAMGNVPSAVKHCLSYQQLLREHLWIGDSVAGALDPAQETSQLSGLPEFVKIVEVGPRDGLQNEKVIVPTDIKIEFINRLSQTGLSVIEVTSFVSSRWVPQMADHTEVMKGIHQYPGVRYPVLTPNLQGFHHAVAAGATEISVFGAASESFSKKNINCSIEESMGKFEEVVKSARHMNIPARGYVSCALGCPYEGSITPQKVTEVSKRLYGMGCYEISLGDTIGVGTPGSMKRMLESVMKEIPPGALAVHCHDTYGQALANILTALQMGINVVDSAVSGLGGCPYAKGASGNVATEDLIYMLNGLGLNTGVNLYKVMEAGDFICKAVNKTTNSKVAQASFNA

SEQ ID NO: 766454 - protein, 179 aa, Homo sapiens
MGKFEEVVKSARHMNIPARGYVSCALGCPYEGSITPQKVTEVSKRLYGMGCYEISLGDTIGVGTPGSMKRMLESVMKEIPPGALAVHCHDTYGQALANILTALQMGINVVDSAVSGLGGCPYAKGASGNVATEDLIYMLNGLGLNTGVNLYKVMEAGDFICKAVNKTTNSKVAQASFNA

SEQ ID NO: 766455 - protein, 153 aa, Homo sapiens
AAARGPRSASPRDSRAPAGCAARWVHEGAAPERRRLQLEPGARPSAGWLAGTSRTGGRVPCVDWQATPHLPRAHHFLSRWLQLTRRSLGRTWARVQEGAGGGGPVFCPPATGFRGWSPLQTPAGAWVSGRLLVCTSRQEQGSPTFHPGILICP

SEQ ID NO: 766456 - protein, 216 aa, Homo sapiens
MSIALKQVFNKDKTFRPKRKFEPGTQRFELHKRAQASLNSGVDLKAAVQLPSGEDQNDWVAVHVVDFFNRINLIYGTICEFCTERTCPVMSGGPKYEYRWQDDLKYKKPTALPAPQYMNLLMDWIEVQINNEEIFPTCVGVPFPKNFLQICKKILCRLFRVFVHVYIHHFDRVIVMGAEAHVNTCYKHFYYFVTEMNLIDRKELEPLKEMTSRMCH

SEQ ID NO: 766457 - protein, 216 aa, Homo sapiens; identical to SEQ ID NO: 766456

SEQ ID NO: 766458 - protein, 643 aa, Homo sapiens
PPGRPNPGGNGVVEVYSAAAPLAGSGTVEIQALGMQPYPPPSQVPNQCVEPPVYPTPTVYSPGKQGFKPKGPNPAAPMTSATGGTVATFDSPATLKTRRAKAAGKPKAQKLKCSYCDKSFTKNFDLQQHIRSHTGEKPFQCIACGRAFAQKSNVKKHMQTHKVWPPGHSGGTVSRNSVTVQVMALNPSRQEDEESTGLGQPLPGAPQPQALSTAGEEEGDKPESKQVVLIDSSYLCQFCPSKFSTYFQLKSHMTQHKNEQVYKCVVKSCAQTFPKLDTFLEHIKSHQEELSYRCHLCGKDFPSLYDLGVHQYSHSLLPQHSPKKDNAVYKCVKCVNKYSTPEALEHHLQTATHNFPCPHCQKVFPCERYLRRHLPTHGSGGRFKCQVCKKFFRREHYLKLHAHIHSGEKPYKCSVCESAFNRKDKLKRHMLIHEPFKKYKCPFSTHTGCSKEFNRPDKLKAHILSHSGMKLHKCALCSKSFSRRAHLAEHQRAHTGNYKFRCAGCAKGFSRHKYLKDHRCRLGPQKDKDLQTRRPPQRRAAPRSCGSGGRKVLTPLPDPLGLEELKDTGAGLVPEAVPGKPPFAEPDAVLSIVVGGAVGAETELVVPGHAEGLGSNLALAELQAGAEGPCAMLAVPVYIQASE

SEQ ID NO: 766459 - protein, 286 aa, Homo sapiens
PPGRPNPGGNGVVEVYSAAAPLAGSGTVEIQALGMQPYPPPSQVPNQCVEPPVYPTPTVYSPGKQGFKPKGPNPAAPMTSATGGTVATFDSPATLKTRRAKAAGKPKAQKLKCSYCDKSFTKNFDLQQHIRSHTGEKPFQCIACGRAFAQKSNVKKHMQTHKVWPPGHSGGTVSRNSVTVQVMALNPSRQEDEESTGLGQPLPGAPQPQALSTAGEEEGDKPESKQVVLIDSSYLCQFCPSKFSTYFQLKSHMTQHKNEQVGGWWQQGPTPHQSKPFTGARVLNAA

SEQ ID NO: 766460 - protein, 393 aa, Homo sapiens
PPGRPNPGGNGVVEVYSAAAPLAGSGTVEIQALGMQPYPPPSQVPNQCVEPPVYPTPTVYSPGKQGFKPKGPNPAAPMTSATGGTVATFDSPATLKTRRAKAAGKPKAQKLKCSYCDKSFTKNFDLQQHIRSHTGEKPFQCIACGRAFAQKSNVKKHMQTHKVWPPGHSGGTVSRNSVTVQVMALNPSRQEDEESTGLGQPLPGAPQPQALSTAGEEEGDKPESKQVVLIDSSYLCQFCPSKFSTYFQLKSHMTQHKNEQVYKCVVKSCAQTFPKLDTFLEHIKSHQEELSYRCHLCGKDFPSLYDLGVHQYSHSLLPQHSPKKDNAVYKCFLVNATCGVICPPTAAGAGSSAKCARSSSGGSIISNCMLTSTRVRSPTNAQCASLRSTARTN

SEQ ID NO: 766461 - protein, 112 aa, Homo sapiens
PPWASQPWWERCGGGVQCCCAPGWEWNGGDPGTGDAALPTPRGEQRGQGGRGHWSWTSWPTRTHPEHQLCARHCAGDTMKTRPGPGLHGVYHITGEKDFNQSITPTDVRCKP

SEQ ID NO: 766462 - protein, 434 aa, Homo sapiens
PPGRPNPGGNGVVEVYSAAAPLAGSGTVEIQALGMQPYPPPSQVPNQCVEPPVYPTPTVYSPGKQGFKPKGPNPAAPMTSATGGTVATFDSPATLKTRRAKAAGKPKAQKLKCSYCDKSFTKNFDLQQHIRSHTGEKPFQCIACGRAFAQKSNVKKHMQTHKVWPPGHSGGTVSRNSVTVQVMALNPSRQEDEESTGLGQPLPGAPQPQALSTAGEEEGDKPESKQVVLIDSSYLCQFCPSKFSTYFQLKSHMTQHKNEQVYKCVVKSCAQTFPKLDTFLEHIKSHQEELSYRCHLCGKDFPSLYDLGVHQYSHSLLPQHSPKKDNAVYKCVKCVNKYSTPEALEHHLQTATHNFPCPHCQKVFPCERYLRRHLPTHGSGGRFKCQVCKKFFRREHYLKLHAHIHSGEKPYKCSVCESAFNRKDKLKRHMLIHV

SEQ ID NO: 766463 - protein, 81 aa, Homo sapiens
GKQGFKPKGPNPAAPMTSATGGTVATFDSPATLKTRRAKGARGLPEGGPPACHGHLSSTLANPQATWFWSSLLWLFKFGCM

SEQ ID NO: 766464 - protein, 360 aa, Homo sapiens
MAAPAAATAMGNAPAKKDTEQEESVNEFLAKARGDFLYRWGNPAQNTASSDQFERLRTLGMGSFGRVMLVRHQETGGHYAMKILNKQKVVKMKQVEHILNEKRILQAIDFPFLVKLQFSFKDNSYLYLVMEYVPGGEMFSRLQRVGRFSEPHACFYAAQVVLAVQYLHSLDLIHRDLKPENLLIDQQGYLQVTDFGFAKRVKGRTWTLCGTPEYLAPEIILSKGYNKAVDWWALGVLIYEMAVGFPPFYADQPIQIYEKIVSGRVRFPSKLSSDLKHLLRSLLQVDLTKRFGNLRNGVGDIKNHKWFATTSWIAIYEKKVEAPFIPKYTGPGDASNFDDYEEEELRISINEKCAKEFSEF

SEQ ID NO: 766465 - protein, 176 aa, Homo sapiens
MKRLINYKNMSSIWDRCKGTLNMETSVFPSHMGGKFSFSSARDLVLLKTWEEVLQLSSFPQRGKDHARTPEFSNRCSTPGDSQFWEVISDEHCIDSVGLTRGQHLAGDQLRHNGSRVTRLTTYRHSTLVHNAAPSINTIPTCVNLQPHMPNTYPKDIATLTPIAKHKAKDTTLTHI

SEQ ID NO: 766466 - protein, 185 aa, Homo sapiens
PFSSGRPRGQLRPPGSTGGAGGGKMSVPGPYQAATGPSSAPSAPPSYEETVAVNSYYPTPPAPMPGPTTGLVTGPDGKGMNPPSYYTQPAPIPNNNPITVQTVYVQHPITFLDRPIQMCCPSCNKMIVSQLSYNAGALTWLSCGSLCLLGCIAGCCFIPFCVDALQDVDHYCPNCRALLGTYKRL

SEQ ID NO: 766467 - protein, 156 aa, Homo sapiens
TEMMSARCEAWVLRGQLRPPGSTGGAGGGKMSVPGPYQAATGPSSAPSAPPSYEETVAVNSYYPTPPAPMPGPTTGLVTGPDGKGMNPPSYYTQPAPIPNNNPITVQTVYVQHPITFLDRPIQMCCPSCNKMIVSQLSYNAGALTWLSCGSLCLLG

SEQ ID NO: 766468 - protein, 185 aa, Homo sapiens
ALFSGRPRGQLRPPGSTGGAGGGKMSVPGPYQAATGPSSAPSAPPSYEETVAVNSYYPTPPAPMPGPTTGLVTGPDGKGMNPPSYYTQPAPIPNNNPITVQTVYVQHPITFLDRPIQMCCPSCNKMIVSQLSYNAGALTWLSCGSLCLLGCIAGCCFIPFCVDALQDVDHYCPNCRALLGTYKRL

SEQ ID NO: 766469 - protein, 185 aa, Homo sapiens; identical to SEQ ID NO: 766466

SEQ ID NO: 766470 - protein, 185 aa, Homo sapiens; identical to SEQ ID NO: 766466

SEQ ID NO: 766471 - protein, 185 aa, Homo sapiens; identical to SEQ ID NO: 766466

SEQ ID NO: 766472 - protein, 185 aa, Homo sapiens; identical to SEQ ID NO: 766466

SEQ ID NO: 766473 - protein, 185 aa, Homo sapiens; identical to SEQ ID NO: 766466

SEQ ID NO: 766474 - protein, 191 aa, Homo sapiens
TEMMSARCEAWVLRGQLRPPGSTGGAGGGKMSVPGPYQAATGPSSAPSAPPSYEETVAVNSYYPTPPAPMPGPTTGLVTGPDGKGMNPPSYYTQPAPIPNNNPITVQTVYVQHPITFLDRPIQMCCPSCNKMIVSQLSYNAGALTWLSCGSLCLLGCIAGCCFIPFCVDALQDVDHYCPNCRALLGTYKRL

SEQ ID NO: 766475 - protein, 185 aa, Homo sapiens; identical to SEQ ID NO: 766466

SEQ ID NO: 766476 - protein, 185 aa, Homo sapiens; identical to SEQ ID NO: 766466

SEQ ID NO: 766477 - protein, 171 aa, Homo sapiens
KEGRVCSKGKMSVPGPYQAATGPSSAPSAPPSYEETVAVNSYYPTPPAPMPGPTTGLVTGPDGKGMNPPSYYTQPAPIPNNNPITVQTVYVQHPITFLDRPIQMCCPSCNKMIVSQLSYNAGALTWLSCGSLCLLGCIAGCCFIPFCVDALQDVDHYCPNCRALLGTYKRL

SEQ ID NO: 766478 - protein, 161 aa, Homo sapiens
MSVPGPYQAATGPSSAPSAPPSYEETVAVNSYYPTPPAPMPGPTTGLVTGPDGKGMNPPSYYTQPAPIPNNNPITVQTVYVQHPITFLDRPIQMCCPSCNKMIVSQLSYNAGALTWLSCGSLCLLGCIAGCCFIPFCVDALQDVDHYCPNCRALLGTYKRL

SEQ ID NO: 766479 - protein, 173 aa, Homo sapiens
GGRVGLAPRGRGRIGEWGRHQVRARRLGASAPPSYEETVAVNSYYPTPPAPMPGPTTGLVTGPDGKGMNPPSYYTQPAPIPNNNPITVQTVYVQHPITFLDRPIQMCCPSCNKMIVSQLSYNAGALTWLSCGSLCLLGCIAGCCFIPFCVDALQDVDHYCPNCRALLGTYKRL

SEQ ID NO: 766480 - protein, 185 aa, Homo sapiens; identical to SEQ ID NO: 766466

SEQ ID NO: 766481 - protein, 185 aa, Homo sapiens; identical to SEQ ID NO: 766466

SEQ ID NO: 766482 - protein, 143 aa, Homo sapiens
MNQLRSISTYQLMSRRARTYGERRYSGHAMVMRLPMWLPMMPVKLHYLSDVGDITEQTWLHGVDLDLSFLDRPIQMCCPSCNKMIVSQLSYNAGALTWLSCGSLCLLGCIAGCCFIPFCVDALQDVDHYCPNCRALLGTYKRL

SEQ ID NO: 766483 - protein, 115 aa, Homo sapiens
MPCRTWTITVPTAELSWAPTSVCRTQPDVEGAGCRRKSFPPLIQLHAWWRFCPGGLTSPGGPPSCLLLGGIRRKTNKSPNPRNCCLESCIGLAKTFPLSVSSTVSCLPETLSPAI

SEQ ID NO: 766484 - protein, 185 aa, Homo sapiens; identical to SEQ ID NO: 766466

SEQ ID NO: 766485 - protein, 105 aa, Homo sapiens
MSVPGPYQAATGPSSAPSAPPSYEETVAVNSYYPTPPAPMPGPTTGLVTGPDGKGMNPPSYYTQPAPIPNNNPSTCGLPGPPYHSLAFHPGNQESDRSDSAKESK

SEQ ID NO: 766486 - protein, 191 aa, Homo sapiens; identical to SEQ ID NO: 766474

SEQ ID NO: 766487 - protein, 185 aa, Homo sapiens; identical to SEQ ID NO: 766466

SEQ ID NO: 766488 - protein, 161 aa, Homo sapiens; identical to SEQ ID NO: 766478

SEQ ID NO: 766489 - protein, 161 aa, Homo sapiens; identical to SEQ ID NO: 766478

SEQ ID NO: 766490 - protein, 161 aa, Homo sapiens; identical to SEQ ID NO: 766478

SEQ ID NO: 766491 - protein, 191 aa, Homo sapiens
GGRVGLAPRGRGRIGEWGRHQVRARRLGGKMSVPGPYQAATGPSSAPSAPPSYEETVAVNSYYPTPPAPMPGPTTGLVTGPDGKGMNPPSYYTQPAPIPNNNPITVQTVYVQHPITFLDRPIQMCCPSCNKMIVSQLSYNAGALTWLSCGSLCLLGCIAGCCFIPFCVDALQDVDHYCPNCRALLGTYKRL

SEQ ID NO: 766492 - protein, 179 aa, Homo sapiens
QAVRPRVYGSTGGAGGGKMSVPGPYQAATGPSSAPSAPPSYEETVAVNSYYPTPPAPMPGPTTGLVTGPDGKGMNPPSYYTQPAPIPNNNPITVQTVYVQHPITFLDRPIQMCCPSCNKMIVSQLSYNAGALTWLSCGSLCLLGCIAGCCFIPFCVDALQDVDHYCPNCRALLGTYKRL

SEQ ID NO: 766493 - protein, 161 aa, Homo sapiens; identical to SEQ ID NO: 766478

SEQ ID NO: 766494 - protein, 184 aa, Homo sapiens
MTDFLEVNRQELGRWLQEEPGAFNWSMYSQHACLIEGKGECWQDKERQLRARVKRVLPIDVHQPQPLGAGSPAPLPADALVSAFCLEAVSPDLASFQRALDHITTLLRPGGHLLLIGALEESWYLAGEARLTVVPVSEEEVREALVRSGYKVRDLRTYIMPAHLQTGVDDVKGVFFAWAQKVGL

SEQ ID NO: 766495 - protein, 282 aa, Homo sapiens
MSGADRSPNAGAAPDSAPGQAAVASAYQRFEPRAYLRNNYAPPRGDLCNPNGVGPWKLRCLAQTFATGEVSGRTLIDIGSGPTVYQLLSACSHFEDITMTDFLEVNRQELGRWLQEEPGAFNWSMYSQHACLIEGKGECWQDKERQLRARVKRVLPIDVHQPQPLGAGSPAPLPADALVSAFCLEAVSPDLASFQRALDHITTLLRPGGHLLLIGALEESWYLAGEARLTVVPVSEEEVREALVRSGYKVRDLRTYIMPAHLQTGVDDVKGVFFAWAQKVGL

SEQ ID NO: 766496 - protein, 320 aa, Homo sapiens
MSGADRSPNAGAAPDSAPGQAAVASAYQRFEPRAYLRNNYAPPRGDLCNPNGVGPWKLRCLAQTFATGEVSGRTLIDIGSGPTVYQLLSACSHFEDITMTDFLEVNRQELGRWLQEEPGAFNWSMYSQHACLIEGKGKDWGVRVGEEASHRVAGWGNRGLSVEQPVSPALCLLHRECWQDKERQLRARVKRVLPIDVHQPQPLGAGSPAPLPADALVSAFCLEAVSPDLASFQRALDHITTLLRPGGHLLLIGALEESWYLAGEARLTVVPVSEEEVREALVRSGYKVRDLRTYIMPAHLQTGVDDVKGVFFAWAQKVGL

SEQ ID NO: 766497 - protein, 1068 aa, Homo sapiens
MPPRPSSGELWGIHLMPPRILVECLLPNGMIVTLECLREATLITIKHELFKEARKYPLHQLLQDESSYIFVSVTQEAEREEFFDETRRLCDLRLFQPFLKVIEPVGNREEKILNREIGFAIGMPVCEFDMVKDPEVQDFRRNILNVCKEAVDLRDLNSPHSRAMYVYPPNVESSPELPKHIYNKLDKGQIIVVIWVIVSPNNDKQKYTLKINHDCVPEQVIAEAIRKKTRSMLLSSEQLKLCVLEYQGKYILKVCGCDEYFLEKYPLSQYKYIRSCIMLGRMPNLMLMAKESLYSQLPMDCFTMPSYSRRISTATPYMNGETSTKSLWVINSALRIKILCATYVNVNIRDIDKIYVRTGIYHGGEPLCDNVNTQRVPCSNPRWNEWLNYDIYIPDLPRAARLCLSICSVKGRKGAKEEHCPLAWGNINLFDYTDTLVSGKMALNLWPVPHGLEDLLNPIGVTGSNPNKETPCLELEFDWFSSVVKFPDMSVIEEHANWSVSREAGFSYSHAGLSNRLARDNELRENDKEQLKAISTRDPLSEITEQEKDFLWSHRHYCVTIPEILPKLLLSVKWNSRDEVAQMYCLVKDWPPIKPEQAMELLDCNYPDPMVRGFAVRCLEKYLTDDKLSQYLIQLVQVLKYEQYLDNLLVRFLLKKALTNQRIGHFFFWHLKSEMHNKTVSQRFGLLLESYCRACGMYLKHLNRQVEAMEKLINLTDILKQEKKDETQKVQMKFLVEQMRRPDFMDALQGFLSPLNPAHQLGNLRLEECRIMSSAKRPLWLNWENPDIMSELLFQNNEIIFKNGDDLRQDMLTLQIIRIMENIWQNQGLDLRMLPYGCLSIGDCVGLIEVVRNSHTIMQIQCKGGLKGALQFNSHTLHQWLKDKNKGEIYDAAIDLFTRSCAGYCVATFILGIGDRHNSNIMVKDDGQLFHIDFGHFLDHKKKKFGYKRERVPFVLTQDFLIVISKGAQECTKTREFERFQEMCYKAYLAIRQHANLFINLFSMMLGSGMPELQSFDDIAYIRKTLALDKTEQEALEYFMKQMNDAHHGGWTTKMDWIFHTIKQHALN

SEQ ID NO: 766498 - protein, 1050 aa, Homo sapiens
MPPRPSSGELWGIHLMPPRILVECLLPNGMIVTLECLREATLITIKHELFKEARKYPLHQLLQDESSYIFVSVTQEAEREEFFDETRRLCDLRLFQPFLKVIEPVGNREEKILNREIGFAIGMPVCEFDMVKDPEVQDFRRNILNVCKEAVDLRDLNSPHSRAMYVYPPNVESSPELPKHIYNKLDKGQIIVVIWVIVSPNNDKQKYTLKINHDCVPEQVIAEAIRKKTRSMLLSSEQLKLCVLEYQGKYILKVCGCDEYFLEMPNLMLMAKESLYSQLPMDCFTMPSYSRRISTATPYMNGETSTKSLWVINSALRIKILCATYVNVNIRDIDKIYVRTGIYHGGEPLCDNVNTQRVPCSNPRWNEWLNYDIYIPDLPRAARLCLSICSVKGRKGAKEEHCPLAWGNINLFDYTDTLVSGKMALNLWPVPHGLEDLLNPIGVTGSNPNKETPCLELEFDWFSSVVKFPDMSVIEEHANWSVSREAGFSYSHAGLSNRLARDNELRENDKEQLKAISTRDPLSEITEQEKDFLWSHRHYCVTIPEILPKLLLSVKWNSRDEVAQMYCLVKDWPPIKPEQAMELLDCNYPDPMVRGFAVRCLEKYLTDDKLSQYLIQLVQVLKYEQYLDNLLVRFLLKKALTNQRIGHFFFWHLKSEMHNKTVSQRFGLLLESYCRACGMYLKHLNRQVEAMEKLINLTDILKQEKKDETQKVQMKFLVEQMRRPDFMDALQGFLSPLNPAHQLGNLRLEECRIMSSAKRPLWLNWENPDIMSELLFQNNEIIFKNGDDLRQDMLTLQIIRIMENIWQNQGLDLRMLPYGCLSIGDCVGLIEVVRNSHTIMQIQCKGGLKGALQFNSHTLHQWLKDKNKGEIYDAAIDLFTRSCAGYCVATFILGIGDRHNSNIMVKDDGQLFHIDFGHFLDHKKKKFGYKRERVPFVLTQDFLIVISKGAQECTKTREFERFQEMCYKAYLAIRQHANLFINLFSMMLGSGMPELQSFDDIAYIRKTLALDKTEQEALEYFMKQMNDAHHGGWTTKMDWIFHTIKQHALN

SEQ ID NO: 766499 - protein, 1068 aa, Homo sapiens; identical to SEQ ID NO: 766497

SEQ ID NO: 766500 - protein, 267 aa, Homo sapiens
VLEDPGHFLHRTLQIIRIMENIWQNQGLDLRMLPYGCLSIGDCVGLIEVVRNSHTIMQIQCKGGLKGALQFNSHTLHQWLKDKNKGEIYDAAIDLFTRSCAGYCVATFILGIGDRHNSNIMVKDDGQLFHIDFGHFLDHKKKKFGYKRERVPFVLTQDFLIVISKGAQECTKTREFERFQEMCYKAYLAIRQHANLFINLFSMMLGSGMPELQSFDDIAYIRKTLALDKTEQEALEYFMKQMNDAHHGGWTTKMDWIFHTIKQHALN

SEQ ID NO: 766501 - protein, 220 aa, Homo sapiens
MLRLLLALNLFPSIQVTGNKILVKQSPMLVAYDNAVNLSCKYSYNLFSREFRASLHKGLDSAVEVCVVYGNYSQQLQVYSKTGFNCDGKLGNESVTFYLQNLYVNQTDIYFCKIEVMYPPPYLDNEKSNGTIIHVKGKHLCPSPLFPGPSKPFWVLVVVGGVLACYSLLVTVAFIIFWVRSKRSRLLHSDYMNMTPRRPGPTRKHYQPYAPPRDFAAYRS

SEQ ID NO: 766502 - protein, 55 aa, Homo sapiens
MLRLLLALNLFPSIQVTGNKILVKQSPMLVAYDNAVNLSYNEKSNGTIIHVKGEE

SEQ ID NO: 766503 - protein, 111 aa, Homo sapiens
VSLVTKENQVFVAGGLFYNEDNKEDPMSAYFLQFDHLDSEWLGMPPLPSPRCLFGLGEALNSIYVVGGREIKDGERCLDSVMCYDRLSFKWGESDPLPYVVYGHTVLSHMD

SEQ ID NO: 766504 - protein, 809 aa, Homo sapiens
MYEALPGPAPENEDGLVKVKEEDPTWEQVCNSQEGSSHTQEICRLRFRHFCYQEAHGPQEALAQLRELCHQWLRPEMHTKEQIMELLVLEQFLTILPKELQPCVKTYPLESGEEAVTVLENLETGSGDTGQQASVYIQGQDMHPMVAEYQGVSLECQSLQLLPGITTLKCEPPQRPQGNPQEVSGPVPHGSAHLQEKNPRDKAVVPVFNPVRSQTLVKTEEETAQAVAAEKWSHLSLTRRNLCGNSAQETVMSLSPMTEEIVTKDRLFKAKQETSEEMEQSGEASGKPNRECAPQIPCSTPIATERTVAHLNTLKDRHPGDLWARMHISSLEYAAGDITRKGRKKDKARVSELLQGLSFSGDSDVEKDNEPEIQPAQKKLKVSCFPEKSWTKRDIKPNFPSWSALDSGLLNLKSEKLNPVELFELFFDDETFNLIVNETNNYASQKNVSLEVTVQEMRCVFGVLLLSGFMRHPRREMYWEVSDTDQNLVRDAIRRDRFELIFSNLHFADNGHLDQKDKFTKLRPLIKQMNKNFLLYAPLEEYYCFDKSMCECFDSDQFLNGKPIRIGYKIWCGTTTQGYLVWFEPYQEESTMKVDEDPDLGLGGNLVMNFADVLLERGQYPYHLCFDSFFTSVKLLSALKKKGVRATGTIRENRTEKCPLMNVEHMKKMKRGYFDFRIEENNEIILCRWYGDGIISLCSNAVGIEPVNEVSCCDADNEEIPQISQPSIVKVYDECKEGVAKMDQIISKYRVRIRSKKWYSILVSYMIDVAMNNAWQLHRACNPGASLDPLDFRRFVAHFYLEHNAHLSD

SEQ ID NO: 766505 - protein, 809 aa, Homo sapiens; identical to SEQ ID NO: 766504

SEQ ID NO: 766506 - protein, 304 aa, Homo sapiens [sequence omitted]

SEQ ID NO: 766507 - protein, 56 aa, Homo sapiens
MVTRFLGPRYRELVKNWVPTAYTWGAVGAVGLVWATDWRLILDWVPYINGKFKKDN

SEQ ID NO: 766508 - protein, 94 aa, Homo sapiens
  misc_feature (6)..(6): Xaa can be any naturally occurring amino acid
  misc_feature (12)..(12): Xaa can be any naturally occurring amino acid
  misc_feature (28)..(28): Xaa can be any naturally occurring amino acid
LDLKLXIAFEVXPKLPSLSLSLSPTSSXPSEFGTKPAAMVTRFLGPRYRELVKNWVPTAYTWGAVGAVGLVWATDWRLILDWVPYINGKFKKDN

SEQ ID NO: 766509 - protein, 90 aa, Homo sapiens
MNEGKAHTAPRQHRCPTTRTNDEKQNTHTDEERSKQHQAHDIEKEAEEEENSDGTHTKERDKRKRPKPQGRKAEQHETQQHTAKQQEERS

SEQ ID NO: 766510 - protein, 70 aa, Homo sapiens
MTRNRTLTPMKSRSKQHQAHDIEKEAEEEENSDGTHTKERDKRKRPKPQGRKAEQHETQQHTAKQQEERS

SEQ ID NO: 766511 - protein, 134 aa, Homo sapiens
HPPSPPSPPPPPPPPPPPSPSPSPSPPPPPLPSPPPPPPLPPRPPPPPPPPPPPPPPTIGLVEAWLWPGQLDRVILRVRLRRDGDPVPGPTLPGAGQELGPDGLHMGRCGRRGAGVGHRLAADPGLGTLHQWQV

SEQ ID NO: 766512 - protein, 124 aa, Homo sapiens
  misc_feature (75)..(75): Xaa can be any naturally occurring amino acid
MASLRRIINYTNPSQTALVPGGASSSHLSTCCIWSSPSLRMDKRKPTAQLQASYVSENSLDILMHVALNLTETCXNKTFYYYLCSKTGWGAHEELSHLEEFNPRGGAPHFLQILLFGLGREKKH

SEQ ID NO: 766513 - protein, 134 aa, Homo sapiens; identical to SEQ ID NO: 766511

SEQ ID NO: 766514 - protein, 134 aa, Homo sapiens; identical to SEQ ID NO: 766511

SEQ ID NO: 766515 - protein, 134 aa, Homo sapiens; identical to SEQ ID NO: 766511

SEQ ID NO: 766516 - protein, 70 aa, Homo sapiens
ARYEAGVIGRGAAAMVTRFLGPRYRELVKNWVPTAYTWGAVGAVGLVWATDWRLILDWVPYINGKFKKDN

SEQ ID NO: 766517 - protein, 69 aa, Homo sapiens
VELRVYLDEGAAAMVTRFLGPRYRELVKNWVPTAYTWGAVGAVGLVWATDWRLILDWVPYINGKFKKDN

SEQ ID NO: 766518 - protein, 134 aa, Homo sapiens; identical to SEQ ID NO: 766511

SEQ ID NO: 766519 - protein, 70 aa, Homo sapiens; identical to SEQ ID NO: 766516

SEQ ID NO: 766520 - protein, 166 aa, Homo sapiens
HPPSPPSPPPPPPPPPPPSPSPSPSPPPPPLPSPPPPPPLPPRPPPPPPPPPPPPPPTIGLVEAWLWPGQLDRVILRVRLRRDGDPVPGPTLPGAGQELNAIKTTRAKIPALLVASASEPGSRSSCACPQLVSGHLAYTWRVSGSRRPTHGALWAPWGWCGPPIGG

SEQ ID NO: 766521 - protein, 104 aa, Homo sapiens
RTHFLTASCPRVILRTTAIYVLVLFALYFLLSYMDTEQYEEAVRDYEKVYQTEKTKEHKQLLKNAQLELKKSKRKDYYKIYEWKDFLTASCLPGVFREPLSVPL

SEQ ID NO: 766522 - protein, 450 aa, Homo sapiens
MADKAKPAKAANRTPPKSPGDPSKDRAAKRLSLESEGAGEGAAASPELSALEEAFRRFAVHGDARATGREMHGKNWSKLCKDCQVIDGRNVTVTDVDIVFSKIKGKSCRTITFEQFQEALEELAKKRFKDKSSEEAVREVHRLIEGKAPIISGVTKAISSPTVSRLTDTTKFTGSHKERFDPSGKGKGKAGRVDLVDESGYVSGYKHAGTYDQKVQGGSSPRSMPRGTAGVPRAGTLSPRTSLHSCTNWGRTQTGAPEGAGGRPGPGLPPAPPPTGCPQHSPLKPGLGPSSLTLLIHLPRPQPFPKCLADHTTLGTWFAGQRGVLKQLAVMATGGCADLLSGRHLPGALRVAGANPNQQATNTELAPHRTWEVSVGPEACPVCSGHHGAFLLSWAEGRVRPPGGGAGRLAHVWGSRSHGHTCAHMPTGQLCAKGNLGKTKAVRGSGRLPG

SEQ ID NO: 766523 - protein, 450 aa, Homo sapiens; identical to SEQ ID NO: 766522

SEQ ID NO: 766524 - protein, 450 aa, Homo sapiens; identical to SEQ ID NO: 766522

SEQ ID NO: 766525 - protein, 130 aa, Homo sapiens
MRQAGRYLPEFRETRAAQDFFSTCRSPEACCELTLQPLRRFPLDAAIIFSDILVVPQALGMEVTMVPGKGPSFPEPLREEQDLERLRDPEVVASELGYVFQAITLTRQRLAGRVPLIGFAGAPWTLMTYM

SEQ ID NO: 766526 - protein, 367 aa, Homo sapiens
MEANGLGPQGFPELKNDTFLRAAWGEETDYTPVWCMRQAGRYLPEFRETRAAQDFFSTCRSPEACCELTLQPLRRFPLDAAIIFSDILVVPQALGMEVTMVPGKGPSFPEPLREEQDLERLRDPEVVASELGYVFQAITLTRQRLAGRVPLIGFAGAPWTLMTYMVEGGGSSTMAQAKRWLYQRPQASHQLLRILTDALVPYLVGQVVAGAQALQLFESHAGHLGPQLFNKFALPYIRDVAKQVKARLREAGLAPVPMIIFAKDGHFALEELAQAGYEVVGLDWTVAPKKARECVGKTVTLQGNLDPCALYASEEEIGQLVKQMLDDFGPHRYIANLGHGLYPDMDPEHVGAFVDAVHKHSRLLRQN

SEQ ID NO: 766527 - protein, 71 aa, Homo sapiens
  misc_feature (15)..(15): Xaa can be any naturally occurring amino acid
  misc_feature (19)..(19): Xaa can be any naturally occurring amino acid
STMYVIKGPWGTSKXNQRXTSSQSLSGKGDEFGPHRYIANLGHGLYPDMDPEHVGAFVDAVHKHSRLLRQN

SEQ ID NO: 766528 - protein, 101 aa, Homo sapiens
LYNSSSDPIIVIESKADWTVAPKKARECVGKTVTLQGNLDPCALYASEEEIGQLVKQMLDDFGPHRYIANLGHGLYPDMDPEHVGAFVDAVHKHSRLLRQN

SEQ ID NO: 766529 - protein, 392 aa, Homo sapiens
  misc_feature (4)..(4): Xaa can be any naturally occurring amino acid
LTPXCKHSLGHTCYSPRGSSYRQLTMEANGLGPQGFPELKNDTFLRAAWGEETDYTPVWCMRQAGRYLPEFRETRAAQDFFSTCRSPEACCELTLQPLRRFPLDAAIIFSDILVVPQALGMEVTMVPGKGPSFPEPLREEQDLERLRDPEVVASELGYVFQAITLTRQRLAGRVPLIGFAGAPWTLMTYMVEGGGSSTMAQAKRWLYQRPQASHQLLRILTDALVPYLVGQVVAGAQALQLFESHAGHLGPQLFNKFALPYIRDVAKQVKARLREAGLAPVPMIIFAKDGHFALEELAQAGYEVVGLDWTVAPKKARECVGKTVTLQGNLDPCALYASEEEIGQLVKQMLDDFGPHRYIANLGHGLYPDMDPEHVGAFVDAVHKHSRLLRQN

SEQ ID NO: 766530 - protein, 392 aa, Homo sapiens; identical to SEQ ID NO: 766529
  misc_feature (4)..(4): Xaa can be any naturally occurring amino acid

SEQ ID NO: 766531 - protein, 392 aa, Homo sapiens; identical to SEQ ID NO: 766529
  misc_feature (4)..(4): Xaa can be any naturally occurring amino acid

SEQ ID NO: 766532 - protein, 392 aa, Homo sapiens; identical to SEQ ID NO: 766529
  misc_feature (4)..(4): Xaa can be any naturally occurring amino acid

SEQ ID NO: 766533 - protein, 371 aa, Homo sapiens
  misc_feature (4)..(4): Xaa can be any naturally occurring amino acid
MTPXCKHSLGHTCYSPRGSSYRQLTMEANGLGPQGFPELKNDTFLRAAWGEETDYTPVWCMRQAGRYLPEFRETRAAQDFFSTCRSPEACCELTLQALGMEVTMVPGKGPSFPEPLREEQDLERLRDPEVVASELGYVFQAITLTRQRLAGRVPLIGFAGAPWTLMTYMVEGGGSSTMAQAKRWLYQRPQASHQLLRILTDALVPYLVGQVVAGAQALQLFESHAGHLGPQLFNKFALPYIRDVAKQVKARLREAGLAPVPMIIFAKDGHFALEELAQAGYEVVGLDWTVAPKKARECVGKTVTLQGNLDPCALYASEEEIGQLVKQMLDDFGPHRYIANLGHGLYPDMDPEHVGAFVDAVHKHSRLLRQN

SEQ ID NO: 766534 - protein, 268 aa, Homo sapiens [sequence omitted]

SEQ ID NO: 766535 - protein, 325 aa, Homo sapiens
MTHSCEQPGERKQTTLPFGACARQAVTYQPLRRFPLDAAIIFSDILVVPQALGMEVTMVPGKGPSFPEPLREEQDLERLRDPEVVASELGYVFQAITLTRQRLAGRVPLIGFAGAPWTLMTYMVEGGGSSTMAQAKRWLYQRPQASHQLLRILTDALVPYLVGQVVAGAQALQLFESHAGHLGPQLFNKFALPYIRDVAKQVKARLREAGLAPVPMIIFAKDGHFALEELAQAGYEVVGLDWTVAPKKARECVGKTVTLQGNLDPCALYASEEEIGQLVKQMLDDFGPHRYIANLGHGLYPDMDPEHVGAFVDAVHKHSRLLRQN

SEQ ID NO: 766536 - protein, 268 aa, Homo sapiens [sequence omitted]

SEQ ID NO: 766537 - protein, 268 aa, Homo sapiens [sequence omitted]

SEQ ID NO: 766538 - protein, 268 aa, Homo sapiens [sequence omitted]

SEQ ID NO: 766539 - protein, 366 aa, Homo sapiens
  misc_feature (4)..(4): Xaa can be any naturally occurring amino acid
LTPXCKHSLGHTCYSPRGSSYRQLTMEANGLGPQGFPELKNDTFLRAAWGEETDYTPVWCMRQAGRYLPEFRETRAAQDFFSTCRSPEACCELTLQPLRRFPLDAAIIFSDILVVPQALGMEVTMVPGKGPSFPEPLREEQDLERLRDPEVVASELGYVFQAITLTRQRLAGRVPLIGFAGAPWTLMTYMVEGGGSSTMAQAKRWLYQRPQASHQLLRILTDALVPYLVGQVVAGAQALQLFESHAGHLGPQLFNKFALPYIRDVAKQVKARLREAGLAPVPMIIFAKDGHFALEELAQAGYEVVGLDWTVAPKKARECVGKTVTLQGNLDPCALYASEVTARAPLCVCYCALLWLWLYYSVCTCF

SEQ ID NO: 766540 - protein, 317 aa, Homo sapiens
  misc_feature (4)..(4): Xaa can be any naturally occurring amino acid
LTPXCKHSLGHTCYSPRGSSYRQLTMEANGLGPQGFPELKNDTFLRAAWGEETDYTPVWCMRQAGRYLPEFRETRAAQDFFSTCRSPEACCELTLQPLRRFPLDAAIIFSDILVVPQALGMEVTMVPGKGPSFPEPLREEQDLERLRDPEVVASELGYVFQAITLTRQRLAGRVPLIGFAGAPWTLMTYMVEGGGSSTMAQAKRWLYQRPQASHQLLRILTDALVPYLVGQVVAGAQALQLFESHAGHLGPQLFNKFALPYIRDVAKQVKARLREAGLAPVPMIIFAKDGHFALEELAQAGYEVVGLDWTVAPKKAR

SEQ ID NO: 766541 - protein, 434 aa, Homo sapiens
  misc_feature (4)..(4): Xaa can be any naturally occurring amino acid
LTPXCKHSLGHTCYSPRGSSYRQLTMEANGLGPQGFPELKNDTFLRAAWGEETDYTPVWCMRQAGRYLPEFRETRAAQDFFSTCRSPEACCELTLQPLRRFPLDAAIIFSDILVVPQALGMEVTMVPGKGPSFPEPLREEQDLERLRDPEVVASELGYVFQAITLTRQRLAGRVPLIGFAGAPVPQYCGTGQGLGARGDHSGRSGVDKRKGQSGFCDTIFLSFSEWTLMTYMVEGGGSSTMAQAKRWLYQRPQASHQLLRILTDALVPYLVGQVVAGAQALQLFESHAGHLGPQLFNKFALPYIRDVAKQVKARLREAGLAPVPMIIFAKDGHFALEELAQAGYEVVGLDWTVAPKKARECVGKTVTLQGNLDPCALYASEEEIGQLVKQMLDDFGPHRYIANLGHGLYPDMDPEHVGAFVDAVHKHSRLLRQN

SEQ ID NO: 766542 - protein, 317 aa, Homo sapiens; identical to SEQ ID NO: 766540
  misc_feature (4)..(4): Xaa can be any naturally occurring amino acid

SEQ ID NO: 766543 - protein, 323 aa, Homo sapiens
  misc_feature (4)..(4): Xaa can be any naturally occurring amino acid
LTPXCKHSLGHTCYSPRGSSYRQLTMEANGLGPQGFPELKNDTFLRAAWGEETDYTPVWCMRQAGRYLPEFRETRAAQDFFSTCRSPEACCELTLQPLRRFPLDAAIIFSDILVVPQALGMEVTMVPGKGPSFPEPLREEQDLERLRDPEVVASELGYVFQAITLTRQRLAGRVPLIGFAGAPWTLMTYMVEGGGSSTMAQAKRWLYQRPQASHQLLRILTDALVPYLVGQVVAGAQALQLFESHAGHLGPQLFNKFALPYIRDVAKQVKARLREAGLAPVPMIIFAKDGHFALEELAQAGYEVVGLDWTVAPKKARRRSGSW

SEQ ID NO: 766544 - protein, 289 aa, Homo sapiens
  misc_feature (4)..(4): Xaa can be any naturally occurring amino acid
LTPXCKHSLGHTCYSPRGSSYRQLTMEANGLGPQGFPELKNDTFLRAAWGEETDYTPVWCMRQAGRYLPEFRETRAAQDFFSTCRSPEACCELTLQPLRRFPLDAAIIFSDILVVPQALGMEVTMVPGKGPSFPEPLREEQDLERLRDPEVVASELGYVFQAITLTRQRLAGRVPLIGFAGAPWTLMTYMVEGGGSSTMAQAKRWLYQRPQASHQLLRILTDALVPYLVGQVVAGAQALQLFESHAGHLGPQLFNKFALPYIRDVAKQVKARLREAGLAPVPMVRIGMG

SEQ ID NO: 766545 - protein, 206 aa, Homo sapiens [sequence omitted]

SEQ ID NO: 766546 - protein, 251 aa, Homo sapiens
  misc_feature (4)..(4): Xaa can be any naturally occurring amino acid
LTPXCKHSLGHTCYSPRGSSYRQLTMEANGLGPQGFPELKNDTFLRAAWGEETDYTPVWCMRQAGRYLPEFRETRAAQDFFSTCRSPEACCELTLQPLRRFPLDAAIIFSDILVVPQALGMEVTMVPGKGPSFPEPLREEQDLERLRDPEVVASELGYVFQAITLTRQRLAGRVPLIGFAGAPWTLMTYMVEGGGSSTMAQAKRWLYQRPQASHQLLRILTDALVPYLVGQVVAGAQVSPERERNRLGFGL

SEQ ID NO: 766547 - protein, 289 aa, Homo sapiens; identical to SEQ ID NO: 766544
  misc_feature (4)..(4): Xaa can be any naturally occurring amino acid

SEQ ID NO: 766548 - protein, 289 aa, Homo sapiens; identical to SEQ ID NO: 766544
  misc_feature (4)..(4): Xaa can be any naturally occurring amino acid

SEQ ID NO: 766549 - protein, 186 aa, Homo sapiens
  misc_feature (4)..(4): Xaa can be any naturally occurring amino acid
LTPXCKHSLGHTCYSPRGSSYRQLTMEANGLGPQGFPELKNDTFLRAAWGEETDYTPVWCMRQAGRYLPEFRETRAAQDFFSTCRSPEACCELTLQPLRRFPLDAAIIFSDILVVPQALGMEVTMVPGKGPSFPEPLREEQDLERLRDPEVVASELGYVFQAITLTRQRLAGRVPLIGFAGAPVPQ

SEQ ID NO: 766550 - protein, 289 aa, Homo sapiens; identical to SEQ ID NO: 766544
  misc_feature (4)..(4): Xaa can be any naturally occurring amino acid

SEQ ID NO: 766551 - protein, 338 aa, Homo sapiens
  misc_feature (4)..(4): Xaa can be any naturally occurring amino acid
LTPXCKHSLGHTCYSPRGSSYRQLTMEANGLGPQGFPELKNDTFLRAAWGEETDYTPVWCMRQAGRYLPEFRETRAAQDFFSTCRSPEACCELTLQPLRRFPLDAAIIFSDILVVPQALGMEVTMVPGKGPSFPEPLREEQDLERLRDPEVVASELGYVFQAITLTRQRLAGRVPLIGFAGAPALQLFESHAGHLGPQLFNKFALPYIRDVAKQVKARLREAGLAPVPMIIFAKDGHFALEELAQAGYEVVGLDWTVAPKKARECVGKTVTLQGNLDPCALYASEEEIGQLVKQMLDDFGPHRYIANLGHGLYPDMDPEHVGAFVDAVHKHSRLLRQN

SEQ ID NO: 766552 - protein, 131 aa, Homo sapiens
MEVTMVPGKGPSFPEPLREEQDLERLRDPEVVASELGYVFQAITLTRQRLAGRVPLIGFAGAPWTLMTYMVEGGGSSTMAQAKRWLYQRPQASHQLLRILTDALVPYLVGQVVAGAQVSPERERNRLGFGL

SEQ ID NO: 766553 - protein, 160 aa, Homo sapiens
  misc_feature (4)..(4): Xaa can be any naturally occurring amino acid
LTPXCKHSLGHTCYSPRGSSYRQLTMEANGLGPQGFPELKNDTFLRAAWGEETDYTPVWCMRQAGRYLPEFRETRAAQDFFSTCRSPEACCELTLQPLRRFPLDAAIIFSDILVVPQMFSPPPGTGHGGDHGTWQRTQLPRAIKRRAGPRTPTGSRSGSL

SEQ ID NO: 766554 - protein, 345 aa, Homo sapiens
  misc_feature (4)..(4): Xaa can be any naturally occurring amino acid
LTPXCKHSLGHTCYSPRGSSYRQLTMEANGLGPQGFPELKNDTFLRAAWGEETDYTPVWCMRQAGRYLPEFRETRAAQDFFSTCRSPEACCELTLQPLRRFPLDAAIIFSDILVVPQALGMEVTMVPGKGPSFPEPLREEQDLERLRDPEVVASELGYVFQAITLTRQRLAGRVPLIGFAGAPWTLMTYMVEGGGSSTMAQAKRWLYQRPQASHQLLRILTDALVPYLVGQVVAGAQALQLFESHAGHLGPQLFNKFALRGQRCPRSAGVNMHSSHRGEKAQLHPVKLAQDQHASPRLALLLERSLASGTALRPATTIDLRASRSPLPATCLEATTSTSWAAGTE

SEQ ID NO: 766555 - protein, 251 aa, Homo sapiens; identical to SEQ ID NO: 766546
  misc_feature (4)..(4): Xaa can be any naturally occurring amino acid

SEQ ID NO: 766556 - protein, 221 aa, Homo sapiens
  misc_feature (4)..(4): Xaa can be any naturally occurring amino acid
LTPXCKHSLGHTCYSPRGSSYRQLTMEANGLGPQGFPELKNDTFLRAAWGEETDYTPVWCMRQAGRYLPEFRETRAAQDFFSTCRSPEACCELTLQPLRRFPLDAAIIFSDILVVPQALGMEVTMVPQAGYEVVGLDWTVAPKKARECVGKTVTLQGNLDPCALYASEEEIGQLVKQMLDDFGPHRYIANLGHGLYPDMDPEHVGAFVDAVHKHSRLLRQN

SEQ ID NO: 766557 - protein, 187 aa, Homo sapiens
  misc_feature (4)..(4): Xaa can be any naturally occurring amino acid
LTPXCKHSLGHTCYSPRGSSYRQLTMEANGLGPQGFPELKNDTFLRAAWGEETDYTPVWCMRQAGRYLPEFRETRAAQDFFSTCRSPEACCELTLQPLRRFPLDAAIIFSDILVVPQALGMEVTMVPGKGPSFPEPLREEQDLERLRDPEVVASELGYVFQAITLTRQRLAGRVPLIGFAGAPPSWL

SEQ ID NO: 766558 - protein, 213 aa, Homo sapiens
  misc_feature (4)..(4): Xaa can be any naturally occurring amino acid
MTPXCKHSLGHTCYSPRGSSYRQLTMEANGLGPQGFPELKNDTFLRAAWGEETDYTPVWCMRQAGRYLPEFRETRAAQDFFSTCRSPEACCELTLQPLRRFPLDAAIIFSDILVVPQALGMEVTMVPLDWTVAPKKARECVGKTVTLQGNLDPCALYASEEEIGQLVKQMLDDFGPHRYIANLGHGLYPDMDPEHVGAFVDAVHKHSRLLRQN

SEQ ID NO: 766559 - protein, 236 aa, Homo sapiens
  misc_feature (4)..(4): Xaa can be any naturally occurring amino acid
LTPXCKHSLGHTCYSPRGSSYRQLTMEANGLGPQGFPELKNDTFLRAAWGEETDYTPVWCMRQAGRYLPEFRETRAAQDFFSTCRSPEACCELTLQPLRRFPLDAAIIFSDILVVPQALGMEVTMVPGKGPSFPEPLREEQDLERLRDPEVVASELGYVFQAITLTRQRLAGRVPLIGFAGAPEEIGQLVKQMLDDFGPHRYIANLGHGLYPDMDPEHVGAFVDAVHKHSRLLRQN

SEQ ID NO: 766560 - protein, 119 aa, Homo sapiens
MRQAGRYLPEFRETRAAQDFFSTCRSPEACCELTLQVRGPQKRERFMPSVCHLATCLLFPTATASLPSGCCHHFLRHPCCTPGTGHGGDHGTWQRTQLPRAIKRRAGPRTPTGSRSGSL

SEQ ID NO: 766561 - protein, 222 aa, Homo sapiens
MVPGKGPSFPEPLREEQDLERLRDPEVVASELGYVFQAITLTRQRLAGRVPLIGFAGAPWTLMTYMVEGGGSSTMAQAKRWLYQRPQASHQLLRILTDALVPYLVGQVVAGAQIIFAKDGHFALEELAQAGYEVVGLDWTVAPKKARECVGKTVTLQGNLDPCALYASEEEIGQLVKQMLDDFGPHRYIANLGHGLYPDMDPEHVGAFVDAVHKHSRLLRQN

SEQ ID NO: 766562 - protein, 157 aa, Homo sapiens
  misc_feature (4)..(4): Xaa can be any naturally occurring amino acid
LTPXCKHSLGHTCYSPRGSSYRQLTMEANGLGPQGFPELKNDTFLRAAWGEETDYTPVWCMRQAGRYLPEFRETRAAQDFFSTCRSPEACCELTLQVRGPQKRERFMPSVCHLATCLLFPTATASLPSGCCHHFLRHPCCTPGTHSNLILEYNPRTP

SEQ ID NO: 766563 - protein, 198 aa, Homo sapiens
  misc_feature (4)..(4): Xaa can be any naturally occurring amino acid
LTPXCKHSLGHTCYSPRGSSYRQLTMEANGLGPQGFPELKNDTFLRAAWGEETDYTPVWCMRQAGRYLPEFRETRAAQDFFSTCRSPEACCELTLQPLRRFPLDAAIIFSDILVVPQALGMEVTMVPGKGPSFPEPLREEQDLERLRDPEVVASELGYVFQAITLTRQRLAGRVPLIGFAGAPGDIAGQPGPLCLVCI

SEQ ID NO: 766564 - protein, 190 aa, Homo sapiens
  misc_feature (4)..(4): Xaa can be any naturally occurring amino acid
LTPXCKHSLGHTCYSPRGSSYRQLTMEANGLGPQGFPELKNDTFLRAAWGEETDYTPVWCMRQAGRYLPEFRETRAAQDFFSTCRSPEACCELTLQPLRRFPLDAAIIFSDILVVPQALGMEVTMVPGKGPSFPEPLREEQDLERLRDPEVVASELGYVFQAITLTRQRLAGRVPLIGFAGAPWTLMTYM

SEQ ID NO: 766565 - protein, 81 aa, Homo sapiens
  misc_feature (4)..(4): Xaa can be any naturally occurring amino acid
LTPXCKHSLGHTCYSPRGSSYRQLTMEANGLGPQGFPELKNDTFLRAAWGEETDYTPVWCMRQAGRYLPGAPVMWDRWALS

SEQ ID NO: 766566 - protein, 555 aa, Homo sapiens
MAARLLLLGILLLLLPLPVPAPCHTAARSECKRSHKFVPGAWLAGEGVDVTSLRRSGSFPVDTQRFLRPDGTCTLCENALQEGTLQRLPLALTNWRAQGSGCQRHVTRAKVSSTEAVARDAARSIRNDWKVGLDVTPKPTSNVHVSVAGSHSQAANFAAQKTHQDQYSFSTDTVECRFYSFHVVHTPPLHPDFKRALGDLPHHFNASTQPAYLRLISNYGTHFIRAVELGGRISALTALRTCELALEGLTDNEVEDCLTVEAQVNIGIHGSISAEAKACEEKKKKHKMTASFHQTYRERHSEVVGGHHTSINDLLFGIQAGPEQYSAWVNSLPGSPGLVDYTLEPLHVLLDSQDPRREALRRALSQYLTDRARWRDCSRPCPPGRQKSPRDPCQCVCHGSAVTTQDCCPRQRGLAQLEVTFIQAWGLWGDWFTATDAYVKLFFGGQELRTSTVWDNNNPIWSVRLDFGDVLLATGGPLRLQVWDQDSGRDDDLLGTCDQAPKSGSHEVRCNLNHGHLKFRYHARCLPHLGGGTCLDYVPQMLLGEPPGNRSGAVW

SEQ ID NO: 766567 - protein, 270 aa, Homo sapiens
RLQPNPGPSSTMWLLLTLSFLLASTAAQDGDKLLEGDECAPHSQPWQVALYERGRFNCGASLISPHWVLSAAHCQSRFMRVRLGEHNLRKRDGPEQLRTTSRVIPHPRYEARSHRNDIMLLRLVQPARLNPQVRPAVLPTRCPHPGEACVVSGWGLVSHNEPGTAGSPRSQASPVSLPDTLHCANISIISDTSCDKSYPGRLTNTMVCAGAEGRGAESCEGDSGGPLVCGGILQGIVSWGDVPCDNTTKPGVYTKVCHYLEWIRETMKRN

SEQ ID NO: 766568 - protein, 179 aa, Homo sapiens
RLQPNPGPSSTMWLLLTLSFLLASTAAQDGDKLLEGDECAPHSQPWQVALYERGRFNCGASLISPHWVLSAAHCQSRFMRVRLGEHNLRKRDGPEQLRTTSRVIPHPRYEARSHRNDIMLLRLVQPARLNPQVRPAVLPTRCPHPGEACVVSGWGLVFPSESPRYVALCQHQHYLGHIL

SEQ ID NO: 766569 - protein, 173 aa, Homo sapiens
RLQPNPGPSSTMWLLLTLSFLLASTAAQDGDKLLEGDECAPHSQPWQVALYERGRFNCGASLISPHWVLSAAHCQSRFMRVRLGEHNLRKRDGPEQLRTTSRVIPHPRYEARSHRNDIMLLRLVQPARLNPQVRPAVLPTRCPHPGEACVVSGWGLVSHNEPGTAGSPRSQGA

SEQ ID NO: 766570 - protein, 180 aa, Homo sapiens
MFKNEYQGGAFVEIFSAQGKNPGAKWKILGSPSVIWKEFDKEVKSFVFVLEGSSQTNKIQLPKENKQSLGLIQRFLVLQIYVPLGQDFSTELLITDLGNIKRRLYLSTVHKELSSTPLHAKIPLFMIKRKIWCNLCIDLVAFTSEIFKGAVFQSLDGIVVSANCKLRKIFTFKSKAHRHS

SEQ ID NO: 766571 - protein, 166 aa, Homo sapiens [sequence omitted]

SEQ ID NO: 766572 - protein, 162 aa, Homo sapiens
LHRAPARDHGSEVARHLLFQSHMATKTTSMSSQGSDDEQRKRENIRSLTVSGHVGFENLPDQLVNRSIQQGFCFNILCGGNWNGKSTLIDTLFNTNLEDYESSHFCPNVKLKVQTYELQESNVRLKLTIVNTVGFGDQINKEESYQPIVDYIDAQFEACLQE

SEQ ID NO: 766573 - protein, 184 aa, Homo sapiens
MGAGWGGMEACPAGGAPRTRSCHSCPGLCGGLWPRTARVCLGRGEARRRPPLPVGPRPPGGRLPDGVPPASQLQARVPGQRARLADYCAGAMFVQQLLSRGYGFDERAFGGVIFQKKAADTAVGWALGYMLNLTNLIPADPPGLRKGTDFSSWVVLLLLFASALLAALVLLLRQVHSAKLPSTI

SEQ ID NO: 766574 - protein, 481 aa, Homo sapiens
IVLPRARPPMAGKVRSLLPPLLLAAAGLAGLLLLCVPTRDVREPPALKYGIVLDAGSSHTSMFIYKWPADKENDTGIVGQHSSCDVPGGGISSYADNPSGASQSLVGCLEQALQDVPKERHAGTPLYLGATAGMRLLNLTNPEASTSVLMAVTHTLTQYPFDFRGARILSGQEEGVFGWVTANYLLENFIKYGWVGRWFRPRKGTLGAMDLGGASTQITFETTSPAEDRASEVQLHLYGQHYRVYTHSFLCYGRDQVLQRLLASALQTHGFHPCWPRGFSTQVLLGDVYQSPCTMAQRPQNFNSSARVSLSGSSDPHLCRDLVSGLFSFSSCPFSRCSFNGVFQPPVAGNFVAFSAFFYTVDFLRTSMGLPVATLQQLEAAAVNVCNQTWAQQLLSRGYGFDERAFGGVIFQKKAADTAVGWALGYMLNLTNLIPADPPGLRKGTDFSSWVVLLLLFASALLAALVLLLRQVHSAKLPSTI

SEQ ID NO: 766575 - protein, 478 aa, Homo sapiens
IVLPRARPPMAGKVRSLLPPLLLAAAGLAGLLLLCVPTRDVREPPALKYGIVLDAGSSHTSMFIYKWPADKENDTGIVGQHSSCDVPGGGISSYADNPSGASQSLVGCLEQALQDVPKERHAGTPLYLGATAGMRLLNLTNPEASTSVLMAVTHTLTQYPFDFRGARILSGQEEGVFGWVTANYLLENFIKITFETTSPAEDRASEVQLHLYGQHYRVYTHSFLCYGRDQVLQRLLASALQTHGFHPCWPRGFSTQVLLGDVYQSPCTMAQRPQNFNSSARVSLSGSSDPHLCRDLVSGLFSFSSCPFSRCSFNGVFQPPVAGNFVAFSAFFYTVDFLRTSMGLPVATLQQLEAAAVNVCNQTWAQLQARVPGQRARLADYCAGAMFVQQLLSRGYGFDERAFGGVIFQKKAADTAVGWALGYMLNLTNLIPADPPGLRKGTDFSSWVVLLLLFASALLAALVLLLRQVHSAKLPSTI

SEQ ID NO: 766576 - protein, 504 aa, Homo sapiens
IVLPRARPPMAGKVRSLLPPLLLAAAGLAGLLLLCVPTRDVREPPALKYGIVLDAGSSHTSMFIYKWPADKENDTGIVGQHSSCDVPGGGISSYADNPSGASQSLVGCLEQALQDVPKERHAGTPLYLGATAGMRLLNLTNPEASTSVLMAVTHTLTQYPFDFRGARILSGQEEGVFGWVTANYLLENFIKYGWVGRWFRPRKGTLGAMDLGGASTQITFETTSPAEDRASEVQLHLYGQHYRVYTHSFLCYGRDQVLQRLLASALQTHGFHPCWPRGFSTQVLLGDVYQSPCTMAQRPQNFNSSARVSLSGSSDPHLCRDLVSGLFSFSSCPFSRCSFNGVFQPPVAGNFVAFSAFFYTVDFLRTSMGLPVATLQQLEAAAVNVCNQTWAQLQARVPGQRARLADYCAGAMFVQQLLSRGYGFDERAFGGVIFQKKAADTAVGWALGYMLNLTNLIPADPPGLRKGTDFSSWVVLLLLFASALLAALVLLLRQVHSAKLPSTI

SEQ ID NO: 766577 - protein, 125 aa, Homo sapiens [sequence omitted]

SEQ ID NO: 766578 - protein, 336 aa, Homo sapiens
VPVSSNFVSQNITPVNESVVSSARAVNVLSVTGANLSLGSFPVTSASASAGAQPPVLVSGNDTSSRIMPILSNRLCSSSLGNTVAISTVKTGHLASSVLISTTQPVVSPKCLTSALQIPVTVALPTPATTSPKIINTVPHSAAVPGATRSVSISKRQSRTSLQFHSPGISTTVPTNVNTNKPQTELSSLSTSPGKITNTSNFASLPNQQALVKTPSYSSAPGGTTIHTASAPSNVTSLVGSQFSEPCIQQKIVINTSTPLAPGTQIMINGTRFIVPPQGLGAGSHVLLISTNPKYGAPLVLNSGQGIQSTPIDNSAQKITLASNNSLSGPTSTTSS

SEQ ID NO: 766579 - protein, 215 aa, Homo sapiens
VPVSSNFVSQNITPVNESVVSSARAVNVLSVTGANLSLGSFPVTSASASAGAQPPVLVSGNDTSSRIMPILSNRLCSSSLGNTVAISTVKTGHLASSVLISTTQPVVSPKCLTSALQIPVTVALPTPATTSPKIINTVPHSAAVPGATRSVSISKRQSRTSLQFHSPGISTTVPTNVNTNKPQTELSSLSTSPVSFLLSVPSCHPTFLSIFSHGK

SEQ ID NO: 766580 - protein, 105 aa, Homo sapiens
YFLQYWSLVQIHQLLLLPTRCQHTRGLCSVGVSAPRLDLPLMVCICIYALERHWGTGDMRHETAQVSWQRGKESRVVSLTFSLSACQASIPTPHQPSSLSQDLFL

SEQ ID NO: 766581 - protein, 107 aa, Homo sapiens
QTQSVETTRVSQINTLNTLTPVTTSTVLSSPSGFNPSGTVSQETFPSGETTISSPSSVSNTFLVTSKVFRMPISRDSTLGNTEETSLSVSGSLSQGTTWENLKFKLL

SEQ ID NO: 766582 - protein, 215 aa, Homo sapiens; identical to SEQ ID NO: 766579

SEQ ID NO: 766583 - protein, 57 aa, Homo sapiens
ELTESVMDVVRKEAESCDCLQGFQLTHSLGGGTGSGMGTLLISKIREEYPDRIINTF

SEQ ID NO: 766584 - protein, 149 aa, Homo sapiens
GAIVAPAGCAGPRTLREARVRGHEFEANLVHMGRKKKTQQQHKTTLVGGGRGPRGRKVSSTQSPLGPGAQEGNGAQWATQVCQAGDTGDRRTGAWTLTQKKGARGKPGLFQGNTPRGGAKRGTERGIYNPQGGPDASAIIKIKPRRRGV

SEQ ID NO: 766585 - protein, 76 aa, Homo sapiens
  misc_feature (73)..(73): Xaa can be any naturally occurring amino acid
  misc_feature (75)..(76): Xaa can be any naturally occurring amino acid
GAIVAPAGCAGPRTLREARVRGHEFEANLVHMGRKKKKKNLVPNSAEQRGYGLQGSITNNYSGTQQVQTTHKXQXX

SEQ ID NO: 766586 - protein, 99 aa, Homo sapiens
  misc_feature (44)..(44): Xaa can be any naturally occurring amino acid
MSRVWGGGGPSVGVSVDIGAITRGSKRENPGQGAKAAGGSLSPXLKKRAGGEKPGGGSCGKNFPGVGVHEGGKLRGDLFTTGGFKGEGLRFKIRARVGG

SEQ ID NO: 766587 - protein, 219 aa, Homo sapiens
MKGHGELQGHERRMSSKQATSPFACAADGEDAMTQDLTSREKEEGSDQHVASHLPLHPIMHNKPHSEELPTLVSTIQQDADWDSVLSSQQRMESENNKLCSLYSFRNTSTSPHKPDEGSRDREIMTSVTFGTPERRKGSLADVVDTLKQKKLEEMTRTEQEDSSCMRTTTFNKHRKAPHWTRLTYPGATSRQTTSEDTLSSPGPTTRHRHAPPTNDISA

SEQ ID NO: 766588 - protein, 803 aa, Homo sapiens
MTQDLTSREKEEGSDQHVASHLPLHPIMHNKPHSEELPTLVSTIQQDADWDSVLSSQQRMESENNKLCSLYSFRNTSTSPHKPDEGSRDREIMTSVTFGTPERRKGSLADVVDTLKQKKLEEMTRTEQEDSSCMEKLLSKDWKEKMERLNTSELLGEIKGTPESLAEKERQLSTMITQLISLREQLLAAHDEQKKLAASQIEKQRQQMDLARQQQEQIARQQQQLLQQQHKINLLQQQIQVQGHMPPLMIPIFPHDQRTLAAAAAAQQGFLFPPGITYKPGDNYPVQFIPSTMAAAAASGLSPLQLQKGHASHPQINQRLKGLSDRFGRNLDTFEHGGGHSYNHKQIEQLYAAQLASMQVSPGAKMPSTPQPPNTAGTVSPTGIKNEKRGTSPVTQVKDEAAAQPLNLSSRPKTAEPVKSPTSPTQNLFPASKTSPVNLPNKSSIPSPIGGSLGRGSSLGKWKSQHQEETYELDILSSLNSPALFGDQDTVMKAIQEARKMREQIQREQQQQQPHGVDGKLSSINNMGLNSCRNEKERTRFENLGPQLTGKSNEDGKLGPGVIDLTRPEDAEGGATVAEARVYRDARGRASSEPHIKRPMNAFMVWAKDERRKILQAFPDMHNSNISKILGSRWKSMSNQEKQPYYEEQARLSKIHLEKYPNYKYKPRPKRTCIVDGKKLRIGEYKQLMRSRRQEMRQFFTVGQQPQIPITTGTGVVYPGAITMATTTPSPQMTSDCSSTSASPEPSLPVIQSTYGMKTDGGSLAGNEMINGEDEMEMYDDYEDDPKSDYSSENEAPEAVSAN

SEQ ID NO: 766589 - protein, 803 aa, Homo sapiens; identical to SEQ ID NO: 766588

SEQ ID NO: 766590 - protein, 804 aa, Homo sapiens
MGRMSSKQATSPFACAADGEDAMTQDLTSREKEEGSDQHVASHLPLHPIMHNKPHSEELPTLVSTIQQDADWDSVLSSQQRMESENNKLCSLYSFRNTSTSPHKPDEGSRDREIMTSVTFGTPERRKGSLADVVDTLKQKKLEEMTRTEQEDSSCMEKLLSKDWKEKMERLNTSELLGEIKGTPESLAEKERQLSTMITQLISLREQLLAAHDEQKKLAASQIEKQRQQMDLARQQQEQIARQQQQLLQQQHKINLLQQQIQVQGHMPPLMIPIFPHDQRTLAAAAAAQQGFLFPPGITYKPGDNYPVQFIPSTMAAAAASGLSPLQLQQLYAAQLASMQVSPGAKMPSTPQPPNTAGTVSPTGIKNEKRGTSPVTQVKDEAAAQPLNLSSRPKTAEPVKSPTSPTQNLFPASKTSPVNLPNKSSIPSPIGGSLGRGSSLGKWKSQHQEETYELDILSSLNSPALFGDQDTVMKAIQEARKMREQIQREQQQQQPHGVDGKLSSINNMGLNSCRNEKERTRFENLGPQLTGKSNEDGKLGPGVIDLTRPEDAEGSKAMNGSAAKLQQYYCWPTGGATVAEARVYRDARGRASSEPHIKRPMNAFMVWAKDERRKILQAFPDMHNSNISKILGSRWKSMSNQEKQPYYEEQARLSKIHLEKYPNYKYKPRPKRTCIVDGKKLRIGEYKQLMRSRRQEMRQFFTVGQQPQIPITTGTGVVYPGAITMATTTPSPQMTSDCSSTSASPEPSLPVIQSTYGMKTDGGSLAGNEMINGEDEMEMYDDYEDDPKSDYSSENEAPEAVSAN

SEQ ID NO: 766591 - protein, 808 aa, Homo sapiens
MSSKQATSPFACAADGEDAMTQDLTSREKEEGSDQHVASHLPLHPIMHNKPHSEELPTLVSTIQQDADWDSVLSSQQRMESENNKLCSLYSFRNTSTSPHKPDEGSRDREIMTSVTFGTPERRKGSLADVVDTLKQKKLEEMTRTEQEDSSCMEKLLSKDWKEKMERLNTSELLGEIKGTPESLAEKERQLSTMITQLISLREQLLAAHDEQKKLAASQIEKQRQQMDLARQQQEQIARQQQQLLQQQHKINLLQQQIQVQGHMPPLMIPIFPHDQRTLAAAAAAQQGFLFPPGITYKPGDNYPVQFIPSTMAAAAASGLSPLQLQKGHASHPQINQRLKGLSDRFGRNLDTFEHGGGHSYNHKQIEQLYAAQLASMQVSPGAKMPSTPQPPNTAGTVSPTGIKNEKRGTSPVTQVKDEAAAQPLNLSSRPKTAEPVKSPTSPTQNLFPASKTSPVNLPNKSSIPSPIGGSLGRGSSLDILSSLNSPALFGDQDTVMKAIQEARKMREQIQREQQQQQPHGVDGKLSSINNMGLNSCRNEKERTRFENLGPQLTGKSNEDGKLGPGVIDLTRPEDAEGGATVAEARVYRDARGRASSEPHIKRPMNAFMVWAKDERRKILQAFPDMHNSNISKILGSRWKSMSNQEKQPYYEEQARLSKIHLEKYPNYKYKPRPKRTCIVDGKKLRIGEYKQLMRSRRQEMRQFFTVGQQPQIPITTGTGVVYPGAITMATTTPSPQMTSDCSSTSASPEPSLPVIQSTYGMKTDGGSLAGNEMINGEDEMEMYDDYEDDPKSDYSSENEAPEAVSAN

SEQ ID NO: 766592 - protein, 75 aa, Homo sapiens [sequence omitted]

SEQ ID NO: 766593 - protein, 219 aa, Homo sapiens
MASVTDGKTGVKDASDQNFDYMFKLLIIGNSSVGKTSFLFRYADDTFTPAFVSTVGIDFKVKTVYRHEKRVKLQIWDTAGQERYRTITTAYYRGAMGFILMYDITNEESFNAVQDWATQIKTYSWDNAQVILVGNKCDMEEERVVPTEKGQLLAEQLGFDFFEASAKENISVRQAFERLVDAICDKMSDSLDTDPSMLGSSKNTRLSDTPPLLQQNCSC

SEQ ID NO: 766594 - protein, 219 aa, Homo sapiens; identical to SEQ ID NO: 766593

SEQ ID NO: 766595 - protein, 110 aa, Homo sapiens
SLVYANKGSMTQRRSVKRAYKNGGDAGAWSAERSGLVVRWAVLVFRSSTAALPRAAEAARRSEKWPKTSALGERKWPEPSRLLVSPPVGKPPANSWPRKPPGKALPLPAG

SEQ ID NO: 766596 - protein, 84 aa, Homo sapiens
AEVILRIPVRRRLSKKSAPSTGGVKKPHRYRPGTVALREIRRYQKSTELLIRKLPFQRLVREIAQDFKTDLRFQSAAIRCAAGG

SEQ ID NO: 766597 - protein, 40 aa, Homo sapiens
MPRAGFYNTWDLENPWGYPTLNPFDLQRVPTLMGNGNLTV

SEQ ID NO: 766598 - protein, 114 aa, Homo sapiens
MARTKQTARKSTGGKAPRKQLATKAARKSAPSTGGVKKPHRYRPGTVALREIRRYQKSTELLIRKLPFQRLVREIAQDFKTDLRFQSAAIRCAAGKTKAWSRGRAGRFPLPEWD

SEQ ID NO: 766599 - protein, 107 aa, Homo sapiens
MARTKQTARKSTGGKAPRKQLATKAARKSAPSTGGVKKPHRYRPGTVALREIRRYQKSTELLIRKLPFQRLVREIAQDFKTDLRFPLYRSVPGGLFEDTRDTSCPKT

SEQ ID NO: 766600 - protein, 92 aa, Homo sapiens
KLLTMYGTCAGLCVPATAGAPAQHGFQLATSGRWGRQAGPGKASCCQEAATGKAAACPCLLQGNSGLRSQRPGQRGVSIPKPPLLNPAQFCK

SEQ ID NO: 766601 - protein, 2205 aa, Homo sapiens
PTSAPITTVVTTGCEPQCAWSEWLDYSYPMPGPSGGDFDTYSNIRAAGGAVCEQPLGLECRAQAQPGVPLRELGQVVECSLDFGLVCRNREQVGKFKMCFNYEIRVFCCNYGHCPSTPATSSTATPSSTPGTTWILTKLTTTATTTESTGSTATPSSTPGTTWILTEPSTTATVTVPTGSTATASSTQATAGTPHVSTTATTPTVTSSKATPFSSPGTATALPALRSTATTPTATSFTAIPSSSLGTTWTRLSQTTTPTATMSTATPSSTPETAHTSTVLTTTATTTRATGSVATPSSTPGTAHTTKVPTTTTTGFTVTPSSSPGTARTPPVWISTTTTPTTSGSTVTPSSIPGTTHTPTVLTTTTTTVATGSMATPSSSTQTSGTPPSLITTATTITATGSTTNPSSTPGTTPIPPVLTTTATTPAATSSTVTPSSALGTTHTPPVPNTTATTHGRSLSPSSPHTVRTAWTSATSGTLGTTHITEPSTGTSHTPAATTGTTQHSTPALSSPHPSSRTTESPPSPGTTTPGHTTATSRTTATATPSKTRTSTLLPSSPTSAPITTVVTTGCEPQCAWSEWLDYSYPMPGPSGGDFDTYSNIRAAGGAVCEQPLGLECRAQAQPGVPLGELGQVVECSLDFGLVCRNREQVGKFKMCFNYEIRVFCCNYGHCPSTPATSSTAMPSSTPGTTWILTELTTTATTTASTGSTATPSSTPGTAPPPKVLTSPATTPTATSSKATSSSSPRTATTLPVLTSTATKSTATSVTPIPSSTLGTTGTLPEQTTTPVATMSTIHPSSTPETTHTSTVLTTKATTTRATSSTSTPSSTPGTTWILTELTTAATTTAATGPTATPSSTPGTTWILTELTTTATTTASTGSTATLSSTPGTTWILTEPSTTATVTVPTGSTATASSTQATAGTPHVSTTATTPTVTSSKATPSSSPGTATALPALRSTATTPTATSFTAIPSSSLGTTWTRLSQTTTPTATMSTATPSSTPETVHTSTVLTATATTTGATGSVATPSSTPGTAHTTKVPTTTTTGFTATPSSSPGTALTPPVWISTTTTPTTTTPTTSGSTVTPSSIPGTTHTARVLTTTTTTVATGSMATPSSSTQTSGTPPSLTTTATTITATGSTTNPSSTPGTTPIPPVLTSTATTPAATSSKATSSSSPRTATTLPVLTSTATKSTATSFTPIPSSTLWTTWTVPAQTTTPMSTMSTIHTSSTPETTHTSTVLTTTATMTRATNSTATPSSTLGTTRILTELTTTATTTAATGSTATLSSTPGTTWILTEPSTIATVMVPTGSTATASSTLGTAHTPKVVTTMATMPTATASTVPSSSTVGTTRTPAVLPSSLPTFSVSTVSSSVLTTLRPTGFPSSHFSTPCFCRAFGQFFSPGEVIYNKTDRAGCHFYAVCNQHCDIDRFQGACPTSPPPVSSAPLSSPSPAPGCDNAIPLRQVNETWTLENCTVARCVGDNRVVLLDPKPVANVTCVNKHLPIKVSDPSQPCDFHYECECICSMWGGSHYSTFDGTSYTFRGNCTYVLMREIHARFGNLSLYLDNHYCTASATAAAARCPRALSIHYKSMDIVLTVTMVHGKEEGLILFDQIPVSSGFSKNGVLVSVLGTTTMRVDIPALGVSVTFNGQVFQARLPYSLFHNNTEGQCGTCTNNQRDDCLQRDGTTAASCKDMAKTWLVPDSRKDGCWAPTGTPPTASPAAPVSSTPTPTPCPPQLLCDLMLSQVFAECHTLLPPGPFFNACISDHCRGRLEVPCQSLEAYAELCRARGVCSDWRGATGGLCDLTCPPTKVYKPCGPIQPATCNSRNQSPQLEGMAEGCFCPEDQILFNAHMGICVQACPCVGPDGFPKFPGERWVSNCQSCVCDEGSVSVQCKPLPCDAQGQPPPCNRPGFVTVTRPRAENPCCPETVCVCNTTTCPQSLPVCPPGQESICTQEEGDCCPTFRCRPQLCSYNGTFYGVGATFPGALPCHMCTCLSGDTQDPTVQCQEDACNNTTCPQGFEYKRVAGQCCGECVQTACLTPDGQPVQLNETWVNSHVDNCTVYLCEAEGGVHLLTPQPASCPDVSSCRGSLRKTGCCYSCEEDSCQVRINTTILWHQGCETEVNITFCEGSCPGASKYSAEAQAMQHQCTCCQERRVHEETVPLHCPNGSAILHTYTHVDECGCTPFCVPAPMAPPHTRGFPAQEATAV

SEQ ID NO: 766602 - protein, 1440 aa, Homo sapiens
LRAVLEDPSTVRLHCPEQTTTPVATMSTIHPSSTPETTHTSTVLTTKATTTRATSSTSTPSSTPGTTWILTELTTAATTTAATGPTATPSSTPGTTWILTELTTTATTTASTGSTATLSSTPGTTWILTEPSTTATVTVPTGSTATASSTQATAGTPHVSTTATTPTVTSSKATPSSSPGTATALPALRSTATTPTATSFTAIPSSSLGTTWTRLSQTTTPTATMSTATPSSTPETVHTSTVLTATATTTGATGSVATPSSTPGTAHTTKVPTTTTTGFTATPSSSPGTALTPPVWISTTTTPTTTTPTTSGSTVTPSSIPGTTHTARVLTTTTTTVATGSMATPSSSTQTSGTPPSLTTTATTITATGSTTNPSSTPGTTPIPPVLTSTATTPAATSSKATSSSSPRTATTLPVLTSTATKSTATSFTPIPSSTLWTTWTVPAQTTTPMSTMSTIHTSSTPETTHTSTVLTTTATMTRATNSTATPSSTLGTTRILTELTTTATTTAATGSTATLSSTPGTTWILTEPSTIATVMVPTGSTATASSTLGTAHTPKVVTTMATMPTATASTVPSSSTVGTTRTPAVLPSSLPTFSVSTVSSSVLTTLRPTGFPSSHFSTPCFCRAFGQFFSPGEVIYNKTDRAGCHFYAVCNQHCDIDRFQGACPTSPPPVSSAPLSSPSPAPGCDNAIPLRQVNETWTLENCTVARCVGDNRVVLLDPKPVANVTCVNKHLPIKVSDPSQPCDFHYECECICSMWGGSHYSTFDGTSYTFRGNCTYVLMREIHARFGNLSLYLDNHYCTASATAAAARCPRALSIHYKSMDIVLTVTMVHGKEEGLILFDQIPVSSGFSKNGVLVSVLGTTTMRVDIPALGVSVTFNGQVFQARLPYSLFHNNTEGQCGTCTNNQRDDCLQRDGTTAASCKDMAKTWLVPDSRKDGCWAPTGTPPTASPAAPVSSTPTPTPCPPQLLCDLMLSQVFAECHTLLPPGPFFNACISDHCRGRLEVPCQSLEAYAELCRARGVCSDWRGATGGLCDLTCPPTKVYKPCGPIQPATCNSRNQSPQLEGMAEGCFCPEDQILFNAHMGICVQACPCVGPDGFPKFPGERWVSNCQSCVCDEGSVSVQCKPLPCDAQGQPPPCNRPGFVTVTRPRAENPCCPETVCVCNTTTCPQSLPVCPPGQESICTQEEGDCCPTFRCRPQLCSYNGTFYGVGATFPGALPCHMCTCLSGDTQDPTVQCQEDACNNTTCPQGFEYKRVAGQCCGECVQTACLTPDGQPVQLNETWVNSHVDNCTVYLCEAEGGVHLLTPQPASCPDVSSCRGSLRKTGCCYSCEEDSCQVRINTTILWHQGCETEVNITFCEGSCPGASKYSAEAQAMQHQCTCCQERRVHEETVPLHCPNGSAILHTYTHVDECGCTPFCVPAPMAPPHTRGFPAQEATAV

SEQ ID NO: 766603 - protein, 967 aa, Homo sapiens
NRARYPAIYSMATPSSTLGTTRILTELTTTATTTAATGSTATLSSTPGTTWILTEPSTIATVMVPTGSTATASSTLGTAHTPKVVTTMATMPTATASTVPSSSTVGTTRTPAVLPSSLPTFSVSTVSSSVLTTLRPTGFPSSHFSTPCFCRAFGQFFSPGEVIYNKTDRAGCHFYAVCNQHCDIDRFQGACPTSPPPVSSAPLSSPSPAPGCDNAIPLRQVNETWTLENCTVARCVGDNRVVLLDPKPVANVTCVNKHLPIKVSDPSQPCDFHYECECICSMWGGSHYSTFDGTSYTFRGNCTYVLMREIHARFGNLSLYLDNHYCTASATAAAARCPRALSIHYKSMDIVLTVTMVHGKEEGLILFDQIPVSSGFSKNGVLVSVLGTTTMRVDIPALGVSVTFNGQVFQARLPYSLFHNNTEGQCGTCTNNQRDDCLQRDGTTAASCKDMAKTWLVPDSRKDGCWAPTGTPPTASPAAPVSSTPTPTPCPPQLLCDLMLSQVFAECHTLLPPGPFFNACISDHCRGRLEVPCQSLEAYAELCRARGVCSDWRGATGGLCDLTCPPTKVYKPCGPIQPATCNSRNQSPQLEGMAEGCFCPEDQILFNAHMGICVQACPCVGPDGFPKFPGERWVSNCQSCVCDEGSVSVQCKPLPCDAQGQPPPCNRPGFVTVTRPRAENPCCPETVCVCNTTTCPQSLPVCPPGQESICTQEEGDCCPTFRCRPQLCSYNGTFYGVGATFPGALPCHMCTCLSGDTQDPTVQCQEDACNNTTCPQGFEYKRVAGQCCGECVQTACLTPDGQPVQLNETWVNSHVDNCTVYLCEAEGGVHLLTPQPASCPDVSSCRGSLRKTGCCYSCEEDSCQVRINTTILWHQGCETEVNITFCEGSCPGASKYSAEAQAMQHQCTCCQERRVHEETVPLHCPNGSAILHTYTHVDECGCTPFCVPAPMAPPHTRGFPAQEATAV

SEQ ID NO: 766604 - protein, 1145 aa, Homo sapiens
PTSAPITTVVTTGCEPQCAWSEWLDYSYPMPGPSGGDFDTYSNIRAAGGAVCEQPLGLECRAQAQPGVPLRELGQVVECSLDFGLVCRNREQVGKFKMCFNYEIRVFCCNYGHCPSTPATSSTATPSSTPGTTWILTKLTTTATTTESTGSTATPSSTPGTTWILTEPSTTATVTVPTGSTATASSTQATAGTPHVSTTATTPTVTSSKATPFSSPGTATALPALRSTATTPTATSFTAIPSSSLGTTWTRLSQTTTPTATMSTATPSSTPETAHTSTVLTTTATTTRATGSVATPSSTPGTAHTTKVPTTTTTGFTVTPSSSPGTARTPPVWISTTTTPTTSGSTVTPSSIPGTTHTPTVLTTTTTTVATGSMATPSSSTQTSGTPPSLITTATTITATGSTTNPSSTPGTTPIPPVLTTTATTPAATSSTVTPSSALGTTHTPPVPNTTATTHGRSLSPSSPHTVRTAWTSATSGTLGTTHITEPSTGTSHTPAATTGTTQHSTPALSSPHPSSRTTESPPSPGTTTPGHTTATSRTTATATPSKTRTSTLLPSSPTSAPITTVVTTGCEPQCAWSEWLDYSYPMPGPSGGDFDTYSNIRAAGGAVCEQPLGLECRAQAQPGVPLGELGQVVECSLDFGLVCRNREQVGKFKMCFNYEIRVFCCNYGHCPSTPATSSTAMPSSTPGTTWILTELTTTATTTASTGSTATPSSTPGTAPPPKVLTSPATTPTATSSKATSSSSPRTATTLPVLTSTATKSTATSVTPIPSSTLGTTGTLPEQTTTPVATMSTIHPSSTPETTHTSTVLTTKATTTRATSSTSTPSSTPGTTWILTELTTAATTTAATGPTATPSSTPGTTWILTELTTTATTTASTGSTATLSSTPGTTWILTEPSTTATVTVPTGSTATASSTQATAGTPHVSTTATTPTVTSSKATPSSSPGTATALPALRSTATTPTATSFTAIPSSSLGTTWTRLSQTTTPTATMSTATPSSTPETVHTSTVLTATATTTGATGSVATPSSTPGTAHTTKVPTTTTTGFTATPSSSPGTALTPPVWISTTTTPTTTTPTTSGSTVTPSSIPGTTHTARVLTTTTTTVATGSMATPSSSTQTSGTPPSLTTTATTITATAYFYTNPVIVGC

SEQ ID NO: 766605 - protein, 133 aa, Homo sapiens
PFSGLKKGVIVNPVFVVVASLIVYPVPGVENGVAVDPVNAVVVAVVVSSVRIQVVPGVKKGMAVELVPGHHTHSHQFQSHFLLQSKDCNHPSSADKHSHQIHSYQRYTHPLLHPWDHRDPSGFHHYTIFKAFW

SEQ ID NO: 766606 - protein, 1506 aa, Homo sapiens
PTSAPITTVVTTGCEPQCAWSEWLDYSYPMPGPSGGDFDTYSNIRAAGGAVCEQPLGLECRAQAQPGVPLRELGQVVECSLDFGLVCRNREQVGKFKMCFNYEIRVFCCNYGHCPSTPATSSTATPSSTPGTTWILTKLTTTATTTESTGSTATPSSTPGTTWILTELTTTATTTASTGSTATLSSTPGTTWILTEPSTTATVTVPTGSTATASSTQATAGTPHVSTTATTPTVTSSKATPSSSPGTATALPALRSTATTPTATSFTAIPSSSLGTTWTRLSQTTTPTATMSTATPSSTPETVHTSTVLTATATTTGATGSVATPSSTPGTAHTTKVPTTTTTGFTATPSSSPGTALTPPVWISTTTTPTTTTPTTSGSTVTPSSIPGTTHTARVLTTTTTTVATGSMATPSSSTQTSGTPPSLTTTATTITATGSTTNPSSTPGTTPIPPVLTSTATTPAATSSKATSSSSPRTATTLPVLTSTATKSTATSFTPIPSSTLWTTWTVPAQTTTPMSTMSTIHTSSTPETTHTSTVLTTTATMTRATNSTATPSSTLGTTRILTELTTTATTTAATGSTATLSSTPGTTWILTEPSTIATVMVPTGSTATASSTLGTAHTPKVVTTMATMPTATASTVPSSSTVGTTRTPAVLPSSLPTFSVSTVSSSVLTTLRPTGFPSSHFSTPCFCRAFGQFFSPGEVIYNKTDRAGCHFYAVCNQHCDIDRFQGACPTSPPPVSSAPLSSPSPAPGCDNAIPLRQVNETWTLENCTVARCVGDNRVVLLDPKPVANVTCVNKHLPIKVSDPSQPCDFHYECECICSMWGGSHYSTFDGTSYTFRGNCTYVLMREIHARFGNLSLYLDNHYCTASATAAAARCPRALSIHYKSMDIVLTVTMVHGKEEGLILFDQIPVSSGFSKNGVLVSVLGTTTMRVDIPALGVSVTFNGQVFQARLPYSLFHNNTEGQCGTCTNNQRDDCLQRDGTTAASCKDMAKTWLVPDSRKDGCWAPTGTPPTASPAAPVSSTPTPTPCPPQLLCDLMLSQVFAECHTLLPPGPFFNACISDHCRGRLEVPCQSLEAYAELCRARGVCSDWRGATGGLCDLTCPPTKVYKPCGPIQPATCNSRNQSPQLEGMAEGCFCPEDQILFNAHMGICVQACPCVGPDGFPKFPGERWVSNCQSCVCDEGSVSVQCKPLPCDAQGQPPPCNRPGFVTVTRPRAENPCCPETVCVCNTTTCPQSLPVCPPGQESICTQEEGDCCPTFRCRPQLCSYNGTFYGVGATFPGALPCHMCTCLSGDTQDPTVQCQEDACNNTTCPQGFEYKRVAGQCCGECVQTACLTPDGQPVQLNETWVNSHVDNCTVYLCEAEGGVHLLTPQPASCPDVSSCRGSLRKTGCCYSCEEDSCQVRINTTILWHQGCETEVNITFCEGSCPGASKYSAEAQAMQHQCTCCQERRVHEETVPLHCPNGSAILHTYTHVDECGCTPFCVPAPMAPPHTRGFPAQEATAV

SEQ ID NO: 766607 - protein, 1139 aa, Homo sapiens
FELRTRTECNGSTVTPSSIPGTTHTARVLTTTTTTVATGSMATPSSSTQTSGTPPSLTTTATTITATGSTTNPSSTPGTTPIPPVLTSTATTPAATSSKATSSSSPRTATTLPVLTSTATKSTATSFTPIPSSTLWTTWTVPAQTTTPMSTMSTIHTSSTPETTHTSTVLTTTATMTRATNSTATPSSTLGTTRILTELTTTATTTAATGSTATLSSTPGTTWILTEPSTIATVMVPTGSTATASSTLGTAHTPKVVTTMATMPTATASTVPSSSTVGTTRTPAVLPSSLPTFSVSTVSSSVLTTLRPTGFPSSHFSTPCFCRAFGQFFSPGEVIYNKTDRAGCHFYAVCNQHCDIDRFQGACPTSPPPVSSAPLSSPSPAPGCDNAIPLRQVNETWTLENCTVARCVGDNRVVLLDPKPVANVTCVNKHLPIKVSDPSQPCDFHYECECICSMWGGSHYSTFDGTSYTFRGNCTYVLMREIHARFGNLSLYLDNHYCTASATAAAARCPRALSIHYKSMDIVLTVTMVHGKEEGLILFDQIPVSSGFSKNGVLVSVLGTTTMRVDIPALGVSVTFNGQVFQARLPYSLFHNNTEGQCGTCTNNQRDDCLQRDGTTAASCKDMAKTWLVPDSRKDGCWAPTGTPPTASPAAPVSSTPTPTPCPPQLLCDLMLSQVFAECHTLLPPGPFFNACISDHCRGRLEVPCQSLEAYAELCRARGVCSDWRGATGGLCDLTCPPTKVYKPCGPIQPATCNSRNQSPQLEGMAEGCFCPEDQILFNAHMGICVQACPCVGPDGFPKFPGERWVSNCQSCVCDEGSVSVQCKPLPCDAQGQPPPCNRPGFVTVTRPRAENPCCPETVCVCNTTTCPQSLPVCPPGQESICTQEEGDCCPTFRCRPQLCSYNGTFYGVGATFPGALPCHMCTCLSGDTQDPTVQCQEDACNNTTCPQGFEYKRVAGQCCGECVQTACLTPDGQPVQLNETWVNSHVDNCTVYLCEAEGGVHLLTPQPASCPDVSSCRGSLRKTGCCYSCEEDSCQVRINTTILWHQGCETEVNITFCEGSCPGASKYSAEAQAMQHQCTCCQERRVHEETVPLHCPNGSAILHTYTHVDECGCTPFCVPAPMAPPHTRGFPAQEATAV

SEQ ID NO: 766608 - protein, 2051 aa, Homo sapiens
PTSAPITTVVTTGCEPQCAWSEWLDYSYPMPGPSGGDFDTYSNIRAAGGAVCEQPLGLECRAQAQPGVPLRELGQVVECSLDFGLVCRNREQVGKFKMCFNYEIRVFCCNYGHCPSTPATSSTATPSSTPGTTWILTKLTTTATTTESTGSTATPSSTPGTTWILTEPSTTATVTVPTGSTATASSTQATAGTPHVSTTATTPTVTSSKATPFSSPGTATALPALRSTATTPTATSFTAIPSSSLGTTWTRLSQTTTPTATMSTATPSSTPETAHTSTVLTTTATTTRATGSVATPSSTPGTAHTTKVPTTTTTGFTVTPSSSPGTARTPPVWISTTTTPTTSGSTVTPSSIPGTTHTPTVLTTTTTTVATGSMATPSSSTQTSGTPPSLITTATTITATGSTTNPSSTPGTTPIPPVLTTTATTPAATSSTVTPSSALGTTHTPPVPNTTATTHGRSLSPSSPHTVRTAWTSATSGTLGTTHITEPSTGTSHTPAATTGTTQHSTPALSSPHPSSRTTESPPSPGTTTPGHTTATSRTTATATPSKTRTSTLLPSSPTSAPITTVVTTGCEPQCAWSEWLDYSYPMPGPSGGDFDTYSNIRAAGGAVCEQPLGLECRAQAQPGVPLGELGQVVECSLDFGLVCRNREQVGKFKMCFNYEIRVFCCNYGHCPSTPATSSTAMPSSTPGTTWILTELTTTATTTASTGSTATPSSTPGTAPPPKVLTSPATTPTATSSKATSSSSPRTATTLPVLTSTATKSTATSVTPIPSSTLGTTGTLPEQTTTPVATMSTIHPSSTPETTHTSTVLTTKATTTRATSSTSTPSSTPGTTWILTELTTAATTTAATGPTATPSSTPGTTWILTELTTTATTTASTGSTATLSSTPGTTWILTEPSTTATVTVPTGSTATASSTQATAGTPHVSTTATTPTVTSSKATPSSSPGTATALPALRSTATTPTATSFTAIPSSSLGTTWTRLSQTTTPTATMSTATPSSTPETVHTSTVLTATATTTGATGSVATPSSTPGTAHTTKVPTTTTTGFTATPSSSPGTALTPPVWISTTTTPTTTTPTTSGSTVTPSSIPGTTHTARVLTTTTTTVATGSMATPSSSTQTSGTPPSLTTTATTITATGSTTNPSSTPGTTPIPPVLTSTATTPAATSSKATSSSSPRTATTLPVLTSTATKSTATSFTPIPSSTLWTTWTVPAQTTTPMSTMSTIHTSSTPETTHTSTVLTTTATMTRATNSTATPSSTLGTTRILTELTTTATTTAATGSTATLSSTPGTTWILTEPSTIATVMVPTGSTATASSTLGTAHTPKVVTTMATMPTATASTVPSSSTVGTTRTPAVLPSSLPTFSVSTVSSSVLTTLRPTGFPSSHFSTPCFCRAFGQFFSPGEVIYNKTDRAGCHFYAVCNQHCDIDRFQGACPTSPPPVSSAPLSSPSPAPGCDNAIPLRQVNETWTLENCTVARCVGDNRVVLLDPKPVANVTCVNKHLPIKVSDPSQPCDFHYECECICSMWGGSHYSTFDGTSYTFRGNCTYVLMREIHARFGNLSLYLDNHYCTASATAAAARCPRALSIHYKSMDIVLTVTMVHGKEEGLILFDQIPVSSGFSKNGVLVSVLGTTTMRVDIPALGVSVTFNGQVFQARLPYSLFHNNTEGQCGTCTNNQRDDCLQRDGTTAASCKDMAKTWLVPDSRKDGCWAPTGTPPTASPAAPVSSTPTPTPCPPQLLCDLMLSQVFAECHTLLPPGPFFNACISDHCRGRLEVPCQSLEAYAELCRARGVCSDWRGATGGLCDLTCPPTKVYKPCGPIQPATCNSRNQSPQLEGMAEGCFCPEDQILFNAHMGICVQACPCVGPDGFPKFPGERWVSNCQSCVCDEGSVSVQCKPLPCDAQGQPPPCNRPGFVTVTRPRAENPCCPETVCVCNTTTCPQSLPVCPPGQESICTQEEGDCCPTFRCRPQLCSYNGTFYGVGATFPGALPCHMCTCLSGDTQDPTVQCQEDACNNTTCPQGFEYKRVAGQCCGECVQTACLTPDGQPVQVTAEACGG

SEQ ID NO: 766609 - protein, 1919 aa, Homo sapiens
MPSDAKDSVNGDLLLNWTSLKNILSGLNASFPLHNNTGSSTVTTSKSIKDPRLMRREESMGEQSSTAGLNEVLQFEKSSDNVNSEIKSTPSNSASSSEVVPGDRAVLTNGLDTPCFKTSVNDSQSWAHNMGSEDYDCIPPNKVTMAGQCKDQGNFSFPISVSNVVSEVENQNHSEEKAQRAQQESGNAYTKEYSSHIFQDSQSSDLKTIYQTGCQTSTVFPLKKKVSIDEYLQNTGKMKNFADLEDSSKHEEKQTSWKEIDNDFTNETKISPIDNYIVLHQEYKESESHNSFGKSCDKILITQELEITKSSTSTIKDKDELDHLALEWQITPSFESLSQKHPQHSVEYEGNIHTSLAIAQKLMELKLGKINQNYASIITEAFPKPKDIPQAKEMFIDTVISSYNIETAHDSSNCSITREHICVHRKNENEPVSLENIQRDYKETAYVEDRGQDHNLFCNSQLSNDIWLNVNFKKQTDRENQNEAKENSASCVENNIENIYGDKKQDSHTNENFSNIDEKEDKNYHNIEILSSEEFSTKFNLICREDNAVSAATALLESEEDTISAVKQKDTENTGRSVEHLASTTFPKTASSSVCVASNAAIQIASATMPALSLNNDDHQIYQFKETCSSESPDFGLLVKHRVSDCEIDTDKNKSQESFHQSINENLVLQSIELESEIEIELEDCDDAFIFQQDTHSHENMLCEEFVTSYKALKSRISWEGLLALDNGEMEVLESTTGRENSDQHYSKESNYFYSSTQNNETELTSPILLPDLQIKITNIFRPGFSPTADSLALKDSFCTHVTEATKPEINKEDGEILGFDIYSQPFGENADYPCEDKVDNIRQESGPVSNSEISLSFDLSRNTDVNHTSENQNSESLFTEPSNVTTIDDGSRCFFTKSKTDYNDTKNKKEVESRISKRKLHISSRDQNIPHKDLRRHKIYGRKRRLTSQDSSECFSSLSQGRIKTFSQSEKHIKSVLNILSDEASLCKSKCLSRKLDKAVVHLKKAHRRVHTSLQLITKVGEERKGPLPKSYAVICNNFWESCDLQGYSSVSQRKYYSTKHFSSKRKYDKRRKKRAPKADISKSLTHVSKHKSYKTSGEKKCLSRKSMASSVSKSHPTTSHMGEFCNQEHPESQLPVSSTSQSTSQSVYYNSSVSNPSLSEEHQPFSGKTAYLFSPDHSDEKLIEKENQIDTAFLSSTSKYEKLEKHSANHNVKDATKENSCDANEVINESNSVSLSCIKENINSSTGNDCDATCIGHTKAKTDVLISVLDSNVKHFLNDLYQQGNLILSDCKRNLEVKWTDPIERPKQSIITGNFLMGPLNLTLIASKKYSIPQVSAAAVTDSEGESSKSYLDKQRILTVDSFAASSTVPHCEQSCREKELLKTEQCSSEGRFYSCKRKEKMNIHIVKPGENNNKFSISTMLPPVSECINKNISNSSKKRPSTVDKCEDSQEQQQDTTVSSCKKLKVDMKDVTKINREKATFKHPRTTGSHPKSENKIVPSSCDSLKRNHLTPKKVEMQRSLPGSLLPLENPKDTCASKSESKIDLTVSSDHFSGQQENLNSMKKRNVNFSAAETKSDKKDCAAFAICDQKSVHGTFSPDHGTLLQKFLKNSPDPTQKSCLSDINPETDVSLVPDASVLSKPIFCFVKDVHPDLEMNDTVFELQDNDIVNSSIKNSSCMTSPEPICIQNKIPTLQINKLQPTETESEDKYMKDTLNPNTVHTFGASGHITLNVNQGAEYSLSEQQNDKNSKVLMQNAATYWNELPQSACNPTYNSSEHLFGTSYPYSAWCVYQYSNSNGNAITQTYQGITSYEVQPSPSGLLTTVASTAQGTHSNLLYSQYFTYFAGEPQANGFVPVNGYFQSQIPASNFRQPIFSQYASHQPLPQATYPYLPNRFVPPEVPWVYAPWHQESFHPGH

SEQ ID NO: 766610 - protein, 2789 aa, Homo sapiens
MPSDAKDSVNGDLLLNWTSLKNILSGLNASFPLHNNTGSSTVTTSKSIKDPRLMRREESMGEQSSTAGLNEVLQFEKSSDNVNSEIKSTPSNSASSSEVVPGDRAVLTNGLDTPCFKTSVNDSQSWAHNMGSEDYDCIPPNKVTMAGQCKDQGNFSFPISVSNVVSEVENQNHSEEKAQRAQQESGNAYTKEYSSHIFQDSQSSDLKTIYQTGCQTSTVFPLKKKVSIDEYLQNTGKMKNFADLEDSSKHEEKQTSWKEIDNDFTNETKISPIDNYIVLHQEYKESESHNSFGKSCDKILITQELEITKSSTSTIKDKDELDHLALEWQITPSFESLSQKHPQHSVEYEGNIHTSLAIAQKLMELKLGKINQNYASIITEAFPKPKDIPQAKEMFIDTVISSYNIETAHDSSNCSITREHICVHRKNENEPVSLENIQRDYKETAYVEDRGQDHNLFCNSQLSNDIWLNVNFKKQTDRENQNEAKENSASCVENNIENIYGDKKQDSHTNENFSNIDEKEDKNYHNIEILSSEEFSTKFNLICREDNAVSAATALLESEEDTISAVKQKDTENTGRSVEHLASTTFPKTASSSVCVASNAAIQIASATMPALSLNNDDHQIYQFKETCSSESPDFGLLVKHRVSDCEIDTDKNKSQESFHQSINENLVLQSIELESEIEIELEDCDDAFIFQQDTHSHENMLCEEFVTSYKALKSRISWEGLLALDNGEMEVLESTTGRENSDQHYSKESNYFYSSTQNNETELTSPILLPDLQIKITNIFRPGFSPTADSLALKDSFCTHVTEATKPEINKEDGEILGFDIYSQPFGENADYPCEDKVDNIRQESGPVSNSEISLSFDLSRNTDVNHTSENQNSESLFTEPSNVTTIDDGSRCFFTKSKTDYNDTKNKKEVESRISKRKLHISSRDQNIPHKDLRRHKIYGRKRRLTSQDSSECFSSLSQGRIKTFSQSEKHIKSVLNILSDEASLCKSKCLSRKLDKAVVHLKKAHRRVHTSLQLITKVGEERKGPLPKSYAVICNNFWESCDLQGYSSVSQRKYYSTKHFSSKRKYDKRRKKRAPKADISKSLTHVSKHKSYKTSGEKKCLSRKSMASSVSKSHPTTSHMGEFCNQEHPESQLPVSSTSQSTSQSVYYNSSVSNPSLSEEHQPFSGKTAYLFSPDHSDEKLIEKENQIDTAFLSSTSKYEKLEKHSANHNVKDATKENSCDANEVINESNSVSLSCIKENINSSTGNDCDATCIGHTKAKTDVLISVLDSNVKHFLNDLYQQGNLILSDCKRNLEVKWTDPIERPKQSIITGNFLMGPLNLTLIASKKYSIPQVSAAAVTDSEGESSKSYLDKQRILTVDSFAASSTVPHCEQSCREKELLKTEQCSSGNCLHTDGNETNVTENYELDVASGTEEDKSYGENIVELSSSDSSLLLRDNVKGSSSETCIVKKDTEDRITWKVKQAEKAKDSVYKRSMTEGSTVNTEYKNQKNQISEESCLNEKIITTNLIDSHLSTKNTTTESVPLKNTVSNPLNKREKKGEIKVSKDSQSDLTLHSEIAYISKPGILGVNHTPILPAHSETCKVPTLLKKPASYVSDFKEKHCSANHTALIANLSQILQRADEASSLQILQEETKVCLNILPLFVEAFERKQECSVEQILISRELLVDQNLWNNCKHTLKPCAVDTLVELQMMMETIQFIENKKRHLEGEPTLRSLLWYDETLYAELLGKPRGFQQQSNFYPGFQGRLKYNAFCELQTYHDQLVELLEETKREKNSYYVFLKYKRQVNECEAIMEHCSDCFDFSLSVPFTCGVNFGDSLEDLEILRKSTLKLINVCGDSPKVHSYPGKQDHLWIIIEMISSKVNFIKNNEAVRVKISLYGLEHIFFDAAKNLVWKERTQSFSKKYSQKKDEERLLRVNKCAFSKLQKIYDTLSKDLNNEPISPIGLEEDTIIASRKSDHPINEATISIENSKFNSNLLAHPDICCISEILDQAEFADLKKLQDLTLRCTDHLEILKKYFQMLQDNNMDNIFITEENVLDVVINHSHEAIILKPEAIEMYIEIVMVSETIHFLKNSIAKKLDKQRFRGMLWFDLSLLPELVQCQEKMASFSFLKDNSTDVCLWKVIETAVSELKKDLDIICKYNEAVNCSYAIHLLSRELQELSEIKKLLKKSKYFISTYIDFVPYIASINYGSTVTELEYNYNQFSTLLKNVMSAPRKDLGKMAHIRKVMKTIEHMKMICTKNAELTISFFLCQMLYNRRKILQLKRKEKMNIHIVKPGENNNKFSISTMLPPVSECINKNISNSSKKRPSTVDKCEDSQEQQQDTTVSSCKKLKVDMKDVTKINREKATFKHPRTTGSHPKSENKIVPSSCDSLKRNHLTPKKVEMQRSLPGSLLPLENPKDTCASKSESKIDLTVSSDHFSGQQENLNSMKKRNVNFSAAETKSDKKDCAAFAICDQKSVHGTFSPDHGTLLQKFLKNSPDPTQKSCLSDINPETDVSLVPDASVLSKPIFCFVKDVHPDLEMNDTVFELQDNDIVNSSIKNSSCMTSPEPICIQNKIPTLQINKLQPTETESEDKYMKDTLNPNTVHTFGASGHITLNVNQGAEYSLSEQQNDKNSKVLMQNAATYWNELPQSACNPTYNSSEHLFGTSYPYSAWCVYQYSNSNGNAITQTYQGITSYEVQPSPSGLLTTVASTAQGTHSNLLYSQYFTYFAGEPQANGFVPVNGYFQSQIPASNFRQPIFSQYASHQPLPQATYPYLPNRFVPPEVPWVYAPWHQESFHPGH

SEQ ID NO: 766611 - protein, 89 aa, Homo sapiens
MTVLGPLIHGSSDTLGQLFWVSGRCEGVPPPGRVQATLSSPAERLPVCRLSVSLFPFPSSLLCSYLSFLLDFLLCSNVMIMDELERGSK

SEQ ID NO: 766612 - protein, 233 aa, Homo sapiens
MAGVRSLRCSRGCAGGCECGDKGKCSDSSLLGKRLSEDSSRHQLLQKWASMWSSMSEDASVADMERAQLEEEAAAAEERPLVFLCSGCRRPLGDSLSWVASQEDTNCILLRCVSCNVSVDKEQKLSKREKENGCVLETLCCAGCSLNLGYVYRCTPKNLDYKRDLFCLSVEAIESYVLGSSEKQIVSEDKELFNLESRVEIEKSLTQMEDVLKALQMKLWEAESKLSFATCKS

SEQ ID NO: 766613 - protein, 233 aa, Homo sapiens; identical to SEQ ID NO: 766612

SEQ ID NO: 766614 - protein, 179 aa, Homo sapiens
MAGVRSLRCSRGCAGGCECGDKGKCSDSSLLGKRLSEDSSRHQLLQKWASMWSSMSEDASVADMERAQLEEEAAAAEERPLVFLCSGCRRPLGDSLSWVASQEDTNCILLRCVSCNVSVDKEQKLSKREKENGCVLETLCCAGCSLNLGYVYRCTPKNLDYKRDLFCLSVEAIERWKMS

SEQ ID NO: 766615 - protein, 233 aa, Homo sapiens; identical to SEQ ID NO: 766612

SEQ ID NO: 766616 - protein, 193 aa, Homo sapiens
FQAGHWGTVGGTQKMLPLLIICLLPAIEGKNCLRCWPELSALIDYDLQILWVTPGPPTELSQNRDHLEEETAKFFTQVHQAIKTLRDDKTVLLEEIYTHKNLFTERLNKISDGLKEKDIQSTLKVTSCADCRTHFLSCNDPTFCPARNRRTSLWAVSLSSALLLAIAGGCFFYWQRKKEAVKQEQGSPHVFQK

SEQ ID NO: 766617 - protein, 150 aa, Homo sapiens
FQAGHWGTVGGTQKMLPLLIICLLPAIEGKNCLRCWPELSALIDYDLQILWVTPGPPTELSQSIHSLFLEDRDHLEEETAKFFTQVHQAIKTLRDDKTVLLEEIYTHKNLFTERLNKISDGLKEKARNRRTSLWAVSLSSALLLAIAGGG

SEQ ID NO: 766618 - protein, 154 aa, Homo sapiens
FQAGHWGTVGGTQKMLPLLIICLLPAIEGKNCLRCWPELSALIDYDLQILWVTPGPPTELSQSIHSLFLEDNNFLKPWYLDRDHLEEETAKFFTQVHQAIKTLRDGEEAKSPRALGLGLTKAHPPRHSQRPMWPWVGGLVKVGDECSLSPCALW

SEQ ID NO: 766619 - protein, 309 aa, Homo sapiens
FQAGHWGTVGGTQKMLPLLIICLLPAIEGKNCLRCWPELSALIDYDLQILWVTPGPPTELSQSIHSLFLEDRDHLEEETAKFFTQVHQAIKTLRDDKTVLLEEIYTHKNLFTERLNKISDGLKEKGKGWGRSLHTAQPSTPAKTQGMQIFTLQPPRSSPGAPPLSMNAFPAPSPTCTPEPLGSVCLPSTSVSLPSHPPWQPAMSPVVSMHGDWAWGRDERHLAPPSPCPSPPIDIQSTLKVTSCADCRTHFLSCNDPTFCPARNRRTSLWAVSLSSALLLAIAGGCFFYWQRKKEAVKQEQGSPHVFQK

SEQ ID NO: 766620 - protein, 188 aa, Homo sapiens
FQAGHWGTVGGTQKMLPLLIICLLPAIEGKNCLRCWPELSALIDYDLQILWVTPGPPTELSQSIHSLFLEDNNFLKPWYLDRDHLEEETAKFFTQVHQAIKTLRDDKTVLLEEIYTHKNLFTERLNKISDGLKEKARNRRTSLWAVSLSSALLLAIAGGRNRAARMSSRSEQRPQLPPSQSSLISGSR

SEQ ID NO: 766621 - protein, 150 aa, Homo sapiens
FQAGHWGTVGGTQKMLPLLIICLLPAIEGKNCLRCWPELSALIDYDLQILWVTPGPPTELSQSIHSLFLEDNNFLKPWYLDRDHLEEETAKFFTQVHQAIKTLRDDKTVLLEEIYTHKNLFTERLNKISDGLKEKAPQFLYLLTLPGSLQ

SEQ ID NO: 766622 - protein, 759 aa, Homo sapiens
MESSPFNRRQWTSLSLRVTAKELSLVNKNKSSAIVEIFSKYQKAAEETNMEKKRSNTENLSQHFRKGTLTVLKKKWENPGLGAESHTDSLRNSSTEIRHRADHPPAEVTSHAASGAKADQEEQIHPRSRLRSPPEALVQGRYPHIKDGEDLKDHSTESKKMENCLGESRHEVEKSEISENTDASGKIEKYNVPLNRLKMMFEKGEPTQTKILRAQSRSASGRKISENSYSLDDLEIGPGQLSSSTFDSEKNESRRNLELPRLSETSIKDRMAKYQAAVSKQSSSTNYTNELKASGGEIKIHKMEQKENVPPGPEVCITHQEGEKISANENSLAVRSTPAEDDSRDSQVKSEVQQPVHPKPLSPDSRASSLSESSPPKAMKKFQAPARETCVECQKTVYPMERLLANQQVFHISCFRCSYCNNKLSLGTYASLHGRIYCKPHFNQLFKSKGNYDEGFGHRPHKDLWASKNENEEILERPAQLANARETPHSPGVEDAPIAKVGVLAASMEAKASSQQEKEDKPAETKKLRIAWPPPTELGSSGSALEEGIKMSKPKWPPEDEISKPEVPEDVDLDLKKLRRSSSLKERSRPFTVAASFQSTSVKSPKTVSPPIRKGWSMSEQSEESVGGRVAERKQVENAKASKKNGNVGKTTWQNKESKGETGKRSKEGHSLEMENENLVENGADSDEDDNSFLKQQSPQEPKSLNWSSFVDNTFAEEFTTQNQKSQDVELWEGEVVKELSVEEQIKRNRYYDEDEDEE

SEQ ID NO: 766623 - protein, 599 aa, Homo sapiens
MENCLGESRHEVEKSEISENTDASGKIEKYNVPLNRLKMMFEKGEPTQTKILRAQSRSASGRKISENSYSLDDLEIGPGQLSSSTFDSEKNESRRNLELPRLSETSIKDRMAKYQAAVSKQSSSTNYTNELKASGGEIKIHKMEQKENVPPGPEVCITHQEGEKISANENSLAVRSTPAEDDSRDSQVKSEVQQPVHPKPLSPDSRASSLSESSPPKAMKKFQAPARETCVECQKTVYPMERLLANQQVFHISCFRCSYCNNKLSLGTYASLHGRIYCKPHFNQLFKSKGNYDEGFGHRPHKDLWASKNENEEILERPAQLANARETPHSPGVEDAPIAKVGVLAASMEAKASSQQEKEDKPAETKKLRIAWPPPTELGSSGSALEEGIKMSKPKWPPEDEISKPEVPEDVDLDLKKLRRSSSLKERSRPFTVAASFQSTSVKSPKTVSPPIRKGWSMSEQSEESVGGRVAERKQVENAKASKKNGNVGKTTWQNKESKGETGKRSKEGHSLEMENENLVENGADSDEDDNSFLKQQSPQEPKSLNWSSFVDNTFAEEFTTQNQKSQDVELWEGEVVKELSVEEQIKRNRYYDEDEDEE

SEQ ID NO: 766624 - protein, 457 aa, Homo sapiens
MEQKENVPPGPEVCITHQEGEKISANENSLAVRSTPAEDDSRDSQVKSEVQQPVHPKPLSPDSRASSLSESSPPKAMKKFQAPARETCVECQKTVYPMERLLANQQVFHISCFRCSYCNNKLSLGTYASLHGRIYCKPHFNQLFKSKGNYDEGFGHRPHKDLWASKNENEEILERPAQLANARETPHSPGVEDAPIAKVGVLAASMEAKASSQQEKEDKPAETKKLRIAWPPPTELGSSGSALEEGIKMSKPKWPPEDEISKPEVPEDVDLDLKKLRRSSSLKERSRPFTVAASFQSTSVKSPKTVSPPIRKGWSMSEQSEESVGGRVAERKQVENAKASKKNGNVGKTTWQNKESKGETGKRSKEGHSLEMENENLVENGADSDEDDNSFLKQQSPQEPKSLNWSSFVDNTFAEEFTTQNQKSQDVELWEGEVVKELSVEEQIKRNRYYDEDEDEE

SEQ ID NO: 766625 - protein, 101 aa, Homo sapiens
MYRLVEPHSSPGSHLLELQKEDILQYLMECLWKVFFRKAKYGHFTLMTDPSNTRKNTAYLLKNIRTLTTMAQVFSGPVRNQVLSDKSFIPNNDGVWNFLVY

SEQ ID NO: 766626 - protein, 759 aa, Homo sapiens; identical to SEQ ID NO: 766622

SEQ ID NO: 766627 - protein, 561 aa, Homo sapiens
MMVDKGEEGKTIILRAQSRSASGRKISENSYSLDDLEIGPGQLSSSTFDSEKNESRRNLELPRLSETSIKDRMAKYQAAVSKQSSSTNYTNELKASGGEIKIHKMEQKENVPPGPEVCITHQEGEKISANENSLAVRSTPAEDDSRDSQVKSEVQQPVHPKPLSPDSRASSLSESSPPKAMKKFQAPARETCVECQKTVYPMERLLANQQVFHISCFRCSYCNNKLSLGTYASLHGRIYCKPHFNQLFKSKGNYDEGFGHRPHKDLWASKNENEEILERPAQLANARETPHSPGVEDAPIAKVGVLAASMEAKASSQQEKEDKPAETKKLRIAWPPPTELGSSGSALEEGIKMSKPKWPPEDEISKPEVPEDVDLDLKKLRRSSSLKERSRPFTVAASFQSTSVKSPKTVSPPIRKGWSMSEQSEESVGGRVAERKQVENAKASKKNGNVGKTTWQNKESKGETGKRSKEGHSLEMENENLVENGADSDEDDNSFLKQQSPQEPKSLNWSSFVDNTFAEEFTTQNQKSQDVELWEGEVVKELSVEEQIKRNRYYDEDEDEE

SEQ ID NO: 766628 - protein, 457 aa, Homo sapiens; identical to SEQ ID NO: 766624

SEQ ID NO: 766629 - protein, 759 aa, Homo sapiens; identical to SEQ ID NO: 766622

SEQ ID NO: 766630 - protein, 405 aa, Homo sapiens
RPRGSQFRLHSRASSLSESSPPKAMKKFQAPARETCVECQKTVYPMERLLANQQVFHISCFRCSYCNNKLSLGTYASLHGRIYCKPHFNQLFKSKGNYDEGFGHRPHKDLWASKNENEEILERPAQLANARETPHSPGVEDAPIAKVGVLAASMEAKASSQQEKEDKPAETKKLRIAWPPPTELGSSGSALEEGIKMSKPKWPPEDEISKPEVPEDVDLDLKKLRRSSSLKERSRPFTVAASFQSTSVKSPKTVSPPIRKGWSMSEQSEESVGGRVAERKQVENAKASKKNGNVGKTTWQNKESKGETGKRSKEGHSLEMENENLVENGADSDEDDNSFLKQQSPQEPKSLNWSSFVDNTFAEEFTTQNQKSQDVELWEGEVVKELSVEEQIKRNRYYDEDEDEE

SEQ ID NO: 766631 - protein, 360 aa, Homo sapiens [sequence omitted]

SEQ ID NO: 766632 - protein, 252 aa, Homo sapiens
MEAKASSQQEKEDKPAETKKLRIAWPPPTELGSSGSALEEGIKMSKPKWPPEDEISKPEVPEDVDLDLKKLRRSSSLKERSRPFTVAASFQSTSVKSPKTVSPPIRKGWSMSEQSEESVGGRVAERKQVENAKASKKNGNVGKTTWQNKESKGETGKRSKEGHSLEMENENLVENGADSDEDDNSFLKQQSPQEPKSLNWSSFVDNTFAEEFTTQNQKSQDVELWEGEVVKELSVEEQIKRNRYYDEDEDEE

SEQ ID NO: 766633 - protein, 261 aa, Homo sapiens
VVSRGSLRILGARASSQQEKEDKPAETKKLRIAWPPPTELGSSGSALEEGIKMSKPKWPPEDEISKPEVPEDVDLDLKKLRRSSSLKERSRPFTVAASFQSTSVKSPKTVSPPIRKGWSMSEQSEESVGGRVAERKQVENAKASKKNGNVGKTTWQNKESKGETGKRSKEGHSLEMENENLVENGADSDEDDNSFLKQQSPQEPKSLNWSSFVDNTFAEEFTTQNQKSQDVELWEGEVVKELSVEEQIKRNRYYDEDEDEE

SEQ ID NO: 766634 - protein, 86 aa, Homo sapiens
SSSVPNLENGADSDEDDNSFLKQQSPQEPKSLNWSSFVDNTFAEEFTTQNQKSQDVELWEGEVVKELSVEEQIKRNRYYDEDEDEE

SEQ ID NO: 766635 - protein, 445 aa, Homo sapiens
MESSPFNRRQWTSLSLRVTAKELSLVNKNKSSAIVEIFSKYQKAAEETNMEKKRSNTENLSQHFRKGTLTVLKKKWENPGLGAESHTDSLRNSSTEIRHRADHPPAEVTSHAASGAKADQEEQIHPRSRLRSPPEALVQGRYPHIKDGEDLKDHSTESKKMENCLGESRHEVEKSEISENTDASGKIEKYNVPLNRLKMMFEKGEPTQTKILRAQSRSASGRKISENSYSLDDLEIGPGQLSSSTFDSEKNESRRNLELPRLSETSIKDRMAKYQAAVSKQSSSTNYTNELKASGGEIKIHKMEQKENVPPGPEVCITHQEGEKISANENSLAVRSTPAEDDSRDSQVKSEVQQPVHPKPLSPDSRASSLSESSPPKAMKKFQAPARETCVECQKTVYPMERLLANQQVFHISCFRCSYCNNKLRSQPKTSHLSITGTLEGVFGF

SEQ ID NO: 766636 - protein, 372 aa, Homo sapiens [sequence omitted]

SEQ ID NO: 766637 - protein, 307 aa, Homo sapiens
MESSPFNRRQWTSLSLRVTAKELSLVNKNKSSAIVEIFSKYQKAAEETNMEKKRSNTENLSQHFRKGTLTVLKKKWENPGLGAESHTDSLRNSSTEIRHRADHPPAEVTSHAASGAKADQEEQIHPRSRLRSPPEALVQGRYPHIKDGEDLKDHSTESKKMENCLGESRHEVEKSEISENTDASGKIEKYNVPLNRLKMMFEKGEPTQTKILRAQSRSASGRKISENSYSLDDLEIGPGQLSSSTFDSEKNESRRNLELPRLSETSIKDRMAKYQAAVSKQSSSTNYTVCVLHHSFIHSFHHPADGH

SEQ ID NO: 766638 - protein, 117 aa, Homo sapiens
AAAGAGAAVTSAAASAGPGEDSSDSEAEQEGPQKLIRKVSTSGQIRTKTSIKEGQLLKQTSSFQRWKKRYFKLRGRTLYYAKDSKSLIFDEVDLSDASVAEASTKNANNSFTVDTQW

SEQ ID NO: 766639 - protein, 173 aa, Homo sapiens
MLCAENRKEMEDWISSLKSVQTREPYEVAQFNVEHFSGMHNWYACSHARPTFCNVCRESLSGVTSHGLSCEVCKFKAHKRCAVRATNNCKWTTLASIGKDIIEDEDGVAMPHQWLEGNLPVSAKCAVCDKTCGSVLRLQDWKCLWCKTMVHTACKDLYHPICPLGQCKVSIIP

SEQ ID NO: 766640 - protein, 293 aa, Homo sapiens
AAAGAGAAVTSAAASAGPGEDSSDSEAEQEGPQKLIRKVSTSGQIRTKTSIKEGQLLKQTSSFQRWKKRYFKLRGRTLYYAKDSKSLIFDEVDLSDASVAEASTKNANNSFTIITPFRRLMLCAENRKEMEDWISSLKSVQTREPYEVAQFNVEHFSGMHNWYACSHARPTFCNVCRESLSGVTSHGLSCEVCKFKAHKRCAVRATNNCKWTTLASIGKDIIEDEDGVAMPHQWLEGNLPVSAKCAVCDKTCGSVLRLQDWKCLWCKTMVHTACKDLYHPICPLGQCKVSIIP

SEQ ID NO: 766641 - protein, 173 aa, Homo sapiens; identical to SEQ ID NO: 766639

SEQ ID NO: 766642 - protein, 318 aa, Homo sapiens
MQAGPPPPPPPPPSAPPTPSPALRAAAQGSGGPGGLTSAAPAGGDKKVIATKVLGTVKWFNVRNGYGFINRNDTKEDVFVHQTAIKKNNPRKYLRSVGDGETVEFDVVEGEKGAEAANVTGPGGVPVQGSKYAADRNHYRRYPRRRGPPRNYQQNYQNSESGEKNEGSESAPEGQAQQRRPYRRRRFPPYYMRRPYGRRPQYSNPPVQGEVMEGADNQGAGEQGRPVRQNMYRGYRPRFRRGPPRQRQPREDGNEEDKENQGDETQGQQPPQRRYRRNFNYRRRRPENPKPQDGKETKAADPPAENSSAPEAEQGGAE

SEQ ID NO: 766643 - protein, 520 aa, Homo sapiens
  misc_feature (247)..(247): Xaa can be any naturally occurring amino acid
MQAGPPPPPPPPPSAPPTPSPALRAAAQGSGGPGGLTSAAPAGGDKKVIATKVLGTVKWFNVRNGYGFINRNDTKEDVFVHQTAIKKNNPRKYLRSVGDGETVEFDVVEGEKGAEAANVTGPGGVPVQGSKYAADRNHYRRYPRRRGPPRNYQQNYQNSESGEKNEGSESAPEGQAQQRRPYRRRRFPPYYMRTIGVTQIHPPSASASVLTRRATGTSAHARYTSRASQAGRKTLFGRKLPCGQVLXSPDTSLPGIEENRQQNTMNSTTTATASPVMTMPNTPPERGGWRGRSRGARAGQDAREGKRGERRAEAAGKRRRRARARADVTARSGGGETRAQDASRAHRTGTDARGGAAAAPPAAQPPKLQARRARAETSPPPSATAQAQQEQTRAEDEQQEKERDSATGRRKTQTGAAQTRTPRRTREKRRRTQITRAPSPTRPTSKTTQRERRAHETHGQATTADANAHEGKNGGSTYTNKTAERGRPKRGGRTQREAAARKRRGHHDAREHEADGRADH

SEQ ID NO: 766644 - protein, 67 aa, Homo sapiens
ITVLGTRLVFAGAESGPQRALSSPTAAAGLVTITPREEPQLPQPAPVTITATMSSEAETHAGRPRKE

SEQ ID NO: 766645 - protein, 374 aa, Homo sapiens
RVCDGVPSPPTGLVRSGPHAVVRVTPTQLTFRVCSEGAAHRLSRQERLPLPSRAIRPRPAHTPILGPAPRACPGAPRASDSPTCAAAAATAWPRTRAVERKGCQVAAAAGVRGTGCPSRADLEKDSWNDTKEDVFVHQTAIKKNNPRKYLRSVGDGETVEFDVVEGEKGAEAANVTGPGGVPVQGSKYAADRNHYRRYPRRRGPPRNYQQNYQNSESGEKNEGSESAPEGQAQQRRPYRRRRFPPYYMRRPYGRRPQYSNPPVQGEVMEGADNQGAGEQGRPVRQNMYRGYRPRFRRGPPRQRQPREDGNEEDKENQGDETQGQQPPQRRYRRNFNYRRRRPENPKPQDGKETKAADPPAENSSAPEAEQGGAE

SEQ ID NO: 766646 - protein, 318 aa, Homo sapiens; identical to SEQ ID NO: 766642

SEQ ID NO: 766647 - protein, 318 aa, Homo sapiens; identical to SEQ ID NO: 766642

SEQ ID NO: 766648 - protein, 318 aa, Homo sapiens; identical to SEQ ID NO: 766642

SEQ ID NO: 766649 - protein, 247 aa, Homo sapiens
MQAGPPPPPPPPPSAPPTPSPALRAAAQGSGGPGGLTSAAPAGGDKKVIATKVLGTVKWFNVRNGYGFINRNDTKEDVFVHQTAIKKNNPRKYLRSVGDGETVEFDVVEGEKGAEAANVTGPGGVPVQGSKYAADRNHYRRYPRRRGPPRNYQQNYQNSESGEKNEGSESAPEGQAQQRRPYRRRRFPPYYMRRPYGRRPQYSNPPVQGEVMEGADNQGAGEQGRPVRQNMYRGYRPRFRRYGPRKH

SEQ ID NO: 766650 - protein, 105 aa, Homo sapiens
MSSEAETHAGRPAAPPAAPALSAADTKPGTTGSGAGERWPGRPHIGGACRRGQEGHRNEGFGNSKMCQDEVGEVSLIIHDKRARVDADMALKTTAGVQASTWLGW

SEQ ID NO: 766651 - protein, 320 aa, Homo sapiens
MSSEAETHAGRPPPPSAPPTPSPALRAAAQGSGGPGGLTSAAPAGGDKKVIATKVLGTVKWFNVRNGYGFINRNDTKEDVFVHQTAIKKNNPRKYLRSVGDGETVEFDVVEGEKGAEAANVTGPGGVPVQGSKYAADRNHYRRYPRRRGPPRNYQQNYQNSESGEKNEGSESAPEGQAQQRRPYRRRRFPPYYMRRPYGRRPQYSNPPVQGEVMEGADNQGAGEQGRPVRQNMYRGYRPRFRRGPPRQRQPREDGNEEDKENQGDETQGQQPPQRRYRRNFNYRRRRPENPKPQDGKETKAADPPAENSSAPEAEQGGAE

SEQ ID NO: 766652 - protein, 319 aa, Homo sapiens
MSSEAETHAGRPGLLSVTTCTTGWCERSGACGPVRPYFGGACRFGDKKVIATKVLGTVKWFNVRNGYGFINRNDTKEDVFVHQTAIKKNNPRKYLRSVGDGETVEFDVVEGEKGAEAANVTGPGGVPVQGSKYAADRNHYRRYPRRRGPPRNYQQNYQNSESGEKNEGSESAPEGQAQQRRPYRRRRFPPYYMRRPYGRRPQYSNPPVQGEVMEGADNQGAGEQGRPVRQNMYRGYRPRFRRGPPRQRQPREDGNEEDKENQGDETQGQQPPQRRYRRNFNYRRRRPENPKPQDGKETKAADPPAENSSAPEAEQGGAE

SEQ ID NO: 766653 - protein, 408 aa, Homo sapiens
RVCDGVPSPPTGLVRSGPHAVVRVTPTQLTFRVCSEGAAHRLSRQERLPLPSRAIRPRPAHTPILGPAPRACPGAPRASDSPTCAAAAATAWPRTRAVERKGCQVAAAAGVRGTGCPSRADLEKDSWYIVACFALFSFPATKVLGTVKWFNVRNGYGFINRNDTKEDVFVHQTAIKKNNPRKYLRSVGDGETVEFDVVEGEKGAEAANVTGPGGVPVQGSKYAADRNHYRRYPRRRGPPRNYQQNYQNSESGEKNEGSESAPEGQAQQRRPYRRRRFPPYYMRRPYGRRPQYSNPPVQGEVMEGADNQGAGEQGRPVRQNMYRGYRPRFRRGPPRQRQPREDGNEEDKENQGDETQGQQPPQRRYRRNFNYRRRRPENPKPQDGKETKAADPPAENSSAPEAEQGGAE

SEQ ID NO: 766654 - protein, 298 aa, Homo sapiens
MCLAFQAHSRLDCRHSELNDSQGGDKKVIATKVLGTVKWFNVRNGYGFINRNDTKEDVFVHQTAIKKNNPRKYLRSVGDGETVEFDVVEGEKGAEAANVTGPGGVPVQGSKYAADRNHYRRYPRRRGPPRNYQQNYQNSESGEKNEGSESAPEGQAQQRRPYRRRRFPPYYMRRPYGRRPQYSNPPVQGEVMEGADNQGAGEQGRPVRQNMYRGYRPRFRRGPPRQRQPREDGNEEDKENQGDETQGQQPPQRRYRRNFNYRRRRPENPKPQDGKETKAADPPAENSSAPEAEQGGAE

SEQ ID NO: 766655 - protein, 189 aa, Homo sapiens
MVSSTGMTPRKMYLYTRVRRQQMLQVLVVFQFKAVNMQQTVTIIDAIHVVGVLHAITSKTYYMRRPYGRRPQYSNPPVQGEVMEGADNQGAGEQGRPVRQNMYRGYRPRFRRGPPRQRQPREDGNEEDKENQGDETQGQQPPQRRYRRNFNYRRRRPENPKPQDGKETKAADPPAENSSAPEAEQGGAE

SEQ ID NO: 766656 - protein, 318 aa, Homo sapiens; identical to SEQ ID NO: 766642

SEQ ID NO: 766657 - protein, 318 aa, Homo sapiens; identical to SEQ ID NO: 766642

SEQ ID NO: 766658 - protein, 288 aa, Homo sapiens
MQAGPPPPPPPPPSAPPTPSPALRAAAQGSGGPGGLTSAAPAGGDKKVIATKVLGTVKWFNVRNGYGFINRNDTKEDVFVHQTAIKKNNPRKYLRSVGDGETVEFDVVEGEKGAEAANVTGPGGVPVQGSKYAADRNHYRRYPRRRGPPRNYQQNYQNSESGEKNEGSESAPEGQAQQRRPYRRRRFPPYYMRRPYGRRPQYSNPPVQGEVMEGADNQGAGEQGRPVRQNMYRGYRPRFRRGPPRQRQPREDGNEKTQNTHKGAARGLKIEQTSNPDGGLPHLNGTRE

SEQ ID NO: 766659 - protein, 520 aa, Homo sapiens; identical to SEQ ID NO: 766643
  misc_feature (247)..(247): Xaa can be any naturally occurring amino acid

SEQ ID NO: 766660 - protein, 115 aa, Homo sapiens
MVSSTGMTPRKMYLYTRVRRQQMLQVLVVFQFKAVNMQQTVTIIDAIHVVGVLHAITSKITRIVRVGKRTRDRRVLPKARPNNAGPTAGEGSHLTTCGDPMGVDHSIPTLLCREK

SEQ ID NO: 766661 - protein, 320 aa, Homo sapiens; identical to SEQ ID NO: 766651

SEQ ID NO: 766662 - protein, 290 aa, Homo sapiens
MSSEAETHAGRPPAGGDKKVIATKVLGTVKWFNVRNGYGFINRNDTKEDVFVHQTAIKKNNPRKYLRSVGDGETVEFDVVEGEKGAEAANVTGPGGVPVQGSKYAADRNHYRRYPRRRGPPRNYQQNYQNSESGEKNEGSESAPEGQAQQRRPYRRRRFPPYYMRRPYGRRPQYSNPPVQGEVMEGADNQGAGEQGRPVRQNMYRGYRPRFRRGPPRQRQPREDGNEEDKENQGDETQGQQPPQRRYRRNFNYRRRRPENPKPQDGKETKAADPPAENSSAPEAEQGGAE

SEQ ID NO: 766663 - protein, 146 aa, Homo sapiens
MSSEAETHAGRPGLLRDHVHYGLVLNAVERVAPCGLTLAGPAVRGQEGHRNERFWTHVQWFNVRNRIWFHQQEMTPMGKMYLYNPVCAINRQKLHPPRKVYPFAGVTDDSDADLVARFGLHRFGTGTKNRRCREAPSKKLFHKGSG

SEQ ID NO: 766664 - protein, 270 aa, Homo sapiens
MTTKVLGTVKWFNVRNGYGFINRNDTKEDVFVHQTAIKKNNPRKYLRSVGDGETVEFDVVEGEKGAEAANVTGPGGVPVQGSKYAADRNHYRRYPRRRGPPRNYQQNYQNSESGEKNEGSESAPEGQAQQRRPYRRRRFPPYYMRRPYGRRPQYSNPPVQGEVMEGADNQGAGEQGRPVRQNMYRGYRPRFRRGPPRQRQPREDGNEEDKENQGDETQGQQPPQRRYRRNFNYRRRRPENPKPQDGKETKAADPPAENSSAPEAEQGGAE

SEQ ID NO: 766665 - protein, 56 aa, Homo sapiens
MAVRVLSVSDIPHTTPPGTPGADSADGHAAISKWYGSFIWAAWGNANPPKYGSFLL

SEQ ID NO: 766666 - protein, 359 aa, Homo sapiens
MAGHLASDFAFSPPPGGGGDGPGGPEPGWVDPRTWLSFQGPPGGPGIGPGFGPGSEEWGIPPCPPPYEFCGGMAYCGPQTGVGLVPQDGLETSQPEGEAGVGVESNSDGASPEPCTVPSGAVKLEKEKLEQNPEESQDIKALQKELEQFAKLLKQKRITLGYTQAVWLTLGVLFGKVFSQTTICRFEALQLSFKNMCELRPLLQKWVEEADNNENLQEICKAETLVQAGKRKRTSIENQVRGNLENLFLRCPKPTLQQISHIAQQLGLEKDVVRVWFCNRRQKGKRSSSGYAQREDFEAVGSPFSGGPVSFPLAPGPHFGTPGYGSPHFTALYSSVPFPEGEAFPPVSVTTLGSPMHSN

SEQ ID NO: 766667 - protein, 103 aa, Homo sapiens
VLVQMGFHHVGQAGLKPLNSGDLPALASQSAGITGVSYCAWPKVRILKGTLQDMLRFSQSVSFRVAEWSHRVNISGSKPFTQYDVVELEKTTTTTTTKNPKKL

SEQ ID NO: 766668 - protein, 353 aa, Homo sapiens
MRRQLRSRRAPSFPYSYRYRLDDPDEANQNYLADEEEEAEEEARVTVVPKSEEEEEEEEKEEEEEEEKEEEEGQGQPTGNAWWQKLQIMSEYLWDPERRMFLARTGLILLIYFFFYASLAAVITLCMYTLFLTISPYIPTFTERVKPPGVMIRPFAHSLNFNFNVSEPDTWQHYVISLNGFLQGYNDSLQEEMNVDCPPGQYFIQDGNEDEDKKACQFKRSFLKNCSGLEDPTFGYSTGQPCILLKMNRIVGFRPELGDPVKVSCKVQRGDENDIRSISYYPESASFDLRYYPYYGKLTHVNYTSPLVAMHFTDVVKNQAVPVQCQLKGKGVINDVINDRFVGRVIFTLNIET

SEQ ID NO: 766669 - protein, 113 aa, Homo sapiens
MRRQLRSRRAPSFPYSYRYRLDDPDEANQNYLADEEEEAEEEARVTVVPKSEEEEEEEEKEEEEEEEKEEEEGQGQPTGNAWWQKLQIMSEYLWDPERRMFLARTGQSWSKSQ

SEQ ID NO: 766670 - protein, 353 aa, Homo sapiens; identical to SEQ ID NO: 766668

SEQ ID NO: 766671 - protein, 745 aa, Homo sapiens
MEVMNLMEQPIKVTEWQQTYTYDSGIHSGANTCVPSVSSKGIMEEDEACGRQYTLKKTTTYTQGVPPSQGDLEYQMSTTARAKRVREAMCPGVSGEDSSLLLATQVEGQATNLQRLAEPSQLLKSAIVHLINYQDDAELATRALPELTKLLNDEDPVVVTKAAMIVNQLSKKEASRRALMGSPQLVAAVVRTMQNTSDLDTARCTTSILHNLSHHREGLLAIFKSGGIPALVRMLSSPVESVLFYAITTLHNLLLYQEGAKMAVRLADGLQKMVPLLNKNNPKFLAITTDCLQLLAYGNQESKLIILANGGPQALVQIMRNYSYEKLLWTTSRVLKVLSVCPSNKPAIVEAGGMQALGKHLTSNSPRLVQNCLWTLRNLSDVATKQEGLESVLKILVNQLSVDDVNVLTCATGTLSNLTCNNSKNKTLVTQNSGVEALIHAILRAGDKDDITEPAVCALRHLTSRHPEAEMAQNSVRLNYGIPAIVKLLNQPNQWPLVKATIGLIRNLALCPANHAPLQEAAVIPRLVQLLVKAHQDAQRHVAAGTQQPYTDGVRMEEIVEGCTGALHILARDPMNRMEIFRLNTIPLFVQLLYSSVENIQRVAAGVLCELAQDKEAADAIDAEGASAPLMELLHSRNEGTATYAAAVLFRISEDKNPDYRKRVSVELTNSLFKHDPAAWEAAQSMIPINEPYGDDMDATYRPMYSSDVPLDPLEMHMDMDGDYPIDTYSDGLRPPYPTADHMLA

SEQ ID NO: 766672 - protein, 745 aa, Homo sapiens; identical to SEQ ID NO: 766671

SEQ ID NO: 766673 - protein, 745 aa, Homo sapiens; identical to SEQ ID NO: 766671

SEQ ID NO: 766674 - protein, 73 aa, Homo sapiens
EAALRPEVSLERRGPEMKPAVDEMFPEGAGPYVDLDEAGGSTGLLMDLAANEKAVHADFFNDFEDLFDDDDIQ

SEQ ID NO: 766675 - protein, 73 aa, Homo sapiens; identical to SEQ ID NO: 766674

SEQ ID NO: 766676 - protein, 106 aa, Homo sapiens
MLRRLGGELLFDEQHYYYYPGGALAVKKEKRGTTRTNNITPSSRSEATKRNYQRQHHTAHSNKHRSNRKYLRNPPSPHRSTYTTLPQHIHRHTTKSNNNDDPHQNA

SEQ ID NO: 766677 - protein, 86 aa, Homo sapiens
SHFPANVCLRAGDSVERSFSNKAELLFQLHGHQRESLSKKEAQVWRDKGLYFRKGLLDQAQTLIRADNMSSLHYCKNFFVYGSVVN

SEQ ID NO: 766678 - protein, 289 aa, Homo sapiens
MENGYTYEDYKNTAEWLLSHTKHRPQVAIICGSGLGGLTDKLTQAQIFDYGEIPNFPRSTVPGHAGRLVFGFLNGRACVMMQGRFHMYEGYPLWKVTFPVRVFHLLGVDTLVVTNAAGGLNPKFEVGDIMLIRDHINLPGFSGQNPLRGPNDERFGDRFPAMSDAYDRTMRQRALSTWKQMGEQRELQEGTYVMVAGPSFETVAECRVLQKLGADAVGMSTVPEVIVARHCGLRVFGFSLITNKVIMDYESLEKANHEEVLAAGKQAAQKLEQFVSILMASIPLPDKAS

SEQ ID NO: 766679 - protein, 251 aa, Homo sapiens
MENGYTYEDYKNTAEWLLSHTKHRPQVAIICGSGLGGLTDKLTQAQIFDYGEIPNFPRSTVPGHAGRLVFGFLNGRACVMMQGRFHMYEGYPLWKVTFPVRVFHLLGVDTLVVTNAAGGLNPKFEVGDIMLIRDHINLPGFSGQNPLRGPNDERFGDRFPAMSDAYDRTMRQRALSTWKQMGEQRELQEGTYVMVAGPSFETVAECRVLQKLGADAVGLPPLQTFSCPAWASRLGLSPSHPVPRFCRRNGP

SEQ ID NO: 766680 - protein, 83 aa, Homo sapiens
RRAPGPQDPWGGAGAVTREPGTLGPEGAGGGSERPEDAERPGTEPSVGSKAAESCGSQRGQGRTRESSWGGATGAGRGQVGAV

SEQ ID NO: 766681 - protein, 289 aa, Homo sapiens; identical to SEQ ID NO: 766678

SEQ ID NO: 766682 - protein, 328 aa, Homo sapiens
MQRGLALSLVSGARRQSHAAASAGRDARGNRAGVAPPEQEGDRYTYEDYKNTAEWLLSHTKHRPQVAIICGSGLGGLTDKLTQAQIFDYGEIPNFPRSTVPGHAGRLVFGFLNGRACVMMQGRFHMYEGYPLWKVTFPVRVFHLLGVDTLVVTNAAGGLNPKFEVGDIMLIRDHINLPGFSGQNPLRGPNDERFGDRFPAMSDAYDRTMRQRALSTWKQMGEQRELQEGTYVMVAGPSFETVAECRVLQKLGADAVGMSTVPEVIVARHCGLRVFGFSLITNKVIMDYESLEKANHEEVLAAGKQAAQKLEQFVSILMASIPLPDKAS

SEQ ID NO: 766683 - protein, 331 aa, Homo sapiens
MAFPSVPASPSLLPQYTCQPFCTEGHLSVMPLEWEQNSPRYFFSPRYTYEDYKNTAEWLLSHTKHRPQVAIICGSGLGGLTDKLTQAQIFDYGEIPNFPRSTVPGHAGRLVFGFLNGRACVMMQGRFHMYEGYPLWKVTFPVRVFHLLGVDTLVVTNAAGGLNPKFEVGDIMLIRDHINLPGFSGQNPLRGPNDERFGDRFPAMSDAYDRTMRQRALSTWKQMGEQRELQEGTYVMVAGPSFETVAECRVLQKLGADAVGMSTVPEVIVARHCGLRVFGFSLITNKVIMDYESLEKANHEEVLAAGKQAAQKLEQFVSILMASIPLPDKAS

SEQ ID NO: 766684 - protein, 139 aa, Homo sapiens
MENGYTYEDYKNTAEWLLSHTKHRPQVAIICGSGLGGLTDKLTQAQIFDYGEIPNFPRSTVPGHAGRLVFGFLNGRACVMMQGRFHMYEGYPLWKVTFPVRVFHLLGVDTLVVTNAAGGLNPKFEVGDNTFRGAQFCLI

SEQ ID NO: 766685 - protein, 273 aa, Homo sapiens
ASRAGVNRTRVAIICGSGLGGLTDKLTQAQIFDYGEIPNFPRSTVPGHAGRLVFGFLNGRACVMMQGRFHMYEGYPLWKVTFPVRVFHLLGVDTLVVTNAAGGLNPKFEVGDIMLIRDHINLPGFSGQNPLRGPNDERFGDRFPAMSDAYDRTMRQRALSTWKQMGEQRELQEGTYVMVAGPSFETVAECRVLQKLGADAVGMSTVPEVIVARHCGLRVFGFSLITNKVIMDYESLEKANHEEVLAAGKQAAQKLEQFVSILMASIPLPDKAS

SEQ ID NO: 766686 - protein, 113 aa, Homo sapiens [sequence omitted]

SEQ ID NO: 766687 - protein, 196 aa, Homo sapiens
IFKEQIDIFEGIKDSQAQRMAENLGFVGPLKSQAADQISKLDNLFLKIDATQVEVNPFGETPEGQVVCFDAKINFDDNAEFRQKDIFAMDDKSENEPIENEAAKYDLKYIGLDGNIACFVNGAGLAMATCDIIFLNGGKPANFLDLGGGVKEAQVYQAFKLLTADPKVEAILVNIFGGIVNCAIIAHGDHQSLPGS

SEQ ID NO: 766688 - protein, 104 aa, Homo sapiens
QNYKTVSENIPKECLENIFFQVDREFVRLHHWHHFIITIPLRSSRRGELSQLELQRKKHSIYKVLELKNTMNKVKSETETISSRISQAKERICKIEDELFENIQ

SEQ ID NO: 766689 - protein, 975 aa, Homo sapiens
MIATISPAASNIEETLSTLRYANQARLIVNIAKVNEDMNAKLIRELKAEIAKLKAAQRNSRNIDPERYRLCRQEITSLRMKLHQQERDMAEMQRVWKEKFEQAEKRKLQETKELQKAGIMFQMDNHLPNLVNLNEDPQLSEMLLYMIKEGTTTVGKYKPNSSHDIQLSGVLIADDHCTIKNFGGTVSIIPVGEAKTYVNGKHILEITVLRHGDRVILGGDHYFRFNHPVEVQKGKRPSGRDTPISEGPKDFEFAKNELLMAQRSQLEAEIKEAQLKAKEEMMQGIQIAKEMAQQELSSQKAAYESKIKALEAELREESQRKKMQEINNQKANHKIEELEKAKQHLEQEIYVNKKRLEMETLATKQALEDHSIRHARILEALETEKQKIAKEVQILQQNRNNRDKTFTVQTTWSSMKLSMMIQEANAISSKLKTYYVFGRHDISDKSSSDTSIRVRNLKLGISTFWSLEKFESKLAAMKELYESNGSNRGEDAFCDPEDEWEPDITDAPVSSLSRRRSRSLMKNRRISGCLHDIQVHPIKNLHSSHSSGLMDKSSTIYSNSAESFLPGICKELIGSSLDFFGQSYDEERTIADSLINSFLKIYNGLFAISKAHEEQDEESQDNLFSSDRAIQSLTIQTACAFEQLVVLMKHWLSDLLPCTNIARLEDELRQEVKKLGGYLQLFLQGCCLDISSMIKEAQKNAIQIVQQAVKYVGQLAVLKGSKLHFLENGNNKAASVQEEFMDAVCDGVGLGMKILLDSGLEKAKELQHELFRQCTKNEVTKEMKTNAMGLIRSLENIFAESKIKSFRRQVQEENFEYQDFKRMVNRAPEFLKLKHCLEKAIEIIISALKGCHSDINLLQTCVESIRNLASDFYSDFSVPSTSVGSYESRVTHIVHQELESLAKSLLFCFESEESPDLLKPWETYNQNTKEEHQQSKSSGIDGSKNKGVPKRVYELHGSSPAVSSEECTPSRIQWV

SEQ ID NO: 766690 - protein, 1648 aa, Homo sapiens
MSLHSTHNRNNSGDILDIPSSQNSSSLNALTHSSRLKLHLKSDMSECENDDPLLRSAGKVRDINRTYVISASRKTADMPLTPNPVGRLALQRRTTRNKESSLLVSELEDTTEKTAETRLTLQRRAKTDSAEKWKTAEIDSVKMTLNVGGETENNGVSKESRTNVRIVNNAKNSFVASSVPLDEDPQVIEMMADKKYKETFSAPSRANENVALKYSSNRPPIASLSQTEVVRSGHLTTKPTQSKLDIKVLGTGNLYHRSIGKEIAKTSNKFGSLEKRTPTKCTTEHKLTTKCSLPQLKSPAPSILKNRMSNLQVKQRPKSSFLANKQERSAENTILPEEETVVQNTSAGKDPLKVENSQVTVAVRVRPFTKREKIEKASQVVFMSGKEITVEHPDTKQVYNFIYDVSFWSFDECHPHYASQTTVYEKLAAPLLERAFEGFNTCLFAYGQTGSGKSYTMMGFSEEPGIIPRFCEDLFSQVARKQTQEVSYHIEMSFFEVYNEKIHDLLVCKDENGQRKQPLRVREHPVYGPYVEALSMNIVSSYADIQSWLELGNKQRATAATGMNDKSSRSHSVFTLVMTQTKTEFVEGEEHDHRITSRINLIDLAGSERCSTAHTNGDRLKEGVSINKSLLTLGKVISALSEQANQRSVFIPYRESVLTWLLKESLGGNSKTAMIATISPAASNIEETLSTLRYANQARLIVNIAKVNEDMNAKLIRELKAEIAKLKAAQRNSRNIDPERYRLCRQEITSLRMKLHQQERDMAEMQRVWKEKFEQAEKRKLQETKELQKAGIMFQMDNHLPNLVNLNEDPQLSEMLLYMIKEGTTTVGKYKPNSSHDIQLSGVLIADDHCTIKNFGGTVSIIPVGEAKTYVNGKHILEITVLRHGDRVILGGDHYFRFNHPVEVQKGKRPSGRDTPISEGPKDFEFAKNELLMAQRSQLEAEIKEAQLKAKEEMMQGIQIAKEMAQQELSSQKAAYESKIKALEAELREESQRKKMQEINNQKANHKIEELEKAKQHLEQEIYVNKKRLEMETLATKQALEDHSIRHARILEALETEKQKIAKEVQILQQNRNNRDKTFTVQTTWSSMKLSMMIQEANAISSKLKTYYVFGRHDISDKSSSDTSIRVRNLKLGISTFWSLEKFESKLAAMKELYESNGSNRGEDAFCDPEDEWEPDITDAPVSSLSRRRSRSLMKNRRISGCLHDIQVHPIKNLHSSHSSGLMDKSSTIYSNSAESFLPGICKELIGSSLDFFGQSYDEERTIADSLINSFLKIYNGLFAISKAHEEQDEESQDNLFSSDRAIQSLTIQTACAFEQLVVLMKHWLSDLLPCTNIARLEDELRQEVKKLGGYLQLFLQGCCLDISSMIKEAQKNAIQIVQQAVKYVGQLAVLKGSKLHFLENGNNKAASVQEEFMDAVCDGVGLGMKILLDSGLEKAKELQHELFRQCTKNEVTKEMKTNAMGLIRSLENIFAESKIKSFRRQVQEENFEYQDFKRMVNRAPEFLKLKHCLEKAIEIIISALKGCHSDINLLQTCVESIRNLASDFYSDFSVPSTSVGSYESRVTHIVHQELESLAKSLLFCFESEESPDLLKPWETYNQNTKEEHQQSKSSGIDGSKNKGVPKRVYELHGSSPAVSSEECTPSRIQWV

SEQ ID NO: 766691 - protein, 192 aa, Homo sapiens
GASKLRLTRGNSCTVRPRAPSAHTEHTPTRAHTRSHSPPPRAPALDPRARTRSPALGVATPRAPRPPPSHPHARPAGGSPPRARKGDMPFGHVIVSTGSETFQKMKPATGLWVWVSLLVAAGTVQPSDSQSVCAGTENKLSSLSDLEQQYRALRKYYENCEVVMGNLEITSIEHNRDLSFLRVKLWLSFSSL

SEQ ID NO: 766692 - protein, 83 aa, Homo sapiens
SVREVTGYVLVALNQFRYLPLENLRIIRGTKLYEDRYALAIFLNYRKDGNFGLQELGLKNLTGKEYIQNGKYAFIINIRQLYM

SEQ ID NO: 766693 - protein, 1308 aa, Homo sapiens
MKPATGLWVWVSLLVAAGTVQPSDSQSVCAGTENKLSSLSDLEQQYRALRKYYENCEVVMGNLEITSIEHNRDLSFLRSVREVTGYVLVALNQFRYLPLENLRIIRGTKLYEDRYALAIFLNYRKDGNFGLQELGLKNLTEILNGGVYVDQNKFLCYADTIHWQDIVRNPWPSNLTLVSTNGSSGCGRCHKSCTGRCWGPTENHCQTLTRTVCAEQCDGRCYGPYVSDCCHRECAGGCSGPKDTDCFACMNFNDSGACVTQCPQTFVYNPTTFQLEHNFNAKYTYGAFCVKKCPHNFVVDSSSCVRACPSSKMEVEENGIKMCKPCTDICPKACDGIGTGSLMSAQTVDSSNIDKFINCTKINGNLIFLVTGIHGDPYNAIEAIDPEKLNVFRTVREITGFLNIQSWPPNMTDFSVFSNLVTIGGRVLYSGLSLLILKQQGITSLQFQSLKEISAGNIYITDNSNLCYYHTINWTTLFSTINQRIVIRDNRKAENCTAEGMVCNHLCSSDGCWGPGPDQCLSCRRFSRGRICIESCNLYDGEFREFENGSICVECDPQCEKMEDGLLTCHGPGPDNCTKCSHFKDGPNCVEKCPDGLQGANSFIFKYADPDRECHPCHPNCTQGCNGPTSHDCIYYPWTGHSTLPQHARTPLIAAGVIGGLFILVIVGLTFAVYVRRKSIKKKRALRRFLETELVEPLTPSGTAPNQAQLRILKETELKRVKVLGSGAFGTVYKGIWVPEGETVKIPVAIKILNETTGPKANVEFMDEALIMASMDHPHLVRLLGVCLSPTIQLVTQLMPHGCLLEYVHEHKDNIGSQLLLNWCVQIAKGMMYLEERRLVHRDLAARNVLVKSPNHVKITDFGLARLLEGDEKEYNADGGKMPIKWMALECIHYRKFTHQSDVWSYGVTIWELMTFGGKPYDGIPTREIPDLLEKGERLPQPPICTIDVYMVMVKCWMIDADSRPKFKELAAEFSRMARDPQRYLVIQGDDRMKLPSPNDSKFFQNLLDEEDLEDMMDAEEYLVPQAFNIPPPIYTSRARIDSNRSEIGHSPPPAYTPMSGNQFVYRDGGFAAEQGVSVPYRAPTSTIPEAPVAQGATAEIFDDSCCNGTLRKPVAPHVQEDSSTQRYSADPTVFAPERSPRGELDEEGYMTPMRDKPKQEYLNPVEENPFVSRRKNGDLQALDNPEYHNASNGPPKAEDEYVNEPLYLNTFANTLGKAEYLKNNILSMPEKAKKAFDNPDYWNHSLPPRSTLQHPDYLQEYSTKYFYKQNGRIRPIVAENPEYLSEFSLKPGTVLPPPPYRHRNTVV

SEQ ID NO: 766694 - protein, 664 aa, Homo sapiens
MKPATGLWVWVSLLVAAGTVQPSDSQSVCAGTENKLSSLSDLEQQYRALRKYYENCEVVMGNLEITSIEHNRDLSFLRSVREVTGYVLVALNQFRYLPLENLRIIRGTKLYEDRYALAIFLNYRKDGNFGLQELGLKNLTEILNGGVYVDQNKFLCYADTIHWQDIVRNPWPSNLTLVSTNGSSGCGRCHKSCTGRCWGPTENHCQTLTRTVCAEQCDGRCYGPYVSDCCHRECAGGCSGPKDTDCFACMNFNDSGACVTQCPQTFVYNPTTFQLEHNFNAKYTYGAFCVKKCPHNFVVDSSSCVRACPSSKMEVEENGIKMCKPCTDICPKACDGIGTGSLMSAQTVDSSNIDKFINCTKINGNLIFLVTGIHGDPYNAIEAIDPEKLNVFRTVREITGFLNIQSWPPNMTDFSVFSNLVTIGGRVLYSGLSLLILKQQGITSLQFQSLKEISAGNIYITDNSNLCYYHTINWTTLFSTINQRIVIRDNRKAENCTAEGMVCNHLCSSDGCWGPGPDQCLSCRRFSRGRICIESCNLYDGEFREFENGSICVECDPQCEKMEDGLLTCHGPGPDNCTKCSHFKDGPNCVEKCPDGLQGANSFIFKYADPDRECHPCHPNCTQGCIGSSIEDCIGLMDRCNGPTSHDCIYYPWTGHSTLPQHAR

SEQ ID NO: 766695 - protein, 160 aa, Homo sapiens
MSEVRPLSRDILMETLLYEQLLEPPTMEVLGMTDSEEDLDPMEDFDSLECMEGSDALALRLACIGDEMDVSLRAPRLAQLSEVAMHSLGLAFIYDQTEDIRDVLRSFMDGFTTLKENIMRFWRSPNPGSWVSCEQVLLALLLLLALLLPLLSGGLHLLLK

SEQ ID NO: 766696 - protein, 194 aa, Homo sapiens [sequence omitted]

SEQ ID NO: 766697 - protein, 137 aa, Homo sapiens
DALALRLACIGDEMDVSLRAPRLAQLSEVAMHRYRPMPYASTPGEGPWAVGGGPEHSTGLGPEEALWGMCLDTGAILKPLAASRTSPGSPQLLALAPCHLSLAFLGNKAEPRALFSLAVLIEPRWYISTVVLRGGAT

SEQ ID NO: 766698 - protein, 194 aa, Homo sapiens [sequence omitted]

SEQ ID NO: 766699 - protein, 194 aa, Homo sapiens [sequence omitted]

SEQ ID NO: 766700 - protein, 73 aa, Homo sapiens
TKDPKERLGCHPQTGFADIQGHPFFRNVDWDMMEQKQVVPPFKPNISGEFGLDNFDSQFTNCPQEVLLKSEQV

SEQ ID NO: 766701 - protein, 676 aa, Homo sapiens
GGVLGPGGCRGGGAYGQWEEPRGSGCSGEATLGSALRARWAGRWADGRGSPASAGGGVPHGARSAPPHPRPPALRRGSEEMPTQRDSSTMSHTVAGGGSGDHSHQVRVKAYYRGDIMITHFEPSISFEGLCNEVRDMCSFDNEQLFTMKWIDEEGDPCTVSSQLELEEAFRLYELNKDSELLIHVFPCVPERPGMPCPGEDKSIYRRGARRWRKLYCANGHTFQAKRFNRRAHCAICTDRIWGLGRQGYKCINCKLLVHKKCHKLVTIECGRHSLPQEPVMPMDQSSMHSDHAQTVIPYNPSSHESLDQVGEEKEAMNTRESGKASSSLGLQDFDLLRVIGRGSYAKVLLVRLKKTDRIYAMKVVKKELVNDDEDIDWVQTEKHVFEQASNHPFLVGLHSCFQTESRLFFVIEYVNGGDLMFHMQRQRKLPEEHARFYSAEISLALNYLHERGIIYRDLKLDNVLLDSEGHIKLTDYGMCKEGLRPGDTTSTFCGTPNYIAPEILRGEDYGFSVDWWALGVLMFEMMAGRSPFDIVGSSDNPDQNTEDYLFQVILEKQIRIPRSLSVKAASVLKSFLNKDPKERLGCHPQTGFADIQGHPFFRNVDWDMMEQKQVVPPFKPNISGEFGLDNFDSQFTNEPVQLTPDDDDIVRKIDQSEFEGFEYINPLLMSAEECV

SEQ ID NO: 766702 - protein, 150 aa, Homo sapiens
MAGRSPFDIVGSSDNPDQNTEDYLFQVILEKQIRIPRSLSVKAASVLKSFLNKDPKERLGCHPQTGFADIQGHPFFRNVDWDMMEQKQVVPPFKPNISGEFGLDNFDSQFTNEPVQLTPDDDDIVRKIDQSEFEGFEYINPLLMSAEECV

SEQ ID NO: 766703 - protein, 513 aa, Homo sapiens
GGVLGPGGCRGGGAYGQWEEPRGSGCSGEATLGSALRARWAGRWADGRGSPASAGGGVPHGARSAPPHPRPPALRRGSEEMPTQRDSSTMSHTVAGGGSGDHSHQVRVKAYYRGDIMITHFEPSISFEGLCNEVRDMCSFDNEQLFTMKWIDEEGDPCTVSSQLELEEAFRLYELNKDSELLIHVFPCVPERPGMPCPGEDKSIYRRGARRWRKLYCANGHTFQAKRFNRRAHCAICTDRIWGLGRQGYKCINCKLLVHKKCHKLVTIECGRHSLPQEPVMPMDQSSMHSDHAQTVIPYNPSSHESLDQVGEEKEAMNTRESGKASSSLGLQDFDLLRVIGRGSYAKVLLVRLKKTDRIYAMKVVKKELVNDDEDIDWVQTEKHVFEQASNHPFLVGLHSCFQTESRLFFVIEYVNGGDLMFHMQRQRKLPEEHARFYSAEISLALNYLHERGIIYRDLKLDNVLLDSEGHIKLTDYGMCKEGLRPGDTTSTFCGTPNYIAPEILRGEDYGNK

SEQ ID NO: 766704 - protein, 676 aa, Homo sapiens; identical to SEQ ID NO: 766701

SEQ ID NO: 766705 - protein, 360 aa, Homo sapiens
MNTRESGKASSSLGLQDFDLLRVIGRGSYAKVLLVRLKKTDRIYAMKVVKKELVNDDEDIDWVQTEKHVFEQASNHPFLVGLHSCFQTESRLFFVIEYVNGGDLMFHMQRQRKLPEEHARFYSAEISLALNYLHERGIIYRDLKLDNVLLDSEGHIKLTDYGMCKEGLRPGDTTSTFCGTPNYIAPEILRGEDYGFSVDWWALGVLMFEMMAGRSPFDIVGSSDNPDQNTEDYLFQVILEKQIRIPRSLSVKAASVLKSFLNKDPKERLGCHPQTGFADIQGHPFFRNVDWDMMEQKQVVPPFKPNISGEFGLDNFDSQFTNEPVQLTPDDDDIVRKIDQSEFEGFEYINPLLMSAEECV

SEQ ID NO: 766706 - protein, 513 aa, Homo sapiens; identical to SEQ ID NO: 766703

SEQ ID NO: 766707 - protein, 446 aa, Homo sapiens
SSLTSPTGRGSMAAPSLHPSLGPGIGSPGQLHSPISTLSSPINGMGPPFSVISSPMGPHSMSVPTTPTLGFSTGSPQLSSPMNPVSSSEDIKPPLGLNGVLKVPAHPSGNMASFTKHICAICGDRSSGKHYGVYSCEGCKGFFKRTVRKDLTYTCRDNKDCLIDKRQRNRCQYCRYQKCLAMGMKREAVQEERQRGKDRNENEVESTSSANEDMPVERILEAELAVEPKTETYVEANMGLNPSSPNDPVTNICQAADKQLFTLVEWAKRIPHFSELPLDDQVILLRAGWNELLIASFSHRSIAVKDGILLATGLHVHRNSAHSAGVGAIFDRVLTELVSKMRDMQMDKTELGCLRAIVLFNPDSKGLSNPAEVEALREKVYASLEAYCKHKYPEQPGRFAKLLLRLPALRSIGLKCLEHLFFFKLIGDTPIDTFLMEMLEAPHQMT

SEQ ID NO: 766708 - protein, 271 aa, Homo sapiens
SSLTSPTGRGSMAAPSLHPSLGPGIGSPGQLHSPISTLSSPINGMGPPFSVISSPMGPHSMSVPTTPTLGFSTGSPQLSSPMNPVSSSEDIKPPLGLNGVLKVPAHPSGNMASFTKHICAICGDRSSGKHYGVYSCEGCKGFFKRTVRKDLTYTCRDNKDCLIDKRQRNRCQYCRYQKCLAMGMKREDSKGLSNPAEVEALREKVYASLEAYCKHKYPEQPGRFAKLLLRLPALRSIGLKCLEHLFFFKLIGDTPIDTFLMEMLEAPHQMT

SEQ ID NO: 766709 - protein, 251 aa, Homo sapiens
MSCPLCKVSGPPPGCRGGSLAPLFSLCLGVLVSDSRLPVQTRVPRPLPSLSLLLALRGGLRLVLVSCRAGPGSGRVGHHHLTGLAGGTGLCGPAAICEARGDGGGGGWPVGFPQRGQVAWRERGSGTGSLVGGADAPRPGVVLPGHWWDPCSGLLSGCQLCLKDSWNLRTRSRSALGPGPHAGPGGTTQPGIVHGQRCSPRALLGSLTERLLWLKVGWGRGLGPPWLSPVRPGAPPAGSAPGLRWCGALSG

SEQ ID NO: 766710 - protein, 369 aa, Homo sapiens
SSLTSPTGRGSMAAPSLHPSLGPGIGSPGQLHSPISTLSSPINGMGPPFSVISSPMGPHSMSVPTTPTLGFSTGSPQLSSPMNPVSSSEDIKPPLGLNGVLKVPAHPSGNMASFTKHICAICGDRSSGKHYGVYSCEGCKGFFKRTVRKDLTYTCRDNKDCLIDKRQRNRCQYCRYQKCLAMGMKREAVQEERQRGKDRNENEVESTSSANEDMPVERILEAELAVEPKTETYVEANMGLNPSSPNDPVTNICQAADKQLFTLVEWAKRIPHFSELPLDDQVILLRAGWNELLIASFSHRSIAVKDGILLATGLHVHRNSAHSAGVGAIFDSWPVWTLGHSLSLLCLRDVLSPSLFLLLLVCGPGQWLS

SEQ ID NO: 766711 - protein, 446 aa, Homo sapiens; identical to SEQ ID NO: 766707

SEQ ID NO: 766712 - protein, 446 aa, Homo sapiens; identical to SEQ ID NO: 766707

SEQ ID NO: 766713 - protein, 179 aa, Homo sapiens
DSETNTVSSEALPVLIGSWPARTFHPGACVSRRPSAPWKHTASGKDSPDLRFSEHGVSQEFWAGGLVAVLEMTPSPSPWGTQEGPAGMCSLWVVGWCPCRGAGVRDLVLVHAGVWCKHVCAVQRDACGESRTPAPPRKGGAVTSVLCLFLIKTFPLFSYKFASCKQVHKDPPLVKSGFE

SEQ ID NO: 766714 - protein, 446 aa, Homo sapiens; identical to SEQ ID NO: 766707

SEQ ID NO: 766715 - protein, 446 aa, Homo sapiens; identical to SEQ ID NO: 766707

SEQ ID NO: 766716 - protein, 104 aa, Homo sapiens
NFSPSPPTWIQIATCRTGQSFSLSDFLFNHLWANSPFSGAINYVAHSRCTIQGEGPFFQLVMITNYYCRLSCQPPYQPLSFGNNFFIVPQIVCAHCSTFFKNHK

SEQ ID NO: 766717 - protein, 206 aa, Homo sapiens
LDGCFPPAKTTTGEPSRRQLGNMKSVLLLTTLLVPAHLVAAWSNNYAVDCPQHCDSSECKSSPRCKRTVLDDCGCCRVCAAGRGETCYRTVSGMDGMKCGPGLRCQPSNGEDPFGEEFGICKDCPYGTFGMDCRETCNCQSGICDRGTGKCLKFPFFQYSVTKSSNRFVSLTEHDMASGDGNIVREEVVKENAAGSPVMRKWLNPR

SEQ ID NO: 766718 - protein, 206 aa, Homo sapiens; identical to SEQ ID NO: 766717

SEQ ID NO: 766719 - protein, 122 aa, Homo sapiens
MEASALTSSAVTSVAKVVRVASGSAVVLPLARIATVVIGGVVAMAAVPMVLSAMGFTAAGIASSSIAAKMMSAAAIANGGGVASGSLVATLQSLGATGLSGLTKFILGSIGSAIAAVIARFY

SEQ ID NO: 766720 - protein, 122 aa, Homo sapiens; identical to SEQ ID NO: 766719

SEQ ID NO: 766721 - protein, 140 aa, Homo sapiens
GITPFGNTSKLKTVRSASHSQELSFFGQDCYSCDWRSCGHGGCAHGAQCHGLHCGGNRLVLHSSQDDVRGGHCQWGWSCLGQPCGYSAVTGSNWTLRIDQVHPGLHWVCHCGCHCEVLLAPCPSPCREENHARGEGTQPS

SEQ ID NO: 766722 - protein, 122 aa, Homo sapiens; identical to SEQ ID NO: 766719

SEQ ID NO: 766723 - protein, 122 aa, Homo sapiens; identical to SEQ ID NO: 766719

SEQ ID NO: 766724 - protein, 122 aa, Homo sapiens; identical to SEQ ID NO: 766719

SEQ ID NO: 766725 - protein, 112 aa, Homo sapiens
RPPTTTKFAAASTKFILGFIGSAIAAVIGGSTVVIGGVVAMAAVPMVLSAMGFTAAGIASSSIAAKMMSAAAIANGGGVASGSLVATLQSLGEKAPSHPDPARSQLSQIYLG

SEQ ID NO: 766726 - protein, 122 aa, Homo sapiens; identical to SEQ ID NO: 766719

SEQ ID NO: 766727 - protein, 122 aa, Homo sapiens; identical to SEQ ID NO: 766719

SEQ ID NO: 766728 - protein, 122 aa, Homo sapiens; identical to SEQ ID NO: 766719

SEQ ID NO: 766729 - protein, 1040 aa, Homo sapiens
MGTATRRKPHLLLVAAVALVSSSAWSSALGSQTTFGPVFEDQPLSVLFPEESTEEQVLLACRARASPPATYRWKMNGTEMKLEPGSRHQLVGGNLVIMNPTKAQDAGVYQCLASNPVGTVVSREAILRFGFLQEFSKEERDPVKAHEGWGVMLPCNPPAHYPGLSYRWLLNEFPNFIPTDGRHFVSQTTGNLYIARTNASDLGNYSCLATSHMDFSTKSVFSKFAQLNLAAEDTRLFAPSIKARFPAETYALVGQQVTLECFAFGNPVPRIKWRKVDGSLSPQWTTAEPTLQIPSVSFEDEGTYECEAENSKGRDTVQGRIIVQAQPEWLKVISDTEADIGSNLRWGCAAAGKPRPTVRWLRNGEPLASQNRVEVLAGDLRFSKLSLEDSGMYQCVAENKHGTIYASAELAVQALAPDFRLNPVRRLIPAARGGEILIPCQPRAAPKAVVLWSKGTEILVNSSRVTVTPDGTLIIRNISRSDEGKYTCFAENFMGKANSTGILSVRDATKITLAPSSADINLGDNLTLQCHASHDPTMDLTFTWTLDDFPIDFDKPGGHYRRTNVKETIGDLTILNAQLRHGGKYTCMAQTVVDSASKEATVLVRGPPGPPGGVVVRDIGDTTIQLSWSRGFDNHSPIAKYTLQARTPPAGKWKQVRTNPANIEGNAETAQVLGLTPWMDYEFRVIASNILGTGEPSGPSSKIRTREAAPSVAPSGLSGGGGAPGELIVNWTPMSREYQNGDGFGYLLSFRRQGSTHWQTARVPGADAQYFVYSNESVRPYTPFEVKIRSYNRRGDGPESLTALVYSAEEEPRVAPTKVWAKGVSSSEMNVTWEPVQQDMNGILLGYEIRYWKAGDKEAAADRVRTAGLDTSARVSGLHPNTKYHVTVRAYNRAGTGPASPSANATTMKPPPRRPPGNISWTFSSSSLSIKWDPVVPFRNESAVTGYKMLYQNDLHLTPTLHLTGKNWIEIPVPEDIGHALVQIRTTGPGGDGIPAEVHIVRNGGTSMMVENMAVRPAPHPGTVISHSVAMLILIGSLEL

SEQ ID NO: 766730 - protein, 97 aa, Homo sapiens
SSHHDLCRLALEHWNSLASTPSILQLLTDTGTQKPSSLPVRYSSPRATQKLWFHLKAHPCLAPFISVSCFIPLTPYCSPLGALPSTSFAPELLAPFF

SEQ ID NO: 766731 - protein, 101 aa, Homo sapiens
GLSRKTEQTIDTCDHTDDFHLKGIMPKEGNHTQKTTYSVVPFIGNSGKGKAVGTESRSVVTRVCGERKALTVKGYEGIFSGFGNVLYHFSGNDMNVYICPD

SEQ ID NO: 766732 - protein, 191 aa, Homo sapiens
RYPARLRSDSQQNVYNPSEGSTWNPFDDDNFSKLTAEELLNKDFAKLGEGKHPEKLGGSAESLIPGFQSTQGDAFATTSFSAGTAEKRKGGQTVDSGLPLLSVSDPFIPLQVPDAPEKLIEGLKSPDTSLLLPDLLPMTDPFGSTSDAVIGKVIISVSSVMHDMCACFKNDKYLVNQSLGNSPATPEAKAI

SEQ ID NO: 766733 - protein, 864 aa, Homo sapiens
MKKFFDSRREQGGSGLGSGSSGGGGSTSGLGSGYIGRVFGIGRQQVTVDEVLAEGGFAIVFLVRTSNGMKCALKRMFVNNEHDLQVCKREIQIMRDLSGHKNIVGYIDSSINNVSSGDVWEVLILMDFCRGGQVVNLMNQRLQTGFTENEVLQIFCDTCEAVARLHQCKTPIIHRDLKVENILLHDRGHYVLCDFGSATNKFQNPQTEGVNAVEDEIKKYTTLSYRAPEMVNLYSGKIITTKADIWALGCLLYKLCYFTLPFGESQVAICDGNFTIPDNSRYSQDMHCLIRYMLEPDPDKRPDIYQVSYFSFKLLKKECPIPNVQNSPIPAKLPEPVKASEAAAKKTQPKARLTDPIPTTETSIAPRQRPKAGQTQPNPGILPIQPALTPRKRATVQPPPQAAGSSNQPGLLASVPQPKPQAPPSQPLPQTQAKQPQAPPTPQQTPSTQAQGLPAQAQATPQHQQQLFLKQQQQQQQPPPAQQQPAGTFYQQQQAQTQQFQAVHPATQQPAIAQFPVVSQGGSQQQLMQNFYQQQQQQQQQQQQQQLATALHQQQLMTQQAALQQKPTMAAGQQPQPQPAAAPQPAPAQEPAQIQAPVRQQPKVQTTPPPAVQGQKVGSLTPPSSPKTQRAGHRRILSDVTHSAVFGVPASKSTQLLQAAAAEASLNKSKSATTTPSGSPRTSQQNVYNPSEGSTWNPFDDDNFSKLTAEELLNKDFAKLGEGKHPEKLGGSAESLIPGFQSTQGDAFATTSFSAGTAEKRKGGQTVDSGLPLLSVSDPFIPLQVPDAPEKLIEGLKSPDTSLLLPDLLPMTDPFGSTSDAVIGKVIISVSSVMHDMCACFKNDKYLVNQSLGNSPATPEAKAI

SEQ ID NO: 766734 - protein, 466 aa, Homo sapiens
MKKFFDSRREQGGSGLGSGSSGGGGSTSGLGSGYIGRVFGIGRQQVTVDEVLAEGGFAIVFLVRTSNGMKCALKRMFVNNEHDLQVCKREIQIMRDLSGHKNIVGYIDSSINNVSSGDVWEVLILMDFCRGGQVVNLMNQRLQTGFTENEVLQIFCDTCEAVARLHQCKTPIIHRDLKVENILLHDRGHYVLCDFGSATNKFQNPQTEGVNAVEDEIKKYTTLSYRAPEMVNLYSGKIITTKADIWALGCLLYKLCYFTLPFGESQVAICDGNFTIPDNSRYSQDMHCLIRYMLEPDPDKRPDIYQVSYFSFKLLKKECPIPNVQNSPIPAKLPEPVKASEAAAKKTQPKARLTDPIPTTETSIAPRQRPKAGQTQPNPGILPIQPALTPRKRATVQPPPQAAGSSNQPGLLASVPQPKPQAPPSQPLPQTQAKQPQAPPTPQQTPSTQAQGLPAQAQATPQHQQQ

SEQ ID NO: 766735 - protein, 466 aa, Homo sapiens; identical to SEQ ID NO: 766734

SEQ ID NO: 766736 - protein, 466 aa, Homo sapiens; identical to SEQ ID NO: 766734

SEQ ID NO: 766737 - protein, 758 aa, Homo sapiens
MKKFFDSRREQGGSGLGSGSSGGGGSTSGLGSGYIGRVFGIGRQQVTVDEVLAEGGFAIVFLVRTSNGMKCALKRMFVNNEHDLQVCKREIQIMRDLSGHKNIVGYIDSSINNVSSGDVWEVLILMDFCRGGQVVNLMNQRLQTGFTENEVLQIFCDTCEAVARLHQCKTPIIHRDLKVENILLHDRGHYVLCDFGSATNKFQNPQTEGVNAVEDEIKKYTTLSYRAPEMVNLYSGKIITTKADIWALGCLLYKLCYFTLPFGESQVAICDGNFTIPDNSRYSQDMHCLIRYMLEPDPDKRPDIYQVSYFSFKLLKKECPIPNVQNSPIPAKLPEPVKASEAAAKKTQPKARLTDPIPTTETSIAPRQRPKAGQTQPNPGILPIQPALTPRKRATVQPPPQAAGSSNQPGLLASVPQPKPQAPPSQPLPQTQAKQPQAPPTPQQTPSTQAQGLPAQAQATPQHQQQLFLKQQQQQQQPPPAQQQPAGTFYQQQQAQTQQFQAVHPATQQPAIAQFPVVSQGGSQQQLMQNFYQQQQQQQQQQQQQQLATALHQQQLMTQQAALQQKPTMAAGQQPQPQPAAAPQPAPAQEPAQIQAPVRQQPKVQTTPPPAVQGQKVGSLTPPSSPKTQRAGHRRILSDVTHSAVFGVPASKSTQLLQAAAAEASLNKSKSATTTPSGSPRTSQQNVYNPSEGSTWNPFDDDNFSKLTAEELLNKDFAKLGEGKHPEKLGGSAESLIPGFQSTQGDAFATTSFSAGTG

SEQ ID NO: 766738 - protein, 501 aa, Homo sapiens
MKKFFDSRREQGGSGLGSGSSGGGGSTSGLGSGYIGRVFGIGRQQVTVDEVLAEGGFAIVFLVRTSNGMKCALKRMFVNNEHDLQVCKREIQIMRDLSGHKNIVGYIDSSINNVSSGDVWEVLILMDFCRGGQVVNLMNQRLQTGFTENEVLQIFCDTCEAVARLHQCKTPIIHRDLKVENILLHDRGHYVLCDFGSATNKFQNPQTEGVNAVEDEIKKYTTLSYRAPEMVNLYSGKIITTKADIWALGCLLYKLCYFTLPFGESQVAICDGNFTIPDNSRYSQDMHCLIRYMLEPDPDKRPDIYQVSYFSFKLLKKECPIPNVQNSPIPAKLPEPVKASEAAAKKTQPKARLTDPIPTTETSIAPRQRPKAGQTQPNPGILPIQPALTPRKRATVQPPPQAAGSSNQPGLLASVPQPKPQAPPSQPLPQTQAKQPQAPPTPQQTPSTQAQGLPAQAQATPQHQQQLFLKQQQQQQQPPPAHSSNNNSNSNSWPQPCINNS

SEQ ID NO: 766739 - protein, 328 aa, Homo sapiens
MKKFFDSRREQGGSGLGSGSSGGGGSTSGLGSGYIGRVFGIGRQQVTVDEVLAEGGFAIVFLVRTSNGMKCALKRMFVNNEHDLQVCKREIQIMRDLSGHKNIVGYIDSSINNVSSGDVWEVLILMDFCRGGQVVNLMNQRLQTGFTENEVLQIFCDTCEAVARLHQCKTPIIHRDLKVENILLHDRGHYVLCDFGSATNKFQNPQTEGVNAVEDEIKKYTTLSYRAPEMVNLYSGKIITTKADIWALGCLLYKLCYFTLPFGESQVAICDGNFTIPDNSRYSQDMHCLIRYMLEPDPDKRPDIYQVSYFSFKLLKKECPIPNVQNSP

SEQ ID NO: 766740 - protein, 308 aa, Homo sapiens
MKKFFDSRREQGGSGLGSGSSGGGGSTSGLGSGYIGRVFGIGRQQVTVDEVLAEGGFAIVFLVRTSNGMKCALKRMFVNNEHDLQVCKREIQIMRDLSGHKNIVGYIDSSINNVSSGDVWEVLILMDFCRGGQVVNLMNQRLQTGFTENEVLQIFCDTCEAVARLHQCKTPIIHRDLKVENILLHDRGHYVLCDFGSATNKFQNPQTEGVNAVEDEIKKYTTLSYRAPEMVNLYSGKIITTKADIWALGCLLYKLCYFTLPFGESQVAICDGNFTIPDNSRYSQDMHCLIRYMLEPEPDYSRIQSGIL

SEQ ID NO: 766741 - protein, 219 aa, Homo sapiens
MKKFFDSRREQGGSGLGSGSSGGGGSTSGLGSGYIGRVFGIGRQQVTVDEVLAEGGFAIVFLVRTSNGMKCALKRMFVNNEHDLQVCKREIQIMRDLSGHKNIVGYIDSSINNVSSGDVWEVLILMDFCRGGQVVNLMNQRLQTGFTENEVLQIFCDTCEAVARLHQCKTPIIHRDLKVENILLHDRGHYVLCDFGSATNKFQNPQTEGVNAVEDEIKK

SEQ ID NO: 766742 - protein, 114 aa, Homo sapiens
MKKFFDSRREQGGSGLGSGSSGGGGSTSGLGSGYIGRVFGIGRQQVTVDEVLAEGGFAIVFLVRTSNGMKCALKRMFVNNEHDLQVCKREIQIMRDLSGTRIFGVQSGGPLEYP

SEQ ID NO: 766743 - protein, 466 aa, Homo sapiens; identical to SEQ ID NO: 766734

SEQ ID NO: 766744 - protein, 547 aa, Homo sapiens
MKKFFDSRREQGGSGLGSGSSGGGGSTSGLGSGYIGRVFGIGRQQVTVDEVLAEGGFAIVFLVRTSNGMKCALKRMFVNNEHDLQVCKREIQIMRDLSGHKNIVGYIDSSINNVSSGDVWEVLILMDFCRGGQVVNLMNQRLQTGFTENEVLQIFCDTCEAVARLHQCKTPIIHRDLKVENILLHDRGHYVLCDFGSATNKFQNPQTEGVNAVEDEIKKYTTLSYRAPEMVNLYSGKIITTKADIWALGCLLYKLCYFTLPFGESQVAICDGNFTIPDNSRYSQDMHCLIRYMLEPDPDKRPDIYQVSYFSFKLLKKECPIPNVQNSPIPAKLPEPVKASEAAAKKTQPKARLTDPIPTTETSIAPRQRPKAGQTQPNPGILPIQPALTPRKRATVQPPPQAAGSSNQPGLLASVPQPKPQAPPSQPLPQTQAKQPQAPPTPQQTPSTQAQGLPAQAQATPQHQQQLFLKQQQQQQQPPPAQQQPAGTFYQQQQAQTQQTPPLSPASPSQKRVEDEMKAMGLLEDTQCLFWVREVLTKGFSNKNKCH

SEQ ID NO: 766745 - protein, 362 aa, Homo sapiens
MKKFFDSRREQGGSGLGSGSSGGGGSTSGLGSGYIGRVFGIGRQQVTVDEVLAEGGFAIVFLVRTSNGMKCALKRMFVNNEHDLQVCKREIQIMRDLSGHKNIVGYIDSSINNVSSGDVWEVLILMDFCRGGQVVNLMNQRLQTGFTENEVLQIFCDTCEAVARLHQCKTPIIHRDLKVENILLHDRGHYVLCDFGSATNKFQNPQTEGVNAVEDEIKKYTTLSYRAPEMVNLYSGKIITTKADIWALGCLLYKLCYFTLPFGESQVAICDGNFTIPDNSRYSQDMHCLIRYMLEPDPDKRPDIYQVSYFSFKLLKKECPIPNVQNSPIPAKLPEPVKASEAAAKKTQPKASMKEIYTSKHI

SEQ ID NO: 766746 - protein, 646 aa, Homo sapiens
AGYSEDPADCADLMDFCRGGQVVNLMNQRLQTGFTENEVLQIFCDTCEAVARLHQCKTPIIHRDLKVENILLHDRGHYVLCDFGSATNKFQNPQTEGVNAVEDEIKKYTTLSYRAPEMVNLYSGKIITTKADIWALGCLLYKLCYFTLPFGESQVAICDGNFTIPDNSRYSQDMHCLIRYMLEPDPDKRPDIYQVSYFSFKLLKKECPIPNVQNSPIPAKLPEPVKASEAAAKKTQPKARLTDPIPTTETSIAPRQRPKAGQTQPNPGILPIQPALTPRKRATVQPPPQAAGSSNQPGLLASVPQPKPQAPPSQPLPQTQAKQPQAPPTPQQTPSTQAQGLPAQAQATPQHQQQLFLKQQQQQQQPPPAQQQPAGTFYQQQQAQTQQFQAVHPATQQPAIAQFPVVSQGGSQQQLMQNFYQQQQQQQQQQQQQQLATALHQQQLMTQQAALQQKPTMAAGQQPQPQPAAAPQPAPAQEPAQIQAPVRQQPKVQTTPPPAVQGQKVGSLTPPSSPKTQRAGHRRILSDVTHSAVFGVPASKSTQLLQAAAAEASLNKSKSATTTPSGSPRTSQQNVYNPSEGSTWNPFDDDNFSKLTAEELLNKDFAKLGEGKHPEKLGGSAESLIPGFQSTQGDAFATTSFSAGTG

SEQ ID NO: 766747 - protein, 389 aa, Homo sapiens
TQGRAAADKTCPAGCCCAGGGCCCCCCCLRKSCCRIQQSAWPFSQCSPTKTPSPTQPASAANSGQAATGSSHSTADAFYSGPGSARSGPGHTPAPAATLPQAATAAATATASTAAAGRHVLPAAAGPDSAVSGSTSSNPATSNCSVPCGVPRRLSTAANAEFLPAAAAAAQQQQQQQLATALHQQQLMTQQAALQQKPTMAAGQQPQPQPAAAPQPAPAQEPAQIQAPVRQQPKVQTTPPPAVQGQKVGSLTPPSSPKTQRAGHRRILSDVTHSAVFGVPASKSTQLLQAAAAEASLNKSKSATTTPSGSPRTSQQNVYNPSEGSTWNPFDDDNFSKLTAEELLNKDFAKLGEGKHPEKLGGSAESLIPGFQSTQGDAFATTSFSAGTG

SEQ ID NO: 766748 - protein, 191 aa, Homo sapiens
VEATRLPPRPLLQEYAGIVVQQPDCAELTFPSLPCGSGDINSLFQNSVCTETLFPQSSSRGRLLPIRGDRTAVAGEAPVPRRAAPRGTSGGGSLPGWVDGAGRERARGRGGGSVSARRSRDQLAGGREPSAAPALAAAPPLLCVAGRPGGRDNVAGLVAGRRPPSRLKFKLTRIAFWRRRGPAARLTRIFL

SEQ ID NO: 766749 - protein, 142 aa, Homo sapiens
MNSLEQAEAPRVVSLIPAVVSGNCQDLKAFERRLTEYIHCLQPATGRWRMLLIVVSVCTATGAWNWLIDPETQKVSFFTSLWNHPFFTISCITLIGLFFAGIHKRVVAPSIIAARCRTVLAEYNMSCDDTGKLILKPRPHVQ

SEQ ID NO: 766750 - protein, 125 aa, Homo sapiens
MNSLEQAEDLKAFERRLTEYIHCLQPATGRWRMLLIVVSVCTATGAWNWLIDPETQKVSFFTSLWNHPFFTISCITLIGLFFAGIHKRVVAPSIIAARCRTVLAEYNMSCDDTGKLILKPRPHVQ

SEQ ID NO: 766751 - protein, 338 aa, Homo sapiens
MDPNTIIEALRGTMDPALREAAERQLNEAHKSLNFVSTLLQITMSEQLDLPVRQAGVIYLKNMITQYWPDRETAPGDISPYTIPEEDRHCIRENIVEAIIHSPELIRVQLTTCIHHIIKHDYPSRWTAIVDKIGFYLQSDNSACWLGILLCLYQLVKNYEYKKPEERSPLVAAMQHFLPVLKDRFIQLLSDQSDQSVLIQKQIFKIFYALVQYTLPLELINQQNLTEWIEILKTVVNRDVPNETLQVEEDDRPELPWWKCKKWALHILARLFERYGSPGNVSKEYNEFAEVFLKAFAVGVQQVLLKVLYQYKEKQYMAPRVLQQALQQVHELDSLPSS

SEQ ID NO: 766752 - protein, 76 aa, Homo sapiens
LGAFELLVKNYEYKKPEERSPLVAAMQHFLPVLKDRFIQLLSDQSDQSVLIQKQIFKIFYALVQVISVKQFLCIKS

SEQ ID NO: 766753 - protein, 1038 aa, Homo sapiens
MDPNTIIEALRGTMDPALREAAERQLNEAHKSLNFVSTLLQITMSEQLDLPVRQAGVIYLKNMITQYWPDRETAPGDISPYTIPEEDRHCIRENIVEAIIHSPELIRVQLTTCIHHIIKHDYPSRWTAIVDKIGFYLQSDNSACWLGILLCLYQLVKNYEYKKPEERSPLVAAMQHFLPVLKDRFIQLLSDQSDQSVLIQKQIFKIFYALVQYTLPLELINQQNLTEWIEILKTVVNRDVPNETLQVEEDDRPELPWWKCKKWALHILARLFERYGSPGNVSKEYNEFAEVFLKAFAVGVQQVLLKVLYQYKEKQYMAPRVLQQTLNYINQGVSHALTWKNLKPHIQGIIQDVIFPLMCYTDADEELWQEDPYEYIRMKFDVFEDFISPTTAAQTLLFTACSKRKEVLQKTMGFCYQILTEPNADPRKKDGALHMIGSLAEILLKKKIYKDQMEYMLQNHVFPLFSSELGYMRARACWVLHYFCEVKFKSDQNLQTALELTRRCLIDDREMPVKVEAAIALQVLISNQEKAKEYITPFIRPVMQALLHIIRETENDDLTNVIQKMICEYSEEVTPIAVEMTQHLAMTFNQVIQTGPDEEGSDDKAVTAMGILNTIDTLLSVVEDHKEITQQLEGICLQVIGTVLQQHVLEFYEEIFSLAHSLTCQQVSPQMWQLLPLVFEVFQQDGFDYFTDMMPLLHNYVTVDTDTLLSDTKYLEMIYSMCKKVLTGVAGEDAECHAAKLLEVIILQCKGRGIDQCIPLFVEAALERLTREVKTSELRTMCLQVAIAALYYNPHLLLNTLENLRFPNNVEPVTNHFITQWLNDVDCFLGLHDRKMCVLGLCALIDMEQIPQVLNQVSGQILPAFILLFNGLKRAYACHAEHENDSDDDDEAEDDDETEELGSDEDDIDEDGQEYLEILAKQAGEDGDDEDWEEDDAEETALEGYSTIIDDEDNPVDEYQIFKAIFQTIQNRNPVWYQALTHGLNEEQRKQLQDIATLADQRRAAHESKMIEKHGGYKFSAPVVPSSFNFGGPAPGMN

SEQ ID NO: 766754 - protein, 1038 aa, Homo sapiens; identical to SEQ ID NO: 766753

SEQ ID NO: 766755 - protein, 1038 aa, Homo sapiens; identical to SEQ ID NO: 766753

SEQ ID NO: 766756 - protein, 1038 aa, Homo sapiens; identical to SEQ ID NO: 766753

SEQ ID NO: 766757 - protein, 1038 aa, Homo sapiens; identical to SEQ ID NO: 766753

SEQ ID NO: 766758 - protein, 1038 aa, Homo sapiens; identical to SEQ ID NO: 766753

SEQ ID NO: 766759 - protein, 1038 aa, Homo sapiens; identical to SEQ ID NO: 766753

SEQ ID NO: 766760 - protein, 1038 aa, Homo sapiens; identical to SEQ ID NO: 766753

SEQ ID NO: 766761 - protein, 1038 aa, Homo sapiens; identical to SEQ ID NO: 766753

SEQ ID NO: 766762 - protein, 722 aa, Homo sapiens
MAPRVLQQTLNYINQGVSHALTWKNLKPHIQGIIQDVIFPLMCYTDADEELWQEDPYEYIRMKFDVFEDFISPTTAAQTLLFTACSKRKEVLQKTMGFCYQILTEPNADPRKKDGALHMIGSLAEILLKKKIYKDQMEYMLQNHVFPLFSSELGYMRARACWVLHYFCEVKFKSDQNLQTALELTRRCLIDDREMPVKVEAAIALQVLISNQEKAKEYITPFIRPVMQALLHIIRETENDDLTNVIQKMICEYSEEVTPIAVEMTQHLAMTFNQVIQTGPDEEGSDDKAVTAMGILNTIDTLLSVVEDHKEITQQLEGICLQVIGTVLQQHVLEFYEEIFSLAHSLTCQQVSPQMWQLLPLVFEVFQQDGFDYFTDMMPLLHNYVTVDTDTLLSDTKYLEMIYSMCKKVLTGVAGEDAECHAAKLLEVIILQCKGRGIDQCIPLFVEAALERLTREVKTSELRTMCLQVAIAALYYNPHLLLNTLENLRFPNNVEPVTNHFITQWLNDVDCFLGLHDRKMCVLGLCALIDMEQIPQVLNQVSGQILPAFILLFNGLKRAYACHAEHENDSDDDDEAEDDDETEELGSDEDDIDEDGQEYLEILAKQAGEDGDDEDWEEDDAEETALEGYSTIIDDEDNPVDEYQIFKAIFQTIQNRNPVWYQALTHGLNEEQRKQLQDIATLADQRRAAHESKMIEKHGGYKFSAPVVPSSFNFGGPAPGMN

SEQ ID NO: 766763 - protein, 1038 aa, Homo sapiens; identical to SEQ ID NO: 766753

SEQ ID NO: 766764 - protein, 1038 aa, Homo sapiens; identical to SEQ ID NO: 766753

SEQ ID NO: 766765 - protein, 1038 aa, Homo sapiens; identical to SEQ ID NO: 766753

SEQ ID NO: 766766 - protein, 1038 aa, Homo sapiens; identical to SEQ ID NO: 766753

SEQ ID NO: 766767 - protein, 2322 aa, Homo sapiens
MQSGRGPPLPAPGLALALTLTMLARLASAASFFGENHLEVPVATALTDIDLQLQFSTSQPEALLLLAAGPADHLLLQLYSGRLQVRLVLGQEELRLQTPAETLLSDSIPHTVVLTVVEGWATLSVDGFLNASSAVPGAPLEVPYGLFVGGTGTLGLPYLRGTSRPLRGCLHAATLNGRSLLRPLTPDVHEGCAEEFSASDDVALGFSGPHSLAAFPAWGTQDEGTLEFTLTTQSRQAPLAFQAGGRRGDFIYVDIFEGHLRAVVEKGQGTVLLHNSVPVADGQPHEVSVHINAHRLEISVDQYPTHTSNRGVLSYLEPRGSLLLGGLDAEASRHLQEHRLGLTPEATNASLLGCMEDLSVNGQRRGLREALLTRNMAAGCRLEEEEYEDDAYGHYEAFSTLAPEAWPAMELPEPCVPEPGLPPVFANFTQLLTISPLVVAEGGTAWLEWRHVQPTLDLMEAELRKSQVLFSVTRGAHYGELELDILGAQARKMFTLLDVVNRKARFIHDGSEDTSDQLVLEVSVTARVPMPSCLRRGQTYLLPIQVNPVNDPPHIIFPHGSLMVILEHTQKPLGPEVFQAYDPDSACEGLTFQVLGTSSGLPVERRDQPGEPATEFSCRELEAGSLVYVHCGGPAQDLTFRVSDGLQASPPATLKVVAIRPAIQIHRSTGLRLAQGSAMPILPANLSVETNAVGQDVSVLFRVTGALQFGELQKHSTGGVEGAEWWATQAFHQRDVEQGRVRYLSTDPQHHAYDTVENLALEVQVGQEILSNLSFPVTIQRATVWMLRLEPLHTQNTQQETLTTAHLEATLEEAGPSPPTFHYEVVQAPRKGNLQLQGTRLSDGQGFTQDDIQAGRVTYGATARASEAVEDTFRFRVTAPPYFSPLYTFPIHIGGDPDAPVLTNVLLVVPEGGEGVLSADHLFVKSLNSASYLYEVMERPRLGRLAWRGTQDKTTMVTSFTNEDLLRGRLVYQHDDSETTEDDIPFVATRQGESSGDMAWEEVRGVFRVAIQPVNDHAPVQTISRIFHVARGGRRLLTTDDVAFSDADSGFADAQLVLTRKDLLFGSIVAVDEPTRPIYRFTQEDLRKRRVLFVHSGADRGWIQLQVSDGQHQATALLEVQASEPYLRVANGSSLVVPQGGQGTIDTAVLHLDTNLDIRSGDEVHYHVTAGPRWGQLVRAGQPATAFSQQDLLDGAVLYSHNGSLSPEDTMAFSVEAGPVHTDATLQVTIALEGPLAPLKLVRHKKIYVFQGEAAEIRRDQLEAAQEAVPPADIVFSVKSPPSAGYLVMVSRGALADEPPSLDPVQSFSQEAVDTGRVLYLHSRPEAWSDAFSLDVASGLGAPLEGVLVELEVLPAAIPLEAQNFSVPEGGSLTLAPPLLRVSGPYFPTLLGLSLQVLEPPQHGPLQKEDGPQARTLSAFSWRMVEEQLIRYVHDGSETLTDSFVLMANASEMDRQSHPVAFTVTVLPVNDQPPILTTNTGLQMWEGATAPIPAEALRSTDGDSGSEDLVYTIEQPSNGRVVLRGAPGTEVRSFTQAQLDGGLVLFSHRGTLDGGFPFRLSDGEHTSPGHFFRVTAQKQVLLSLKGSQTLTVCPGSVQPLSSQTLRASSSAGTDPQLLLYRVVRGPQLGRLFHAQQDSTGEALVNFTQAEVYAGNILYEHEMPPEPFWEAHDTLELQLSSPPARDVAATLAVAVSFEAACPQRPSHLWKNKGLWVPEGQRARITVAALDASNLLASVPSPQRSEHDVLFQVTQFPSRGQLLVSEEPLHAGQPHFLQSQLAAGQLVYAHGGGGTQQDGFHFRAHLQGPAGASVAGPQTSEAFAITVRDVNERPPQPQASVPLRLTRGSRAPISRAQLSVVDPDSAPGEIEYEVQRAPHNGFLSLVGGGLGPVTRFTQADVDSGRLAFVANGSSVAGIFQLSMSDGASPPLPMSLAVDILPSAIEVQLRAPLEVPQALGRSSLSQQQLRVVSDREEPEAAYRLIQGPQYGHLLVGGRPTSAFSQFQIDQGEVVFAFTNFSSSHDHFRVLALARGVNASAVVNVTVRALLHVWAGGPWPQGATLRLDPTVLDAGELANRTGSVPRFRLLEGPRHGRVVRVPRARTEPGGSQLVEQFTQQDLEDGRLGLEVGRPEGRAPGPAGDSLTLELWAQGVPPAVASLDFATEPYNAARPYSVALLSVPEAARTEAGKPESSTPTGEPGPMASSPEPAVAKGGFLSFLEANMFSVIIPMCLVLLLLALILPLLFYLRKRNKTGKHDVQVLTAKPRNGLAGDTETFRKVEPGQAIPLTAVPGQGPPPGGQPDPELLQFCRTPNPALKNGQYWV

SEQ ID NO: 766768 - protein, 313 aa, Homo sapiens
PEVPGRVPRANVSCKVRLETGDMAAPGPALCLFDVDGTLTAPRQKITKEMDDFLQKLRQKIKIGVVGGSDFEKVQEQLGNDVVEKYDYVFPENGLVAYKDGKLLCRQNIQSHLGEALIQDLINYCLSYIAKIKLPKKRGTFIEFRNGMLNVSPIGRSCSQEERIEFYELDKKENIRQKFVADLRKEFAGKGLTFSIGGQISFDVFPDGWDKRYCLRHVENDGYKTIYFFGDKTMPLQAFFLVADDIMDVIPYPPGTDLWYQKPGVGLDAIKMMLTSLEACIYPLLKLYWREQAYYTETDRALLQSSYQTEMGR

SEQ ID NO: 766769 - protein, 146 aa, Homo sapiens [sequence omitted]

SEQ ID NO: 766770 - protein, 163 aa, Homo sapiens
MMNIQSHLGEALIQDLINYCLSYIAKIKLPKKRGTFIEFRNGMLNVSPIGRSCSQEERIEFYELDKKENIRQKFVADLRKEFAGKGLTFSIGGQISFDVFPDGWDKRYCLRHVENDGYKTIYFFGDKTMPGGNDHEIFTDPRTMGYSVTAPEDTRRICELLFS

SEQ ID NO: 766771 - protein, 121 aa, Homo sapiens
MLNVSPIGRSCSQEERIEFYELDKKENIRQKFVADLRKEFAGKGLTFSIGGQISFDVFPDGWDKRYCLRHVENDGYKTIYFFGDKTMPGGNDHEIFTDPRTMGYSVTAPEDTRRICELLFS

SEQ ID NO: 766772 - protein, 131 aa, Homo sapiens [sequence omitted]

SEQ ID NO: 766773 - protein, 131 aa, Homo sapiens [sequence omitted]

SEQ ID NO: 766774 - protein, 268 aa, Homo sapiens
PEVPGRVPRANVSCKVRLETGDMAAPGPALCLFDVDGTLTAPRQKITKEMDDFLQKLRQKIKIGVVGGSDFEKVQEQLGNDVVEKYDYVFPENGLVAYKDGKLLCRQNIQSHLGEALIQDLINYCLSYIAKIKLPKKRGTFIEFRNGMLNVSPIGRSCSQEERIEFYELDKKENIRQKFVADLRKEFAGKGLTFSIGGQISFDVFPDGWDKRYCLRHVENDGYKTIYFFGDKTMPGGNDHEIFTDPRTMGYSVTAPEDTRRICELLFS

SEQ ID NO: 766775 - protein, 262 aa, Homo sapiens
MARYEAGVIGRGETGDMAAPGPALCLFDVDGTLTAPRQKITKEMDDFLQKLRQKIKIGVVGGSDFEKVQEQLGNDVVEKYDYVFPENGLVAYKDGKLLCRQNIQSHLGEALIQDLINYCLSYIAKIKLPKKRGTFIEFRNGMLNVSPIGRSCSQEERIEFYELDKKENIRQKFVADLRKEFAGKGLTFSIGGQISFDVFPDGWDKRYCLRHVENDGYKTIYFFGDKTMPGGNDHEIFTDPRTMGYSVTAPEDTRRICELLFS

SEQ ID NO: 766776 - protein, 88 aa, Homo sapiens
PEVPGRVPRANVSCKVRLETGDMAAPGPALCLFDVDGTLTAPRQKITKEMDDFLQKLRQKIKIGVVGGSDFEKVQEQLGNDEYSKSSG

SEQ ID NO: 766777 - protein, 141 aa, Homo sapiens
PEVPGRVPRANVSCKVRLETGDMAAPGPALCLFDVDGTLTAPRQKITKEMDDFLQKLRQKIKIGVVGGSDFEKVQEQLGNDVVEKYDYVFPENGLVAYKDGKLLCRQNIQSHLGEALIQDLINYCLSYIAKIKLPKKRKKI

SEQ ID NO: 766778 - protein, 131 aa, Homo sapiens [sequence omitted]

SEQ ID NO: 766779 - protein, 738 aa, Homo sapiens
MQPRWAQGATMWLGVLLTLLLCSSLEGQENSFTINSVDMKSLPDWTVQNGKNLTLQCFADVSTTSHVKPQHQMLFYKDDVLFYNISSMKSTESYFIPEVRIYDSGTYKCTVIVNNKEKTTAEYQLLVEGVPSPRVTLDKKEAIQGGIVRVNCSVPEEKAPIHFTIEKLELNEKMVKLKREKNSRDQNFVILEFPVEEQDRVLSFRCQARIISGIHMQTSESTKSELVTVTESFSTPKFHISPTGMIMEGAQLHIKCTIQVTHLAQEFPEIIIQKDKAIVAHNRHGNKAVYSVMAMVEHSGNYTCKVESSRISKVSSIVVNITELFSKPELESSFTHLDQGERLNLSCSIPGAPPANFTIQKEDTIVSQTQDFTKIASKSDSGTYICTAGIDKVVKKSNTVQIVVCEMLSQPRISYDAQFEVIKGQTIEVRCESISGTLPISYQLLKTSKVLENSTKNSNDPAVFKDNPTEDVEYQCVADNCHSHAKMLSEVLRVKVIAPVDEVQISILSSKVVESGEDIVLQCAVNEGSGPITYKFYREKEGKPFYQMTSNATQAFWTKQKASKEQEGEYYCTAFNRANHASSVPRSKILTVRVILAPWKKGLIAVVIIGVIIALLIIAAKCYFLRKAKAKQMPVEMSRPAVPLLNSNNEKMSDPNMEANSHYGHNDDVRNHAMKPINDNKEPLNSDVQYTEVQVSSAESHKDLGKKDTETVYSEVRKAVPDAVESRYSRTEGSLDGT

SEQ ID NO: 766780 - protein, 720 aa, Homo sapiens
MQPRWAQGATMWLGVLLTLLLCSSLEGQENSFTINSVDMKSLPDWTVQNGKNLTLQCFADVSTTSHVKPQHQMLFYKDDVLFYNISSMKSTESYFIPEVRIYDSGTYKCTVIVNNKEKTTAEYQLLVEGVPSPRVTLDKKEAIQGGIVRVNCSVPEEKAPIHFTIEKLELNEKMVKLKREKNSRDQNFVILEFPVEEQDRVLSFRCQARIISGIHMQTSESTKSELVTVTESFSTPKFHISPTGMIMEGAQLHIKCTIQVTHLAQEFPEIIIQKDKAIVAHNRHGNKAVYSVMAMVEHSGNYTCKVESSRISKVSSIVVNITELFSKPELESSFTHLDQGERLNLSCSIPGAPPANFTIQKEDTIVSQTQDFTKIASKSDSGTYICTAGIDKVVKKSNTVQIVVCEMLSQPRISYDAQFEVIKGQTIEVRCESISGTLPISYQLLKTSKVLENSTKNSNDPAVFKDNPTEDVEYQCVADNCHSHAKMLSEVLRVKVIAPVDEVQISILSSKVVESGEDIVLQCAVNEGSGPITYKFYREKEGKPFYQMTSNATQAFWTKQKASKEQEGEYYCTAFNRANHASSVPRSKILTVRVILAPWKKGLIAVVIIGVIIALLIIAAKCYFLRKAKAKQMPVEMSRPAVPLLNSNNEKMSDPNMEANSHYEPLNSDVQYTEVQVSSAESHKDLGKKDTETVYSEVRKAVPDAVESRYSRTEGSLDGT

SEQ ID NO: 766781 - protein, 727 aa, Homo sapiens
MQPRWAQGATMWLGVLLTLLLCSSLEGQENSFTINSVDMKSLPDWTVQNGKNLTLQCFADVSTTSHVKPQHQMLFYKDDVLFYNISSMKSTESYFIPEVRIYDSGTYKCTVIVNNKEKTTAEYQLLVEGVPSPRVTLDKKEAIQGGIVRVNCSVPEEKAPIHFTIEKLELNEKMVKLKREKNSRDQNFVILEFPVEEQDRVLSFRCQARIISGIHMQTSESTKSELVTVTESFSTPKFHISPTGMIMEGAQLHIKCTIQVTHLAQEFPEIIIQKDKAIVAHNRHGNKAVYSVMAMVEHSGNYTCKVESSRISKVSSIVVNITELFSKPELESSFTHLDQGERLNLSCSIPGAPPANFTIQKEDTIVSQTQDFTKIASKSDSGTYICTAGIDKVVKKSNTVQIVVCEMLSQPRISYDAQFEVIKGQTIEVRCESISGTLPISYQLLKTSKVLENSTKNSNDPAVFKDNPTEDVEYQCVADNCHSHAKMLSEVLRVKVIAPVDEVQISILSSKVVESGEDIVLQCAVNEGSGPITYKFYREKEGKPFYQMTSNATQAFWTKQKASKEQEGEYYCTAFNRANHASSVPRSKILTVRVILAPWKKGLIAVVIIGVIIALLIIAAKCYFLRKAKAKQMPVEMSRPAVPLLNSNNEKMSDPNMEANSHYGHNDDVRNHAMKPINDNKEPLNSDVQYTEVQVSSAESHKDLGKKDTETVYSEVRKAVPENGRLP

SEQ ID NO: 766782 - protein, 746 aa, Homo sapiens
MQPRWAQGATMWLGVLLTLLLCSSLEGQENSFTINSVDMKSLPDWTVQNGKNLTLQCFADVSTTSHVKPQHQMLFYKDDVLFYNISSMKSTESYFIPEVRIYDSGTYKCTVIVNNKEKTTAEYQLLVEGVPSPRVTLDKKEAIQGGIVRVNCSVPEEKAPIHFTIEKLELNEKMVKLKREKNSRDQNFVILEFPVEEQDRVLSFRCQARIISGIHMQTSESTKSELVTVTESFSTPKFHISPTGMIMEGAQLHIKCTIQVTHLAQEFPEIIIQKDKAIVAHNRHGNKAVYSVMAMVEHSGNYTCKVESSRISKVSSIVVNITELFSKPELESSFTHLDQGERLNLSCSIPGAPPANFTIQKEDTIVSQTQDFTKIASKSDSGTYICTAGIDKVVKKSNTVQIVVCEMLSQPRISYDAQFEVIKGQTIEVRCESISGTLPISYQLLKTSKVLENSTKNSNDPAVFKDNPTEDVEYQCVADNCHSHAKMLSEVLRVKVIAPVDEVQISILSSKVVESGEDIVLQCAVNEGSGPITYKFYREKEGKPFYQMTSNATQAFWTKQKASKEQEGEYYCTAFNRANHASSVPRSKILTVRVILAPWKKGLIAVVIIGVIIALLIIAAKCYFLRKAKAKQMPVEMSRPAVPLLNSNNEKMSDPNMEANSHYGHNDDVRNHAMKPINDNKEPLNSDVQYTEVQVSSAESHKDLGKKDTETVYSEVRKAVPVELGYLRCSLPCHPLFCRCRGKQIL

SEQ ID NO: 766783 - protein, 756 aa, Homo sapiens
MQPRWAQGATMWLGVLLTLLLCSSLEGQENSFTINSVDMKSLPDWTVQNGKNLTLQCFADVSTTSHVKPQHQMLFYKDDVLFYNISSMKSTESYFIPEVRIYDSGTYKCTVIVNNKEKTTAEYQLLVEGVPSPRVTLDKKEAIQGGIVRVNCSVPEEKAPIHFTIEKLELNEKMVKLKREKNSRDQNFVILEFPVEEQDRVLSFRCQARIISGIHMQTSESTKSELVTVTESFSTPKFHISPTGMIMEGAQLHIKCTIQVTHLAQEFPEIIIQKDKAIVAHNRHGNKAVYSVMAMVEHSGNYTCKVESSRISKVSSIVVNITELFSKPELESSFTHLDQGERLNLSCSIPGAPPANFTIQKEDTIVSQTQDFTKIASKSDSGTYICTAGIDKVVKKSNTVQIVVCEMLSQPRISYDAQFEVIKGQTIEVRCESISGTLPISYQLLKTSKVLENSTKNSNDPAVFKDNPTEDVEYQCVADNCHSHAKMLSEVLRVKVIAPVDEVQISILSSKVVESGEDIVLQCAVNEGSGPITYKFYREKEGKPFYQMTSNATQAFWTKQKASKEQEGEYYCTAFNRANHASSVPRSKILTVRVILAPWKKGLIAVVIIGVIIALLIIAAKCYFLRKAKAKQMPVEMSRPAVPLLNSNNEKMSDPNMEANSHYGHNDDVRNHAMKPINDNKEPLNSDVQYTEVQVSSAESHKDLGKKDTETVYSEVRKAVPVELGYLRCSLPCHPLFCRCRGKQILCKYTFHIHYI

SEQ ID NO: 766784 - protein, 218 aa, Homo sapiens
MAIPGRQNIVLRSHRKRYGLILPKKTQQLHPVLQKPSVFGNDSDDDDETSVSESLQREAAKKQAMKQTKLEIQKALAEDATVYEYDSIYDEMQKKKEENNPKLLLGKDRKPKYIHNLLKAVEIRKKEQEKRMEKKIQREREMEKGEFDDKEAFVTSAYKKKLQERAEEEEREKRAAALEACLDVTKQKDLSGFYRHLLNQAVGEEEVPKCSFREARSV

SEQ ID NO: 766785 - protein, 238 aa, Homo sapiens
MAIPGRQYGLILPKKTQQLHPVLQKPSVFGNDSDDDDEERRGFIRLATLISNSSAQVIQPPQPPKALGLQTSVSESLQREAAKKQAMKQTKLEIQKALAEDATVYEYDSIYDEMQKKKEENNPKLLLGKDRKPKYIHNLLKAVEIRKKEQEKRMEKKIQREREMEKGEFDDKEAFVTSAYKKKLQERAEEEEREKRAAALEACLDVTKQKDLSGFYRHLLNQAVGEEEVPKCSFREAR

SEQ ID NO: 766786 - protein, 558 aa, Homo sapiens
MAIPGRQYGLILPKKTQQLHPVLQKPSVFGNDSDDDDETSVSESLQREAAKKQAMKQTKLEIQKALAEDATVYEYDSIYDEMQKKKEENNPKLLLGKDRKPKYIHNLLKAVEIRKKEQEKRMEKKIQREREMEKGEFDDKEAFVTSAYKKKLQERAEEEEREKRAAALEACLDVTKQKDLSGFYRHLLNQAVGEEEVPKCSFREARSGIKEEKSRGFSNEVSSKNRIPQEKCILQTDVKVEENPDADSDFDAKSSADDEIEETRVNCRREKVIETPENDFKHHRSQNHSRSPSEERGHSTRHHTKGSRTSRGHEKREDQHQQKQSRDQENHYTDRDYRKERDSHRHREASHRDSHWKRHEQEDKPRARDQRERSDRVWKREKDREKYSQREQERDRQQNDQNRPSEKGEKEEKSKAKEEHMKVRKERYENNDKYRDREKREVGVQSSERNQDRKESSPNSRAKDKFLDQERSNKMRNMAKDKERNQEKPSNSESSLGAKHRLTEEGQEKGKEQERPPEAVSKFAKRNNEETVMSARDRYLARQMARVNAKTYIEKEDD

SEQ ID NO: 766787 - protein, 504 aa, Homo sapiens
MKQTKLEIQKALAEDATVYEYDSIYDEMQKKKEENNPKLLLGKDRKPKYIHNLLKAVEIRKKEQEKRMEKKIQREREMEKGEFDDKEAFVTSAYKKKLQERAEEEEREKRAAALEACLDVTKQKDLSGFYRHLLNQAVGEEEVPKCSFREARSGIKEEKSRGFSNEVSSKNRIPQEKCILQTDVKVEENPDADSDFDAKSSADDEIEETRVNCRREKVIETPENDFKHHRSQNHSRSPSEERGHSTRHHTKGSRTSRGHEKREDQHQQKQSRDQENHYTDRDYRKERDSHRHREASHRDSHWKRHEQEDKPRARDQRERSDRVWKREKDREKYSQREQERDRQQNDQNRPSEKGEKEEKSKAKEEHMKVRKERYENNDKYRDREKREVGVQSSERNQDRKESSPNSRAKDKFLDQERSNKMRNMAKDKERNQEKPSNSESSLGAKHRLTEEGQEKGKEQERPPEAVSKFAKRNNEETVMSARDRYLARQMARVNAKTYIEKEDD

SEQ ID NO: 766788 - protein, 599 aa, Homo sapiens
MAIPGRQYGLILPKKTQQLHPVLQKPSVFGNDSDDDDEMGFHSCCPGWSAMVQSRLTEPPPPGFKRFSCLSLPNSCNYQTSVSESLQREAAKKQAMKQTKLEIQKALAEDATVYEYDSIYDEMQKKKEENNPKLLLGKDRKPKYIHNLLKAVEIRKKEQEKRMEKKIQREREMEKGEFDDKEAFVTSAYKKKLQERAEEEEREKRAAALEACLDVTKQKDLSGFYRHLLNQAVGEEEVPKCSFREARSGIKEEKSRGFSNEVSSKNRIPQEKCILQTDVKVEENPDADSDFDAKSSADDEIEETRVNCRREKVIETPENDFKHHRSQNHSRSPSEERGHSTRHHTKGSRTSRGHEKREDQHQQKQSRDQENHYTDRDYRKERDSHRHREASHRDSHWKRHEQEDKPRARDQRERSDRVWKREKDREKYSQREQERDRQQNDQNRPSEKGEKEEKSKAKEEHMKVRKERYENNDKYRDREKREVGVQSSERNQDRKESSPNSRAKDKFLDQERSNKMRNMAKDKERNQEKPSNSESSLGAKHRLTEEGQEKGKEQERPPEAVSKFAKRNNEETVMSARDRYLARQMARVNAKTYIEKEDD

SEQ ID NO: 766789 - protein, 623 aa, Homo sapiens
RPRSADTGARWRFRAGRHLAVNPSGTCCLSSTDPHGSSLSKQMRAATSTWLDCCSDVTFSTRWGFTLVAQAGVQWCNLGSPQPPPPGFKRFSCLSLPNSCNYQTSVSESLQREAAKKQAMKQTKLEIQKALAEDATVYEYDSIYDEMQKKKEENNPKLLLGKDRKPKYIHNLLKAVEIRKKEQEKRMEKKIQREREMEKGEFDDKEAFVTSAYKKKLQERAEEEEREKRAAALEACLDVTKQKDLSGFYRHLLNQAVGEEEVPKCSFREARSGIKEEKSRGFSNEVSSKNRIPQEKCILQTDVKVEENPDADSDFDAKSSADDEIEETRVNCRREKVIETPENDFKHHRSQNHSRSPSEERGHSTRHHTKGSRTSRGHEKREDQHQQKQSRDQENHYTDRDYRKERDSHRHREASHRDSHWKRHEQEDKPRARDQRERSDRVWKREKDREKYSQREQERDRQQNDQNRPSEKGEKEEKSKAKEEHMKVRKERYENNDKYRDREKREVGVQSSERNQDRKESSPNSRAKDKFLDQERSNKMRNMAKDKERNQEKPSNSESSLGAKHRLTEEGQEKGKEQERPPEAVSKFAKRNNEETVMSARDRYLARQMARVNAKTYIEKEDD

SEQ ID NO: 766790 - protein, 400 aa, Homo sapiens
ELEDPVLSTTEACLDVTKQKDLSGFYRHLLNQAVGEEEVPKCSFREARSGIKEEKSRGFSNEVSSKNRIPQEKCILQTDVKVEENPDADSDFDAKSSADDEIEETRVNCRREKVIETPENDFKHHRSQNHSRSPSEERGHSTRHHTKGSRTSRGHEKREDQHQQKQSRDQENHYTDRDYRKERDSHRHREASHRDSHWKRHEQEDKPRARDQRERSDRVWKREKDREKYSQREQERDRQQNDQNRPSEKGEKEEKSKAKEEHMKVRKERYENNDKYRDREKREVGVQSSERNQDRKESSPNSRAKDKFLDQERSNKMRNMAKDKERNQEKPSNSESSLGAKHRLTEEGQEKGKEQERPPEAVSKFAKRNNEETVMSARDRYLARQMARVNAKTYIEKEDD

SEQ ID NO: 766791 - protein, 264 aa, Homo sapiens
SRGSPNKNTLKGSRTSRGHEKREDQHQQKQSRDQENHYTDRDYRKERDSHRHREASHRDSHWKRHEQEDKPRARDQRERSDRVWKREKDREKYSQREQERDRQQNDQNRPSEKGEKEEKSKAKEEHMKVRKERYENNDKYRDREKREVGVQSSERNQDRKESSPNSRAKDKFLDQERSNKMRNMAKDKERNQEKPSNSESSLGAKHRLTEEGQEKGKEQERPPEAVSKFAKRNNEETVMSARDRYLARQMARVNAKTYIEKEDD

SEQ ID NO: 766792 - protein, 558 aa, Homo sapiens; identical to SEQ ID NO: 766786

SEQ ID NO: 766793 - protein, 558 aa, Homo sapiens; identical to SEQ ID NO: 766786

SEQ ID NO: 766794 - protein, 504 aa, Homo sapiens; identical to SEQ ID NO: 766787

SEQ ID NO: 766795 - protein, 568 aa, Homo sapiens
MAIPGRQNIVLRSHRKRYGLILPKKTQQLHPVLQKPSVFGNDSDDDDETSVSESLQREAAKKQAMKQTKLEIQKALAEDATVYEYDSIYDEMQKKKEENNPKLLLGKDRKPKYIHNLLKAVEIRKKEQEKRMEKKIQREREMEKGEFDDKEAFVTSAYKKKLQERAEEEEREKRAAALEACLDVTKQKDLSGFYRHLLNQAVGEEEVPKCSFREARSGIKEEKSRGFSNEVSSKNRIPQEKCILQTDVKVEENPDADSDFDAKSSADDEIEETRVNCRREKVIETPENDFKHHRSQNHSRSPSEERGHSTRHHTKGSRTSRGHEKREDQHQQKQSRDQENHYTDRDYRKERDSHRHREASHRDSHWKRHEQEDKPRARDQRERSDRVWKREKDREKYSQREQERDRQQNDQNRPSEKGEKEEKSKAKEEHMKVRKERYENNDKYRDREKREVGVQSSERNQDRKESSPNSRAKDKFLDQERSNKMRNMAKDKERNQEKPSNSESSLGAKHRLTEEGQEKGKEQERPPEAVSKFAKRNNEETVMSARDRYLARQMARVNAKTYIEKEDD

SEQ ID NO: 766796 - protein, 457 aa, Homo sapiens
ADSDFDAKSSADDVIEETRVNCRREKVIETPENDFKHHRSRNHSRSPSVERGQQYGKKKEKKRAAVLEACLDVTKQKDLSGFYRHLLNQAVGEEEVPKCSFREARSGIKEEKSRGFSNEVSSKNRIPQEKCILQTDVKVEENPDADSDFDAKSSADDEIEETRVNCRREKVIETPENDFKHHRSQNHSRSPSEERGHSTRHHTKGSRTSRGHEKREDQHQQKQSRDQENHYTDRDYRKERDSHRHREASHRDSHWKRHEQEDKPRARDQRERSDRVWKREKDREKYSQREQERDRQQNDQNRPSEKGEKEEKSKAKEEHMKVRKERYENNDKYRDREKREVGVQSSERNQDRKESSPNSRAKDKFLDQERSNKMRNMAKDKERNQEKPSNSESSLGAKHRLTEEGQEKGKEQERPPEAVSKFAKRNNEETVMSARDRYLARQMARVNAKTYIEKEDD

SEQ ID NO: 766797 - protein, 138 aa, Homo sapiens [sequence omitted]

SEQ ID NO: 766798 - protein, 549 aa, Homo sapiens
MAIPGRQYGLILPKKTQQLHPVLQKPSVFGNDSDDDDETSVSESLQREAAKKQAMKQTKLEIQKALAEDATVYEYDSIYDEMQKKKEENNPKLLLGKDRKPKYIHNLLKAVEIRKKEQEKRMEKKIQREREMEKGEFDDKEAFVTSAYKKKLQERAEEEEREKRAAALEACLDVTKQKDLSGFYRHLLNQAVGEEEVPKCSFREARSGIKEEKSRGFSNEVSSKNRIPQEKCILQTDVKVEENPDADSDFDAKSSADDEIEETRVNCRREKVIETPENDFKHHRSQNHSRSPSEERGHSTRHHTKGSRTSRGHEKREDQHQQKQSRDQENHYTDRDYRKERDSHRHREASHRDSHWKRHEQEDKPRARDQRERSDRVWKREKDREKYSQREQERDRQQNDQNRPSEKGEKEEKSKAKEEHMKVRKERYENNDKYRDREKREVGVQSSERNQDRKESSPNSRAKDKFLDQERSNKMRNMAKDKERNQEKPSNSESSLGAKHRLTEEGQEKGKEQERPPEAVSKFAKRNNEETVMSLFERLRQEDHLSLGI

SEQ ID NO: 766799 - protein, 362 aa, Homo sapiens
MESRGPLATSRLLLLLLLLLLRHTRQGWALRPVLPTQSAHDPPAVHLSNGPGQEPIAVMTFDLTKITKTSSSFEVRTWDPEGVIFYGDTNPKDDWFMLGLRDGRPEIQLHNHWAQLTVGAGPRLDDGRWHQVEVKMEGDSVLLEVDGEEVLRLRQVSGPLTSKRHPIMRIALGGLLFPASNLRLPLVPALDGCLRRDSWLDKQAEISASAPTSLRSCDVESNPGIFLPPGTQAEFNLRDIPQPHAEPWAFSLDLGLKQAAGSGHLLALGTPENPSWLSLHLQDQKVVLSSGSGPGLDLPLVLGLPLQLKLSMSRVVLSQGSKMKALALPPLGLAPLLNLWPSLKGVSSWGLYQEKTLPPLFA

SEQ ID NO: 766800 - protein, 288 aa, Homo sapiens
PRFKGSPAVLFKLTYAVITCFSLRLTHPPRPWSAHDPPAVHLSNGPGQEPIAVMTFDLTKITKTSSSFEVRTWDPEGVIFYGDTNPKDDWFMLGLRDGRPEIQLHNHWAQLTVGAGPRLDDGRWHQVEVKMEGDSVLLEVDGEEVLRLRQVSGPLTSKRHPIMRIALGGLLFPASNLRLPLVPALDGCLRRDSWLDKQAEISASAPTSLRSCDVESNPGIFLPPGTQAEFNLRDIPQPHAEPWAFSLDLGLKQAAGSGHLLALGTPENPSWLSLHLQDQEKTLPPLFA

SEQ ID NO: 766801 - protein, 271 aa, Homo sapiens
MESRGPLATSRLLLLLLLLLLRHTRQGWALRPVLPTQSAHDPPAVHLSNGPGQEPIAVMTFDLTKITKTSSSFEVRTWDPEGVIFYGDTNPKDDWFMLGLRDGRPEIQLHNHWAQLTVGAGPRLDDGRWHQVEVKMEGDSVLLEVDGEEVLRLRQVSGPLTSKRHPIMRIALGGLLFPASNLRLPLVPALDGCLRRDSWLDKQAEISASAPTSLRSCDVESNPGIFLPPGTQAEFNLRGRFPRSLFFPPWPAQPASVPLYHWPLSSLRPQL

SEQ ID NO: 766802 - protein, 175 aa, Homo sapiens
MESRGPLATSRLLLLLLLLLLRHTRQGWALRPVLPTQSAHDPPAVHLSNGPGQEPIAVMTFDLTKITKTSSSFEVRTWDPEGVIFYGDTNPKDDWFMLGLRDGRPEIQLHNHWAQLTVGAGPRLDDGRWHQVEVKMEGDSVLLEVDGEEVLRLRQVSGPLTSKRHPIMRIALGGA

SEQ ID NO: 766803 - protein, 271 aa, Homo sapiens; identical to SEQ ID NO: 766801

SEQ ID NO: 766804 - protein, 36 aa, Homo sapiens
MTARPSPQAPLPPPALLMLEHQGSVLSLLFSFHHVQ

SEQ ID NO: 766805 - protein, 2221 aa, Homo sapiens
MALFECLVAGPTDVEVDWLCRGRLLQPALLKCKMHFDGRKCKLLLTSVHEDDSGVYTCKLSTAKDELTCSARLTVRPSLAPLFTRLLEDVEVLEGRAARFDCKISGTPPPVVTWTHFGCPMEESENLRLRQDGGLHSLHIAHVGSEDEGLYAVSAVNTHGQAHCSAQLYVEEPRTAASGPSSKLEKMPSIPEEPEQGELERLSIPDFLRPLQDLEVGLAKEAMLECQVTGLPYPTISWFHNGHRIQSSDDRRMTQYRDVHRLVFPAVGPQHAGVYKSVIANKLGKAACYAHLYVTDVVPGPPDGAPQVVAVTGRMVTLTWNPPRSLDMAIDPDSLTYTVQHQVLGSDQWTALVTGLREPGWAATGLRKGVQHIFRVLSTTVKSSSKPSPPSEPVQLLEHGPTLEEAPAMLDKPDIVYVVEGQPASVTVTFNHVEAQVVWRSCRGALLEARAGVYELSQPDDDQYCLRICRVSRRDMGALTCTARNRHGTQTCSVTLELAEAPRFESIMEDVEVGAGETARFAVVVEGKPLPDIMWYKDEVLLTESSHVSFVYEENECSLVVLSTGAQDGGVYTCTAQNLAGEVSCKAELAVHSAQTAMEVEGVGEDEDHRGRRLSDFYDIHQEIGRGAFSYLRRIVERSSGLEFAAKFIPSQAKPKASARREARLLARLQHDCVLYFHEAFERRRGLVIVTELCTEELLERIARKPTVCESEIRAYMRQVLEGIHYLHQSHVLHLDVKPENLLVWDGAAGEQQVRICDFGNAQELTPGEPQYCQYGTPEFVAPEIVNQSPVSGVTDIWPVGVVAFLCLTGISPFVGENDRTTLMNIRNYNVAFEETTFLSLSREARGFLIKVLVQDRLRPTAEETLEHPWFKTQAKGAEVSTDHLKLFLSRRRWQRSQISYKCHLVLRPIPELLRAPPERVWVTMPRRPPPSGGLSSSSDSEEEELEELPSVPRPLQPEFSGSRVSLTDIPTEDEALGTPETGAATPMDWQEQGRAPSQDQEAPSPEALPSPGQEPAAGASPRRGELRRGSSAESALPRAGPRELGRGLHKAASVELPQRRSPSPGATRLARGGLGEGEYAQRLQALRQRLLRGGPEDGKVSGLRGPLLESLGGRARDPRMARAASSEAAPHHQPPLENRGLQKSSSFSQGEAEPRGRHRRAGAPLEIPVARLGARRLQESPSLSALSEAQPSSPARPSAPKPSTPKSAEPSATTPSDAPQPPAPQPAQDKAPEPRPEPVRASKPAPPPQALQTLALPLTPYAQIIQSLQLSGHAQGPSQGPAAPPSEPKPHAAVFARVASPPPGAPEKRVPSAGGPPVLAEKARVPTVPPRPGSSLSSSIENLESEAVFEAKFKRSRESPLSLGLRLLSRSRSEERGPFRGAEEEDGIYRPSPAGTPLELVRRPERSRSVQDLRAVGEPGLVRRLSLSLSQRLRRTPPAQRHPAWEARGGDGESSEGGSSARGSPVLAMRRRLSFTLERLSSRLQRSGSSEDSGGASGRSTPLFGRLRRATSEGESLRRLGLPHNQLAAQAGATTPSAESLGSEASATSGSSAPGESRSRLRWGFSRPRKDKGLSPPNLSASVQEELGHQYVRSESDFPPVFHIKLKDQVLLEGEAATLLCLPAACPAPHISWMKDKKSLRSEPSVIIVSCKDGRQLLSIPRAGKRHAGLYECSATNVLGSITSSCTVAVARVPGKLAPPEVPQTYQDTALVLWKPGDSRAPCTYTLERRVDGESVWHPVSSGIPDCYYNVTHLPVGVTVRFRVACANRAGQGPFSNSSEKVFVRGTQDSSAVPSAAHQEAPVTSRPARARPPDSPTSLAPPLAPAAPTPPSVTVSPSSPPTPPSQALSSLKAVGPPPQTPPRRHRGLQAARPAEPTLPSTHVTPSEPKPFVLDTGTPIPASTPQGVKPVSSSTPVYVVTSFVSAPPAPEPPAPEPPPEPTKVTVQSLSPAKEVVSSPGSSPRSSPRPEGTTLRQGPPQKPYTFLEEKARGRFGVVRACRENATGRTFVAKIVPYAAEGKRRVLQEYEVLRTLHHERIMSLHEAYITPRYLVLIAESCGNRELLCGLSDRFRYSEDDVATYMVQLLQGLDYLHGHHVLHLDIKPDNLLLAPDNALKIVDFGSAQPYNPQALRPLGHRTGTLEFMAPEMVKGEPIGSATDIWGAGVLTYIMLSGRSPFYEPDPQETEARIVGGRFDAFQLYPNTSQSATLFLRKVLSVHPW

SEQ ID NO: 766806 - protein, 2171 aa, Homo sapiens
MALFECLVAGPTDVEVDWLCRGRLLQPALLKCKMHFDGRKCKLLLTSVHEDDSGVYTCKLSTAKDELTCSARLTVRPSLAPLFTRLLEDVEVLEGRAARFDCKISGTPPPVVTWTHFGCPMEESENLRLRQDGGLHSLHIAHVGSEDEGLYAVSAVNTHGQAHCSAQLYVEEPRTAASGPSSKLEKMPSIPEEPEQGELERLSIPDFLRPLQDLEVGLAKEAMLECQVTGLPYPTISWFHNGHRIQSSDDRRMTQYRDVHRLVFPAVGPQHAGVYKSVIANKLGKAACYAHLYVTDVVPGPPDGAPQVVAVTGRMVTLTWNPPRSLDMAIDPDSLTYTVQHQVLGSDQWTALVTGLREPGWAATGLRKGVQHIFRVLSTTVKSSSKPSPPSEPVQLLEHGPTLEEAPAMLDKPDIVYVVEGQPASVTVTFNHVEAQVVWRSCRGALLEARAGVYELSQPDDDQYCLRICRVSRRDMGALTCTARNRHGTQTCSVTLELAEAPRFESIMEDVEVGAGETARFAVVVEGKPLPDIMWYKDEVLLTESSHVSFVYEENECSLVVLSTGAQDGGVYTCTAQNLAGEVSCKAELAVHSAQTAMEVEGVGEDEDHRGRRLSDFYDIHQEIGRGAFSYLRRIVERSSGLEFAAKFIPSQAKPKASARREARLLARLQHDCVLYFHEAFERRRGLVIVTELCTEELLERIARKPTVCESEIRAYMRQVLEGIHYLHQSHVLHLDVKPENLLVWDGAAGEQQVRICDFGNAQELTPGEPQYCQYGTPEFVAPEIVNQSPVSGVTDIWPVGVVAFLCLTGISPFVGENDRTTLMNIRNYNVAFEETTFLSLSREARGFLIKVLVQDRLRPTAEETLEHPWFKTQAKGAEVSTDHLKLFLSRRRWQRSQISYKCHLVLRPIPELLRAPPERVWVTMPRRPPPSGGLSSSSDSEEEELEELPSVPRPLQPEFSGSRVSLTDIPTEDEALGTPETGAATPMDWQEQGRAPSQDQEAPSPEALPSPGQEPAAGASPRRGELRRGSSAESALPRAGPRELGRGLHKAASVELPQRRSPSPGATRLARGGLGEGEYAQRLQALRQRLLRGGPEDGKVSGLRGPLLESLGGRARDPRMARAASSEAAPHHQPPLENRGLQKSSSFSQGEAEPRGRHRRAGAPLEIPVARLGARRLQESPSLSALSEAQPSSPARPSAPKPSTPKSAEPSATTPSDAPQPPAPQPAQDKAPEPRPEPVRASKPAPPPQALQTLALPLTPYAQIIQSLQLSGHAQGPSQGPAAPPSEPKPHAAVFARVASPPPGAPEKRVPSAGGPPVLAEKARVPTVPPRPGSSLSSSIENLESEAVFEAKFKRSRESPLSLGLRLLSRSRSEERGPFRGAEEEDGIYRPSPAGTPLELVRRPERSRSVQDLRAVGEPGLVRRLSLSLSQRLRRTPPAQRHPAWEARGGDGESSEGGSSARGSPVLAMRRRLSFTLERLSSRLQRSGSSEDSGGASGRSTPLFGRLRRATSEGESLRRLGLPHNQLAAQAGATTPSAESLGSEASATSGSSAPGESRSRLRWGFSRPRKDKGLSPPNLSASVQEELGHQYVRSESDFPPVFHIKLKDQVLLEGEAATLLCLPAACPAPHISWMKDKKSLRSEPSVIIVSCKDGRQLLSIPRAGKRHAGLYECSATNVLGSITSSCTVAVARVPGKLAPPEVPQTYQDTALVLWKPGDSRAPCTYTLERRVDGESVWHPVSSGIPDCYYNVTHLPVGVTVRFRVACANRAGQGPFSNSSEKVFVRGTQDSSAVPSAAHQEAPVTSRPARARPPDSPTSLAPPLAPAAPTPPSVTVSPSSPPTPPSQALSSLKAVGPPPQTPPRRHRGLQAARPAEPTLPSTHVTPSEPKPFVLDTGTPIPASTPQGVKPVSSSTPVYVVTSFVSAPPAPEPPAPEPPPEPTKVTVQSLSPAKEVVSSPGSSPRSSPRPEGTTLRQGPPQKPYTFLEEKARGRFGVVRACRENATGRTFVAKIVPYAAEGKRRVLQEYEVLRTLHHERIMSLHEAYITPRYLVLIAESCGNRELLCGLSDRFRYSEDDVATYMVQLLQGLDYLHGHHVLHLDIKPDNLLLAPDNALKIVDFGSAQPYNPQALRPLGHRTGTLEFMAPEMVKGEPIGSATDIWGAGVLTYIM

SEQ ID NO: 766807 - protein, 238 aa, Homo sapiens
SGVLGTPPFCAWVNSSGDPYVSWGMPPPLSCLLAFRACHSGHSHGLVTRTLSCCSSTQGPPPPPLPCHQEAGSAWPLSPVSSGDGEGRTHRLCHGHLGSGCAHLHYVSVPYPTAALSAHTVSSRTHLLPTPSPPCPTSPVHTSTLHTHTQVHSSMALSTVHLTLMSFWVWVLASGLHMSIKLSSPTGSVDAPRSMSQTPRKRRLGLWGAALMPSSCTPIHPRAPPSSCERFSLYIPGE

SEQ ID NO: 766808 - protein, 140 aa, Homo sapiens
MVNKDMNGFPVKKCSAFQFFKKRVRRWIKSPMVSVDKHQSPSLKYTGSSMVHIPPGEPDFESSLCQTCLGEHAFQRGVLPQENESCSWETQSGCEVSSCSLWIYSPGKILGLCFSCISARVYPKNNFLMHIYKASEEDLE

SEQ ID NO: 766809 - protein, 97 aa, Homo sapiens
RCSPSLPLASALSYSFSQLLNYSSHWNLHNQKQLSSLKPPPGAHHLEKSDSLPAPAAEEQPGSWGRGGVPFSRSVRATASPRRLAVSHRPAPRVLQR

SEQ ID NO: 766810 - protein, 107 aa, Homo sapiens
MVNKDMNGFPVKKCSAFQFFKKRVRRWIKSPMVSVDKHQSPSLKYTGSSMVHIPPGEPDFESSLCQTCLGEHAFQRGVLPQENESCSWETQSGCEILCKTSGQLTSP

SEQ ID NO: 766811 - protein, 1482 aa, Homo sapiens
MRKDRLLHLCLVLLLILLSASDSNSTEPQYMVLVPSLLHTEAPKKGCVLLSHLNETVTVSASLESGRENRSLFTDLVAEKDLFHCVSFTLPRISASSEVAFLSIQIKGPTQDFRKRNTVLVLNTQSLVFVQTDKPMYKPGQTVRFRVVSVDENFRPRNELIPLIYLENPRRNRIAQWQSLKLEAGINQLSFPLSSEPIQGSYRVVVQTESGGRIQHPFTVEEFVLPKFEVKVQVPKIISIMDEKVNITVCGEYTYGKPVPGLATVSLCRKLSRVLNCDKQEVCEEFSQQLNSNGCITQQVHTKMLQITNTGFEMKLRVEARIREEGTDLEVTANRISEITNIVSKLKFVKVDSHFRQGIPFFAQVLLVDGKGVPIPNKLFFISVNDANYYSNATTNEQGLAQFSINTTSISVNKLFVRVFTVHPNLCFHYSWVAEDHQGAQHTANRVFSLSGSYIHLEPVAGTLPCGHTETITAHYTLNRQAMGELSELSFHYLIMAKGVIVRSGTHTLPVESGDMKGSFALSFPVESDVAPIARMFIFAILPDGEVVGDSEKFEIENCLANKVDLSFSPAQSPPASHAHLQVAAAPQSLCALRAVDQSVLLMKPEAELSVSSVYNLLTVKDLTNFPDNVDQQEEEQGHCPRPFFIHNGAIYVPLSSNEADIYSFLKGMGLKVFTNSKIRKPKSCSVIPSVSAGAVGQGYYGAGLGVVERPYVPQLGTYNVIPLNNEQSSGPVPETVRSYFPETWIWELVAVNSSGVAEVGVTVPDTITEWKAGAFCLSEDAGLGISSTASLRAFQPFFVELTMPYSVIRGEVFTLKATVLNYLPKCIRVSVQLKASPAFLASQNTKGEESYCICGSERQTLSWTVTPKTLGNVNFSVSAEAMQSLELCGNEVVEVPEIKRKDTVIKTLLVEAEGIEQEKTFSSMTCASGANVSEQLSLKLPSNVVKESARASFSVLGDILGSAMQNIQNLLQMPYGCGEQNMVLFAPNIYVLNYLNETQQLTQEIKAKAVGYLITGYQRQLNYKHQDGSYSTFGERYGRNQGNTWLTAFVLKTFAQARSYIFIDEAHITQSLTWLSQMQKDNGCFRSSGSLLNNAIKGGVEDEATLSAYVTIALLEIPLPVTNPIVRNALFCLESAWNVAKEGTHGSHVYTKALLAYAFSLLGKQNQNREILNSLDKEAVKEDNLVHWERPQRPKAPVGHLYQTQAPSAEVEMTSYVLLAYLTAQPAPTSGDLTSATNIVKWIMKQQNAQGGFSSTQDTVVALHALSRYGAATFTRTEKTAQVTVQDSQTFSTNFQVDNNNLLLLQQISLPELPGEYVITVTGERCVYLQTSMKYNILPEKEDSPFALKVQTVPQTCDGHKAHTSFQISLTISYTGNRPASNMVIVDVKMVSGFIPLKPTVKMLERSSSVSRTEVSNNHVLIYVEQVTNQTLSFSFMVLQDIPVGDLKPAIVKVYDYYETDESVVAEYIAPCSTDTEHGNV

SEQ ID NO: 766812 - protein, 1399 aa, Homo sapiens
MRKDRLLHLCLVLLLILLSASDSNSTEPQYMVLVPSLLHTEAPKKGCVLLSHLNETVTVSASLESGRENRSLFTDLVAEKDLFHCVSFTLPRISASSEVAFLSIQIKGPTQDFRKRNTVLVLNTQSLVFVQTDKPMYKPGQTVRFRVVSVDENFRPRNELIPLIYLENPRRNRIAQWQSLKLEAGINQLSFPLSSEPIQGSYRVVVQTESGGRIQHPFTVEEFVLPKFEVKVQVPKIISIMDEKVNITVCGEYTYGKPVPGLATVSLCRKLSRVLNCDKQEVCEEFSQQLNSNGCITQQVHTKMLQITNTGFEMKLRVEARIREEGTDLEVTANRISEITNIVSKLKFVKVDSHFRQGIPFFAQVLLVDGKGVPIPNKLFFISVNDANYYSNATTNEQGLAQFSINTTSISVNKLFVRVFTVHPNLCFHYSWVAEDHQGAQHTANRVFSLSGSYIHLEPVAGTLPCGHTETITAHYTLNRQAMGELSELSFHYLIMAKGVIVRSGTHTLPVESGDMKGSFALSFPVESDVAPIARMFIFAILPDGEVVGDSEKFEIENCLANKVDLSFSPAQSPPASHAHLQVAAAPQSLCALRAVDQSVLLMKPEAELSVSSVYNLLTVKDLTNFPDNVDQQEEEQGHCPRPFFIHNGAIYVPLSSNEADIYSFLKGMGLKVFTNSKIRKPKSCSVIPSVSAGAVGQGYYGAGLGVVERPYVPQLGTYNVIPLNNEQSSGPVPETVRSYFPETWIWELVAVNSSGVAEVGVTVPDTITEWKAGAFCLSEDAGLGISSTASLRAFQPFFVELTMPYSVIRGEVFTLKATVLNYLPKCIRAEGIEQEKTFSSMTCASGANVSEQLSLKLPSNVVKESARASFSVLGDILGSAMQNIQNLLQMPYGCGEQNMVLFAPNIYVLNYLNETQQLTQEIKAKAVGYLITGYQRQLNYKHQDGSYSTFGERYGRNQGNTWLTAFVLKTFAQARSYIFIDEAHITQSLTWLSQMQKDNGCFRSSGSLLNNAIKGGVEDEATLSAYVTIALLEIPLPVTNPIVRNALFCLESAWNVAKEGTHGSHVYTKALLAYAFSLLGKQNQNREILNSLDKEAVKEDNLVHWERPQRPKAPVGHLYQTQAPSAEVEMTSYVLLAYLTAQPAPTSGDLTSATNIVKWIMKQQNAQGGFSSTQDTVVALHALSRYGAATFTRTEKTAQVTVQDSQTFSTNFQVDNNNLLLLQQISLPELPGEYVITVTGERCVYLQTSMKYNILPEKEDSPFALKVQTVPQTCDGHKAHTSFQISLTISYTGNRPASNMVIVDVKMVSGFIPLKPTVKMLERSSSVSRTEVSNNHVLIYVEQVTNQTLSFSFMVLQDIPVGDLKPAIVKVYDYYETDESVVAEYIAPCSTDTEHGNV

SEQ ID NO: 766813 - protein, 1361 aa, Homo sapiens
MRKDRLLHLCLVLLLILLSASDSNSTEPQYMVLVPSLLHTEAPKKGCVLLSHLNETVTVSASLESGRENRSLFTDLVAEKDLFHCVSFTLPRISASSEVAFLSIQIKGPTQDFRKRNTVLVLNTQSLVFVQTDKPMYKPGQTVRFRVVSVDENFRPRNELIPLIYLENPRRNRIAQWQSLKLEAGINQLSFPLSSEPIQGSYRVVVQTESGGRIQHPFTVEEFVLPKFEVKVQVPKIISIMDEKVNITVCGEYTYGKPVPGLATVSLCRKLSRVLNCDKQEVCEEFSQQLNSNGCITQQVHTKMLQITNTGFEMKLRVEARIREEGTDLEVTANRISEITNIVSKLKFVKVDSHFRQGIPFFAQVLLVDGKGVPIPNKLFFISVNDANYYSNATTNEQGLAQFSINTTSISVNKLFVRVFTVHPNLCFHYSWVAEDHQGAQHTANRVFSLSGSYIHLEPVAGTLPCGHTETITAHYTLNRQAMGELSELSFHYLIMAKGVIVRSGTHTLPVESGDMKGSFALSFPVESDVAPIARMFIFAILPDGEVVGDSEKFEIENCLANKVDLSFSPAQSPPASHAHLQVAAAPQSLCALRAVDQSVLLMKPEAELSVSSVYNLLTVKDLTNFPDNVDQQEEEQGHCPRPFFIHNGAIYVPLSSNEADIYSFLKGMGLKVFTNSKIRKPKSCSVIPSVSAGAVGQGYYGAGLGVVERPYVPQLGTYNVIPLNNEQSSGPVPETVRSYFPETWIWELVAVNSSGVAEVGVTVPDTITEWKAGAFCLSEDAGLGISSTASLRAFQPFFVELTMPYSVIRGEVFTLKATVLNYLPKCIRAEGIEQEKTFSSMTCASGANVSEQLSLKLPSNVVKESARASFSVLGDILGSAMQNIQNLLQMPYGCGEQNMVLFAPNIYVLNYLNETQQLTQEIKAKAVGYLITGYQRQLNYKHQDGSYSTFGERYGRNQGNTWLTAFVLKTFAQARSYIFIDEAHITQSLTWLSQMQKDNGCFRSSGSLLNNAIKGGVEDEATLSAYVTIALLEIPLPVTNPIVRNALFCLESAWNVAKEGTHGSHVYTKALLAYAFSLLGKQNQNREILNSLDKEAVKEDNLVHWERPQRPKAPVGHLYQTQAPSAEVEMTSYVLLAYLTAQPAPTSGDLTSATNIVKWIMKQQNAQGGFSSTQDTVVALHALSRYGAATFTRTEKTAQVTVQDSQTFSTNFQVDNNNLLLLQQISLPELPGEYVITVTGERCVYLQTSMKYNILPEKEDSPFALKVQTVPQTCDGHKAHTSFQISLTISYTGNRPASNMVIVDVKMVSGFIPLKPTVKMLERSSSVSRTEVSNNHVLIYVEQVRALTSWLRLHMGRLSK

SEQ ID NO: 766814 - protein, 1361 aa, Homo sapiens; identical to SEQ ID NO: 766813

SEQ ID NO: 766815 - protein, 1361 aa, Homo sapiens; identical to SEQ ID NO: 766813

SEQ ID NO: 766816 - protein, 1361 aa, Homo sapiens; identical to SEQ ID NO: 766813

SEQ ID NO: 766817 - protein, 1208 aa, Homo sapiens
MRKDRLLHLCLVLLLILLSASDSNSTEPQYMVLVPSLLHTEAPKKGCVLLSHLNETVTVSASLESGRENRSLFTDLVAEKDLFHCVSFTLPRISASSEVAFLSIQIKGPTQDFRKRNTVLVLNTQSLVFVQTDKPMYKPGQTVRFRVVSVDENFRPRNELIPLIYLENPRRNRIAQWQSLKLEAGINQLSFPLSSEPIQGSYRVVVQTESGGRIQHPFTVEEFVLPKFEVKVQVPKIISIMDEKVNITVCGEYTYGKPVPGLATVSLCRKLSRVLNCDKQEVCEEFSQQLNSNGCITQQVHTKMLQITNTGFEMKLRVEARIREEGTDLEVTANRISEITNIVSKLKFVKVDSHFRQGIPFFAQVLLVDGKGVPIPNKLFFISVNDANYYSNATTNEQGLAQFSINTTSISVNKLFVRVFTVHPNLCFHYSWVAEDHQGAQHTANRVFSLSGSYIHLEPVAGTLPCGHTETITAHYTLNRQAMGELSELSFHYLIMAKGVIVRSGTHTLPVESGDMKGSFALSFPVESDVAPIARMFIFAILPDGEVVGDSEKFEIENCLANKVDLSFSPAQSPPASHAHLQVAAAPQSLCALRAVDQSVLLMKPEAELSVSSVYNLLTVKDLTNFPDNVDQQEEEQGHCPRPFFIHNGAIYVPLSSNEADIYSFLKGMGLKVFTNSKIRKPKSCSVIPSVSAGAVGQGYYGAGLGVVERPYVPQLGTYNVIPLNNEQSSGPVPETVRSYFPETWIWELVAVNSSGVAEVGVTVPDTITEWKAGAFCLSEDAGLGISSTASLRAFQPFFVELTMPYSVIRGEVFTLKATVLNYLPKCIRAEGIEQEKTFSSMTCASGANVSEQLSLKLPSNVVKESARASFSVLGDILGSAMQNIQNLLQMPYGCGEQNMVLFAPNIYVLNYLNETQQLTQEIKAKAVGYLITGYQRQLNYKHQDGSYSTFGERYGRNQGNTWLTAFVLKTFAQARSYIFIDEAHITQSLTWLSQMQKDNGCFRSSGSLLNNAIKGGVEDEATLSAYVTIALLEIPLPVTNPIVRNALFCLESAWNVAKEGTHGSHVYTKALLAYAFSLLGKQNQNREILNSLDKEAVKEDNLVHWERPQRPKAPVGHLYQTQAPSAEVEMTSYVLLAYLTAQPAPTSGDLTSATNIVKWIMKQQNAQGGFSSTQVSGSQRVFCSRFTWQLGGLKVEQLMEKRRQLLN

SEQ ID NO: 766818 - protein, 108 aa, Homo sapiens
DFGGKSQMPKIYSLGRLSTRLFQDTVVALHALSRYGAATFTRTEKTAQVTVQDSQTFSTNFQVDNNNLLLLQQISLPELPGEYVITVTGERCVYLQVGLQAYMGESQL

SEQ ID NO: 766819 - protein, 1014 aa, Homo sapiens
MRVPVFEDIKDETEEEKIGEEENEEDQVFYKPVIEDLSMELARKCTELISDIRYKEEFKKSKDKCTFVTDSPMLNHVKNIGAFISEAKYKGTIKADLSNSLYKRMPATIDSVFAGEVTQLQSEVAYKQKHDAAKGFSDYAHMKEPPEVKHAMEVNKHQSNISYRKDVQDTHTYSAELDRPDIKMATQISKIISNAEYKKGQGIMNKEPAVIGRPDFEHAVEASKLSSQIKYKEKFDNEMKDKKHHYNPLESASFRQNQLAATLASNVKYKKDIQNMHDPVSDLPNLLFLDHVLKASKMLSGREYKKLFEENKGMYHFDADAVEHLHHKGNAVLQSQVKYKEEYEKNKGKPMLEFVETPSYQASKEAQKMQSEKVYKEDFEKEIKGRSSLDLDKTPEFLHVKYITNLLREKEYKKDLENEIKGKGMELNSEVLDIQRAKRASEMASEKEYKKDLESIIKGKGMQAGTDTLEMQHAKKAAEIASEKDYKRDLETEIKGKGMQVSTDTLDVQRAKKASEMASQKQYKKDLENEIKGKGMQVSMDIPDILRAKRTSEIYSQRKYKDEAEKMLSNYSTIADTPEIQRIKTTQQNISAVFYKKEVGAGTAVKDSPEIERVKKNQQNISSVKYKEEIKHATAISDPPELKRVKENQKNISNLQYKEQNYKATPVSMTPEIERVRRNQEQLSAVKYKGELQRGTAISDPPELKRAKENQKNISNVYYRGQLGRATTLSVTPEMERVKKNQENISSVKYTQDHKQMKGRPSLILDTPAMRHVKEAQNHISMVKYHEDFEKTKGRGFTPVVDDPVTERVRKNTQVVSDAAYKGVHPHIVEMDRRPGIIVDLKVWRTDPGSIFDLDPLEDNIQSRSLHMLSEKASHYRRHWSRSHSSSTFGTGLGDDRSEISEIYPSFSCCSEVTRPSDEGAPVLPGAYQQSHSQGYGYMHQTSVSSMRSMQHSPNLRTYRAMYDYSAQDEDEVSFRDGDYIVNVQPIDDGWMYGTVQRTGRTGMLPANYIEFVN

SEQ ID NO: 766820 - protein, 1014 aa, Homo sapiens; identical to SEQ ID NO: 766819

SEQ ID NO: 766821 - protein, 2376 aa, Homo sapiens
MRVPVFEDIKDETEEEKIGEEENEEDQVFYKPVIEDLSMELARKCTELISDIRYKEEFKKSKDKCTFVTDSPMLNHVKNIGAFISEAKYKGTIKADLSNSLYKRMPATIDSVFAGEVTQLQSEVAYKQKHDAAKGFSDYAHMKEPPEVKHAMEVNKHQSNISYRKDVQDTHTYSAELDRPDIKMATQISKIISNAEYKKGQGIMNKEPAVIGRPDFEHAVEASKLSSQIKYKEKFDNEMKDKKHHYNPLESASFRQNQLAATLASNVKYKKDIQNMHDPVSDLPNLLFLDHVLKASKMLSGREYKKLFEENKGMYHFDADAVEHLHHKGNAVLQSQVKYKEEYEKNKGKPMLEFVETPSYQASKEAQKMQSEKVYKEDFEKEIKGRSSLDLDKTPEFLHVKYITNLLREKEYKKDLENEIKGKGMELNSEVLDIQRAKRASEMASEKEYKKDLESIIKGKGMQAGTDTLEMQHAKKAAEIASEKDYKRDLETEIKGKGMQVSTDTLDVQRAKKASEMASQKQYKKDLENEIKGKGMQVSMDIPDILRAKRTSEIYSQRKYKDEAEKMLSNYSTIADTPEIQRIKTTQQNISAVFYKKEVGAGTAVKDSPEIERVKKNQQNISSVKYKEEIKHATAISDPPELKRVKENQKNISNLQYKEQNYKATPVSMTPEIERVRRNQEQLSAASRFCFLLYFLKHNIFLFKNMPFGRPLSFSKLTQERKTKYCIIMRAEMMRIHGHIEGNNRHRSLLDGRGWEEGEDPEKYLLSTGLNAGVMKSSVQQTPITQVHLCNKPAHVPLNLKVLKENEFEQHAIIWMNHIIKHEKVICTCSINSFVKFNNCNNNDDDKRNISRFNKLSKNLKRKSFTPSAFLDVPFHISLLKGMNCVSRKFGTVLLYLSCVCFIQEIFIKYPNVLGIVLVTQTQRWVKYKGELQRGTAISDPPELKRAKENQKNISNVYYRGQLGRATTLSVTPEMERVKKNQENISSVKYTQDHKQMKGRPSLILDTPAMRHVKEAQNHISMVKYHEDFEKTKGRGFTPVVDDPVTERVRKNTQVVSDAAYKGVHPHIVEMDRRPGIIVDLKVWRTDPGSIFDLDPLEDNIQSRSLHMLSEKASHYRRHWSRSHSSSTFGTGLGDDRSEISEIYPSFSCCSEVTRPSDEGAPVLPGAYQQSHSQGYGYMHQTSVSSMRSMQHSPNLRTYRAMYDYSAQDEDEVSFRDGDYIVNVQPIDDGWMYGTVQRTGRTGMLPANYIEFVELIISPCPLSFILMYPKPNLFKREKILLRQLGHYFTMMYPSFDNETHRYQEEGMTSGLKTAAFSVIPTNKNLCVWTLVLLIVFMVSFDWLLNPSGKCIFVDFNREVDCPLNVACVGNFLAVTLESPQANSLNSVMQPIIQTRFAFEIMRQFPILVKIAQYNKCKQWQKDSLVKIILTGGLRDLETSTKQRNFLVPQADWYLFISHLYQGISYSPFIFYGPKSMLSSTECQDQITSQLLCKGQIIMSLYNFPSSIYPVACHVDSSFCNMAAALRVPIIEAKRVTDDLKALSSSSRQLIRKTYFEKMLEIFLLHRTLFGRIYILGNNMYTLVNKRFRCSIEQLVINLMPPLISNEENVTEASEAMEAGAVTGKILSKQSYQFHTEMIWCLLLENGIQILEWKSSHQNGLIKRRPFPFFLLLFSEIIFKGMKQECHQRFFSTGPRACTLRKKFLPCMNFRISDFAGFCSALAGGSGNYIQSLQSRSPSQRHPSATLCFSDCAVYCDLQRGGIHLGSDFTAMTKPKKQNCKEVLRCTGLGDICLICYIQGELTKHPVKHRLRKRLLVQRPKLIYFHFRKVQHMLLKICDFILLAKRVNRLYYTEAASICHLHKVEKINAGKYLETSFKGVWLVSLTEMASRDESDKTPYLFWYIVHKPTKINWTCNIFAKKSVVKTEDKIPAQFYFTKYIFTFHPGRPFSFVIIRKSELLIKFSDLNIGQVQFWINSTFIRTAMKTDLKYMLVIRKVISSTDFKTRFTEHKSQYIFEELSLLKFYASRNNVCIAKYFCFKPLGIKICSEFNYKGSCFTMKTKTEQDVACSSGHNLVVLAVVNKACQDVKHLRRNIGKLYVSNQSAIFKSIIYKKMTCLNNFSTFHVLPSHLWFGNRYLVHEADSYKKILKIELKMTVEMSKHREHAPDFLKFDVFSSLTEAQGTVRYTFKRVLKTKLYRDPLSLEQSIATEYIAFVVSFCVHVFTNNSCSLESFLFLTYGKMNPSCLLVIVYTLAVEPSLKYLFGYQLPMEEALDDPRSPRPPYTTQAFVSTVFHKHLVGIWIRLDQPLSVHWVYFLKKMQIWFFQCATVFPYPLHAELDNTLGMRNKTFSKKIVEVQGMYLVFRFIHLQWNVFNKR

SEQ ID NO: 766822 - protein, 1070 aa, Homo sapiens
MTSGLKTAAFSVIPTNKNLCVWTLVLLIVFMVSFDWLLNPSGKCIFVDFNREVDCPLNVACVGNFLAVTLESPQANSLNSVMQPIIQTRFAFEIMRQFPILVKIAQYNKCKQWQKDSLVKIILTGGLRDLETSTKQRNFLVPQADWYLFISHLYQGISYSPFIFYGPKSMLSSTECQDQITSQLLCKGQIIMSLYNFPSSIYPVACHVDSSFCNMAAALRVPIIEAKRVTDDLKALSSSSRQLIRKTYFEKMLEIFLLHRTLFGRIYILGNNMYTLVNKRFRCSIEQLVINLMPPLISNEENVTEASEAMEAGAVTGKILSKQSYQFHTEMIWCLLLENGIQILEWKSSHQNGLIKRRPFPFFLLLFSEIIFKGMKQECHQRFFSTGPRACTLRKKFLPCMNFRISDFAGFLLALAGGSGNYIQSLQSRSPSQRHPSATLCFSDCAVYCDLQRGGIHLGSDFTAMTKPKKQNCKEVLRCTGLGDICLICYIQGELTKHPVKHRLRKRLLVQRPKLIYFHFRKVQHMLLKICDFILLAKRVNRLYYTEAASICHLHKVEKINAGKELETSFKGVWLVSLTEMASRDESDKTPYLFWYIVHKPTKINWTCNIFAKKSVVKTEDKIPAQFYFTKYIFTFHPGRPFSFVIIRKSELLIKFSDLNIGQVQFWINSTFIRTAMKTDLKYMLVIRKVISSTDFKTRFTEHKSQYIFEEISLLKFYASRNNVCIAKYFCFKPLGIKICSEFNYKGSCFTMKTKTEQDVACSSGHNLVVLAVVNKACQDVKHLRRNIGKLYVSNQSAIFKSIIYKKMTCLNNFSTFHVLPSHLWFGNRYLVHEADSYKKILKIELKMTVYMSKHREHAPDFLKFDVFSSLTEAQGTVRYTFKRLLKTKLYRDPLSLEQSIATEYIAFVVSFCVHVFTNNSCSLESFLFLTYGKMNPSCLLVIVYTLAVEPSLKYLFGYQLPMEEALDDPRSPRPPYTTQAFVSTVFHKHLVGIWIRLDQPLSVHWVYFLKKMQIWFFQCATVFPYPLHAELDNTLGMRNKTFSKKIVEVQGMYLVFRFIHLQWNVFNKR

SEQ ID NO: 766823 - protein, 280 aa, Homo sapiens
ATAGPREAAIMNPQCARCGKVVYPTEKVNCLDKYWHKGCFHCEVCKMALNMNNYKGYEKKPYCNAHYPKQSFTTVADTPENLRLKQQSELQSQVKYKRDFEESKGRGFSIVTDTPELQRLKRTQEQISNVKYHEDFEKTKGRGFTPVVDDPVTERVRKNTQVVSDAAYKGVHPHIVEMDRRPGIIVAPVLPGAYQQSHSQGYGYMHQTSVSSMRSMQHSPNLRTYRAMYDYSAQDEDEVSFRDGDYIVNVQPIDDGWMYGTVQRTGRTGMLPANYIEFVN

SEQ ID NO: 766824 - protein, 2376 aa, Homo sapiens; identical to SEQ ID NO: 766821

SEQ ID NO: 766825 - protein, 716 aa, Homo sapiens
MRVPVFEDIKDETEEEKIGEEENEEDQVFYKPVIEDLSMELARKCTELISDIRYKEEFKKSKDKCTFVTDSPMLNHVKNIGAFISEAKYKGTIKADLSNSLYKRMPATIDSVFAGEVTQLQSEVAYKQKHDAAKGFSDYAHMKEPPEVKHAMEVNKHQSNISYRKDVQDTHTYSAELDRPDIKMATQISKIISNAEYKKGQGIMNKEPAVIGRPDFEHAVEASKLSSQIKYKEKFDNEMKDKKHHYNPLESASFRQNQLAATLASNVKYKKDIQNMHDPVSDLPNLLFLDHVLKASKMLSGREYKKLFEENKGMYHFDADAVEHLHHKGNAVLQSQVKYKEEYEKNKGKPMLEFVETPSYQASKEAQKMQSEKVYKEDFEKEIKGRSSLDLDKTPEFLHVKYITNLLREKEYKKDLENEIKGKGMELNSEVLDIQRAKRASEMASEKEYKKDLESIIKGKGMQAGTDTLEMQHAKKAAEIASEKDYKRDLETEIKGKGMQVSTDTLDVQRAKKASEMASQKQYKKDLENEIKGKGMQVSMDIPDILRAKRTSEIYSQRKYKDEAEKMLSNYSTIADTPEIQRIKTTQQNISAVFYKKEVGAGTAVKDSPEIERVKKNQQNISSVKYKEEIKHATAISDPPELKRVKENQKNISNLQYKEQNYKATPVSMTPEIERVRRNQEQLSAASRFCFLLYFLKHNIFLFKNMPFGRPLSLAN

SEQ ID NO: 766826 - protein, 716 aa, Homo sapiens; identical to SEQ ID NO: 766825

SEQ ID NO: 766827 - protein, 561 aa, Homo sapiens
MRVPVFEDIKDETEEEKIGEEENEEDQVFYKPVIEDLSMELARKCTELISDIRYKEEFKKSKDKCTFVTDSPMLNHVKNIGAFISEAKYKGTIKADLSNSLYKRMPATIDSVFAGEVTQLQSEVAYKQKHDAAKGFSDYAHMKEPPEVKHAMEVNKHQSNISYRKDVQDTHTYSAELDRPDIKMATQISKIISNAEYKKGQGIMNKEPAVIGRPDFEHAVEASKLSSQIKYKEKFDNEMKDKKHHYNPLESASFRQNQLAATLASNVKYKKDIQNMHDPVSDLPNLLFLDHVLKASKMLSGREYKKLFEENKGMYHFDADAVEHLHHKGNAVLQSQVKYKEEYEKNKGKPMLEFVETPSYQASKEAQKMQSEKVYKEDFEKEIKGRSSLDLDKTPEFLHVKYITNLLREKEYKKDLENEIKGKGMELNSEVLDIQRAKRASEMASEKEYKKDLESIIKGKGMQAGTDTLEMQHAKKAAEIASEKDYKRDLETEIKGKGMQVSTDTLDVQRAKKASEMASQKQYKKDLENEIKGKGMQVSMDIPDILRAKRTSEIYSQVGHE

SEQ ID NO: 766828 - protein, 628 aa, Homo sapiens
MALTQGPLKFMDVAIEFSQEEWKCLDPAQRTLYRDVMLENYRNLVSLGICLPDLSVTSMLEQKRDPWTLQSEEKIANDPDGRECIKGVNTERSSKLGSNAGNKPCKNQLGFTFQLHLSDLQLFQAERKISGCKHFEKPVSDNSSVSPLEKISSSVKSHLLNKYRNNFDHAPLLPQEQKAHIREKAYKCNEHGQVFRASASLTNQVIHNADNPYKCSECGKVFSCSSKLVIHRRMHTGEKPYKCHECGKLFSSNSNLSQHQRIHTGEKPYKCHECDKVFRSSSKLAQHQRIHTGEKPYKCHECDKVFNQIAHLVRHQKIHTGEKPYSCNKCGKVFSRHSYLAEHQTVHTGEKPYKCEECGKAFSVRSSLITHQLIHTGRKPYKCKECDKVFGRKCFLTSHQRIHTRERPYGCSQCGKIFSQKSDLIRHRKTHTDEKPYKCNKCGTAFREFSDLTAHFLIHSGEKPYECKECGKVFRYKSSLTSHHRIHTGEKPYKCNRCGKVFSRSSNLVCHQKIHTGEKPYKCNQCGKVFNQASYLTRHQIIHTGERPYRCSKCGKAFRGCSGLTAHLAIHTEKKSHECKECGKIFTQKSSLTNHHRIHIGEKPYKCTLCSKVFSHNSDLAQHQRVHS

SEQ ID NO: 766829 - protein, 683 aa, Homo sapiens
MALTQGPLKFMDVAIEFSQEEWKCLDPAQRTLYRDVMLENYRNLVSLGICLPDLSVTSMLEQKRDPWTLQSEEKIANDPDGRECIKGVNTVPLLQQNLLCSRPQSPMFGGHLSDILGVPLLGHQLPPAQTLGDCTKGANIGIKDKERSSKLGSNAGNKPCKNQLGFTFQLHLSDLQLFQAERKISGCKHFEKPVSDNSSVSPLEKISSSVKSHLLNKYRNNFDHAPLLPQEQKAHIREKAYKCNEHGQVFRASASLTNQVIHNADNPYKCSECGKVFSCSSKLVIHRRMHTGEKPYKCHECGKLFSSNSNLSQHQRIHTGEKPYKCHECDKVFRSSSKLAQHQRIHTGEKPYKCHECDKVFNQIAHLVRHQKIHTGEKPYSCNKCGKVFSRHSYLAEHQTVHTGEKPYKCEECGKAFSVRSSLITHQLIHTGRKPYKCKECDKVFGRKCFLTSHQRIHTRERPYGCSQCGKIFSQKSDLIRHRKTHTDEKPYKCNKCGTAFREFSDLTAHFLIHSGEKPYECKECGKVFRYKSSLTSHHRIHTGEKPYKCNRCGKVFSRSSNLVCHQKIHTGEKPYKCNQCGKVFNQASYLTRHQIIHTGERPYRCSKCGKAFRGCSGLTAHLAIHTEKKSHECKECGKIFTQKSSLTNHHRIHIGEKPYKCTLCSKVFSHNSDLAQHQRVHS

SEQ ID NO: 766830 - protein, 106 aa, Homo sapiens
MALTQGPLKFMDVAIEFSQEEWKCLDPAQRTLYRDVMLENYRNLVSLGICLPDLSVTSMLEQKRDPWTLQSEEKIANDPDGRECIKGVNTGESSGGQSGGPIIFVF

SEQ ID NO: 766831 - protein, 252 aa, Homo sapiens
MGPPSASPHRECIPWQGLLLTASLLNFWNPPTTAKLTIESMPLSVAEGKEVLLLVHNLPQHLFGYSWYKGERVDGNSLIVGYVIGTQQATPGAAYSGRETIYTNASLLIQNVTQNDIGFYTLQVIKSDLVNEEATGQFHVYQENAPGLPVGAVAGIVTGVLVGVALVAALVCFLLLAKTGRTSIQRDLKEQQPQALAPGRGPSHSSAFSMSPLSTAQAPLPNPRTAASIYEELLKHDTNIYCRMDHKAEVAS

SEQ ID NO: 766832 - protein, 212 aa, Homo sapiens
MGPPSASPHRECIPWQGLLLTASLLNFWNPPTTAKLTIESMPLSVAEGKEVLLLVHNLPQHLFGYSWYKGERVDGNSLIVGYVIGTQQATPGAAYSGRETIYTNASLLIQNVTQNDIGFYTLQVIKSDLVNEEATGQFHVYQENAPGLPVGAVAGIVTGVLVGVALVAALVCFLLLAKTGRPWSLPQLCLLDVPSLHCPGPPTQPQDSSFHL

SEQ ID NO: 766833 - protein, 177 aa, Homo sapiens
MGPPSASPHRECIPWQGLLLTASLLNFWNPPTTAKLTIESMPLSVAEGKEVLLLVHNLPQHLFGYSWYKGERVDGNSLIVGYVIGTQQATPGAAYSGRETIYTNASLLIQNVTQNDIGFYTLQVIKSDLVNEEATGQFHVYPELPKPSISSNNSNPKEDKDAVAFTCEPEIHSTTCL

SEQ ID NO: 766834 - protein, 177 aa, Homo sapiens; identical to SEQ ID NO: 766833

SEQ ID NO: 766835 - protein, 137 aa, Homo sapiens
MPLSVAEGKEVLLLVHNLPQHLFGYSWYKGERVDGNSLIVGYVIGTQQATPGAAYSGRETIYTNASLLIQNVTQNDIGFYTLQVIKSDLVNEEATGQFHVYPELPKPSISSNNSNPKEDKDAVAFTCEPEIHSTTCL

SEQ ID NO: 766836 - protein, 44 aa, Homo sapiens
MTQTFTAGWTTKQKWLLSFLQELLLWVDGESPRPPALGMGKDMK

SEQ ID NO: 766837 - protein, 142 aa, Homo sapiens
MPRCRWLSLILLTIPLALVARKDPKKNETGVLRKLKPVNASNANVKQCLWFAMQEYNKESEDKYVFLVVKTLQAQLQVTNLLEYLIDVEIARSDCRKPLSTNEICAIQENSKLKRKLSCSFLVGALPWNGEFTVMEKKCEDA

SEQ ID NO: 766838 - protein, 142 aa, Homo sapiens; identical to SEQ ID NO: 766837

SEQ ID NO: 766839 - protein, 1103 aa, Homo sapiens
TCVQSVLQATQRPRVPGRLRPLSAAKPLRPSQRPGPRPGLDFLAGTVMASQPNSSAKKKEEKGKNIQVVVRCRPFNLAERKASAHSIVECDPVRKEVSVRTGGLADKSSRKTYTFDMVFGASTKQIDVYRSVVCPILDEVIMGYNCTIFAYGQTGTGKTFTMEGERSPNEEYTWEEDPLAGIIPRTLHQIFEKLTDNGTEFSVKVSLLEIYNEELFDLLNPSSDVSERLQMFDDPRNKRGVIIKGLEEITVHNKDEVYQILEKGAAKRTTAATLMNAYSSRSHSVFSVTIHMKETTIDGEELVKIGKLNLVDLAGSENIGRSGAVDKRAREAGNINQSLLTLGRVITALVERTPHVPYRESKLTRILQDSLGGRTRTSIIATISPASLNLEETLSTLEYAHRAKNILNKPEVNQKLTKKALIKEYTEEIERLKRDLAAAREKNGVYISEENFRVMSGKLTVQEEQIVELIEKIGAVEEELNRVTELFMDNKNELDQCKSDLQNKTQELETTQKHLQETKLQLVKEEYITSALESTEEKLHDAASKLLNTVEETTKDVSGLHSKLDRKKAVDQHNAEAQDIFGKNLNSLFNNMEELIKDGSSKQKAMLEVHKTLFGNLLSSSVSALDTITTVALGSLTSIPENVSTHVSQIFNMILKEQSLAAESKTVLQELINVLKTDLLSSLEMILSPTVVSILKINSQLKHIFKTSLTVADKIEDQKKELDGFLSILCNNLHELQENTICSLVESQKQCGNLTEDLKTIKQTHSQELCKLMNLWTERFCALEEKCENIQKPLSSVQENIQQKSKDIVNKMTFHSQKFCADSDGFSQELRNFNQEGTKLVEESVKHSDKLNGNLEKISQETEQRCESLNTRTVYFSEQWVSSLNEREQELHNLLEVVSQCCEASSSDITEKSDGRKAAHEKQHNIFLDQMTIDEDKLIAQNLELNETIKIGLTKLNCFLEQDLKLDIPTGTTPQRKSYLYPSTLVRTEPREHLLDQLKRKQPELLMMLNCSENNKEETIPDVDVEEAVLGQYTEEPLSQEPSVDAGVDCSSIGGVPFFQHKKSHGKDKENRGINTLERSKVEETTEHLVTKSRLPLRAQINL

SEQ ID NO: 766840 - protein, 1103 aa, Homo sapiens; identical to SEQ ID NO: 766839

SEQ ID NO: 766841 - protein, 649 aa, Homo sapiens
MSGKLTVQEEQIVELIEKIGAVEEELNRVTELFMDNKNELDQCKSDLQNKTQELETTQKHLQETKLQLVKEEYITSALESTEEKLHDAASKLLNTVEETTKDVSGLHSKLDRKKAVDQHNAEAQDIFGKNLNSLFNNMEELIKDGSSKQKAMLEVHKTLFGNLLSSSVSALDTITTVALGSLTSIPENVSTHVSQIFNMILKEQSLAAESKTVLQELINVLKTDLLSSLEMILSPTVVSILKINSQLKHIFKTSLTVADKIEDQKKELDGFLSILCNNLHELQENTICSLVESQKQCGNLTEDLKTIKQTHSQELCKLMNLWTERFCALEEKCENIQKPLSSVQENIQQKSKDIVNKMTFHSQKFCADSDGFSQELRNFNQEGTKLVEESVKHSDKLNGNLEKISQETEQRCESLNTRTVYFSEQWVSSLNEREQELHNLLEVVSQCCEASSSDITEKSDGRKAAHEKQHNIFLDQMTIDEDKLIAQNLELNETIKIGLTKLNCFLEQDLKLDIPTGTTPQRKSYLYPSTLVRTEPREHLLDQLKRKQPELLMMLNCSENNKEETIPDVDVEEAVLGQYTEEPLSQEPSVDAGVDCSSIGGVPFFQHKKSHGKDKENRGINTLERSKVEETTEHLVTKSRLPLRAQINL

SEQ ID NO: 766842 - protein, 403 aa, Homo sapiens [sequence omitted]

SEQ ID NO: 766843 - protein, 506 aa, Homo sapiens
AGGALLSQLKMADESETAVKPPAPPLPQMMEGNGNGHEHCSDCENEEDNSYNRGGLSPANDTGAKKKKKKQKKKKEKGSETDSAQDQPVKMNSLPAERIQEIQKAIELFSVGQGPAKTMEEASKRSYQFWDTQPVPKLGEVVNTHGPVEPDKDNIRQEPYTLPQGFTWDALDLGDRGVLKELYTLLNENYVEDDDNMFRFDYSPEFLLWALRPPGWLPQWHCGVRVVSSRKLVGFISAIPANIHIYDTEKKMVEINFLCVHKKLRSKRVAPVLIREITRRVHLEGIFQAVYTAGVVLPKPVGTCRYWHRSLNPRKLIEVKFSHLSRNMTMQRTMKLYRLPETPKTAGLRPMETKDIPVVHQLLTRYLKQFHLTPVMSQEEVEHWFYPQENIIDTFVVENANGEVTDFLSFYTLPSTIMNHPTHKSLKAAYSFYNVHTQTPLLDLMSDALVLAKMKGFDVFNALDLMENKTFLEKLKFGIGDGNLQYYLYNWKCPSMGAEKVGLVLQ

SEQ ID NO: 766844 - protein, 88 aa, Homo sapiens
  misc_feature (1)..(1): Xaa can be any naturally occurring amino acid
XANSAEFPNPEDIVLTQSPLAPARYWHRSLNPRKLIEVKFSHLSRNMTMQRTMKLYRLPENQGRPEASVLLCCKMKAGLQADYTYGGC

SEQ ID NO: 766845 - protein, 506 aa, Homo sapiens; identical to SEQ ID NO: 766843

SEQ ID NO: 766846 - protein, 506 aa, Homo sapiens; identical to SEQ ID NO: 766843

SEQ ID NO: 766847 - protein, 506 aa, Homo sapiens; identical to SEQ ID NO: 766843

SEQ ID NO: 766848 - protein, 506 aa, Homo sapiens; identical to SEQ ID NO: 766843

SEQ ID NO: 766849 - protein, 493 aa, Homo sapiens
MSTAAAEVPAPPLPQMMEGNGNGHEHCSDCENEEDNSYNRGGLSPANDTGAKKKKKKQKKKKEKGSETDSAQDQPVKMNSLPAERIQEIQKAIELFSVGQGPAKTMEEASKRSYQFWDTQPVPKLGEVVNTHGPVEPDKDNIRQEPYTLPQGFTWDALDLGDRGVLKELYTLLNENYVEDDDNMFRFDYSPEFLLWALRPPGWLPQWHCGVRVVSSRKLVGFISAIPANIHIYDTEKKMVEINFLCVHKKLRSKRVAPVLIREITRRVHLEGIFQAVYTAGVVLPKPVGTCRYWHRSLNPRKLIEVKFSHLSRNMTMQRTMKLYRLPETPKTAGLRPMETKDIPVVHQLLTRYLKQFHLTPVMSQEEVEHWFYPQENIIDTFVVENANGEVTDFLSFYTLPSTIMNHPTHKSLKAAYSFYNVHTQTPLLDLMSDALVLAKMKGFDVFNALDLMENKTFLEKLKFGIGDGNLQYYLYNWKCPSMGAEKVGLVLQ

SEQ ID NO: 766850 - protein, 456 aa, Homo sapiens
PGGTPPGNGIDTGAKKKKKKQKKKKEKGSETDSAQDQPVKMNSLPAERIQEIQKAIELFSVGQGPAKTMEEASKRSYQFWDTQPVPKLGEVVNTHGPVEPDKDNIRQEPYTLPQGFTWDALDLGDRGVLKELYTLLNENYVEDDDNMFRFDYSPEFLLWALRPPGWLPQWHCGVRVVSSRKLVGFISAIPANIHIYDTEKKMVEINFLCVHKKLRSKRVAPVLIREITRRVHLEGIFQAVYTAGVVLPKPVGTCRYWHRSLNPRKLIEVKFSHLSRNMTMQRTMKLYRLPETPKTAGLRPMETKDIPVVHQLLTRYLKQFHLTPVMSQEEVEHWFYPQENIIDTFVVENANGEVTDFLSFYTLPSTIMNHPTHKSLKAAYSFYNVHTQTPLLDLMSDALVLAKMKGFDVFNALDLMENKTFLEKLKFGIGDGNLQYYLYNWKCPSMGAEKVGLVLQ

SEQ ID NO: 766851 - protein, 416 aa, Homo sapiens
MNSLPAERIQEIQKAIELFSVGQGPAKTMEEASKRSYQFWDTQPVPKLGEVVNTHGPVEPDKDNIRQEPYTLPQGFTWDALDLGDRGVLKELYTLLNENYVEDDDNMFRFDYSPEFLLWALRPPGWLPQWHCGVRVVSSRKLVGFISAIPANIHIYDTEKKMVEINFLCVHKKLRSKRVAPVLIREITRRVHLEGIFQAVYTAGVVLPKPVGTCRYWHRSLNPRKLIEVKFSHLSRNMTMQRTMKLYRLPETPKTAGLRPMETKDIPVVHQLLTRYLKQFHLTPVMSQEEVEHWFYPQENIIDTFVVENANGEVTDFLSFYTLPSTIMNHPTHKSLKAAYSFYNVHTQTPLLDLMSDALVLAKMKGFDVFNALDLMENKTFLEKLKFGIGDGNLQYYLYNWKCPSMGAEKVGLVLQ

SEQ ID NO: 766852 - protein, 336 aa, Homo sapiens
  misc_feature (2)..(2): Xaa can be any naturally occurring amino acid
CXSMPHSSLKELYTLLNENYVEDDDNMFRFDYSPEFLLWALRPPGWLPQWHCGVRVVSSRKLVGFISAIPANIHIYDTEKKMVEINFLCVHKKLRSKRVAPVLIREITRRVHLEGIFQAVYTAGVVLPKPVGTCRYWHRSLNPRKLIEVKFSHLSRNMTMQRTMKLYRLPETPKTAGLRPMETKDIPVVHQLLTRYLKQFHLTPVMSQEEVEHWFYPQENIIDTFVVENANGEVTDFLSFYTLPSTIMNHPTHKSLKAAYSFYNVHTQTPLLDLMSDALVLAKMKGFDVFNALDLMENKTFLEKLKFGIGDGNLQYYLYNWKCPSMGAEKVGLVLQ

SEQ ID NO: 766853 - protein, 255 aa, Homo sapiens
AGGALLSQLKMADESETAVKPPAPPLPQMMEGNGNGHEHCSDCENEEDNSYNRGYWHRSLNPRKLIEVKFSHLSRNMTMQRTMKLYRLPETPKTAGLRPMETKDIPVVHQLLTRYLKQFHLTPVMSQEEVEHWFYPQENIIDTFVVENANGEVTDFLSFYTLPSTIMNHPTHKSLKAAYSFYNVHTQTPLLDLMSDALVLAKMKGFDVFNALDLMENKTFLEKLKFGIGDGNLQYYLYNWKCPSMGAEKVGLVLQ

SEQ ID NO: 766854 - protein, 198 aa, Homo sapiens
TALKWQQRGRKEAVPTCPHLFLFVPAALQKGFDVFNALDLMENKTFLEKVVHQLLTRYLKQFHLTPVMSQEEVEHWFYPQENIIDTFVVENANGEVTDFLSFYTLPSTIMNHPTHKSLKAAYSFYNVHTQTPLLDLMSDALVLAKMKGFDVFNALDLMENKTFLEKLKFGIGDGNLQYYLYNWKCPSMGAEKVGLVLQ

SEQ ID NO: 766855 - protein, 122 aa, Homo sapiens
MTCGVRVSLLPSPLRSYRNEALARRPGSALCHSPKPLSTGQQGLVAGCGFWCGLSEANSAEFPKPEDIVCLGWGPCHPWECCPLCRLLLEPATPLRWIFIRGLQGPPFSHCSCAANCRPQQS

SEQ ID NO: 766856 - protein, 169 aa, Homo sapiens
DLENHLVQAFWSGVQPSDRAKLGCEIVLPGLDVIFALERSKWWEGGSMTCGVRVSLLPSPLRSYRNEALARRPGSALCHSPKPLSTGQQGLVAGCGFWCGLSEANSAEFPKPEDIVCLGWGPCHPWECCPLCRLLLEPATPLRWIFIRGLQGPPFSHCSCAANCRPQQS

SEQ ID NO: 766857 - protein, 432 aa, Homo sapiens
AGGALLSQLKMADESETAVKPPAPPLPQMMEGNGNGHEHCSDCENEEDNSYNRGGLSPANDTGAKKKKKKQKKKKEKGSETDSAQDQPVKMNSLPAERIQEIQKAIELFSVGQGPAKTMEEASKRSYQFWDTQPVPKLGEVVNTHGPVEPDKDNIRQEPYTLPQGFTWDALDLGDRGVLKELYTLLNENYVEDDDNMFRFDYSPEFLLWALRPPGWLPQWHCGVRVVSSRKLVGFISAIPANIHIYDTEKKMVEINFLCVHKKLRSKRVAPVLIREITRRVHLEGIFQAVYTAGVVLPKPVGTCRYWHRSLNPRKLIEVKFSHLSRNMTMQRTMKLYRLPETPKTAGLRPMETKDIPVVHQLLTRYLKQFHLTPVMSQEEVEHWFYPQENIIDTFVVENANGEVTDFLSFYTLPSTIMNPSPQGNLYIDHTA

SEQ ID NO: 766858 - protein, 383 aa, Homo sapiens
AGGALLSQLKMADESETAVKPPAPPLPQMMEGNGNGHEHCSDCENEEDNSYNRGGLSPANDTGAKKKKKKQKKKKEKGSETDSAQDQPVKMNSLPAERIQEIQKAIELFSVGQGPAKTMEEASKRSYQFWDTQPVPKLGEVVNTHGPVEPDKDNIRQEPYTLPQGFTWDALDLGDRGVLKELYTLLNENYVEDDDNMFRFDYSPEFLLWALRPPGWLPQWHCGVRVVSSRKLVGFISAIPANIHIYDTEKKMVEINFLCVHKKLRSKRVAPVLIREITRRVHLEGIFQAVYTAGVVLPKPVGTCRYWHRSLNPRKLIEVKFSHLSRNMTMQRTMKLYRLPEGQCCPGWWAGGRERARRAWLSAGEKGSGWRGSFLLLEKRTSP

SEQ ID NO: 766859 - protein, 364 aa, Homo sapiens
AGGALLSQLKMADESETAVKPPAPPLPQMMEGNGNGHEHCSDCENEEDNSYNRGGLSPANDTGAKKKKKKQKKKKEKGSETDSAQDQPVKMNSLPAERIQEIQKAIELFSVGQGPAKTMEEASKRSYQFWDTQPVPKLGEVVNTHGPVEPDKDNIRQEPYTLPQGFTWDALDLGDRGVLKELYTLLNENYVEDDDNMFRFDYSPEFLLWALRPPGWLPQWHCGVRVVSSRKLVGFISAIPANIHIYDTEKKMVEINFLCVHKKLRSKRVAPVLIREITRRVHLEGIFQAVYTAGVVLPKPVGTCRYWHRSLNPRKLIEVKFSHLSRNMTMQRTMKLYRLPETPKTAGLRPMETKDIPTATTGVV

SEQ ID NO: 766860 - protein, 403 aa, Homo sapiens
AGGALLSQLKMADESETAVKPPAPPLPQMMEGNGNGHEHCSDCENEEDNSYNRGGLSPANDTGAKKKKKKQKKKKEKGSETDSAQDQPVKMNSLPAERIQEIQKAIELFSVGQGPAKTMEEASKRSYQFWDTQPVPKLGEVVNTHGPVEPDKDNIRQEPYTLPQGFTWDALDLGDRGVLKELYTLLNENYVEDDDNMFRFDYSPEFLLWALRPPGWLPQWHCGVRVVSSRKLVGFISAIPANIHIYDTEKKMVEINFLCVHKKLRSKRVAPVLIREITRRVHLEGIFQAVYTAGVVLPKPVGTCRYWHRSLNPRKLIEVKFSHLSRNMTMQRTMKLYRLPEGQCCPGWWAGGRERARRAWLSAGEKGSGWRGSFLLLEKRTSLSSLRAVLDVSIYLPIRISDV

SEQ ID NO: 766861 - protein, 309 aa, Homo sapiens
AGGALLSQLKMADESETAVKPPAPPLPQMMEGNGNGHEHCSDCENEEDNSYNRGGLSPANDTGAKKKKKKQKKKKEKGSETDSAQDQPVKMNSLPAERIQEIQKAIELFSVGQGPAKTMEEASKRSYQFWDTQPVPKLGEVVNTHGPVEPDKDNIRQEPYTLPQGFTWDALDLGDRGVLKELYTLLNENYVEDDDNMFRFDYSPEFLLWALRPPGWLPQWHCGVRVVSSRKLVGFISAIPANIHIYDTEKKMVEINFLCVHKKSDEPRSQIGPRGQIEPRSQIEPRSQIEPRSQIEPRSQIEPRSPIEP

SEQ ID NO: 766862 - protein, 107 aa, Homo sapiens
ADSRVSLLPAAMFQRRPLPPAFGLTLHLTTDSSLCVGRELSRRPPLRIEACIGLVSPHMPISEEASVLFEGQPTPSYFNTRFMENVRPSPQLLSNCCRPPTCWLSEA

SEQ ID NO: 766863 - protein, 506 aa, Homo sapiens; identical to SEQ ID NO: 766843

SEQ ID NO: 766864 - protein, 422 aa, Homo sapiens
AGGALLSQLKMADESETAVKPPAPPLPQMMEGNGNGHEHCSDCENEEDNSYNRGGLSPANDTGAKKKKKKQKKKKEKGSETDSAQDQPVKMNSLPAERIQEIQKAIELFSVGQGPAKTMEEASKRSYQFWDTQPVPKLGEVVNTHGPVEPDKDNIRQEPYTLPQGFTWDALDLGDRGVLKELYTLLNENYVEDDDNMFRFDYSPEFLLWALRPPGWLPQWHCGVRVVSSRKLVGFISAIPANIHIYDTEKKMVEINFLCVHKNRYGCLLECPLVVHQLLTRYLKQFHLTPVMSQEEVEHWFYPQENIIDTFVVENANGEVTDFLSFYTLPSTIMNHPTHKSLKAAYSFYNVHTQTPLLDLMSDALVLAKMKGFDVFNALDLMENKTFLEKLKFGIGDGNLQYYLYNWKCPSMGAEKVGLVLQ

SEQ ID NO: 766865 - protein, 416 aa, Homo sapiens; identical to SEQ ID NO: 766851

SEQ ID NO: 766866 - protein, 416 aa, Homo sapiens; identical to SEQ ID NO: 766851

SEQ ID NO: 766867 - protein, 506 aa, Homo sapiens; identical to SEQ ID NO: 766843

SEQ ID NO: 766868 - protein, 156 aa, Homo sapiens [sequence omitted]

SEQ ID NO: 766869 - protein, 506 aa, Homo sapiens; identical to SEQ ID NO: 766843

SEQ ID NO: 766870 - protein, 504 aa, Homo sapiens
AGGALLSQLKMADESETAVKPPAPPLPQMMEGNGNGHEHCSDCENEEDNSYNRGGLSPANDTGAKKKKKKQKKKKEKGSETDSAQDQPVKMNSLPAERIQEIQKAIELFSVGQGPAKTMEEASKRSYQFWDTQPVPKLGEVVNTHGPVEPDKDNIRQEPYTLPQGFTWDALDLGDRGVLKELYTLLNENYVEDDDNMFRFDYSPEFLLWALRPPGWLPQWHCGVRVVSSRKLVGFISAIPANIHIYDTEKKMVEINFLCVHKKLRSKRVAPVLIREITRRVHLEGIFQAVYTAGVVLPKPVGTCRYWHRSLNPRKLIEVKFSHLSRNMTMQRTMKLYRLPETPKTAGLRPMETKDIPVVHQLLTRYLKQFHLTPVMSQEEVEHWFYPQENIIDTFVVENANGEVTDFLSFYTLPSTIMNHPTHKSLKAAYSFYNVHTQTPLLDLMSDALVLAKMKGFDVFNALDLMENKTFLEKLKFGIGDGNLQYYLYNWKCPSMGAEKVGDT

SEQ ID NO: 766871 - protein, 383 aa, Homo sapiens; identical to SEQ ID NO: 766858

SEQ ID NO: 766872 - protein, 348 aa, Homo sapiens
AGGALLSQLKMADESETAVKPPAPPLPQMMEGNGNGHEHCSDCENEEDNSYNRGGLSPANDTGAKKKKKKQKKKKEKGSETDSAQDQPVKMNSLPAERIQEIQKAIELFSVGQGPAKTMEEASKRSYQFWDTQPVPKLGEVVNTHGPVEPDKDNIRQEPYTLPQGFTWDALDLGDRGVLKELYTLLNENYVEDDDNMFRFDYSPEFLLWALRPPGWLPQWHCGVRVVSSRKLVGFISAIPANIHIYDTEKKMVEINFLCVHKKLRSKRVAPVLIREITRRVHLEGIFQAVYTAGVVLPKPVGTCRYWHRSLNPRKLIEVKFSHLSRNMTMQRTMKLYRLPETPKTAGL

SEQ ID NO: 766873 - protein, 305 aa, Homo sapiens
AGGALLSQLKMADESETAVKPPAPPLPQMMEGNGNGHEHCSDCENEEDNSYNRGGLSPANDTGAKKKKKKQKKKKEKGSETDSAQDQPVKMNSLPAERIQEIQKAIELFSVGQGPAKTMEEASKRSYQFWDTQPVPKLGEVVNTHGPVEPDKDNIRQEPYTLPQGFTWDALDLGDRGVLKELYTLLNENYVEDDDNMFRFDYSPEFLLWALRPPGWLPQWHCGVRVVSSRKLVGFISAIPANIHIYDTEKKMVEINFLCVHKKLRSKRVAPVLIREITRRVHLEGIFQAVYTAGVVLPKPVGTCR

SEQ ID NO: 766874 - protein, 254 aa, Homo sapiens
AGGALLSQLKMADESETAVKPPAPPLPQMMEGNGNGHEHCSDCENEEDNSYNRGGLSPANDTGAKKKKKKQKKKKEKGSETDSAQDQPVKMNSLPAERIQEIQKAIELFSVGQGPAKTMEEASKRSYQFWDTQPVPKLGEVVNTHGPVEPDKDNIRQEPYTLPQGFTWDALDLGDRGVLKELYTLLNENYVEDDDNMFRFDYSPEFLLWALRPPGWLPQWHCGVRVVSSRKLVGFISAIPANIHIYDTDDTYVG

SEQ ID NO: 766875 - protein, 88 aa, Homo sapiens
PLSPRSPPLAPAAAGKSRLEEQRRPPSQLSFPFCFCLTILFSSSKDGCLEKGEKLRGRQRGAKEGAIASAGAGGGFSSANPSWTIVSS

SEQ ID NO: 766876 - protein, 587 aa, Homo sapiens
MISSVDVKSEVPVGLEPISPLDLRTDLRMMMPVVDPVVREKQLQQELLLIQQQQQIQKQLLIAEFQKQHENLTRQHQAQLQEHIKELLAIKQQQELLEKEQKLEQQRQEQEVERHRREQQLPPLRGKDRGRERAVASTEVKQKLQEFLLSKSATKDTPTNGKNHSVSRHPKLWYTAAHHTSLDQSSPPLSGTSPSYKYTLPGAQDAKDDFPLRKTASEPNLKVRSRLKQKVAERRSSPLLRRKDGNVVTSFKKRMFEVTESSVSSSSPGSGPSSPNNGPTGSVTENETSVLPPTPHAEQMVSQQRILIHEDSMNLLSLYTSPSLPNITLGLPAVPSQLNASNSLKEKQKCETQTLRQGVPLPGQYGGSIPASSSHPHVTLEGKPPNSSHQALLQHLLLKEQMRQQKLLVAGGVPLHPQSPLATKERISPGIRGTHKLPRHRPLNRTQSAPLPQSTLAQLVIQQQHQQFLEKQKQYQQQIHMNKLLSKSIEQLKQPGSHLEEAEEELQGDQAMQEDRAPSSGNSTRSDSSACVDDTLGQVGAVKVKEEPVDSDEDAQIQEMESGEQAAFMQQVIGKDLAPGFVIKVII

SEQ ID NO: 766877 - protein, 1008 aa, Homo sapiens
MISSVDVKSEVPVGLEPISPLDLRTDLRMMMPVVDPVVREKQLQQELLLIQQQQQIQKQLLIAEFQKQHENLTRQHQAQLQEHIKELLAIKQQQELLEKEQKLEQQRQEQEVERHRREQQLPPLRGKDRGRERAVASTEVKQKLQEFLLSKSATKDTPTNGKNHSVSRHPKLWYTAAHHTSLDQSSPPLSGTSPSYKYTLPGAQDAKDDFPLRKTASEPNLKVRSRLKQKVAERRSSPLLRRKDGNVVTSFKKRMFEVTESSVSSSSPGSGPSSPNNGPTGSVTENETSVLPPTPHAEQMVSQQRILIHEDSMNLLSLYTSPSLPNITLGLPAVPSQLNASNSLKEKQKCETQTLRQGVPLPGQYGGSIPASSSHPHVTLEGKPPNSSHQALLQHLLLKEQMRQQKLLVAGGVPLHPQSPLATKERISPGIRGTHKLPRHRPLNRTQSAPLPQSTLAQLVIQQQHQQFLEKQKQYQQQIHMNKLLSKSIEQLKQPGSHLEEAEEELQGDQAMQEDRAPSSGNSTRSDSSACVDDTLGQVGAVKVKEEPVDSDEDAQIQEMESGEQAAFMQQPFLEPTHTRALSVRQAPLAAVGMDGLEKHRLVSRTHSSPAASVLPHPAMDRPLQPGSATGIAYDPLMLKHQCVCGNSTTHPEHAGRIQSIWSRLQETGLLNKCERIQGRKASLEEIQLVHSEHHSLLYGTNPLDGQKLDPRILLGDDSQKFFSSLPCGGLGVDSDTIWNELHSSGAARMAVGCVIELASKVASGELKNGFAVVRPPGHHAEESTAMGFCFFNSVAITAKYLRDQLNISKILIVDLDVHHGNGTQQAFYADPSILYISLHRYDEGNFFPGSGAPNEVGTGLGEGYNINIAWTGGLDPPMGDVEYLEAFRTIVKPVAKEFDPDMVLVSAGFDALEGHTPPLGGYKVTAKCFGHLTKQLMTLADGRVVLALEGGHDLTAICDASEACVNALLGNELEPLAEDILHQSPNMNAVISLQKIIEIQSMSLKFS

SEQ ID NO: 766878 - protein, 1008 aa, Homo sapiens; identical to SEQ ID NO: 766877

SEQ ID NO: 766879 - protein, 333 aa, Homo sapiens [sequence omitted]

SEQ ID NO: 766880 - protein, 333 aa, Homo sapiens [sequence omitted]

SEQ ID NO: 766881 - protein, 333 aa, Homo sapiens [sequence omitted]

SEQ ID NO: 766882 - protein, 559 aa, Homo sapiens
MMMPVVDPVVREKQLQQELLLIQQQQQIQKQLLIAEFQKQHENLTRQHQAQLQEHIKELLAIKQQQELLEKEQKLEQQRQEQEVERHRREQQLPPLRGKDRGRERAVASTEVKQKLQEFLLSKSATKDTPTNGKNHSVSRHPKLWYTAAHHTSLDQSSPPLSGTSPSYKYTLPGAQDAKDDFPLRKTASEPNLKVRSRLKQKVAERRSSPLLRRKDGNVVTSFKKRMFEVTESSVSSSSPGSGPSSPNNGPTGSVTENETSVLPPTPHAEQMVSQQRILIHEDSMNLLSLYTSPSLPNITLGLPAVPSQLNASNSLKEKQKCETQTLRQGVPLPGQYGGSIPASSSHPHVTLEGKPPNSSHQALLQHLLLKEQMRQQKLLVAGGVPLHPQSPLATKERISPGIRGTHKLPRHRPLNRTQSAPLPQSTLAQLVIQQQHQQFLEKQKQYQQQIHMNKLLSKSIEQLKQPGSHLEEAEEELQGDQAMQEDRAPSSGNSTRSDSSACVDDTLGQVGAVKVKEEPVDSDEDAQIQEMESGEQAAFMQQVIGKDLAPGFVIKVII

SEQ ID NO: 766883 - protein, 876 aa, Homo sapiens
MISSVDVKSEVPVGLEPISPLDLRTDLRMMMPVVDPVVREKQLQQELLLIQQQQQIQKQLLIAEFQKQHENLTRQHQAQLQEHIKELLAIKQQQELLEKEQKLEQQRQEQEVERHRREQQLPPLRGKDRGRERAVASTEVKQKLQEFLLSKSATKDTPTNGKNHSVSRHPKLWYTAAHHTSLDQSSPPLSGTSPSYKYTLPGAQDAKDDFPLRKTASEPNLKVRSRLKQKVAERRSSPLLRRKDGNVVTSFKKRMFEVTESSVSSSSPGSGPSSPNNGPTGSVTENETSVLPPTPHAEQMVSQQRILIHEDSMNLLSLYTSPSLPNITLGLPAVPSQLNASNSLKEKQKCETQTLRQGVPLPGQYGGSIPASSSHPHVTLEGKPPNSSHQALLQHLLLKEQMRQQKLLVAGGVPLHPQSPLATKERISPGIRGTHKLPRHRPLNRTQSAPLPQSTLAQLVIQQQHQQFLEKQKQYQQQIHMNKLLSKSIEQLKQPGSHLEEAEEELQGDQAMQEDRAPSSGNSTRSDSSACVDDTLGQVGAVKVKEEPVDSDEDAQIQEMESGEQAAFMQQPFLEPTHTRALSVRQAPLAAVGMDGLEKHRLVSRTHSSPAASVLPHPAMDRPLQPGSATGIAYDPLMLKHQCVCGNSTTHPEHAGRIQSIWSRLQETGLLNKCERIQGRKASLEEIQLVHSEHHSLLYGTNPLDGQKLDPRILLGDDSQKFFSSLPCGGLGVDSDTIWNELHSSGAARMAVGCVIELASKVASGELKNGFAVVRPPGHHAEESTAMGFCFFNSVAITAKYLRDQLNISKILIVDLDVHHGNGTQQAFYADPSILYISLHRYDEGNFFPGSGAPNEVRFISLEPHFYLYLSGNCIA

SEQ ID NO: 766884 - protein, 258 aa, Homo sapiens
LGTRQAIRFNASNSLKEKQKCETQTLRQGVPLPGQYGGSIPASSSHPHVTLEGKPPNSSHQALLQHLLLKEQMRQQKLLVAGGVPLHPQSPLATKERISPGIRGTHKLPRHRPLNRTQSAPLPQSTLAQLVIQQQHQQFLEKQKQYQQQIHMNKLLSKSIEQLKQPGSHLEEAEEELQGDQAMQEDRAPSSGNSTRSDSSACVDDTLGQVGAVKVKEEPVDSDEDAQIQEMESGEQAAFMQQVIGKDLAPGFVIKVII

SEQ ID NO: 766885 - protein, 892 aa, Homo sapiens
MMMPVVDPVVREKQLQQELLLIQQQQQIQKQLLIAEFQKQHENLTRQHQAQLQEHIKELLAIKQQQELLEKEQKLEQQRQEQEVERHRREQQLPPLRGKDRGRERAVASTEVKQKLQEFLLSKSATKDTPTNGKNHSVSRHPKLWYTAAHHTSLDQSSPPLSGTSPSYKYTLPGAQDAKDDFPLRKTASEPNLKVRSRLKQKVAERRSSPLLRRKDGNVVTSFKKRMFEVTESSVSSSSPGSGPSSPNNGPTGSVTENETSVLPPTPHAEQMVSQQRILIHEDSMNLLSLYTSPSLPNITLGLPAVPSQLNASNSLKEKQKCETQTLRQGVPLPGQYGGSIPASSSHPHVTLEGKPPNSSHQALLQHLLLKEQMRQQKLLVAGGVPLHPQSPLATKERISPGIRGTHKLPRHRPLNRTQSAPLPQSTLAQLVIQQQHQQFLEKQKQYQQQIHMNKPFLEPTHTRALSVRQAPLAAVGMDGLEKHRLVSRTHSSPAASVLPHPAMDRPLQPGSATGIAYDPLMLKHQCVCGNSTTHPEHAGRIQSIWSRLQETGLLNKCERIQGRKASLEEIQLVHSEHHSLLYGTNPLDGQKLDPRILLGDDSQKFFSSLPCGGLGVDSDTIWNELHSSGAARMAVGCVIELASKVASGELKNGFAVVRPPGHHAEESTAMGFCFFNSVAITAKYLRDQLNISKILIVDLDVHHGNGTQQAFYADPSILYISLHRYDEGNFFPGSGAPNEVGTGLGEGYNINIAWTGGLDPPMGDVEYLEAFRTIVKPVAKEFDPDMVLVSAGFDALEGHTPPLGGYKVTAKCFGHLTKQLMTLADGRVVLALEGGHDLTAICDASEACVNALLGNELEPLAEDILHQSPNMNAVISLQKIIEIQSMSLKFS

SEQ ID NO: 766886 - protein, 812 aa, Homo sapiens
MMMPVVDPVVREKQLQQELLLIQQQQQIQKQLLIAEFQKQHENLTRQHQAQLQEHIKELLAIKQQQELLEKEQKLEQQRQEQEVERHRREQQLPPLRGKDRGRERAVASTEVKQKLQEFLLSKSATKDTPTNGKNHSVSRHPKLWYTAAHHTSLDQSSPPLSGTSPSYKYTLPGAQDAKDDFPLRKTASEPNLKVRSRLKQKVAERRSSPLLRRKDGNVVTSFKKRMFEVTESSVSSSSPGSGPSSPNNGPTGSVTENETSVLPPTPHAEQMVSQQRILIHEDSMNLLSLYTSPSLPNITLGLPAVPSQLNASNSLKEKQKCETQTLRQGVPLPGQYGGSIPASSSHPHVTLEGKPPNSSHQALLQHLLLKEQMRQQKLLVAGGVPLHPQSPLATKERISPGIRGTHKLPRHRPLNRTQSAPLPQSTLAQLVIQQQHQQFLEKQKQYQQQIHMNKPFLEPTHTRALSVRQAPLAAVGMDGLEKHRLVSRTHSSPAASVLPHPAMDRPLQPGSATGIAYDPLMLKHQCVCGNSTTHPEHAGRIQSIWSRLQETGLLNKCERIQGRKASLEEIQLVHSEHHSLLYGTNPLDGQKLDPRILLGDDSQKFFSSLPCGGLGVDSDTIWNELHSSGAARMAVGCVIELASKVASGELKNGFAVVRPPGHHAEESTAMGFCFFNSVAITAKYLRDQLNISKILIVDLDVHHGNGTQQAFYADPSILYISLHRYDEGNFFPGSGAPNEVGTGLGEGYNINIAWTGGLDPPMGDVEYLEAFRTIVKPVAKEFDPDMVLVSAGFDALEGHTPPLGGYKVTAK

SEQ ID NO: 766887 - protein, 88 aa, Homo sapiens; identical to SEQ ID NO: 766875

SEQ ID NO: 766888 - protein, 179 aa, Homo sapiens
ILGTSFFNDLFWFQDVAFLEKLIKDDIERGRLPLLLVANAGTAAVGHTDKIGRLKELCEQYGIWLHVEGVNLATLALGYVSSSVLAAAKCDSMTMTPGPWLGLPAVPAVTLYKHDDPALTLVAGLTSNKPTDKLRALPLWLSLQYLGLDGFVERIKHACQLSQRLQESLKKVNYIKILV

SEQ ID NO: 766889 - protein, 117 aa, Homo sapiens
MVKLSIVLTPQFLSHDQGPLTKELQQHVKSVTCPCEYLRKTILHLPPPMDPLPLCLPVLPMLQWITQHPSQGPMPLKMDLPPGDPGVLPLSCPQECPDPHSYPGPRSLTPGLPSSAV

SEQ ID NO: 766890 - protein, 108 aa, Homo sapiens
KGQGIVCGDSGGSGGSGQPDLVTLLAHQTILHLPPPMDPLPLCLPVLPMLQWITQHPSQGPMPLKMDLPPGDPGVLPLSCPQECPDPHRESVPHRESVPTEERHPTER

SEQ ID NO: 766891 - protein, 856 aa, Homo sapiens
QERYGAPPRRLSTIRFGSRRRRLAAPPLLRPAGRGRGGRQRCQRGRSCGAREEEVEPGTARPPPAASAMDASLEKIADPTLAEMGKNLKEAVKMLEDSQRRTEEENGKKLISGDIPGPLQGSGQDMVSILQLVQNLMHGDEDEEPQSPRIQNIGEQGHMALLGHSLGAYISTLDKEKLRKLTTRILSDTTLWLCRIFRYENGCAYFHEEEREGLAKICRLAIHSRYEDFVVDGFNVLYNKKPVIYLSAAARPGLGQYLCNQLGLPFPCLCRVPCNTVFGSQHQMDVAFLEKLIKDDIERGRLPLLLVANAGTAAVGHTDKIGRLKELCEQYGIWLHVEGVNLATLALGYVSSSVLAAAKCDSMTMTPGPWLGLPAVPAVTLYKHDDPALTLVAGLTSNKPTDKLRALPLWLSLQYLGLDGFVERIKHACQLSQRLQESLKKVNYIKILVEDELSSPVVVFRFFQELPGSDPVFKAVPVPNMTPSGVGRERHSCDALNRWLGEQLKQLVPASGLTVMDLEAEGTCLRFSPLMTAAVLGTRGEDVDQLVACIESKLPVLCCTLQLREEFKQEVEATAGLLYVDDPNWSGIGVVRYEHANDDKSSLKSDPEGENIHAGLLKKLNELESDLTFKIGPEYKSMKSCLYVGMASDNVDAAELVETIAATAREIEENSRLLENMTEVVRKGIQEAQVELQKASEERLLEEGVLRQIPVVGSVLNWFSPVQALQKGRTFNLTAGSLESTEPIYVYKAQGAGVTLPPTPSGSRTKQRLPGQKPFKRSLRGSDALSETSSVSHIEDLEKVERLSSGPEQITLEASSTEGHPGAPSPQHTDQTEAFQKGVPHPEDDHSQVEGPESLR

SEQ ID NO: 766892 - protein, 859 aa, Homo sapiens
GTPPDYGMGPARRLSTIRFGSRRRRLAAPPLLRPAGRGRGGRQRCQRGRSCGAREEEVEPGTARPPPAASAMDASLEKIADPTLAEMGKNLKEAVKMLEDSQRRTEEENGKKLISGDIPGPLQGSGQDMVSILQLVQNLMHGDEDEEPQSPRIQNIGEQGHMALLGHSLGAYISTLDKEKLRKLTTRILSDTTLWLCRIFRYENGCAYFHEEEREGLAKICRLAIHSRYEDFVVDGFNVLYNKKPVIYLSAAARPGLGQYLCNQLGLPFPCLCRVPCNTVFGSQHQMDVAFLEKLIKDDIERGRLPLLLVANAGTAAVGHTDKIGRLKELCEQYGIWLHVEGVNLATLALGYVSSSVLAAAKCDSMTMTPGPWLGLPAVPAVTLYKHDDPALTLVAGLTSNKPTDKLRALPLWLSLQYLGLDGFVERIKHACQLSQRLQESLKKVNYIKILVEDELSSPVVVFRFFQELPGSDPVFKAVPVPNMTPSGVGRERHSCDALNRWLGEQLKQLVPASGLTVMDLEAEGTCLRFSPLMTAAVLGTRGEDVDQLVACIESKLPVLCCTLQLREEFKQEVEATAGLLYVDDPNWSGIGVVRYEHANDDKSSLKSDPEGENIHAGLLKKLNELESDLTFKIGPEYKSMKSCLYVGMASDNVDAAELVETIAATAREIEENSRLLENMTEVVRKGIQEAQVELQKASEERLLEEGVLRQIPVVGSVLNWFSPVQALQKGRTFNLTAGSLESTEPIYVYKAQGAGVTLPPTPSGSRTKQRLPGQKPFKRSLRGSDALSETSSVSHIEDLEKVERLSSGPEQITLEASSTEGHPGAPSPQHTDQTEAFQKGVPHPEDDHSQVEGPESLR

SEQ ID NO: 766893 - protein, 494 aa, Homo sapiens
MTMTPGPWLGLPAVPAVTLYKHDDPALTLVAGLTSNKPTDKLRALPLWLSLQYLGLDGFVERIKHACQLSQRLQESLKKVNYIKILVEDELSSPVVVFRFFQELPGSDPVFKAVPVPNMTPSGVGRERHSCDALNRWLGEQLKQLVPASGLTVMDLEAEGTCLRFSPLMTAAVLGTRGEDVDQLVACIESKLPVLCCTLQLREEFKQEVEATAGLLYVDDPNWSGIGVVRYEHANDDKSSLKSDPEGENIHAGLLKKLNELESDLTFKIGPEYKSMKSCLYVGMASDNVDAAELVETIAATAREIEENSRLLENMTEVVRKGIQEAQVELQKASEERLLEEGVLRQIPVVGSVLNWFSPVQALQKGRTFNLTAGSLESTEPIYVYKAQGAGVTLPPTPSGSRTKQRLPGQKPFKRSLRGSDALSETSSVSHIEDLEKVERLSSGPEQITLEASSTEGHPGAPSPQHTDQTEAFQKGVPHPEDDHSQVEGPESLR

SEQ ID NO: 766894 - protein, 538 aa, Homo sapiens
QERYGAPPRRLSTIRFGSRRRRLAAPPLLRPAGRGRGGRQRCQRGRSCGAREEEVEPGTARPPPAASAMDASLEKIADPTLAEMGKNLKEAVKMLEDSQRRTEEENGKKLISGDIPGPLQGSGQDMVSILQLVQNLMHGDEDEEPQSPRIQNIGEQGHMALLGHSLGAYISTLDKEKLRKLTTRILSDTTLWLCRIFRYENGCAYFHEEEREGLAKICRLAIHSRYEDFVVDGFNVLYNKKPVIYLSAAARPGLGQYLCNQLGLPFPCLCRVPCNTVFGSQHQMDVAFLEKLIKDDIERGRLPLLLVANAGTAAVGHTDKIGRLKELCEQYGIWLHVEGVNLATLALGYVSSSVLAAAKCDSMTMTPGPWLGLPAVPAVTLYKHDDPALTLVAGLTSNKPTDKLRALPLWLSLQYLGLDGFVERIKHACQLSQRLQESLKKVNYIKILVEDELSSPVVVFRFFQELPGSDPVFKAVPVPNMTPSGVGRERHSCDALNRWLGEQLKQLVPASGLTVMDLEAEGTCLRFSPLMTAAGMIS

SEQ ID NO: 766895 - protein, 773 aa, Homo sapiens
MGKNLKEAVKMLEDSQRRTEEENGKKLISGDIPGPLQGSGQDMVSILQLVQNLMHGDEDEEPQSPRIQNIGEQGHMALLGHSLGAYISTLDKEKLRKLTTRILSDTTLWLCRIFRYENGCAYFHEEEREGLAKICRLAIHSRYEDFVVDGFNVLYNKKPVIYLSAAARPGLGQYLCNQLGLPFPCLCRVPCNTVFGSQHQMDVAFLEKLIKDDIERGRLPLLLVANAGTAAVGHTDKIGRLKELCEQYGIWLHVEGVNLATLALGYVSSSVLAAAKCDSMTMTPGPWLGLPAVPAVTLYKHDDPALTLVAGLTSNKPTDKLRALPLWLSLQYLGLDGFVERIKHACQLSQRLQESLKKVNYIKILVEDELSSPVVVFRFFQELPGSDPVFKAVPVPNMTPSGVGRERHSCDALNRWLGEQLKQLVPASGLTVMDLEAEGTCLRFSPLMTAAVLGTRGEDVDQLVACIESKLPVLCCTLQLREEFKQEVEATAGLLYVDDPNWSGIGVVRYEHANDDKSSLKSDPEGENIHAGLLKKLNELESDLTFKIGPEYKSMKSCLYVGMASDNVDAAELVETIAATAREIEENSRLLENMTEVVRKGIQEAQVELQKASEERLLEEGVLRQIPVVGSVLNWFSPVQALQKGRTFNLTAGSLESTEPIYVYKAQGAGVTLPPTPSGSRTKQRLPGQKPFKRSLRGSDALSETSSVSHIEDLEKVERLSSGPEQITLEASSTEGHPGAPSPQHTDQTEAFQKGVPHPEDDHSQVEGPESLR

SEQ ID NO: 766896 - protein, 898 aa, Homo sapiens
GTPPDYGMGPARRLSTIRFGSRRRRLAAPPLLRPAGRGRGGRQRCQRGRSCGAREEEVEPGTARPPPAASAMDASLEKIADPTLAEMGKNLKEAVKMLEDSQRRTEEENGKKLISGDIPGPLQGSCLRKKKNLKQRQLNEGSSEESGGGCVLFPSAHQLFSFCSGQDMVSILQLVQNLMHGDEDEEPQSPRIQNIGEQGHMALLGHSLGAYISTLDKEKLRKLTTRILSDTTLWLCRIFRYENGCAYFHEEEREGLAKICRLAIHSRYEDFVVDGFNVLYNKKPVIYLSAAARPGLGQYLCNQLGLPFPCLCRVPCNTVFGSQHQMDVAFLEKLIKDDIERGRLPLLLVANAGTAAVGHTDKIGRLKELCEQYGIWLHVEGVNLATLALGYVSSSVLAAAKCDSMTMTPGPWLGLPAVPAVTLYKHDDPALTLVAGLTSNKPTDKLRALPLWLSLQYLGLDGFVERIKHACQLSQRLQESLKKVNYIKILVEDELSSPVVVFRFFQELPGSDPVFKAVPVPNMTPSGVGRERHSCDALNRWLGEQLKQLVPASGLTVMDLEAEGTCLRFSPLMTAAVLGTRGEDVDQLVACIESKLPVLCCTLQLREEFKQEVEATAGLLYVDDPNWSGIGVVRYEHANDDKSSLKSDPEGENIHAGLLKKLNELESDLTFKIGPEYKSMKSCLYVGMASDNVDAAELVETIAATAREIEENSRLLENMTEVVRKGIQEAQVELQKASEERLLEEGVLRQIPVVGSVLNWFSPVQALQKGRTFNLTAGSLESTEPIYVYKAQGAGVTLPPTPSGSRTKQRLPGQKPFKRSLRGSDALSETSSVSHIEDLEKVERLSSGPEQITLEASSTEGHPGAPSPQHTDQTEAFQKGVPHPEDDHSQVEGPESLR

SEQ ID NO: 766897 - protein, 494 aa, Homo sapiens; identical to SEQ ID NO: 766893

SEQ ID NO: 766898 - protein, 592 aa, Homo sapiens
QERYGAPPRRLSTIRFGSRRRRLAAPPLLRPAGRGRGGRQRCQRGRSCGAREEEVEPGTARPPPAASAMDASLEKIADPTLAEMGKNLKEAVKMLEDSQRRTEEENGKKLISGDIPGPLQGSGQDMVSILQLVQNLMHGDEDEEPQSPRIQNIGEQGHMALLGHSLGAYISTLDKEKLRKLTTRILSDTTLWLCRIFRYENGCAYFHEEEREGLAKICRLAIHSRYEDFVVDGFNVLYNKKPVIYLSAAARPGLGQYLCNQLGLPFPCLCRVPCNTVFGSQHQMDVAFLEKLIKDDIERGRLPLLLVANAGTAAVGHTDKIGRLKELCEQYGIWLHVEGVNLATLALGYVSSSVLAAAKCDSMTMTPGPWLGLPAVPAVTLYKHDDPALTLVAGLTSNKPTDKLRALPLWLSLQYLGLDGFVERIKHACQLSQRLQESLKKVNYIKILVEDELSSPVVVFRFFQELPGSDPVFKAVPVPNMTPSGVGRERHSCDALNRWLGEQLKQLVPASGLTVMDLEAEGTCLRFSPLMTAAVLGTRGEDVDQLVACIESKLPVLCCTLQLREEFKQEVEATAGLLYVDDPNWSGIGVVR

SEQ ID NO: 766899 - protein, 538 aa, Homo sapiens; identical to SEQ ID NO: 766894

SEQ ID NO: 766900 - protein, 520 aa, Homo sapiens
QERYGAPPRRLSTIRFGSRRRRLAAPPLLRPAGRGRGGRQRCQRGRSCGAREEEVEPGTARPPPAASAMDASLEKIADPTLAEMGKNLKEAVKMLEDSQRRTEEENGKKLISGDIPGPLQGSGQDMVSILQLVQNLMHGDEDEEPQSPRIQNIGEQGHMALLGHSLGAYISTLDKEKLRKLTTRILSDTTLWLCRIFRYENGCAYFHEEEREGLAKICRLAIHSRYEDFVVDGFNVLYNKKPVIYLSAAARPGLGQYLCNQLGLPFPCLCRVPCNTVFGSQHQMDVAFLEKLIKDDIERGRLPLLLVANAGTAAVGHTDKIGRLKELCEQYGIWLHVEGVNLATLALGYVSSSVLAAAKCDSMTMTPGPWLGLPAVPAVTLYKHDDPALTLVAGLTSNKPTDKLRALPLWLSLQYLGLDGFVERIKHACQLSQRLQESLKKVNYIKILVEDELSSPVVVFRFFQELPGSDPVFKAVPVPNMTPSGVGRERHSCDALNRWVRMAVTPLSFQVPVHHHPTCW

SEQ ID NO: 766901 - protein, 538 aa, Homo sapiens; identical to SEQ ID NO: 766894

SEQ ID NO: 766902 - protein, 832 aa, Homo sapiens
GTPPDYGMGPARRLSTIRFGSRRRRLAAPPLLRPAGRGRGGRQRCQRGRSCGAREEEVEPGTARPPPAASAMDASLEKIADPTLAEMGKNLKEAVKMLEDSQRRTEEENGKKLISGDIPGPLQGRIQNIGEQGHMALLGHSLGAYISTLDKEKLRKLTTRILSDTTLWLCRIFRYENGCAYFHEEEREGLAKICRLAIHSRYEDFVVDGFNVLYNKKPVIYLSAAARPGLGQYLCNQLGLPFPCLCRVPCNTVFGSQHQMDVAFLEKLIKDDIERGRLPLLLVANAGTAAVGHTDKIGRLKELCEQYGIWLHVEGVNLATLALGYVSSSVLAAAKCDSMTMTPGPWLGLPAVPAVTLYKHDDPALTLVAGLTSNKPTDKLRALPLWLSLQYLGLDGFVERIKHACQLSQRLQESLKKVNYIKILVEDELSSPVVVFRFFQELPGSDPVFKAVPVPNMTPSGVGRERHSCDALNRWLGEQLKQLVPASGLTVMDLEAEGTCLRFSPLMTAAVLGTRGEDVDQLVACIESKLPVLCCTLQLREEFKQEVEATAGLLYVDDPNWSGIGVVRYEHANDDKSSLKSDPEGENIHAGLLKKLNELESDLTFKIGPEYKSMKSCLYVGMASDNVDAAELVETIAATAREIEENSRLLENMTEVVRKGIQEAQVELQKASEERLLEEGVLRQIPVVGSVLNWFSPVQALQKGRTFNLTAGSLESTEPIYVYKAQGAGVTLPPTPSGSRTKQRLPGQKPFKRSLRGSDALSETSSVSHIEDLEKVERLSSGPEQITLEASSTEGHPGAPSPQHTDQTEAFQKGVPHPEDDHSQVEGPESLR

SEQ ID NO: 766903 - protein, 383 aa, Homo sapiens
QERYGAPPRRLSTIRFGSRRRRLAAPPLLRPAGRGRGGRQRCQRGRSCGAREEEVEPGTARPPPAASAMDASLEKIADPTLAEMGKNLKEAVKMLEDSQRRTEEENGKKLISGDIPGPLQGSGQDMVSILQLVQNLMHGDEDEEPQSPRIQNIGEQGHMALLGHSLGAYISTLDKEKLRKLTTRILSDTTLWLCRIFRYENGCAYFHEEEREGLAKICRLAIHSRYEDFVVDGFNVLYNKKPVIYLSAAARPGLGQYLCNQLGLPFPCLCRVPCNTVFGSQHQMDVAFLEKLIKDDIERGRLPLLLVANAGTAAVGHTDKIGRLKELCEQYGIWLHVEGVNLATLALGYVSSSVLAAAKCDSMTISPSSGNLCFLRFGAGWSH

SEQ ID NO: 766904 - protein, 659 aa, Homo sapiens
  misc_feature (547)..(547): Xaa can be any naturally occurring amino acid
  misc_feature (557)..(557): Xaa can be any naturally occurring amino acid
  misc_feature (562)..(562): Xaa can be any naturally occurring amino acid
  misc_feature (573)..(574): Xaa can be any naturally occurring amino acid
  misc_feature (579)..(580): Xaa can be any naturally occurring amino acid
  misc_feature (582)..(582): Xaa can be any naturally occurring amino acid
  misc_feature (586)..(586): Xaa can be any naturally occurring amino acid
  misc_feature (590)..(592): Xaa can be any naturally occurring amino acid
  misc_feature (600)..(600): Xaa can be any naturally occurring amino acid
  misc_feature (606)..(606): Xaa can be any naturally occurring amino acid
  misc_feature (610)..(610): Xaa can be any naturally occurring amino acid
  misc_feature (616)..(616): Xaa can be any naturally occurring amino acid
  misc_feature (637)..(638): Xaa can be any naturally occurring amino acid
  misc_feature (649)..(650): Xaa can be any naturally occurring amino acid
  misc_feature (652)..(652): Xaa can be any naturally occurring amino acid
  misc_feature (658)..(658): Xaa can be any naturally occurring amino acid
QERYGAPPRRLSTIRFGSRRRRLAAPPLLRPAGRGRGGRQRCQRGRSCGAREEEVEPGTARPPPAASAMDASLEKIADPTLAEMGKNLKEAVKMLEDSQRRTEEENGKKLISGDIPGPLQGSGQDMVSILQLVQNLMHGDEDEEPQSPRIQNIGEQGHMALLGHSLGAYISTLDKEKLRKLTTRILSDTTLWLCRIFRYENGCAYFHEEEREGLAKICRLAIHSRYEDFVVDGFNVLYNKKPVIYLSAAARPGLGQYLCNQLGLPFPCLCRVPCNTVFGSQHQMDVAFLEKLIKDDIERGRLPLLLVANAGTAAVGHTDKIGRLKELCEQYGIWLHVEGVNLATLALGYVSSSVLAAAKCDSMTMTPGPWLGLPAVPAVTLYKHDDPALTLVAGLTSNKPTDKLRALPLWLSLQYLGLDGFVERIKHACQLSQRLQESLKKVNYIKILVEDELSSPVVVFRFFQELPGSDPVFKAVPVPNMTPSGVGRERHSCDALNRWLGEQLKQLVPASGLTVMDLEAEGTCLRFSPLMTAAGYHMEHFEECWPXSTFFQEAWFXLLEIXFFWRTETWAPXXDQRTXXLXLPEXCVNXXXYTTEQAQXSNGLRXTHTXSTEAKXDLQPATGKDCHLLAASGTGRXXLTIFFFQAFNXXTXNKNPIXI

SEQ ID NO: 766905 - protein, 704 aa, Homo sapiens
  misc_feature (592)..(592): Xaa can be any naturally occurring amino acid
  misc_feature (602)..(602): Xaa can be any naturally occurring amino acid
  misc_feature (607)..(607): Xaa can be any naturally occurring amino acid
  misc_feature (615)..(615): Xaa can be any naturally occurring amino acid
  misc_feature (618)..(618): Xaa can be any naturally occurring amino acid
  misc_feature (624)..(625): Xaa can be any naturally occurring amino acid
  misc_feature (628)..(628): Xaa can be any naturally occurring amino acid
  misc_feature (632)..(632): Xaa can be any naturally occurring amino acid
  misc_feature (635)..(637): Xaa can be any naturally occurring amino acid
  misc_feature (645)..(645): Xaa can be any naturally occurring amino acid
  misc_feature (651)..(651): Xaa can be any naturally occurring amino acid
  misc_feature (655)..(655): Xaa can be any naturally occurring amino acid
  misc_feature (661)..(661): Xaa can be any naturally occurring amino acid
  misc_feature (682)..(683): Xaa can be any naturally occurring amino acid
  misc_feature (694)..(695): Xaa can be any naturally occurring amino acid
  misc_feature (697)..(697): Xaa can be any naturally occurring amino acid
  misc_feature (703)..(703): Xaa can be any naturally occurring amino acid
QERYGAPPRRLSTIRFGSRRRRLAAPPLLRPAGRGRGGRQRCQRGRSCGAREEEVEPGTARPPPAASAMDASLEKIADPTLAEMGKNLKEAVKMLEDSQRRTEEENGKKLISGDIPGPLQGSGQDMVSILQLVQNLMHGDEDEEPQSPRIQNIGEQGHMALLGHSLGAYISTLDKEKLRKLTTRILSDTTLWLCRIFRYENGCAYFHEEEREGLAKICRLAIHSRYEDFVVDGFNVLYNKKPVIYLSAAARPGLGQYLCNQLGLPFPCLCRVPCNTVFGSQHQMDVAFLEKLIKDDIERGRLPLLLVANAGTAAVGHTDKIGRLKELCEQYGIWLHVEGVNLATLALGYVSSSVLAAAKCDSMTMTPGPWLGLPAVPAVTLYKHDDPALTLVAGLTSNKPTDKLRALPLWLSLQYLGLDGFVERIKHACQLSQRLQESLKKVNYIKILVEDELSSPVVVFRFFQELPGSDPVFKAVPVPNMTPSGVGRERHSCDALNRWLGEQLKQLVPASGLTVMDLEAEGTCLRFSPLMTAAAPEGLLLMDTIRCWEAGTTRTWTESPVTGLADRGALSYSITNNGWGYHMEHFEELLAXIDIFSRSLVXFTGDXFFLENRDXGTXGGSEDXXPEXARKXLNXXXYTTEQAQXSNGLRXTHTXSTEAKXDLQPATGKDCHLLAASGTGRXXLTIFFFQAFNXXTXNKNPIXI

SEQ ID NO: 766906 - protein, 602 aa, Homo sapiens
MAMQNFQLGLPFPCLCRVPCNTVFGSQHQMDVAFLEKLIKDDIERGRLPLLLVANAGTAAVGHTDKIGRLKELCEQYGIWLHVEGVNLATLALGYVSSSVLAAAKCDSMTMTPGPWLGLPAVPAVTLYKHDDPALTLVAGLTSNKPTDKLRALPLWLSLQYLGLDGFVERIKHACQLSQRLQESLKKVNYIKILVEDELSSPVVVFRFFQELPGSDPVFKAVPVPNMTPSGVGRERHSCDALNRWLGEQLKQLVPASGLTVMDLEAEGTCLRFSPLMTAAVLGTRGEDVDQLVACIESKLPVLCCTLQLREEFKQEVEATAGLLYVDDPNWSGIGVVRYEHANDDKSSLKSDPEGENIHAGLLKKLNELESDLTFKIGPEYKSMKSCLYVGMASDNVDAAELVETIAATAREIEENSRLLENMTEVVRKGIQEAQVELQKASEERLLEEGVLRQIPVVGSVLNWFSPVQALQKGRTFNLTAGSLESTEPIYVYKAQGAGVTLPPTPSGSRTKQRLPGQKPFKRSLRGSDALSETSSVSHIEDLEKVERLSSGPEQITLEASSTEGHPGAPSPQHTDQTEAFQKGVPHPEDDHSQVEGPESLR

SEQ ID NO: 766907 - protein, 573 aa, Homo sapiens [sequence omitted]

SEQ ID NO: 766908 - protein, 586 aa, Homo sapiens
ILGTSFFNDLFWFQDVAFLEKLIKDDIERGRLPLLLVANAGTAAVGHTDKIGRLKELCEQYGIWLHVEGVNLATLALGYVSSSVLAAAKCDSMTMTPGPWLGLPAVPAVTLYKHDDPALTLVAGLTSNKPTDKLRALPLWLSLQYLGLDGFVERIKHACQLSQRLQESLKKVNYIKILVEDELSSPVVVFRFFQELPGSDPVFKAVPVPNMTPSGVGRERHSCDALNRWLGEQLKQLVPASGLTVMDLEAEGTCLRFSPLMTAAVLGTRGEDVDQLVACIESKLPVLCCTLQLREEFKQEVEATAGLLYVDDPNWSGIGVVRYEHANDDKSSLKSDPEGENIHAGLLKKLNELESDLTFKIGPEYKSMKSCLYVGMASDNVDAAELVETIAATAREIEENSRLLENMTEVVRKGIQEAQVELQKASEERLLEEGVLRQIPVVGSVLNWFSPVQALQKGRTFNLTAGSLESTEPIYVYKAQGAGVTLPPTPSGSRTKQRLPGQKPFKRSLRGSDALSETSSVSHIEDLEKVERLSSGPEQITLEASSTEGHPGAPSPQHTDQTEAFQKGVPHPEDDHSQVEGPESLR

SEQ ID NO: 766909 - protein, 339 aa, Homo sapiens
QERYGAPPRRLSTIRFGSRRRRLAAPPLLRPAGRGRGGRQRCQRGRSCGAREEEVEPGTARPPPAASAMDASLEKIADPTLAEMGKNLKEAVKMLEDSQRRTEEENGKKLISGDIPGPLQGSGQDMVSILQLVQNLMHGDEDEEPQSPRIQNIGEQGHMALLGHSLGAYISTLDKEKLRKLTTRILSDTTLWLCRIFRYENGCAYFHEEEREGLAKICRLAIHSRYEDFVVDGFNVLYNKKPVIYLSAAARPGLGQYLCNQLGLPFPCLCRVPCNTVFGSQHQMDVAFLEKLIKDDIERGRLPLLLVANAGTAAVGHTDKIGRLKELCEQYGIWLHVEG

SEQ ID NO: 766910 - protein, 542 aa, Homo sapiens
PLKSSGGWVAKELCEQYGIWLHVEGVNLATLALGYVSSSVLAAAKCDSMTMTPGPWLGLPAVPAVTLYKHDDPALTLVAGLTSNKPTDKLRALPLWLSLQYLGLDGFVERIKHACQLSQRLQESLKKVNYIKILVEDELSSPVVVFRFFQELPGSDPVFKAVPVPNMTPSGVGRERHSCDALNRWLGEQLKQLVPASGLTVMDLEAEGTCLRFSPLMTAAVLGTRGEDVDQLVACIESKLPVLCCTLQLREEFKQEVEATAGLLYVDDPNWSGIGVVRYEHANDDKSSLKSDPEGENIHAGLLKKLNELESDLTFKIGPEYKSMKSCLYVGMASDNVDAAELVETIAATAREIEENSRLLENMTEVVRKGIQEAQVELQKASEERLLEEGVLRQIPVVGSVLNWFSPVQALQKGRTFNLTAGSLESTEPIYVYKAQGAGVTLPPTPSGSRTKQRLPGQKPFKRSLRGSDALSETSSVSHIEDLEKVERLSSGPEQITLEASSTEGHPGAPSPQHTDQTEAFQKGVPHPEDDHSQVEGPESLR

SEQ ID NO: 766911 - protein, 339 aa, Homo sapiens; identical to SEQ ID NO: 766909

SEQ ID NO: 766912 - protein, 339 aa, Homo sapiens; identical to SEQ ID NO: 766909

SEQ ID NO: 766913 - protein, 461 aa, Homo sapiens
MSLKPTDKLRALPLWLSLQYLGLDGFVERIKHACQLSQRLQESLKKVNYIKILVEDELSSPVVVFRFFQELPGSDPVFKAVPVPNMTPSGVGRERHSCDALNRWLGEQLKQLVPASGLTVMDLEAEGTCLRFSPLMTAAVLGTRGEDVDQLVACIESKLPVLCCTLQLREEFKQEVEATAGLLYVDDPNWSGIGVVRYEHANDDKSSLKSDPEGENIHAGLLKKLNELESDLTFKIGPEYKSMKSCLYVGMASDNVDAAELVETIAATAREIEENSRLLENMTEVVRKGIQEAQVELQKASEERLLEEGVLRQIPVVGSVLNWFSPVQALQKGRTFNLTAGSLESTEPIYVYKAQGAGVTLPPTPSGSRTKQRLPGQKPFKRSLRGSDALSETSSVSHIEDLEKVERLSSGPEQITLEASSTEGHPGAPSPQHTDQTEAFQKGVPHPEDDHSQVEGPESLR

SEQ ID NO: 766914 - protein, 305 aa, Homo sapiens
QERYGAPPRRLSTIRFGSRRRRLAAPPLLRPAGRGRGGRQRCQRGRSCGAREEEVEPGTARPPPAASAMDASLEKIADPTLAEMGKNLKEAVKMLEDSQRRTEEENGKKLISGDIPGPLQGSGQDMVSILQLVQNLMHGDEDEEPQSPRIQNIGEQGHMALLGHSLGAYISTLDKEKLRKLTTRILSDTTLWLCRIFRYENGCAYFHEEEREGLAKICRLAIHSRYEDFVVDGFNVLYNKKPVIYLSAAARPGLGQYLCNQLGLPFPCLCRVPCNTVFGSQHQMGFFLVQMIKQSSLFGAMKYSR

SEQ ID NO: 766915 - protein, 272 aa, Homo sapiens
QERYGAPPRRLSTIRFGSRRRRLAAPPLLRPAGRGRGGRQRCQRGRSCGAREEEVEPGTARPPPAASAMDASLEKIADPTLAEMGKNLKEAVKMLEDSQRRTEEENGKKLISGDIPGPLQGSGQDMVSILQLVQNLMHGDEDEEPQSPRIQNIGEQGHMALLGHSLGAYISTLDKEKLRKLTTRILSDTTLWLCRIFRYENGCAYFHEEEREGLAKICRLAIHSRYEDFVVDGFNVLYNKKPVIYLSAAARPGLGQYLCNQVMWYQVAILKK

SEQ ID NO: 766916 - protein, 142 aa, Homo sapiens
MCGDLEDPTRLLFQELPGSDPVFKAVPVPNMTPSGVGRERHSCDALNRWLGEQLKQLVPASGLTVMDLEAEGTCLRFSPLMTAAVLGTRGEDVDQLVACIESKLPVLCCTLQLREEFKQEVEATAGLLYVDDPNWSGIGVVR

SEQ ID NO: 766917 - protein, 494 aa, Homo sapiens; identical to SEQ ID NO: 766893

SEQ ID NO: 766918 - protein, 449 aa, Homo sapiens
QERYGAPPRRLSTIRFGSRRRRLAAPPLLRPAGRGRGGRQRCQRGRSCGAREEEVEPGTARPPPAASAMDASLEKIADPTLAEMGKNLKEAVKMLEDSQRRTEEENGKKLISGDIPGPLQGSGQDMVSILQLVQNLMHGDEDEEPQSPRIQNIGEQGHMALLGHSLGAYISTLDKEKLRKLTTRILSDTTLWLCRIFRYENGCAYFHEEEREGLAKICRLAIHSRYEDFVVDGFNVLYNKKPVIYLSAAARPGLGQYLCNQLGLPFPCLCRVPCNTVFGSQHQMDVAFLEKLIKDDIERGRLPLLLVANAGTAAVGHTDKIGRLKELCEQYGIWLHVEGVNLATLALGYVSSSVLAAAKCDSMTMTPGPWLGLPAVPAVTLYKHDDPALTLVAGLTSNKPTDKLRALPLWLSLQYLGLDGFVERIKHACQLSQRLQESLKKVNYIKILV

SEQ ID NO: 766919 - protein, 494 aa, Homo sapiens; identical to SEQ ID NO: 766893

SEQ ID NO: 766920 - protein, 339 aa, Homo sapiens; identical to SEQ ID NO: 766909

SEQ ID NO: 766921 - protein, 376 aa, Homo sapiens
MTPSGVGRERHSCDALNRWLGEQLKQLVPASGLTVMDLEAEGTCLRFSPLMTAAVLGTRGEDVDQLVACIESKLPVLCCTLQLREEFKQEVEATAGLLYVDDPNWSGIGVVRYEHANDDKSSLKSDPEGENIHAGLLKKLNELESDLTFKIGPEYKSMKSCLYVGMASDNVDAAELVETIAATAREIEENSRLLENMTEVVRKGIQEAQVELQKASEERLLEEGVLRQIPVVGSVLNWFSPVQALQKGRTFNLTAGSLESTEPIYVYKAQGAGVTLPPTPSGSRTKQRLPGQKPFKRSLRGSDALSETSSVSHIEDLEKVERLSSGPEQITLEASSTEGHPGAPSPQHTDQTEAFQKGVPHPEDDHSQVEGPESLR

SEQ ID NO: 766922 - protein, 272 aa, Homo sapiens; identical to SEQ ID NO: 766915

SEQ ID NO: 766923 - protein, 277 aa, Homo sapiens
QERYGAPPRRLSTIRFGSRRRRLAAPPLLRPAGRGRGGRQRCQRGRSCGAREEEVEPGTARPPPAASAMDASLEKIADPTLAEMGKNLKEAVKMLEDSQRRTEEENGKKLISGDIPGPLQGSGQDMVSILQLVQNLMHGDEDEEPQSPRIQNIGEQGHMALLGHSLGAYISTLDKEKLRKLTTRILSDTTLWLCRIFRYENGCAYFHEEEREGLAKICRLAIHSRYEDFVVDGFNVLYNKKPVIYLSAAARPGLGQYLCNQLGLPFPCLCRVPCLSQ

SEQ ID NO: 766924 - protein, 383 aa, Homo sapiens
FELRYPLPSLTLIQPGTLLKSVEARWLGEQLKQLVPASGLTVMDLEAEGTCLRFSPLMTAAVLGTRGEDVDQLVACIESKLPVLCCTLQLREEFKQEVEATAGLLYVDDPNWSGIGVVRYEHANDDKSSLKSDPEGENIHAGLLKKLNELESDLTFKIGPEYKSMKSCLYVGMASDNVDAAELVETIAATAREIEENSRLLENMTEVVRKGIQEAQVELQKASEERLLEEGVLRQIPVVGSVLNWFSPVQALQKGRTFNLTAGSLESTEPIYVYKAQGAGVTLPPTPSGSRTKQRLPGQKPFKRSLRGSDALSETSSVSHIEDLEKVERLSSGPEQITLEASSTEGHPGAPSPQHTDQTEAFQKGVPHPEDDHSQVEGPESLR

SEQ ID NO: 766925 - protein, 104 aa, Homo sapiens
SHLNGTPSFWNKPAVFLPHGLALGFLCMESLSHGYLYGLLPHRFRFLSNVTFFVRPSLADFIKTATLSSWSLLYFSPKNYCHLKNYIVYLFICIQNTSSTRPGI

SEQ ID NO: 766926 - protein, 1226 aa, Homo sapiens
MNPRQGYSLSGYYTHPFQGYEHRQLRYQQPGPGSSPSSFLLKQIEFLKGQLPEAPVIGKQTPSLPPSLPGLRPRFPVLLASSTRGRQVDIRGVPRGVHLGSQGLQRGFQHPSPRGRSLPQRGVDCLSSHFQELSIYQDQEQRILKFLEELGEGKATTAHDLSGKLGTPKKEINRVLYSLAKKGKLQKEAGTPPLWKIAVSTQAWNQHSGVVRPDGHSQGAPNSDPSLEPEDRNSTSVSEDLLEPFIAVSAQAWNQHSGVVRPDSHSQGSPNSDPGLEPEDSNSTSALEDPLEFLDMAEIKEKICDYLFNVSDSSALNLAKNIGLTKARDINAVLIDMERQGDVYRQGTTPPIWHLTDKKRERMQIKRNTNSVPETAPAAIPETRRNAEFLTCNIPTSNASNNMVTTEKVENGQEPVIKLENRQEARPEPARLKPPVHYNGPSKAGYVDFENGQWATDDIPDDLNSIRAAPGEFRAIMEMPSFYSHGLPRCSPYKKLTECQLKNPISGLLEYAQFASQTCEFNMIEQSGPPHEPRFKFQVVINGREFPPAEAGSKKVAKQDAAMKAMTILLEEAKAKDSGKSEESSHYSTEKESEKTAESQTPTPSATSFFSGKSPVTTLLECMHKLGNSCEFRLLSKEGPAHEPKFQYCVAVGAQTFPSVSAPSKKVAKQMAAEEAMKALHGEATNSMASDNQPEGMISESLDNLESMMPNKVRKIGELVRYLNTNPVGGLLEYARSHGFAAEFKLVDQSGPPHEPKFVYQAKVGGRWFPAVCAHSKKQGKQEAADAALRVLIGENEKAERMGFTEVTPVTGASLRRTMLLLSRSPEAQPKTLPLTGSTFHDQIAMLSHRCFNTLTNSFQPSLLGRKILAAIIMKKDSEDMGVVVSLGTGNRCVKGDSLSLKGETVNDCHAEIISRRGFIRFLYSELMKYNSQTAKDSIFEPAKGGEKLQIKKTVSFHLYISTAPCGDGALFDKSCSDRAMESTESRHYPVFENPKQGKLRTKVENGEGTIPVESSDIVPTWDGIRLGERLRTMSCSDKILRWNVLGLQGALLTHFLQPIYLKSVTLGYLFSQGHLTRAICCRVTRDGSAFEDGLRHPFIVNHPKVGRVSIYDSKRQSGKTKETSVNWCLADGYDLEILDGTRGTVDGPRNELSRVSKKNIFLLFKKLCSFRYRRDLLRLSYGEAKKAARDYETAKNYFKKGLKDMGYGNWISKPQEEKNFYLCPV

SEQ ID NO: 766927 - protein, 1226 aa, Homo sapiens; identical to SEQ ID NO: 766926

SEQ ID NO: 766928 - protein, 931 aa, Homo sapiens
MAEIKEKICDYLFNVSDSSALNLAKNIGLTKARDINAVLIDMERQGDVYRQGTTPPIWHLTDKKRERMQIKRNTNSVPETAPAAIPETRRNAEFLTCNIPTSNASNNMVTTEKVENGQEPVIKLENRQEARPEPARLKPPVHYNGPSKAGYVDFENGQWATDDIPDDLNSIRAAPGEFRAIMEMPSFYSHGLPRCSPYKKLTECQLKNPISGLLEYAQFASQTCEFNMIEQSGPPHEPRFKFQVVINGREFPPAEAGSKKVAKQDAAMKAMTILLEEAKAKDSGKSEESSHYSTEKESEKTAESQTPTPSATSFFSGKSPVTTLLECMHKLGNSCEFRLLSKEGPAHEPKFQYCVAVGAQTFPSVSAPSKKVAKQMAAEEAMKALHGEATNSMASDNQPEGMISESLDNLESMMPNKVRKIGELVRYLNTNPVGGLLEYARSHGFAAEFKLVDQSGPPHEPKFVYQAKVGGRWFPAVCAHSKKQGKQEAADAALRVLIGENEKAERMGFTEVTPVTGASLRRTMLLLSRSPEAQPKTLPLTGSTFHDQIAMLSHRCFNTLTNSFQPSLLGRKILAAIIMKKDSEDMGVVVSLGTGNRCVKGDSLSLKGETVNDCHAEIISRRGFIRFLYSELMKYNSQTAKDSIFEPAKGGEKLQIKKTVSFHLYISTAPCGDGALFDKSCSDRAMESTESRHYPVFENPKQGKLRTKVENGEGTIPVESSDIVPTWDGIRLGERLRTMSCSDKILRWNVLGLQGALLTHFLQPIYLKSVTLGYLFSQGHLTRAICCRVTRDGSAFEDGLRHPFIVNHPKVGRVSIYDSKRQSGKTKETSVNWCLADGYDLEILDGTRGTVDGPRNELSRVSKKNIFLLFKKLCSFRYRRDLLRLSYGEAKKAARDYETAKNYFKKGLKDMGYGNWISKPQEEKNFYLCPV

SEQ ID NO: 766929 - protein, 1200 aa, Homo sapiens
MNPRQGYSLSGYYTHPFQGYEHRQLRYQQPGPGSSPSSFLLKQIEFLKGQLPEAPVIGKQTPSLPPSLPGLRPRFPVLLASSTRGRQVDIRGVPRGVHLGSQGLQRGFQHPSPRGRSLPQRGVDCLSSHFQELSIYQDQEQRILKFLEELGEGKATTAHDLSGKLGTPKKEINRVLYSLAKKGKLQKEAGTPPLWKIAVSTQAWNQHSGVVRPDGHSQGAPNSDPSLEPEDRNSTSVSEDLLEPFIAVSAQAWNQHSGVVRPDSHSQGSPNSDPGLEPEDSNSTSALEDPLEFLDMAEIKEKICDYLFNVSDSSALNLAKNIGLTKARDINAVLIDMERQGDVYRQGTTPPIWHLTDKKRERMQIKRNTNSVPETAPAAIPETRRNAEFLTCNIPTSNASNNMVTTEKVENGQEPVIKLENRQEARPEPARLKPPVHYNGPSKAGYVDFENGQWATDDIPDDLNSIRAAPGEFRAIMEMPSFYSHGLPRCSPYKKLTECQLKNPISGLLEYAQFASQTCEFNMIEQSGPPHEPRFKFQVVINGREFPPAEAGSKKVAKQDAAMKAMTILLEEAKAKDSGKSEESSHYSTEKESEKTAESQTPTPSATSFFSGKSPVTTLLECMHKLGNSCEFRLLSKEGPAHEPKFQYCVAVGAQTFPSVSAPSKKVAKQMAAEEAMKALHGEATNSMASDNQPEGMISESLDNLESMMPNKVRKIGELVRYLNTNPVGGLLEYARSHGFAAEFKLVDQSGPPHEPKFVYQAKVGGRWFPAVCAHSKKQGKQEAADAALRVLIGENEKAERMGFTELPLTGSTFHDQIAMLSHRCFNTLTNSFQPSLLGRKILAAIIMKKDSEDMGVVVSLGTGNRCVKGDSLSLKGETVNDCHAEIISRRGFIRFLYSELMKYNSQTAKDSIFEPAKGGEKLQIKKTVSFHLYISTAPCGDGALFDKSCSDRAMESTESRHYPVFENPKQGKLRTKVENGEGTIPVESSDIVPTWDGIRLGERLRTMSCSDKILRWNVLGLQGALLTHFLQPIYLKSVTLGYLFSQGHLTRAICCRVTRDGSAFEDGLRHPFIVNHPKVGRVSIYDSKRQSGKTKETSVNWCLADGYDLEILDGTRGTVDGPRNELSRVSKKNIFLLFKKLCSFRYRRDLLRLSYGEAKKAARDYETAKNYFKKGLKDMGYGNWISKPQEEKNFYLCPV

SEQ ID NO: 766930 - protein, 121 aa, Homo sapiens
MVGVYVMSDAERSGRRIVREPRSLSHRRAYAAVGYTTDNPRKRVIVCPPGPLENSLKERGPHNKLGPHAQRKMGAPLSNESSQEGPSCVPRQRDCVYKRGGPWPLGLIIIRDRPYKGGPPW

SEQ ID NO: 766931 - protein, 1245 aa, Homo sapiens
GGEGSRPHWQPPGVRPCPEEVQDPGYSLSGYYTHPFQGYEHRQLRYQQPGPGSSPSSFLLKQIEFLKGQLPEAPVIGKQTPSLPPSLPGLRPRFPVLLASSTRGRQVDIRGVPRGVHLGSQGLQRGFQHPSPRGRSLPQRGVDCLSSHFQELSIYQDQEQRILKFLEELGEGKATTAHDLSGKLGTPKKEINRVLYSLAKKGKLQKEAGTPPLWKIAVSTQAWNQHSGVVRPDGHSQGAPNSDPSLEPEDRNSTSVSEDLLEPFIAVSAQAWNQHSGVVRPDSHSQGSPNSDPGLEPEDSNSTSALEDPLEFLDMAEIKEKICDYLFNVSDSSALNLAKNIGLTKARDINAVLIDMERQGDVYRQGTTPPIWHLTDKKRERMQIKRNTNSVPETAPAAIPETRRNAEFLTCNIPTSNASNNMVTTEKVENGQEPVIKLENRQEARPEPARLKPPVHYNGPSKAGYVDFENGQWATDDIPDDLNSIRAAPGEFRAIMEMPSFYSHGLPRCSPYKKLTECQLKNPISGLLEYAQFASQTCEFNMIEQSGPPHEPRFKFQVVINGREFPPAEAGSKKVAKQDAAMKAMTILLEEAKAKDSGKSEESSHYSTEKESEKTAESQTPTPSATSFFSGKSPVTTLLECMHKLGNSCEFRLLSKEGPAHEPKFQYCVAVGAQTFPSVSAPSKKVAKQMAAEEAMKALHGEATNSMASDNQPEGMISESLDNLESMMPNKVRKIGELVRYLNTNPVGGLLEYARSHGFAAEFKLVDQSGPPHEPKFVYQAKVGGRWFPAVCAHSKKQGKQEAADAALRVLIGENEKAERMGFTEVTPVTGASLRRTMLLLSRSPEAQPKTLPLTGSTFHDQIAMLSHRCFNTLTNSFQPSLLGRKILAAIIMKKDSEDMGVVVSLGTGNRCVKGDSLSLKGETVNDCHAEIISRRGFIRFLYSELMKYNSQTAKDSIFEPAKGGEKLQIKKTVSFHLYISTAPCGDGALFDKSCSDRAMESTESRHYPVFENPKQGKLRTKVENGEGTIPVESSDIVPTWDGIRLGERLRTMSCSDKILRWNVLGLQGALLTHFLQPIYLKSVTLGYLFSQGHLTRAICCRVTRDGSAFEDGLRHPFIVNHPKVGRVSIYDSKRQSGKTKETSVNWCLADGYDLEILDGTRGTVDGPRNELSRVSKKNIFLLFKKLCSFRYRRDLLRLSYGEAKKAARDYETAKNYFKKGLKDMGYGNWISKPQEEKNFYLCPV

SEQ ID NO: 766932 - protein, 1219 aa, Homo sapiens
GGEGSRPHWQPPGVRPCPEEVQDPGYSLSGYYTHPFQGYEHRQLRYQQPGPGSSPSSFLLKQIEFLKGQLPEAPVIGKQTPSLPPSLPGLRPRFPVLLASSTRGRQVDIRGVPRGVHLGSQGLQRGFQHPSPRGRSLPQRGVDCLSSHFQELSIYQDQEQRILKFLEELGEGKATTAHDLSGKLGTPKKEINRVLYSLAKKGKLQKEAGTPPLWKIAVSTQAWNQHSGVVRPDGHSQGAPNSDPSLEPEDRNSTSVSEDLLEPFIAVSAQAWNQHSGVVRPDSHSQGSPNSDPGLEPEDSNSTSALEDPLEFLDMAEIKEKICDYLFNVSDSSALNLAKNIGLTKARDINAVLIDMERQGDVYRQGTTPPIWHLTDKKRERMQIKRNTNSVPETAPAAIPETRRNAEFLTCNIPTSNASNNMVTTEKVENGQEPVIKLENRQEARPEPARLKPPVHYNGPSKAGYVDFENGQWATDDIPDDLNSIRAAPGEFRAIMEMPSFYSHGLPRCSPYKKLTECQLKNPISGLLEYAQFASQTCEFNMIEQSGPPHEPRFKFQVVINGREFPPAEAGSKKVAKQDAAMKAMTILLEEAKAKDSGKSEESSHYSTEKESEKTAESQTPTPSATSFFSGKSPVTTLLECMHKLGNSCEFRLLSKEGPAHEPKFQYCVAVGAQTFPSVSAPSKKVAKQMAAEEAMKALHGEATNSMASDNQPEGMISESLDNLESMMPNKVRKIGELVRYLNTNPVGGLLEYARSHGFAAEFKLVDQSGPPHEPKFVYQAKVGGRWFPAVCAHSKKQGKQEAADAALRVLIGENEKAERMGFTELPLTGSTFHDQIAMLSHRCFNTLTNSFQPSLLGRKILAAIIMKKDSEDMGVVVSLGTGNRCVKGDSLSLKGETVNDCHAEIISRRGFIRFLYSELMKYNSQTAKDSIFEPAKGGEKLQIKKTVSFHLYISTAPCGDGALFDKSCSDRAMESTESRHYPVFENPKQGKLRTKVENGEGTIPVESSDIVPTWDGIRLGERLRTMSCSDKILRWNVLGLQGALLTHFLQPIYLKSVTLGYLFSQGHLTRAICCRVTRDGSAFEDGLRHPFIVNHPKVGRVSIYDSKRQSGKTKETSVNWCLADGYDLEILDGTRGTVDGPRNELSRVSKKNIFLLFKKLCSFRYRRDLLRLSYGEAKKAARDYETAKNYFKKGLKDMGYGNWISKPQEEKNFYLCPV

SEQ ID NO: 766933 - protein, 931 aa, Homo sapiens; identical to SEQ ID NO: 766928

SEQ ID NO: 766934 - protein, 568 aa, Homo sapiens
  misc_feature (2)..(2): Xaa can be any naturally occurring amino acid
DXEDPSNRRFSSKWFVYQAKVGGRWFPAVCAHSKKQGKQEAADAALRVLIGENEKAERMGFTEVTPVTGASLRRTMLLLSRSPEAQPKTVKTSTFGAFFGGGGSSYTPKWRWLLLSCELFLGFTLSLERAVTGTLDVRRKRRLTRQVELDLPAHGEYGGHSLSFVVLTQPLFPTLPLTGSTFHDQIAMLSHRCFNTLTNSFQPSLLGRKILAAIIMKKDSEDMGVVVSLGTGNRCVKGDSLSLKGETVNDCHAEIISRRGFIRFLYSELMKYNSQTAKDSIFEPAKGGEKLQIKKTVSFHLYISTAPCGDGALFDKSCSDRAMESTESRHYPVFENPKQGKLRTKVENGEGTIPVESSDIVPTWDGIRLGERLRTMSCSDKILRWNVLGLQGALLTHFLQPIYLKSVTLGYLFSQGHLTRAICCRVTRDGSAFEDGLRHPFIVNHPKVGRVSIYDSKRQSGKTKETSVNWCLADGYDLEILDGTRGTVDGPRNELSRVSKKNIFLLFKKLCSFRYRRDLLRLSYGEAKKAARDYETAKNYFKKGLKDMGYGNWISKPQEEKNFYLCPV

SEQ ID NO: 766935 - protein, 412 aa, Homo sapiens
SSVPPRLARQSPEAQPKTLPLTGSTFHDQIAMLSHRCFNTLTNSFQPSLLGRKILAAIIMKKDSEDMGVVVSLGTGNRCVKGDSLSLKGETVNDCHAEIISRRGFIRFLYSELMKYNSQTAKDSIFEPAKGGEKLQIKKTVSFHLYISTAPCGDGALFDKSCSDRAMESTESRHYPVFENPKQGKLRTKVENGEGTIPVESSDIVPTWDGIRLGERLRTMSCSDKILRWNVLGLQGALLTHFLQPIYLKSVTLGYLFSQGHLTRAICCRVTRDGSAFEDGLRHPFIVNHPKVGRVSIYDSKRQSGKTKETSVNWCLADGYDLEILDGTRGTVDGPRNELSRVSKKNIFLLFKKLCSFRYRRDLLRLSYGEAKKAARDYETAKNYFKKGLKDMGYGNWISKPQEEKNFYLCPV

SEQ ID NO: 766936 - protein, 246 aa, Homo sapiens [sequence omitted]

SEQ ID NO: 766937 - protein, 1245 aa, Homo sapiens; identical to SEQ ID NO: 766931

SEQ ID NO: 766938 - protein, 122 aa, Homo sapiens
MPLQNTKASQGTGREVAPVSWSGRGLLPGSGSAGGTVNQSWHPHPGQRGLWFSASEGSAAPLLFRLQGCHLLSPQVVWPLWSILGIRFSSRALASCLFFNWEHRLSQDQNPHSPPRSYLASL

SEQ ID NO: 766939 - protein, 1245 aa, Homo sapiens; identical to SEQ ID NO: 766931

SEQ ID NO: 766940 - protein, 1245 aa, Homo sapiens; identical to SEQ ID NO: 766931

SEQ ID NO: 766941 - protein, 1245 aa, Homo sapiens; identical to SEQ ID NO: 766931

SEQ ID NO: 766942 - protein, 1245 aa, Homo sapiens; identical to SEQ ID NO: 766931

SEQ ID NO: 766943 - protein, 1245 aa, Homo sapiens; identical to SEQ ID NO: 766931

SEQ ID NO: 766944 - protein, 1245 aa, Homo sapiens; identical to SEQ ID NO: 766931

SEQ ID NO: 766945 - protein, 971 aa, Homo sapiens
GGEGSRPHWQPPGVRPCPEEVQDPGYSLSGYYTHPFQGYEHRQLRYQQPGPGSSPSSFLLKQIEFLKGQLPEAPVIGKQTPSLPPSLPGLRPRFPVLLASSTRGRQVDIRGVPRGVHLGSQGLQRGFQHPSPRGRSLPQRGVDCLSSHFQELSIYQDQEQRILKFLEELGEGKATTAHDLSGKLGTPKKEINRVLYSLAKKGKLQKEAGTPPLWKIAVSTQAWNQHSGVVRPDGHSQGAPNSDPSLEPEDRNSTSVSEDLLEPFIAVSAQAWNQHSGVVRPDSHSQGSPNSDPGLEPEDSNSTSALEDPLEFLDMAEIKEKICDYLFNVSDSSALNLAKNIGLTKARDINAVLIDMERQGDVYRQGTTPPIWHLTDKKRERMQIKRNTNSVPETAPAAIPETRRNAEFLTCNIPTSNASNNMVTTEKVENGQEPVIKLENRQEARPEPARLKPPVHYNGPSKAGYVDFENGQWATDDIPDDLNSIRAAPGEFRAIMEMPSFYSHGLPRCSPYKKLTECQLKNPISGLLEYAQFASQTCEFNMIEQSGPPHEPRFKFQVVINGREFPPAEAGSKKVAKQDAAMKAMTILLEEAKAKDSGKSEESSHYSTEKESEKTAESQTPTPSATSFFSGKSPVTTLLECMHKLGNSCEFRLLSKEGPAHEPKFQYCVAVGAQTFPSVSAPSKKVAKQMAAEEAMKALHGEATNSMASDNQPEGMISESLDNLESMMPNKVRKIGELVRYLNTNPVGGLLEYARSHGFAAEFKLVDQSGPPHEPKFVYQAKVGGRWFPAVCAHSKKQGKQEAADAALRVLIGENEKAERMGFTELPLTGSTFHDQIAMLSHRCFNTLTNSFQPSLLGRKILAAIIMKKDSEDMGVVVSLGTGNRCVKGDSLSLKGETVNDCHAEIISRRGFIRFLYSELMKYNSQTAKDSIFEPAKGGEKLQIKKTVSFHLYISRSVWRCALLHPLSPDR

SEQ ID NO: 766946 - protein, 1181 aa, Homo sapiens
MNPRQGYSLSGYYTHPFQGYEHRQLRYQQPGPGSSPSSFLLKQIEFLKGQLPEAPVIGKQTPSLPPSLPGLRPRFPVLLASSTRGRQVDIRGVPRGVHLGSQGLQRGFQHPSPRGRSLPQRGVDCLSSHFQELSIYQDQEQRILKFLEELGEGKATTAHDLSGKLGTPKKEINRVLYSLAKKGKLQKEAGTPPLWKIAVSTQAWNQHSGVVRPDGHSQGAPNSDPSLEPEDRNSTSVSEDLLEPFIAVSAQAWNQHSGVVRPDSHSQGSPNSDPGLEPEDSNSTSALEDPLEFLDMAEIKEKICDYLFNVSDSSALNLAKNIGLTKARDINAVLIDMERQGDVYRQGTTPPIWHLTDKKRERMQIKRNTNSVPETAPAAIPETRRNAEFLTCNIPTSNASNNMVTTEKVENGQEPVIKLENRQEARPEPARLKPPVHYNGPSKAGYVDFENGQWATDDIPDDLNSIRAAPGEFRAIMEMPSFYSHGLPRCSPYKKLTECQLKNPISGLLEYAQFASQTCEFNMIEQSGPPHEPRFKFQVVINGREFPPAEAGSKKVAKQDAAMKAMTILLEEAKAKDSGKSEESSHYSTEKESEKTAESQTPTPSATSFFSGKSPVTTLLECMHKLGNSCEFRLLSKEGPAHEPKFQYCVAVGAQTFPSVSAPSKKVAKQMAAEEAMKALHGEATNSMASDNQVRKIGELVRYLNTNPVGGLLEYARSHGFAAEFKLVDQSGPPHEPKFVYQAKVGGRWFPAVCAHSKKQGKQEAADAALRVLIGENEKAERMGFTELPLTGSTFHDQIAMLSHRCFNTLTNSFQPSLLGRKILAAIIMKKDSEDMGVVVSLGTGNRCVKGDSLSLKGETVNDCHAEIISRRGFIRFLYSELMKYNSQTAKDSIFEPAKGGEKLQIKKTVSFHLYISTAPCGDGALFDKSCSDRAMESTESRHYPVFENPKQGKLRTKVENGEGTIPVESSDIVPTWDGIRLGERLRTMSCSDKILRWNVLGLQGALLTHFLQPIYLKSVTLGYLFSQGHLTRAICCRVTRDGSAFEDGLRHPFIVNHPKVGRVSIYDSKRQSGKTKETSVNWCLADGYDLEILDGTRGTVDGPRNELSRVSKKNIFLLFKKLCSFRYRRDLLRLSYGEAKKAARDYETAKNYFKKGLKDMGYGNWISKPQEEKNFYLCPV

SEQ ID NO: 766947 - protein, 931 aa, Homo sapiens; identical to SEQ ID NO: 766928

SEQ ID NO: 766948 - protein, 1330 aa, Homo sapiens
GGEGSRPHWQPPGVRPCPEEVQDPGYSLSGYYTHPFQGYEHRQLRYQQPGPGSSPSSFLLKQIEFLKGQLPEAPVIGKQTPSLPPSLPGLRPRFPVLLASSTRGRQVDIRGVPRGVHLGSQGLQRGFQHPSPRGRSLPQRGVDCLSSHFQELSIYQDQEQRILKFLEELGEGKATTAHDLSGKLGTPKKEINRVLYSLAKKGKLQKEAGTPPLWKIAVSTQAWNQHSGVVRPDGHSQGAPNSDPSLEPEDRNSTSVSEDLLEPFIAVSAQAWNQHSGVVRPDSHSQGSPNSDPGLEPEDSNSTSALEDPLEFLDMAEIKEKICDYLFNVSDSSALNLAKNIGLTKARDINAVLIDMERQGDVYRQGTTPPIWHLTDKKRERMQIKRNTNSVPETAPAAIPETRRNAEFLTCNIPTSNASNNMVTTEKVENGQEPVIKLENRQEARPEPARLKPPVHYNGPSKAGYVDFENGQWATDDIPDDLNSIRAAPGEFRAIMEMPSFYSHGLPRCSPYKKLTECQLKNPISGLLEYAQFASQTCEFNMIEQSGPPHEPRFKFQVVINGREFPPAEAGSKKVAKQDAAMKAMTILLEEAKAKDSGKSEESSHYSTEKESEKTAESQTPTPSATSFFSGKSPVTTLLECMHKLGNSCEFRLLSKEGPAHEPKFQYCVAVGAQTFPSVSAPSKKVAKQMAAEEAMKALHGEATNSMASDNQPEGMISESLDNLESMMPNKVRKIGELVRYLNTNPVGGLLEYARSHGFAAEFKLVDQSGPPHEPKFVYQAKVGGRWFPAVCAHSKKQGKQEAADAALRVLIGENEKAERMGFTEVTPVTGASLRRTMLLLSRSPEAQPKTVKTSTFGAFFGGGGSSYTPKWRWLLLSCELFLGFTLSLERAVTGTLDVRRKRRLTRQVELDLPAHGEYGGHSLSFVVLTQPLFPTLPLTGSTFHDQIAMLSHRCFNTLTNSFQPSLLGRKILAAIIMKKDSEDMGVVVSLGTGNRCVKGDSLSLKGETVNDCHAEIISRRGFIRFLYSELMKYNSQTAKDSIFEPAKGGEKLQIKKTVSFHLYISTAPCGDGALFDKSCSDRAMESTESRHYPVFENPKQGKLRTKVENGEGTIPVESSDIVPTWDGIRLGERLRTMSCSDKILRWNVLGLQGALLTHFLQPIYLKSVTLGYLFSQGHLTRAICCRVTRDGSAFEDGLRHPFIVNHPKVGRVSIYDSKRQSGKTKETSVNWCLADGYDLEILDGTRGTVDGPRNELSRVSKKNIFLLFKKLCSFRYRRDLLRLSYGEAKKAARDYETAKNYFKKGLKDMGYGNWISKPQEEKNFYLCPV

SEQ ID NO: 766949 - protein, 1343 aa, Homo sapiens
GGEGSRPHWQPPGVRPCPEEVQDPGYSLSGYYTHPFQGYEHRQLRYQQPGPGSSPSSFLLKQIEFLKGQLPEAPVIGKQTPSLPPSLPGLRPRFPVLLASSTRGRQVDIRGVPRGVHLGSQGLQRGFQHPSPRGRSLPQRGVDCLSSHFQELSIYQDQEQRILKFLEELGEGKATTAHDLSGKLGTPKKEINRVLYSLAKKGKLQKEAGTPPLWKIAVSTQAWNQHSGVVRPDGHSQGAPNSDPSLEPEDRNSTSVSEDLLEPFIAVSAQAWNQHSGVVRPDSHSQGSPNSDPGLEPEDSNSTSALEDPLEFLDMAEIKEKICDYLFNVSDSSALNLAKNIGLTKARDINAVLIDMERQGDVYRQGTTPPIWHLTDKKRERMQIKRNTNSVPETAPAAIPETRRNAEFLTCNIPTSNASNNMVTTEKVENGQEPVIKLENRQEARPEPARLKPPVHYNGPSKAGYVDFENGQWATDDIPDDLNSIRAAPGEFRAIMEMPSFYSHGLPRCSPYKKLTECQLKNPISGLLEYAQFASQTCEFNMIEQSGPPHEPRFKFQVVINGREFPPAEAGSKKVAKQDAAMKAMTILLEEAKAKDSGKSEESSHYSTEKESEKTAESQTPTPSATSFFSGKSPVTTLLECMHKLGNSCEFRLLSKEGPAHEPKFQYCVAVGAQTFPSVSAPSKKVAKQMAAEEAMKALHGEATNSMASDNQPEGMISESLDNLESMMPNKVRKIGELVRYLNTNPVGGLLEYARSHGFAAEFKLVDQSGPPHEPKFVYQAKVGGRWFPAVCAHSKKQGKQEAADAALRVLIGENEKAERMGFTEVTPVTGASLRRTMLLLSRSPEAQPKTLPLTGSTFHDQIAMLSHRCFNTLTNSFQPSLLGRKILAAIIMKKDSEDMGVVVSLGTGNRCVKGDSLSLKGETVNDCHAEIISRRGFIRFLYSELMKYNSQTAKDSIFEPAKGGEKLQIKKTVSFHLYIRSVQFLLLPGWALPGCLELGIQMLSWPVNRTWYNKPHSTVGLRSIFRRRSLTCTAVHLQSPMVGLRKHPLPLSHLTVLEPHEIADFPQVSFNSHPMFFSTAPCGDGALFDKSCSDRAMESTESRHYPVFENPKQGKLRTKVENGEGTIPVESSDIVPTWDGIRLGERLRTMSCSDKILRWNVLGLQGALLTHFLQPIYLKSVTLGYLFSQGHLTRAICCRVTRDGSAFEDGLRHPFIVNHPKVGRVSIYDSKRQSGKTKETSVNWCLADGYDLEILDGTRGTVDGPRNELSRVSKKNIFLLFKKLCSFRYRRDLLRLSYGEAKKAARDYETAKNYFKKGLKDMGYGNWISKPQEEKNFYLCPV

SEQ ID NO: 766950 - protein, 468 aa, Homo sapiens
GGEGSRPHWQPPGVRPCPEEVQDPGYSLSGYYTHPFQGYEHRQLRYQQPGPGSSPSSFLLKQIEFLKGQLPEAPLPLTGSTFHDQIAMLSHRCFNTLTNSFQPSLLGRKILAAIIMKKDSEDMGVVVSLGTGNRCVKGDSLSLKGETVNDCHAEIISRRGFIRFLYSELMKYNSQTAKDSIFEPAKGGEKLQIKKTVSFHLYISTAPCGDGALFDKSCSDRAMESTESRHYPVFENPKQGKLRTKVENGEGTIPVESSDIVPTWDGIRLGERLRTMSCSDKILRWNVLGLQGALLTHFLQPIYLKSVTLGYLFSQGHLTRAICCRVTRDGSAFEDGLRHPFIVNHPKVGRVSIYDSKRQSGKTKETSVNWCLADGYDLEILDGTRGTVDGPRNELSRVSKKNIFLLFKKLCSFRYRRDLLRLSYGEAKKAARDYETAKNYFKKGLKDMGYGNWISKPQEEKNFYLCPV

SEQ ID NO: 766951 - protein, 1245 aa, Homo sapiens; identical to SEQ ID NO: 766931

SEQ ID NO: 766952 - protein, 75 aa, Homo sapiens
SKAVRPELGIFLLFKKLCSFRYRRDLLRLSYGEAKKAARDYETAKNYFKKGLKDMGYGNWISKPQEEKNFYLCPV

SEQ ID NO: 766953 - protein, 1245 aa, Homo sapiens; identical to SEQ ID NO: 766931

SEQ ID NO: 766954 - protein, 122 aa, Homo sapiens; identical to SEQ ID NO: 766938

SEQ ID NO: 766955 - protein, 122 aa, Homo sapiens; identical to SEQ ID NO: 766938

SEQ ID NO: 766956 - protein, 1245 aa, Homo sapiens; identical to SEQ ID NO: 766931

SEQ ID NO: 766957 - protein, 1245 aa, Homo sapiens; identical to SEQ ID NO: 766931

SEQ ID NO: 766958 - protein, 103 aa, Homo sapiens
MRCDCTEVMCSRKLPVVEDGSLAEARSGSSVKTILILLRASSPVRFQYCVAVGAQTFPSVSAPSKKVAKQMAAEEAMKALHGEATNSMASDNQVGRFPTQKIQ

SEQ ID NO: 766959 - protein, 121 aa, Homo sapiens
CCDLAVNSMGLFFNSGPYPVIKYEIRMCCEALDWLEACPHTYLIKSLKEHGQKINQGQENLQSRRQHGPLVSDRADLEYRATQPIIGARRSALPAALRNTRLRDSDPSLGLGGASGSGQHR

SEQ ID NO: 766960 - protein, 449 aa, Homo sapiens
MMLGTEGGEGFVVKVRGLPWSCSADEVQRFFSDCKIQNGAQGIRFIYTREGRPSGEAFVELESEDEVKLALKKDRETMGHRYVEVFKSNNVEMDWVLKHTGPNSPDTANDGFVRLRGLPFGCSKEEIVQFFSGLEIVPNGITLPVDFQGRSTGEAFVQFASQEIAEKALKKHKERIGHRYIEIFKSSRAEVRTHYDPPRKLMAMQRPGPYDRPGAGRGYNSIGRGAGFERMRRGAYGGGYGGYDDYNGYNDGYGFGSDRFGRDLNYCFSGMSDHRYGDGGSTFQSTTGHCVHMRGLPYRATENDIYNFFSPLNPVRVHIEIGPDGRVTGEADVEFATHEDAVAAMSKDKANMQHRYVELFLNSTAGASGGAYEHRYVELFLNSTAGASGGAYGSQMMGGMGLSNQSSYGGPASQQLSGGYGGGYGGQSSMSGYDQVLQENSSDFQSNIA

SEQ ID NO: 766961 - protein, 448 aa, Homo sapiens
MLGTEGGEGFVVKVRGLPWSCSADEVQRFFSDCKIQNGAQGIRFIYTREGRPSGEAFVELESEDEVKLALKKDRETMGHRYVEVFKSNNVEMDWVLKHTGPNSPDTANDGFVRLRGLPFGCSKEEIVQFFSGLEIVPNGITLPVDFQGRSTGEAFVQFASQEIAEKALKKHKERIGHRYIEIFKSSRAEVRTHYDPPRKLMAMQRPGPYDRPGAGRGYNSIGRGAGFERMRRGAYGGGYGGYDDYNGYNDGYGFGSDRFGRDLNYCFSGMSDHRYGDGGSTFQSTTGHCVHMRGLPYRATENDIYNFFSPLNPVRVHIEIGPDGRVTGEADVEFATHEDAVAAMSKDKANMQHRYVELFLNSTAGASGGAYEHRYVELFLNSTAGASGGAYGSQMMGGMGLSNQSSYGGPASQQLSGGYGGGYGGQSSMSGYDQVLQENSSDFQSNIA

SEQ ID NO: 766962 - protein, 177 aa, Homo sapiens
  misc_feature (72)..(72): Xaa can be any naturally occurring amino acid
PFDLLSFVRCCVCGASAVGVSLVSWSGLFWVVGRWSAGGSVVSRSVLWWGVVRFAGVSLWSVVGAARVAVLXIVAIGNVPRILLRQVQIAWCMRALAAHSRVTWIPGAGLADGTLDSADSVALVPIWSLPANQSSYGGPASQQLSGGYGGGYGGQSSMSGYDQVLQENSSDFQSNIA

SEQ ID NO: 766963 - protein, 448 aa, Homo sapiens; identical to SEQ ID NO: 766961

SEQ ID NO: 766964 - protein, 448 aa, Homo sapiens; identical to SEQ ID NO: 766961

SEQ ID NO: 766965 - protein, 177 aa, Homo sapiens; identical to SEQ ID NO: 766962
  misc_feature (72)..(72): Xaa can be any naturally occurring amino acid

SEQ ID NO: 766966 - protein, 448 aa, Homo sapiens; identical to SEQ ID NO: 766961

SEQ ID NO: 766967 - protein, 437 aa, Homo sapiens
MADDPSAADRNVEIWKIKKLIKSLEAARGNGTSMISLIIPPKDQISRVAKMLADEFGTASNIKSRVNRLSVLGAITSVQQRLKLYNKVPPNGLVVYCGTIVTEEGKEKKVNIDFEPFKPINTSLYLCDNKFHTEALTALLSDDSKFGFIVIDGSGALFGTLQGNTREVLHKFTVDLPKKHGRGGQSALRFARLRMEKRHNYVRKVAETAVQLFISGDKVNVAGLVLAGSADFKTELSQSDMFDQRLQSKVLKLVDISYGGENGFNQAIELSTEVLSNVKFIQEKKLIGRYFDEISQDTGKYCFGVEDTLKALEMGAVEILIVYENLDIMRYVLHCQGTEEEKILYLTPEQEKDKSHFTDKETGQEHELIESMPLLEWFANNYKKFGATLEIVTDKSQEGSQFVKGFGGIGGILRYRVDFQGMEYQGGDDEFFDLDDY

SEQ ID NO: 766968 - protein, 404 aa, Homo sapiens
MISLIIPPKDQISRVAKMLADEFGTASNIKSRVNRLSVLGAITSVQQRLKLYNKVPPNGLVVYCGTIVTEEGKEKKVNIDFEPFKPINTSLYLCDNKFHTEALTALLSDDSKFGFIVIDGSGALFGTLQGNTREVLHKFTVDLPKKHGRGGQSALRFARLRMEKRHNYVRKVAETAVQLFISGDKVNVAGLVLAGSADFKTELSQSDMFDQRLQSKVLKLVDISYGGENGFNQAIELSTEVLSNVKFIQEKKLIGRYFDEISQDTGKYCFGVEDTLKALEMGAVEILIVYENLDIMRYVLHCQGTEEEKILYLTPEQEKDKSHFTDKETGQEHELIESMPLLEWFANNYKKFGATLEIVTDKSQEGSQFVKGFGGIGGILRYRVDFQGMEYQGGDDEFFDLDDY

SEQ ID NO: 766969 - protein, 437 aa, Homo sapiens; identical to SEQ ID NO: 766967

SEQ ID NO: 766970 - protein, 437 aa, Homo sapiens; identical to SEQ ID NO: 766967

SEQ ID NO: 766971 - protein, 437 aa, Homo sapiens; identical to SEQ ID NO: 766967

SEQ ID NO: 766972 - protein, 404 aa, Homo sapiens; identical to SEQ ID NO: 766968

SEQ ID NO: 766973 - protein, 404 aa, Homo sapiens; identical to SEQ ID NO: 766968

SEQ ID NO: 766974 - protein, 243 aa, Homo sapiens
MEKRHNYVRKVAETAVQLFISGDKVNVAGLVLAGSADFKTELSQSDMFDQRLQSKVLKLVDISYGGENGFNQAIELSTEVLSNVKFIQEKKLIGRYFDEISQDTGKYCFGVEDTLKALEMGAVEILIVYENLDIMRYVLHCQGTEEEKILYLTPEQEKDKSHFTDKETGQEHELIESMPLLEWFANNYKKFGATLEIVTDKSQEGSQFVKGFGGIGGILRYRVDFQGMEYQGGDDEFFDLDDY

SEQ ID NO: 766975 - protein, 243 aa, Homo sapiens; identical to SEQ ID NO: 766974

SEQ ID NO: 766976 - protein, 419 aa, Homo sapiens
MADDPSAADRNVEIWKIKKLIKSLEAARGNGTSMISLIIPPKDQISRVAKMLADEFGTASNIKSRVNRLSVLGAITSVQQRLKLYNKVPPNGLVVYCGTIVTEEGKEKKVNIDFEPFKPINTSLYLCDNKFHTEALTALLSDDSKFGFIVIDGSGALFGTLQGNTREVLHKFTVDLPKKHGRGGQSALRFARLRMVSGDKVNVAGLVLAGSADFKTELSQSDMFDQRLQSKVLKLVDISYGGENGFNQAIELSTEVLSNVKFIQEKKLIGRYFDEISQDTGKYCFGVEDTLKALEMGAVEILIVYENLDIMRYVLHCQGTEEEKILYLTPEQEKDKSHFTDKETGQEHELIESMPLLEWFANNYKKFGATLEIVTDKSQEGSQFVKGFGGIGGILRYRVDFQGMEYQGGDDEFFDLDDY

SEQ ID NO: 766977 - protein, 330 aa, Homo sapiens
MVDGTLLLLLSEALALTQTWAGSHSLKYFHTSVSRPGRGEPRFISVGYVDDTQFVRFDNDAASPRMVPRAPWMSRGGQSALRFARLRMEKRHNYVRKVAETAVQLFISGDKVNVAGLVLAGSADFKTELSQSDMFDQRLQSKVLKLVDISYGGENGFNQAIELSTEVLSNVKFIQEKKLIGRYFDEISQDTGKYCFGVEDTLKALEMGAVEILIVYENLDIMRYVLHCQGTEEEKILYLTPEQEKDKSHFTDKETGQEHELIESMPLLEWFANNYKKFGATLEIVTDKSQEGSQFVKGFGGIGGILRYRVDFQGMEYQGGDDEFFDLDDY

SEQ ID NO: 766978 - protein, 437 aa, Homo sapiens; identical to SEQ ID NO: 766967

SEQ ID NO: 766979 - protein, 282 aa, Homo sapiens
MADDPSAADRNVEIWKIKKLIKSLEAARGNGTSMISLIIPPKDQISRVAKMLADEFGTASNIKSRVNRLSVLGAITSVQQRLKLYNKVPPNGLVVYCGTIVTEEGKEKKVNIDFEPFKPINTSLYLCDNKFHTEALTALLSDDSKFGFIVIDGSGALFGTLQGNTREVLHKFTVDLPKKHGRGGQSALRFARLRMEKRHNYVRKVAETAVQLFISGDKVNVAGLVLAGSADFKTELSQSDMFDQRLQSKVLKLVDISYGGEFISGEEINRTILWWNHARARP

SEQ ID NO: 766980 - protein, 75 aa, Homo sapiens
ARSQAPCERIATHAAAWREGAGVLRQSRRRRGAAAGEEQPLPPRTGPLGRRRREDGGRPQCCRQERGDLEDQEAH

SEQ ID NO: 766981 - protein, 437 aa, Homo sapiens; identical to SEQ ID NO: 766967

SEQ ID NO: 766982 - protein, 437 aa, Homo sapiens; identical to SEQ ID NO: 766967

SEQ ID NO: 766983 - protein, 243 aa, Homo sapiens; identical to SEQ ID NO: 766974

SEQ ID NO: 766984 - protein, 96 aa, Homo sapiens
VVLEDPERTIARPPPDWQFQGCKLHCKIKLTHEAFGPVHCLLPSVCRHICARRLGALCINVLTRVPITLTYSKPVWDGYDGASVLLLGLGEIKHAI

SEQ ID NO: 766985 - protein, 248 aa, Homo sapiens [sequence omitted]

SEQ ID NO: 766986 - protein, 1089 aa, Homo sapiens
MGTSHPAFLVLGCLLTGLSLILCQLSLPSILPNENEKVVQLNSSFSLRCFGESEVSWQYPMSEEESSDVEIRNEENNSGLFVTVLEVSSASAAHTGLYTCYYNHTQTEENELEGRHIYIYVPDPDVAFVPLGMTDYLVIVEDDDSAIIPCRTTDPETPVTLHNSEGVVPASYDSRQGFNGTFTVGPYICEATVKGKKFQTIPFNVYALKATSELDLEMEALKTVYKSGETIVVTCAVFNNEVVDLQWTYPGEVKGKGITMLEEIKVPSIKLVYTLTVPEATVKDSGDYECAARQATREVKEMKKVTISVHEKGFIEIKPTFSQLEAVNLHEVKHFVVEVRAYPPPRISWLKNNLTLIENLTEITTDVEKIQEIRYRSKLKLIRAKEEDSGHYTIVAQNEDAVKSYTFELLTQVPSSILDLVDDHHGSTGGQTVRCTAEGTPLPDIEWMICKDIKKCNNETSWTILANNVSNIITEIHSRDRSTVEGRVTFAKVEETIAVRCLAKNLLGAENRELKLVAPTLRSELTVAAAVLVLLVIVIISLIVLVVIWKQKPRYEIRWRVIESISPDGHEYIYVDPMQLPYDSRWEFPRDGLVLGRVLGSGAFGKVVEGTAYGLSRSQPVMKVAVKMLKPTARSSEKQALMSELKIMTHLGPHLNIVNLLGACTKSGPIYIITEYCFYGDLVNYLHKNRDSFLSHHPEKPKKELDIFGLNPADESTRSYVILSFENNGDYMDMKQADTTQYVPMLERKEVSKYSDIQRSLYDRPASYKKKSMLDSEVKNLLSDDNSEGLTLLDLLSFTYQVARGMEFLASKNCVHRDLAARNVLLAQGKIVKICDFGLARDIMHDSNYVSKGSTFLPVKWMAPESIFDNLYTTLSDVWSYGILLWEIFSLGGTPYPGMMVDSTFYNKIKSGYRMAKPDHATSEVYEIMVKCWNSEPEKRPSFYHLSEIVENLLPGQYKKSYEKIHLDFLKSDHPAVARMRVDSDNAYIGVTYKNEEDKLKDWEGGLDEQRLSADSGYIIPLPDIDPVPEEEDLGKRNRHSSQTSEESAIETGSSSSTFIKREDETIEDIDMMDDIGIDSSDLVEDSFL

SEQ ID NO: 766987 - protein, 1089 aa, Homo sapiens; identical to SEQ ID NO: 766986

SEQ ID NO: 766988 - protein, 218 aa, Homo sapiens
MGTSHPAFLVLGCLLTGLSLILCQLSLPSILPNENEKVVQLNSSFSLRCFGESEVSWQYPMSEEESSDVEIRNEENNSGLFVTVLEVSSASAAHTGLYTCYYNHTQTEENELEGRHIYIYVPDPDVAFVPLGMTDYLVIVEDDDSAIIPCRTTDPETPVTLHNSEGVVPASYDSRQGFNGTFTVGPYICEATVKGKKFQTIPFNVYALKGTCIISFLL

SEQ ID NO: 766989 - protein, 186 aa, Homo sapiens
MKVAVKMLKPTARSSEKQALMSELKIMTHLGPHLNIVNLLGACTKSGPIYIITEYCFYGDLVNYLHKNRDSFLSHHPEKPKKELDIFGLNPADESTRSYVILSFENNGDYMDMKQADTTQYVPMLERKEVSKYSDIQRSLYDRPASYKKKSMLGWAGGVGTRCQRNLSHAQAQALLAGRPLLSGLP

SEQ ID NO: 766990 - protein, 872 aa, Homo sapiens
MEALKTVYKSGETIVVTCAVFNNEVVDLQWTYPGEVKGKGITMLEEIKVPSIKLVYTLTVPEATVKDSGDYECAARQATREVKEMKKVTISVHEKGFIEIKPTFSQLEAVNLHEVKHFVVEVRAYPPPRISWLKNNLTLIENLTEITTDVEKIQEIRYRSKLKLIRAKEEDSGHYTIVAQNEDAVKSYTFELLTQVPSSILDLVDDHHGSTGGQTVRCTAEGTPLPDIEWMICKDIKKCNNETSWTILANNVSNIITEIHSRDRSTVEGRVTFAKVEETIAVRCLAKNLLGAENRELKLVAPTLRSELTVAAAVLVLLVIVIISLIVLVVIWKQKPRYEIRWRVIESISPDGHEYIYVDPMQLPYDSRWEFPRDGLVLGRVLGSGAFGKVVEGTAYGLSRSQPVMKVAVKMLKPTARSSEKQALMSELKIMTHLGPHLNIVNLLGACTKSGPIYIITEYCFYGDLVNYLHKNRDSFLSHHPEKPKKELDIFGLNPADESTRSYVILSFENNGDYMDMKQADTTQYVPMLERKEVSKYSDIQRSLYDRPASYKKKSMLDSEVKNLLSDDNSEGLTLLDLLSFTYQVARGMEFLASKNCVHRDLAARNVLLAQGKIVKICDFGLARDIMHDSNYVSKGSTFLPVKWMAPESIFDNLYTTLSDVWSYGILLWEIFSLGGTPYPGMMVDSTFYNKIKSGYRMAKPDHATSEVYEIMVKCWNSEPEKRPSFYHLSEIVENLLPGQYKKSYEKIHLDFLKSDHPAVARMRVDSDNAYIGVTYKNEEDKLKDWEGGLDEQRLSADSGYIIPLPDIDPVPEEEDLGKRNRHSSQTSEESAIETGSSSSTFIKREDETIEDIDMMDDIGIDSSDLVEDSFL

SEQ ID NO: 766991 - protein, 1089 aa, Homo sapiens; identical to SEQ ID NO: 766986

SEQ ID NO: 766992 - protein, 1089 aa, Homo sapiens; identical to SEQ ID NO: 766986

SEQ ID NO: 766993 - protein, 1089 aa, Homo sapiens; identical to SEQ ID NO: 766986

SEQ ID NO: 766994 - protein, 1089 aa, Homo sapiens; identical to SEQ ID NO: 766986

SEQ ID NO: 766995 - protein, 807 aa, Homo sapiens
MGTSHPAFLVLGCLLTGLSLILCQLSLPSILPNENEKVVQLNSSFSLRCFGESEVSWQYPMSEEESSDVEIRNEENNSGLFVTVLEVSSASAAHTGLYTCYYNHTQTEENELEGRHIYIYVPDPDVAFVPLGMTDYLVIVEDDDSAIIPCRTTDPETPVTLHNSEGVVPASYDSRQGFNGTFTVGPYICEATVKGKKFQTIPFNVYALKATSELDLEMEALKTVYKSGETIVVTCAVFNNEVVDLQWTYPGEVKGKGITMLEEIKVPSIKLVYTLTVPEATVKDSGDYECAARQATREVKEMKKVTISVHEKGFIEIKPTFSQLEAVNLHEVKHFVVEVRAYPPPRISWLKNNLTLIENLTEITTDVEKIQEIRYRSKLKLIRAKEEDSGHYTIVAQNEDAVKSYTFELLTQVPSSILDLVDDHHGSTGGQTVRCTAEGTPLPDIEWMICKDIKKCNNETSWTILANNVSNIITEIHSRDRSTVEGRVTFAKVEETIAVRCLAKNLLGAENRELKLVAPTLRSELTVAAAVLVLLVIVIISLIVLVVIWKQKPRYEIRWRVIESISPDGHEYIYVDPMQLPYDSRWEFPRDGLVLGRVLGSGAFGKVVEGTAYGLSRSQPVMKVAVKMLKPTARSSEKQALMSELKIMTHLGPHLNIVNLLGACTKSGPIYIITEYCFYGDLVNYLHKNRDSFLSHHPEKPKKELDIFGLNPADESTRSYVILSFENNGDYMDMKQADTTQYVPMLERKEVSKYSDIQRSLYDRPASYKKKSMLGWAGGVGTRCQRNLSHAQAQALLAGRPLLSGLP

SEQ ID NO: 766996 - protein, 790 aa, Homo sapiens
MGTSHPAFLVLGCLLTGLSLILCQLSLPSILPNENEKVVQLNSSFSLRCFGESEVSWQYPMSEEESSDVEIRNEENNSGLFVTVLEVSSASAAHTGLYTCYYNHTQTEENELEGRHIYIYVPDPDVAFVPLGMTDYLVIVEDDDSAIIPCRTTDPETPVTLHNSEGVVPASYDSRQGFNGTFTVGPYICEATVKGKKFQTIPFNVYALKATSELDLEMEALKTVYKSGETIVVTCAVFNNEVVDLQWTYPGEVKGKGITMLEEIKVPSIKLVYTLTVPEATVKDSGDYECAARQATREVKEMKKVTISVHEKGFIEIKPTFSQLEAVNLHEVKHFVVEVRAYPPPRISWLKNNLTLIENLTEITTDVEKIQEIRYRSKLKLIRAKEEDSGHYTIVAQNEDAVKSYTFELLTQVPSSILDLVDDHHGSTGGQTVRCTAEGTPLPDIEWMICKDIKKCNNETSWTILANNVSNIITEIHSRDRSTVEGRVTFAKVEETIAVRCLAKNLLGAENRELKLVAPTLRSELTVAAAVLVLLVIVIISLIVLVVIWKQKPRYEIRWRVIESISPDGHEYIYVDPMQLPYDSRWEFPRDGLVLGRVLGSGAFGKVVEGTAYGLSRSQPVMKVAVKMLKPTARSSEKQALMSELKIMTHLGPHLNIVNLLGACTKSGPIYIITEYCFYGDLVNYLHKNRDSFLSHHPEKPKKELDIFGLNPADESTRSYVILSFENNGDYMDMKQADTTQYVPMLERKEVSKYSDIQRSLYDRPASYKKKSMLGKSVYTHSGCWDFPVV

SEQ ID NO: 766997 - protein, 674 aa, Homo sapiens
MGTSHPAFLVLGCLLTGLSLILCQLSLPSILPNENEKVVQLNSSFSLRCFGESEVSWQYPMSEEESSDVEIRNEENNSGLFVTVLEVSSASAAHTGLYTCYYNHTQTEENELEGRHIYIYVPDPDVAFVPLGMTDYLVIVEDDDSAIIPCRTTDPETPVTLHNSEGVVPASYDSRQGFNGTFTVGPYICEATVKGKKFQTIPFNVYALKATSELDLEMEALKTVYKSGETIVVTCAVFNNEVVDLQWTYPGEVKGKGITMLEEIKVPSIKLVYTLTVPEATVKDSGDYECAARQATREVKEMKKVTISVHEKGFIEIKPTFSQLEAVNLHEVKHFVVEVRAYPPPRISWLKNNLTLIENLTEITTDVEKIQEIRYRSKLKLIRAKEEDSGHYTIVAQNEDAVKSYTFELLTQVPSSILDLVDDHHGSTGGQTVRCTAEGTPLPDIEWMICKDIKKCNNETSWTILANNVSNIITEIHSRDRSTVEGRVTFAKVEETIAVRCLAKNLLGAENRELKLVAPTLRSELTVAAAVLVLLVIVIISLIVLVVIWKQKPRYEIRWRVIESISPDGHEYIYVDPMQLPYDSRWEFPRDGLVLGRVLGSGAFGKVVEGTAYGLSRSQPVMKVAVKMLKPTARSSEKQALMSELKIMTHLGPHLNIVNLLGACTKSGGLTDLE

SEQ ID NO: 766998 - protein, 1827 aa, Homo sapiens [sequence omitted]

SEQ ID NO: 766999 - protein, 1827 aa, Homo sapiens [sequence omitted]

SEQ ID NO: 767000 - protein, 233 aa, Homo sapiens
CYLATTQVEARLCAVEEDTFEVYLYVTIKDEKVCVNDDLVAKNYACYMSPTKNKNLDYLEKPRLNIKSAPSFNKLNPALTLWPMFLQGKDVQGMEDSHGVNFPAQSLQHTWCKGIVGDLRPTATAQDKAVKCNMDSLRDSPKDKSEKKHHCISLKDTNKRVESSVYWPAKRGITIYADPDVPEASALSQKSNEKPLRLTEKKEYDEKNSCVKLLQFLNPDPLRADGISDLQQT

SEQ ID NO: 767001 - protein, 220 aa, Homo sapiens
MLGLPGPSLQPSLASSACGTCSRLRLKMPVWGGGNKCGACGRTVYHAEEVQCDGRSFHRCCFLCMVCRKNLDSTTVAIHDEEIYCKSCYGKKYGPKGYGYGQGAGTLNMDRGERLGIKPESVQPHRPTTNPNTSKFAQKYGGAEKCSRCGDSVYAAEKIIGAGKPWHKNCFRCAKCGKSLESTTLTEKEGEIYCKGCYAKNFGPKGFGYGQGAGALVHAQ

SEQ ID NO: 767002 - protein, 174 aa, Homo sapiens
MPRSCCSRSGALLLALLLQASMEVRGWCLESSQCQDLTTESNLLECIRACKPDLSAETPMFPGNGDEQPLTENPRKYVMGHFRWDRFGRRNSSSSGSSGAGQKREDVSAGEDCGPLPEGGPEPRSDGAKPGPREGKRSYSMEHFRWGKPVGKKRRPRRGPLAPRPVLPHASPRV

SEQ ID NO: 767003 - protein, 90 aa, Homo sapiens
MPRSCCSRSGALLLALLLQASMEVRGWCLESSQCQDLTTESNLLECIRACKPDLSAETPMFPGNGDEQPLTENPRSALRPGKPVRPERRS

SEQ ID NO: 767004 - protein, 267 aa, Homo sapiens
MPRSCCSRSGALLLALLLQASMEVRGWCLESSQCQDLTTESNLLECIRACKPDLSAETPMFPGNGDEQPLTENPRKYVMGHFRWDRFGRRNSSSSGSSGAGQKREDVSAGEDCGPLPEGGPEPRSDGAKPGPREGKRSYSMEHFRWGKPVGKKRRPVKVYPNGAEDESAEAFPLEFKRELTGQRLREGDGPDGPADDGAGAQADLEHSLLVAAEKKDEGPYRMEHFRWGSPPKDKRYGGFMTSEKSQTPLVTLFKNAIIKNAYKKGE

SEQ ID NO: 767005 - protein, 267 aa, Homo sapiens; identical to SEQ ID NO: 767004

SEQ ID NO: 767006 - protein, 267 aa, Homo sapiens; identical to SEQ ID NO: 767004

SEQ ID NO: 767007 - protein, 267 aa, Homo sapiens; identical to SEQ ID NO: 767004

SEQ ID NO: 767008 - protein, 453 aa, Homo sapiens
HLGPAPEALRAWPLSRVPPPSTPEQRARSGRSRSLGLCLSPMAAALLARASGPARRALCPRAWRQLHTIYQSVELPETHQMLLQTCRDFAEKELFPIAAQVDKEHLFPAAQVKKMGGLGLLAMDVPEELGGAGLDYLAYAIAMEEISRGCASTGVIMSVNNSLYLGPILKFGSKEQKQAWVTPFTSGDKIGCFALSEPGNGSDAGAASTTARAEGDSWVLNGTKAWITNAWEASAAVVFASTDRALQNKGISAFLVPMPTPGLTLGKKEDKLGIRGSSTANLIFEDCRIPKDSILGEPGMGFKIAMQTLDMGRIGIASQALGIAQTALDCAVNYAENRMAFGAPLTKLQVIQFKLADMALALESARLLTWRAAMLKDNKKPFIKEAAMAKLAASEAATAISHQAIQILGGMGYVTEMPAERHYRDARITEIYEGTSEIQRLVIAGHLLRSYRS

SEQ ID NO: 767009 - protein, 288 aa, Homo sapiens
HLGPAPEALRAWPLSRVPPPSTPEQRARSGRSRSLGLCLSPMAAALLARASGPARRALCPRAWRQLHTIYQSVELPETHQMLLQTCRDFAEKELFPIAAQVDKEHLFPAAQVKKMGGLGLLAMDVPEELGGAGLDYLAYAIAMEEISRGCASTGVIMSVNNVSPLPGPWDTRVEGGSRELGRPLASAPSPDLSGDVTGLGPTAVGPWTEQALRVQARTVGRMRLGLGPRNRSPLSSKSLYLGPILKFGSKEQKQAWVTPFTSGDKIGCFALSEPGTCPVPSPVLRVTG

SEQ ID NO: 767010 - protein, 127 aa, Homo sapiens
SLVHDGLLKPCMSPYNTVRKPDGSYWLVQDLRAINQIVQTTHTVVPNPYTNVSRIPHNHQRFTVVDLKDAFCACLLAEDSQDMFACEWEDPHSGQKQQYQWTVLPQGFTKSPNLFGQILEQVLETSP

SEQ ID NO: 767011 - protein, 102 aa, Homo sapiens
MPRRESPQEKAPEDLKEKKEKVEEKASRKERKKEVVEAPVPLVVMVGKACSQPEATPSPGPHRRRRTGLRRKKKKLPRMERRKMKGKKKMRKKKKRMMKGPR

SEQ ID NO: 767012 - protein, 117 aa, Homo sapiens
MKRIPNGRRQKMGHRREPLPTGWGWEASLGLEVGVGAAKSSHSSPGSLLWALHQSCHPLLSPQPSHFRLSRHCALHPHSAIVPPPDLLHLSSPAGPQLLLSLFALFLPPLPASFFLR

SEQ ID NO: 767013 - protein, 525 aa, Homo sapiens
MWEAQFLGLLFLQPLWVAPVKPLQPGAEVPVVWAQEGAPAQLPCSPTIPLQDLSLLRRAGVTWQHQPDSGPPAAAPGHPLAPGPHPAAPSSWGPRPRRYTVLSVGPGGLRSGRLPLQPRVQLDERGRQRGDFSLWLRPARRADAGEYRAAVHLRDRALSCRLRLRLGQASMTASPPGSLRASDWVILNCSFSRPDRPASVHWFRNRGQGRVPVRESPHHHLAESFLFLPQVSPMDSGPWGCILTYRDGFNVSIMYNLTVLGLEPPTPLTVYAGAGSRVGLPCRLPAGVGTRSFLTAKWTPPGGGPDLLVTGDNGDFTLRLEDVSQAQAGTYTCHIHLQEQQLNATVTLAIITVTPKSFGSPGSLGKLLCEVTPVSGQERFVWSSLDTPSQRSFSGPWLEAQEAQLLSQPWQCQLYQGERLLGAAVYFTELSSPGAQRSGRAPGALPAGHLLLFLTLGVLSLLLLVTGAFGFHLWRRQWRPRRFSALEQGIHPPQAQSKIEELEQEPEPEPEPEPEPEPEPEPEQL

SEQ ID NO: 767014 - protein, 282 aa, Homo sapiens
PPGLVLPPDSLALPPLAFILLSPPLQPPLSSPSPLLSSPLPPAPPLGSPSRRAAPPYKRVPFPGAAAAGRRQLCWCGGGEPGIELPRPSAPATACTALPPALRTAAALRVSAPDPPPPHPARLCRLFQRPSLPSGRRCRCRRRRRHRARFRPRPPSAVQGPSVSAPGPRLPASPGPGPGTMSEKSVEAAAELSAKDLKEKKEKVEEKASRKERKKEVVEEEENGAEEEEEETAEDGEEEDEGEEEDEEEEEEDDEGPALKRAAEEEDEADPKRQKTENGASA

SEQ ID NO: 767015 - protein, 102 aa, Homo sapiens
MSEKSVEAAAELSAKDLKEKKEKVEEKASRKERKKEVVEEEENGAEEEEEETAEDGEEEDEGEEEDEEEEEEDDEGPALKRAAEEEDEADPKRQKTENGASA

SEQ ID NO: 767016 - protein, 282 aa, Homo sapiens; identical to SEQ ID NO: 767014

SEQ ID NO: 767017 - protein, 282 aa, Homo sapiens; identical to SEQ ID NO: 767014

SEQ ID NO: 767018 - protein, 282 aa, Homo sapiens; identical to SEQ ID NO: 767014

SEQ ID NO: 767019 - protein, 282 aa, Homo sapiens; identical to SEQ ID NO: 767014

SEQ ID NO: 767020 - protein, 282 aa, Homo sapiens; identical to SEQ ID NO: 767014

SEQ ID NO: 767021 - protein, 284 aa, Homo sapiens
PPGLVLPPDSLALPPLAFILLSPPLQPPLSSPSPLLSSPLPPAPPLGSPSRRAAPPYKRVPFPGAAAAGRRQLCWCGGGEPGIELPRPSAPATACTALPPALRTAAALRVSAPDPPPPHPARLCRLFQRPSLPSGRRCRCRRRRRHRARFRPRPPSAVQGPSVSAPGPRLPASPGPGPGTMSEKSVEAAAELSAKDLKEKKEKVEEKASRKERKKEVVEAPVPLVVMVGKACSQPEATPSPGPHRRRRTGLRRKKKKLPRMERRKMKGKKKMRKKKKRMMKGPR

SEQ ID NO: 767022 - protein, 208 aa, Homo sapiens
PPGLVLPPDSLALPPLAFILLSPPLQPPLSSPSPLLSSPLPPAPPLGSPSRRAAPPYKRVPFPGAAAAGRRQLCWCGGGEPGIELPRPSAPATACTALPPAPGPGTMSEKSVEAAAELSAKDLKEKKEKVEEKASRKERKKEVVEEEENGAEEEEEETAEDGEEEDEGEEEDEEEEEEDDEGPALKRAAEEEDEADPKRQKTENGASA

SEQ ID NO: 767023 - protein, 181 aa, Homo sapiens
TRRGRGGLLSSPLPPAPPLGSPSRRAAPPYKRVPFPGAAAAGRRQLCWCGGGEPGIELPRPSAPATACTALPPAPGPGTMSEKSVEAAAELSAKDLKEKKEKVEEKASRKERKKEVVEEEENGAEEEEEETAEDGEEEDEGEEEDEEEEEEDDEGPALKRAAEEEDEADPKRQKTENGASA

SEQ ID NO: 767024 - protein, 117 aa, Homo sapiens; identical to SEQ ID NO: 767012

SEQ ID NO: 767025 - protein, 122 aa, Homo sapiens
MTAEEMKATESGAQSAPLPMEGVDISPKQDEGVLKDLKEKKEKVEEKASRKERKKEVVEEEENGAEEEEEETAEDGEEEDEGEEEDEEEEEEDDEGPALKRAAEEEDEADPKRQKTENGASA

SEQ ID NO: 767026 - protein, 134 aa, Homo sapiens
VLRCSVWPSRGLRIRETQMERNKDLQKLKGKLGGMPRRESPQEKAPEDLKEKKEKVEEKASRKERKKEVVEEEENGAEEEEEETAEDGEEEDEGEEEDEEEEEEDDEGPALKRAAEEEDEADPKRQKTENGASA

SEQ ID NO: 767027 - protein, 441 aa, Homo sapiens
PPGLVLPPDSLALPPLAFILLSPPLQPPLSSPSPLLSSPLPPAPPLGSPSRRAAPPYKRVPFPGAAAAGRRQLCWCGGGEPGIELPRPSAPATACTALPPALRTAAALRVSAPDPPPPHPARLCRLFQRPSLPSGRRCRCRRRRRHRARFRPRPPSAVQGPSVSAPGPRLPASPGPGPGTMSEKSVEAAAELSAKDLKEKKEKVEEKASRKERKKEVVEEEENGAEEEEEETAEDGEEEDEGEEEDEEEEEEDDEGPALKRAAEEEVWAGLLGLRGCQGCSRAGRPLDLDPDPCVAGVGAGTGPGQGEVSSSHFTAPPFSPSPQMKRIPNGRRQKMGHRREPLPTGWGWEASLGLEVGVGAAKSSHSSPGSLLWALHQSCHPLLSPQPSHFRLSRHCALHPHSAIVPPPDLLHLSSPAGPQLLLSLFALFLPPLPASFFLR

SEQ ID NO: 767028 - protein, 117 aa, Homo sapiens; identical to SEQ ID NO: 767012

SEQ ID NO: 767029 - protein, 282 aa, Homo sapiens; identical to SEQ ID NO: 767014

SEQ ID NO: 767030 - protein, 282 aa, Homo sapiens; identical to SEQ ID NO: 767014

SEQ ID NO: 767031 - protein, 282 aa, Homo sapiens; identical to SEQ ID NO: 767014

SEQ ID NO: 767032 - protein, 162 aa, Homo sapiens
MQPGWAPFGFGPRSLCGRGGGWNRTGTGGGLPSHFTAPPFSPSPQMKRIPNGRRQKMGHRREPLPTGWGWEASLGLEVGVGAAKSSHSSPGSLLWALHQSCHPLLSPQPSHFRLSRHCALHPHSAIVPPPDLLHLSSPAGPQLLLSLFALFLPPLPASFFLR

SEQ ID NO: 767033 - protein, 147 aa, Homo sapiens
MPGGVEWPGGVEWPGGVEWPALKKELPKKGMKRIPNGRRQKMGHRREPLPTGWGWEASLGLEVGVGAAKSSHSSPGSLLWALHQSCHPLLSPQPSHFRLSRHCALHPHSAIVPPPDLLHLSSPAGPQLLLSLFALFLPPLPASFFLR

SEQ ID NO: 767034 - protein, 258 aa, Homo sapiens
PPGLVLPPDSLALPPLAFILLSPPLQPPLSSPSPLLSSPLPPAPPLGSPSRRAAPPYKRVPFPGAAAAGRRQLCWCGGGEPGIELPRPSAPATACTALPPALRTAAALRVSAPDPPPPHPARLCRLFQRPSLPSGRRCRCRRRRRHRARFRPRPPSAVQGPSVSAPGPRLPASPGPGPGTMSEKSVEAAAELSAKDLKEKKEKVEEKASRKERKKEVVEEEENGAEEEEEETAEDGEEEDEGEEEDEEEEEEDETCSI

SEQ ID NO: 767035 - protein, 322 aa, Homo sapiens
PPGLVLPPDSLALPPLAFILLSPPLQPPLSSPSPLLSSPLPPAPPLGSPSRRAAPPYKRVPFPGAAAAGRRQLCWCGGGEPGIELPRPSAPATACTALPPALRTAAALRVSAPDPPPPHPARLCRLFQRPSLPSGRRCRCRRRRRHRARFRPRPPSAVQGPSVSAPGPRLPASPGPGPGTMSEKSVEAAAELSAKDLKEKKEKVEEKASRKERKKEVVEEEENGAEEEEEETAEDGEEEDEGEEEDEEEEEEDDEGPALKRAAEEEMKRIPNGRRQFGLEVGVGAAKSSHSSPGSLLWALHQSCHPLLSPQPSHFRLPFLFV

SEQ ID NO: 767036 - protein, 238 aa, Homo sapiens
PPGLVLPPDSLALPPLAFILLSPPLQPPLSSPSPLLSSPLPPAPPLGSPSRRAAPPYKRVPFPGAAAAGRRQLCWCGGGEPGIELPRPSAPATACTALPPALRTAAALRVSAPDPPPPHPARLCRLFQRPSLPSGRRCRCRRRRRHRARFRPRPPSAVQGPSVSAPGPRLPASPGPGPGTMSEKSVEAAAELSAKDLKEKKEKVEEKASRKERKKEVVEEEENGAEEEEEEICHCSTS

SEQ ID NO: 767037 - protein, 103 aa, Homo sapiens
MAEARGSSSLDSFFLNFGAYTVRAKSSHSSPGSLLWALHQSCHPLLSPQPSHFRLSRHCALHPHSAIVPPPDLLHLSSPAGPQLLLSLFALFLPPLPASFFLR

SEQ ID NO: 767038 - protein, 238 aa, Homo sapiens
PPGLVLPPDSLALPPLAFILLSPPLQPPLSSPSPLLSSPLPPAPPLGSPSRRAAPPYKRVPFPGAAAAGRRQLCWCGGGEPGIELPRPSAPATACTALPPALRTAAALRVSAPDPPPPHPARLCRLFQRPSLPSGRRCRCRRRRRHRARFRPRPPSAVQGPSVSAPGPRLPASPGPGPGTMSEKSVEAAAELSAKDLKEKKEKVEEKASRKERKKEVVECGKKVRFTPMNMIVKWILA

SEQ ID NO: 767039 - protein, 169 aa, Homo sapiens
PPGLVLPPDSLALPPLAFILLSPPLQPPLSSPSPLLSSPLPPAPPLGSPSRRAAPPYKRVPFPGAAAAGRRQLCWCGGGEPGIELPRPSAPATACTALPPALRTAAALRVSAPDPPPPHPARLCRLFQRPSLPSGRRCRCRRRRRHRARFRPRPPSAVQGPSVSAPGPR

SEQ ID NO: 767040 - protein, 196 aa, Homo sapiens
PPGLVLPPDSLALPPLAFILLSPPLQPPLSSPSPLLSSPLPPAPPLGSPSRRAAPPYKRVPFPGAAAAGRRQLCWCGGGEPGIELPRPSAPATACTALPPALRTAAALRVSAPDPPPPHPARLCRLFQRPSLPSGRRCRCRRRRRHRARFRPRPPSAVQGPSVSAPGPRLPASPGPGPGTMSEKSVEAAAELSAKT

SEQ ID NO: 767041 - protein, 95 aa, Homo sapiens
SPGPIPLGRGGYRGRGGFQGRGGDPKSGDWVCPNPSCGNMNFARRNSCNQCNEPRPEDSRPSGGDFRGRGYGGERGYRGRGGRGGDRGGYGGSGG

SEQ ID NO: 767042 - protein, 592 aa, Homo sapiens
MSDSGSYGQSGGEQQSYSTYGNPGSQGYGQASQSYSGYGQTTDSSYGQNYSGYSSYGQSQSGYSQSYGGYENQKQSSYSQQPYNNQGQQQNMESSGSQGGRAPSYDQPDYGQQDSYDQQSGYDQHQGSYDEQSNYDQQHDSYSQNQQSYHSQRENYSHHTQDDRRDVSRYGEDNRGYGGSQGGGRGRGGYDKDGRGPMTGSSGGDRGGFKNFGGHRDYGPRTDADSESDNSDNNTIFVQGLGEGVSTDQVGEFFKQIGIIKTNKKTGKPMINLYTDKDTGKPKGEATVSFDDPPSAKAAIDWFDGKEFHGNIIKVSFATRRPEFMRGGGSGGGRRGRGGYRGRGGFQGRGGDPKSGDWVCPNPSCGNMNFARRNSCNQCNEPRPEDSRPSGGDFRGRGYGGERGYRGRGGRGGDRGGYGGDRSGGGYGGDRSSGGGYSGDRSGGGYGGDRSGGGYGGDRGGGYGGDRGGGYGGDRGGGYGGDRGGYGGDRGGGYGGDRGGYGGDRGGYGGDRGGYGGDRGGYGGDRSRGGYGGDRGGGSGYGGDRSGGYGGDRSGGGYGGDRGGGYGGDRGGYGGKMGGRNDYRNDQRNRPY

SEQ ID NO: 767043 - protein, 629 aa, Homo sapiens
  misc_feature (1)..(1): Xaa can be any naturally occurring amino acid
XGGRSGIPGYSSGRRAAWLSYSLFSAGCGASAPRPLVMSDSGSYGQSGGEQQSYSTYGNPGSQGYGQASQSYSGYGQTTDSSYGQNYSGYSSYGQSQSGYSQSYGGYENQKQSSYSQQPYNNQGQQQNMESSGSQGGRAPSYDQPDYGQQDSYDQQSGYDQHQGSYDEQSNYDQQHDSYSQNQQSYHSQRENYSHHTQDDRRDVSRYGEDNRGYGGSQGGGRGRGGYDKDGRGPMTGSSGGDRGGFKNFGGHRDYGPRTDADSESDNSDNNTIFVQGLGEGVSTDQVGEFFKQIGIIKTNKKTGKPMINLYTDKDTGKPKGEATVSFDDPPSAKAAIDWFDGKEFHGNIIKVSFATRRPEFMRGGGSGGGRRGRGGYRGRGGFQGRGGDPKSGDWVCPNPSCGNMNFARRNSCNQCNEPRPEDSRPSGGDFRGRGYGGERGYRGRGGRGGDRGGYGGDRSGGGYGGDRSSGGGYSGDRSGGGYGGDRSGGGYGGDRGGGYGGDRGGGYGGDRGGGYGGDRGGYGGDRGGGYGGDRGGYGGDRGGYGGDRGGYGGDRGGYGGDRSRGGYGGDRGGGSGYGGDRSGGYGGDRSGGGYGGDRGGGYGGDRGGYGGKMGGRNDYRNDQRNRPY

SEQ ID NO: 767044 - protein, 501 aa, Homo sapiens
MESSGSQGGRAPSYDQPDYGQQDSYDQQSGYDQHQGSYDEQSNYDQQHDSYSQNQQSYHSQRENYSHHTQDDRRDVSRYGEDNRGYGGSQGGGRGRGGYDKDGRGPMTGSSGGDRGGFKNFGGHRDYGPRTDADSESDNSDNNTIFVQGLGEGVSTDQVGEFFKQIGIIKTNKKTGKPMINLYTDKDTGKPKGEATVSFDDPPSAKAAIDWFDGKEFHGNIIKVSFATRRPEFMRGGGSGGGRRGRGGYRGRGGFQGRGGDPKSGDWVCPNPSCGNMNFARRNSCNQCNEPRPEDSRPSGGDFRGRGYGGERGYRGRGGRGGDRGGYGGDRSGGGYGGDRSSGGGYSGDRSGGGYGGDRSGGGYGGDRGGGYGGDRGGGYGGDRGGGYGGDRGGYGGDRGGGYGGDRGGYGGDRGGYGGDRGGYGGDRGGYGGDRSRGGYGGDRGGGSGYGGDRSGGYGGDRSGGGYGGDRGGGYGGDRGGYGGKMGGRNDYRNDQRNRPY

SEQ ID NO: 767045 - protein, 592 aa, Homo sapiens; identical to SEQ ID NO: 767042

SEQ ID NO: 767046 - protein, 202 aa, Homo sapiens
MSDSGSYGQSGGEQQSYSTYGNPGSQGYGQASQSYSGYGQTTDSSYGQNYSGYSSYGQSQSGYSQSYGGYENQKQSSYSQQPYNNQGQQQNMESSGSQGGRAPSYDQPDYGQQDSYDQQSGYDQHQGSYDEQSNYDQQHDSYSQNQQSYHSQRENYSHHTQDDRRDVSRYGEDNRGYGGSQGGGRGRGGYDKDGRGPMTGSR

SEQ ID NO: 767047 - protein, 525 aa, Homo sapiens
MSDSGSYGQSGGEQQSYSTYGNPGSQGYGQASQSYSGYGQTTDSSYGQNYSGYSSYGQSQSGYSQSYGGYENQKQSSYSQQPYNNQGQQQNMESSGSQGGRAPSYDQPDYGQQDSYDQQSGYDQHQGSYDEQSNYDQQHDSYSQNQQSYHSQRENYSHHTQDDRRDVSRYGEDNRGYGGSQGGGRGRGGYDKDGRGPMTGSSGGDRGGFKNFGGHRDYGPRTDADSESDNSDNNTIFVQGLGEGVSTDQVGEFFKQIGIIKTNKKTGKPMINLYTDKDTGKPKGEATVSFDDPPSAKAAIDWFDGKEFHGNIIKVSFATRRPEFMRGGGSGGGRRGRGGYRGRGGFQGRGGDPKSGDWVCPNPSCGNMNFARRNSCNQCNEPRPEDSRPSGGGGGYGGDRGGGYGGDRGGGYGGDRGGYGGDRGGGYGGDRGGYGGDRGGYGGDRGGYGGDRGGYGGDRSRGGYGGDRGGGSGYGGDRSGGYGGDRSGGGYGGDRGGGYGGDRGGYGGKMGGRNDYRNDQRNRPY

SEQ ID NO: 767048 - protein, 583 aa, Homo sapiens
MSDSGSYGQSGGEQQSYSTYGNPGSQGYGQASQSYSGYGQTTDSSYGQNYSGYSSYGQSQSGYSQSYGGYENQKQSSYSQQPYNNQGQQQNMESSGSQGGRAPSYDQPDYGQQDSYDQQSGYDQHQGSYDEQSNYDQQHDSYSQNQQSYHSQRENYSHHTQDDRRDVSRYGEDNRGYGGSQGGGRGRGGYDKDGRGPMTGSSGGDRGGFKNFGGHRDYGPRTDADSESDNSDNNTIFVQGLGEGVSTDQVGEFFKQIGIIKTNKKTGKPMINLYTDKDTGKPKGEATVSFDDPPSAKAAIDWFDGKEFHGNIIKVSFATRRPEFMRGGGSGGGRRGRGGYRGRGGFQGRGGDPKSGDWVCPNPSCGNMNFARRNSCNQCNEPRPEDSRPSGGDFRGRGYGGERGYRGRGGRGGDRGGYGGDRSGGGYGGDRSSGGGYSGDRSGGGYGGDRSGGGYGGDRGGGYGGDRGGGYGGDRGGGYGGDRGGYGGDRGGGYGGDRGGYGGDRGGYGGDRGGYGGDRGGYGGDRSRGGYGGDRGGGSGYGGDRSGGYGGDRSGGGYGGDRGGGYGGDRGGYGGKMGGSFPL

SEQ ID NO: 767049 - protein, 501 aa, Homo sapiens; identical to SEQ ID NO: 767044

SEQ ID NO: 767050 - protein, 202 aa, Homo sapiens; identical to SEQ ID NO: 767046

SEQ ID NO: 767051 - protein, 501 aa, Homo sapiens; identical to SEQ ID NO: 767044

SEQ ID NO: 767052 - protein, 501 aa, Homo sapiens; identical to SEQ ID NO: 767044

SEQ ID NO: 767053 - protein, 425 aa, Homo sapiens
MSDSGSYGQSGGEQQSYSTYGNPGSQGYGQASQSYSGYGQTTDSSYGQNYSGYSSYGQSQSGYSQSYGGYENQKQSSYSQQPYNNQGQQQNMESSGSQGGRAPSYDQPDYGQQDSYDQQSGYDQHQGSYDEQSNYDQQHDSYSQNQQSYHSQRENYSHHTQDDRRDVSRYGEDNRGYGGSQGGGRGRGGYDKDGRGPMTGSSGGDRGGFKNFGGHRDYGPRTDADSESDNSDNNTIFVQGLGEGVSTDQVGEFFKQIGIIKTNKKTGKPMINLYTDKDTGKPKGEATVSFDDPPSAKAAIDWFDGKEFHGNIIKVSFATRRPEFMRGGGSGGGRRGRGGYRGRGGFQGRGGDPKSGDWVCPNPSCGNMNFARRNSCNQCNEPRPEDSRPSGGDFRGRGYGGERGYRGRGGRGGDRGGYGGEAAQA

SEQ ID NO: 767054 - protein, 202 aa, Homo sapiens; identical to SEQ ID NO: 767046

SEQ ID NO: 767055 - protein, 395 aa, Homo sapiens
MTGSSGGDRGGFKNFGGHRDYGPRTDADSESDNSDNNTIFVQGLGEGVSTDQVGEFFKQIGIIKTNKKTGKPMINLYTDKDTGKPKGEATVSFDDPPSAKAAIDWFDGKEFHGNIIKVSFATRRPEFMRGGGSGGGRRGRGGYRGRGGFQGRGGDPKSGDWVCPNPSCGNMNFARRNSCNQCNEPRPEDSRPSGGDFRGRGYGGERGYRGRGGRGGDRGGYGGDRSGGGYGGDRSSGGGYSGDRSGGGYGGDRSGGGYGGDRGGGYGGDRGGGYGGDRGGGYGGDRGGYGGDRGGGYGGDRGGYGGDRGGYGGDRGGYGGDRGGYGGDRSRGGYGGDRGGGSGYGGDRSGGYGGDRSGGGYGGDRGGGYGGDRGGYGGKMGGRNDYRNDQRNRPY

SEQ ID NO: 767056 - protein, 323 aa, Homo sapiens
MINLYTDKDTGKPKGEATVSFDDPPSAKAAIDWFDGKEFHGNIIKVSFATRRPEFMRGGGSGGGRRGRGGYRGRGGFQGRGGDPKSGDWVCPNPSCGNMNFARRNSCNQCNEPRPEDSRPSGGDFRGRGYGGERGYRGRGGRGGDRGGYGGDRSGGGYGGDRSSGGGYSGDRSGGGYGGDRSGGGYGGDRGGGYGGDRGGGYGGDRGGGYGGDRGGYGGDRGGGYGGDRGGYGGDRGGYGGDRGGYGGDRGGYGGDRSRGGYGGDRGGGSGYGGDRSGGYGGDRSGGGYGGDRGGGYGGDRGGYGGKMGGRNDYRNDQRNRPY

SEQ ID NO: 767057 - protein, 323 aa, Homo sapiens; identical to SEQ ID NO: 767056

SEQ ID NO: 767058 - protein, 221 aa, Homo sapiens
  misc_feature (3)..(3): Xaa can be any naturally occurring amino acid
EWXGVGASRGGYRGRGGFQGRGGDPKSGDWVCPNPSCGNMNFARRNSCNQCNEPRPEDSRPSGGDFRGRGYGGERGYRGRGGRGGDRGGYGGDRSGGGYGGDRSSGGGYSGDRSGGGYGGDRSGGGYGGDRGGGYGGDRGGGYGGDRGGGYGGDRSRGGYGGDRGGGSGYGGDRSGGYGGDRSGGGYGGDRGGGYGGDRGGYGGKMGGRNDYRNDQRNRPY

SEQ ID NO: 767059 - protein, 194 aa, Homo sapiens
MEIQAAKAMDKHHKAILAMGKRLIPLMDRTTAVTPVMDKVSQVIHSPMVVMRIKSRAHIASNHIITRDSSKTWNHQEAKVEEHLPMTSQTMVNKIHMTSSQAMINIKAHMMSSQIMISSMIPIVKTSSPIIHKGKTTATTHKMMPCVQAQYSPSPPGSSYAAQTYSSEYTTEIMNPDYTKLTMDLGSTEITATA

SEQ ID NO: 767060 - protein, 1838 aa, Homo sapiens
MDVHTRWKARSALRPGAPLLPPLLLLLLWAPPPSRAAQPADLLKVLDFHNLPDGITKTTGFCATRRSSKGPDVAYRVTKDAQLSAPTKQLYPASAFPEDFSILTTVKAKKGSQAFLVSIYNEQGIQQIGLELGRSPVFLYEDHTGKPGPEDYPLFRGINLSDGKWHRIALSVHKKNVTLILDCKKKTTKFLDRSDHPMIDINGIIVFGTRILDEEVFEGDIQQLLFVSDHRAAYDYCEHYSPDCDTAVPDTPQSQDPNPDEYYTEGDGEGETYYYEYPYYEDPEDLGKEPTPSKKPVEAAKETTEVPEELTPTPTEAAPMPETSEGAGKEEDVGIGDYDYVPSEDYYTPSPYDDLTYGEGEENPDQPTDPGAGAEIPTSTADTSNSSNPAPPPGEGADDLEGEFTEETIRNLDENYYDPYYDPTSSPSEIGPGMPANQDTIYEGIGGPRGEKGQKGEPAIIEPGMLIEGPPGPEGPAGLPGPPGTMGPTGQVGDPGERGPPGRPGLPGADGLPGPPGTMLMLPFRFGGGGDAGSKGPMVSAQESQAQAILQQARLALRGPAGPMGLTGRPGPVGPPGSGGLKGEPGDVGPQGPRGVQGPPGPAGKPGRRGRAGSDGARGMPGQTGPKGDRGFDGLAGLPGEKGHRGDPGPSGPPGPPGDDGERGDDGEVGPRGLPGKPGPRGLLGPKGPPGPPGPPGVTGMDGQPGPKGNVGPQGEPGPPGQQGNPGAQGLPGPQGAIGPPGEKGPLGKPGLPGMPGADGPPGHPGKEGPPGEKGGQGPPGPQGPIGYPGPRGVKGADGIRGLKGTKGEKGEDGFPGFKGDMGIKGDRGEIGPPGPRGEDGPEGPKGRGGPNGDPGPLGPPGEKGKLGVPGLPGYPGRQGPKGSIGFPGFPGANGEKGGRGTPGKPGPRGQRGPTGPRGERGPRGITGKPGPKGNSGGDGPAGPPGERGPNGPQGPTGFPGPKGPPGPPGKDGLPGHPGQRGETGFQGKTGPPGPPGVVGPQGPTGETGPMGERGHPGPPGPPGEQGLPGLAGKEGTKGDPGPAGLPGKDGPPGLRGFPGDRGLPGPVGALGLKGNEGPPGPPGPAGSPGERGPAGAAGPIGIPGRPGPQGPPGPAGEKGAPGEKGPQGPAGRDGLQGPVGLPGPAGPVGPPGEDGDKGEIGEPGQKGSKGDKGEQGPPGPTGPQGPIGQPGPSGADGEPGPRGQQGLFGQKGDEGPRGFPGPPGPVGLQGLPGPPGEKGETGDVGQMGPPGPPGPRGPSGAPGADGPQGPPGGIGNPGAVGEKGEPGEAGEPGLPGEGGPPGPKGERGEKGESGPSGAAGPPGPKGPPGDDGPKGSPGPVGFPGDPGPPGEPGPAGQDGPPGDKGDDGEPGQTGSPGPTGEPGPSGPPGKRGPPGPAGPEGRQGEKGAKGEAGLEGPPGKTGPIGPQGAPGKPGPDGLRGIPGPVGEQGLPGSPGPDGPPGPMGPPGLPGLKGDSGPKGEKGHPGLIGLIGPPGEQGEKGDRGLPGPQGSSGPKGEQGITGPSGPIGPPGPPGLPGPPGPKGAKGSSGPTGPKGEAGHPGPPGPPGPPGEVIQPLPIQASRTRRNIDASQLLDDGNGENYVDYADGMEEIFGSLNSLKLEIEQMKRPLGTQQNPARTCKDLQLCHPDFPDGEYWVDPNQGCSRDSFKVYCNFTAGGSTCVFPDKKSEGARITSWPKENPGSWFSEFKRGKLLSYVDAEGNPVGVVQMTFLRLLSASAHQNVTYHCYQSVAWQDAATGSYDKALRFLGSNDEEMSYDNNPYIRALVDGCATKKGYQKTVLEIDTPKVEQVPIVDIMFNDFGEASQKFGFEVGPACFMG

SEQ ID NO: 767061 - protein, 1838 aa, Homo sapiens; identical to SEQ ID NO: 767060

SEQ ID NO: 767062 - protein, 1838 aa, Homo sapiens; identical to SEQ ID NO: 767060

SEQ ID NO: 767063 - protein, 1838 aa, Homo sapiens; identical to SEQ ID NO: 767060

SEQ ID NO: 767064 - protein, 1838 aa, Homo sapiens; identical to SEQ ID NO: 767060

SEQ ID NO: 767065 - protein, 1838 aa, Homo sapiens; identical to SEQ ID NO: 767060

SEQ ID NO: 767066 - protein, 1838 aa, Homo sapiens; identical to SEQ ID NO: 767060

SEQ ID NO: 767067 - protein, 1838 aa, Homo sapiens; identical to SEQ ID NO: 767060

SEQ ID NO: 767068 - protein, 386 aa, Homo sapiens
MAVLRANWPTVAEHETWLPQMPLPVFIFPQGHPGLIGLIGPPGEQGEKGDRGLPGPQGSSGPKGEQGITGPSGPIGPPGPPGLPGPPGPKGAKGSSGPTGPKGEAGHPGPPGPPGPPGEVIQPLPIQASRTRRNIDASQLLDDGNGENYVDYADGMEEIFGSLNSLKLEIEQMKRPLGTQQNPARTCKDLQLCHPDFPDGEYWVDPNQGCSRDSFKVYCNFTAGGSTCVFPDKKSEGARITSWPKENPGSWFSEFKRGKLLSYVDAEGNPVGVVQMTFLRLLSASAHQNVTYHCYQSVAWQDAATGSYDKALRFLGSNDEEMSYDNNPYIRALVDGCATKKGYQKTVLEIDTPKVEQVPIVDIMFNDFGEASQKFGFEVGPACFMG

SEQ ID NO: 767069 - protein, 87 aa, Homo sapiens
  misc_feature (5)..(5): Xaa can be any naturally occurring amino acid
SWYAXGFGYVDHALLAFNHARKPSLSPTDRMGEAWILGCSTVLIRNRKSPHPRPGQERAINWKFAPGQQEFMLPLKSRYQCPFSDSF

SEQ ID NO: 767070 - protein, 142 aa, Homo sapiens [sequence omitted]

SEQ ID NO: 767071 - protein, 1352 aa, Homo sapiens
MDVHTRWKARSALRPGAPLLPPLLLLLLWAPPPSRAAQPADLLKVLDFHNLPDGITKTTGFCATRRSSKGPDVAYRVTKDAQLSAPTKQLYPASAFPEDFSILTTVKAKKGSQAFLVSIYNEQGIQQIGLELGRSPVFLYEDHTGKPGPEDYPLFRGINLSDGKWHRIALSVHKKNVTLILDCKKKTTKFLDRSDHPMIDINGIIVFGTRILDEEVFEGDIQQLLFVSDHRAAYDYCEHYSPDCDTAVPDTPQSQDPNPDEYYTEGDGEGETYYYEYPYYEDPEDLGKEPTPSKKPVEAAKETTEVPEELTPTPTEAAPMPETSEGAGKEEDVGIGDYDYVPSEDYYTPSPYDDLTYGEGEENPDQPTDPGAGAEIPTSTADTSNSSNPAPPPGEGADDLEGEFTEETIRNLDENYYDPYYDPTSSPSEIGPGMPANQDTIYEGIGGPRGEKGQKGEPAIIEPGMLIEGPPGPEGPAGLPGPPGTMGPTGQVGDPGERGPPGRPGLPGADGLPGPPGTMLMLPFRFGGGGDAGSKGPMVSAQESQAQAILQQARLALRGPAGPMGLTGRPGPVGPPGSGGLKGEPGDVGPQGPRGVQGPPGPAGKPGRRGRAGSDGARGMPGQTGPKGDRGFDGLAGLPGEKGHRGDPGPSGPPGPPGDDGERGDDGEVGPRGLPGKPGPRGLLGPKGPPGPPGPPGVTGMDGQPGPKGNVGPQGEPGPPGQQGNPGAQGLPGPQGAIGPPGEKGPLGKPGLPGMPGADGPPGHPGKEGPPGEKGGQGPPGPQGPIGYPGPRGVKGADGIRGLKGTKGEKGEDGFPGFKGDMGIKGDRGEIGPPGPRGEDGPEGPKGRGGPNGDPGPLGPPGEKGKLGVPGLPGYPGRQGPKGSIGFPGFPGANGEKGGRGTPGKPGPRGQRGPTGPRGERGPRGITGKPGPKGNSGGDGPAGPPGERGPNGPQGPTGFPGPKGPPGPPGKDGLPGHPGQRGETGFQGKTGPPGPPGVVGPQGPTGETGPMGERGHPGPPGPPGEQGLPGLAGKEGTKGDPGPAGLPGKDGPPGLRGFPGDRGLPGPVGALGLKGNEGPPGPPGPAGSPGERGPAGAAGPIGIPGRPGPQGPPGPAGEKGAPGEKGPQGPAGRDGLQGPVGLPGPAGPVGPPGEDGDKGEIGEPGQKGSKGDKGEQGPPGPTGPQGPIGQPGPSGADGEPGPRGQQGLFGQKGDEGPRGFPGPPGPVGLQGLPGPPGEKGETGDVGQMGPPGPPGPRGPSGAPGADGPQGPPGGIGNPGAVGEKGEPGEAGEPGLPGEGGPPPFKVVIICTELQNVSRSPQTTLATVYCNKITSYICRKIFWCNFIFSSQYI

SEQ ID NO: 767072 - protein, 107 aa, Homo sapiens
MDVHTRWKARSALRPGAPLLPPLLLLLLWAPPPSRAAQPADLLKVLDFHNLPDGITKTTGFCATRRSSKGPDVAYRVTKDAQLSAPTKQLYPGPCLQPPSSPDPSCS

SEQ ID NO: 767073 - protein, 1838 aa, Homo sapiens; identical to SEQ ID NO: 767060

SEQ ID NO: 767074 - protein, 253 aa, Homo sapiens
MAWTRDAERAGNGENYVDYADGMEEIFGSLNSLKLEIEQMKRPLGTQQNPARTCKDLQLCHPDFPDGEYWVDPNQGCSRDSFKVYCNFTAGGSTCVFPDKKSEGARITSWPKENPGSWFSEFKRGKLLSYVDAEGNPVGVVQMTFLRLLSASAHQNVTYHCYQSVAWQDAATGSYDKALRFLGSNDEEMSYDNNPYIRALVDGCATKKGYQKTVLEIDTPKVEQVPIVDIMFNDFGEASQKFGFEVGPACFMG

SEQ ID NO: 767075 - protein, 142 aa, Homo sapiens [sequence omitted]

SEQ ID NO: 767076 - protein, 281 aa, Homo sapiens
MDVHTRWKARSALRPGAPLLPPLLLLLLWAPPPSRAAQPADLLKVLDFHNLPDGITKTTGFCATRRSSKGPDVAYRVTKDAQLSAPTKQLYPASAFPEDFSILTTVKAKKGSQAFLVSIYNEQGIQQIGLELGRSPVFLYEDHTGKPGPEDYPLFRGINLSDGKWHRIALSVHKKNVTLILDLSPSSLQKKSHSRGLSRDPRGLRLGHVILFSFLIPSNLSFSPVIFFLCGPFKVVIICTELQNVSRSPQTTLATVYCNKITSYICRKIFWCNFIFSSQYI

SEQ ID NO: 767077 - protein, 38 aa, Homo sapiens
MTFLRLLSASAHQNVTYHCYQSVAWQDAATGSYDKALR

SEQ ID NO: 767078 - protein, 285 aa, Homo sapiens
MNRLPDDYDPYAVEEPSDEEPALSSSEDEVDVLLHGTPDQKRKLIRECLTGESESSSEDEFEKEMEAELNSTMKTMEDKLSSLGTGSSSGNGKVATAPTRYYDDIYFDSDSEDEDRAVQVTKKKKKKQHKIPTNDELLYDPEKDNRDQAWVDAQRRGYHGLGPQRSRQQQPVPNSDAVLNCPACMTTLCLDCQRHESYKTQYRAMFVMNCSINKEEVLRYKASENRKKRRVHKKMRSNREDAAEKAETDVEEIYHPVMCTECSTEVAVYDKDEVFHFFNVLASHS

SEQ ID NO: 767079 - protein, 196 aa, Homo sapiens
MNRLPDDYDPYAVEEPSDEEPALSSSEDEVDVLLHGTPDQKRKLIRECLTGESESSSEDEFEKEMEAELNSTMKTMEDKLSSLGTGSSSGNGKVATAPTRYYDDIYFDSDSEDEDRAEKDNRDQAWVDAQRRGYHGLGPQRSRQQQPVPNSDAVLNCPACMTTLCLDCQRQTVAEWINKQDSTICCLEETCFTCKD

SEQ ID NO: 767080 - protein, 143 aa, Homo sapiens
MNRLPDDYDPYAVEEPSDEEPALSSSEDEVDVLLHGTPDQKRKLIRECLTGESESSSEDEFEKEMEAELNSTMKTMEDKLSSLGTGSSSGNGKVATAPTRYYDDIYFDSDSEDEDRAVLVTKKKRTIHPRIPTFDDLLFAPGL

SEQ ID NO: 767081 - protein, 84 aa, Homo sapiens
KSPVTVGSLTGESESSSEDEFEKEMEAELNSTMKTMEDKLSSLGTGSSSGNGKVATAPTRYYDDIYFDSDSEDEDRAVSNLFTR

SEQ ID NO: 767082 - protein, 82 aa, Homo sapiens
YYYGVGGRSPLTGESESSSEDEFEKEMEAELNSTMKTMEDKLSSLGTGSSSGNGKVATAPTRYYDDIYFDSSSSESESVDAA

SEQ ID NO: 767083 - protein, 285 aa, Homo sapiens; identical to SEQ ID NO: 767078

SEQ ID NO: 767084 - protein, 221 aa, Homo sapiens
MEAELNSTMKTMEDKLSSLGTGSSSGNGKVATAPTRYYDDIYFDSDSEDEDRAVQVTKKKKKKQHKIPTNDELLYDPEKDNRDQAWVDAQRRGYHGLGPQRSRQQQPVPNSDAVLNCPACMTTLCLDCQRHESYKTQYRAMFVMNCSINKEEVLRYKASENRKKRRVHKKMRSNREDAAEKAETDVEEIYHPVMCTECSTEVAVYDKDEVFHFFNVLASHS

SEQ ID NO: 767085 - protein, 264 aa, Homo sapiens [sequence omitted]

SEQ ID NO: 767086 - protein, 217 aa, Homo sapiens
MRSPHNEKWRTVISLGTGSSSGNGKVATAPTRYYDDIYFDSDSEDEDRAVQVTKKKKKKQHKIPTNDELLYDPEKDNRDQAWVDAQRRGYHGLGPQRSRQQQPVPNSDAVLNCPACMTTLCLDCQRHESYKTQYRAMFVMNCSINKEEVLRYKASENRKKRRVHKKMRSNREDAAEKAETDVEEIYHPVMCTECSTEVAVYDKDEVFHFFNVLASHS

SEQ ID NO: 767087 - protein, 139 aa, Homo sapiens
MNRLPDDYDPYAVEEPSDEEPALSSSEDEVDVLLHGTPDQKRKLIRECLTGESESSSEDEFEKEMEAELNSTMKTMEDKLSSLGTGSSSGNGKVATAPTRYYDDIYFDSDSEDEDRAVTMVWDHRDHVNNSLFQIVMLS

SEQ ID NO: 767088 - protein, 267 aa, Homo sapiens
MNRLPDDYDPYAVEEPSDEEPALSSSEDEVDVLLHGTPDQKRKLIRECLTGESESSSEDEFEKEMEAELNSTMKTMEDKLSSLGTGSSSGNGKVATAPTRYYDDIYFDSDSEDEDRAVQVTKKKKKKQHKIPTNDELLYDPEKDNRDQAWVDAQRRGYHGLGPQRSRQQQPVPNSDAVLNCPACMTTLCLDCQRHESYKTQYRAMFVMNCSINKEEVLRYKASENRKAETDVEEIYHPVMCTECSTEVAVYDKDEVFHFFNVLASHS

SEQ ID NO: 767089 - protein, 285 aa, Homo sapiens; identical to SEQ ID NO: 767078

SEQ ID NO: 767090 - protein, 1132 aa, Homo sapiens
VLSYLISESPMEPSEVPSQISKDNFLEVPNLSDSLCEDEEVTFQPGFSPQPSRRGSDSSEDIYLDTPSSGTRRVSFADSFGFNLVSVKEFDCWELPSASTTFDLGTDIFHTEEYVLAPLFDLPSSKEDLMQQLQIQKAILESTESLLGSTSIKGIIRVLNVSFEKLVYVRMSLDDWQTHYDILAEYVPNSCDGETDQFSFKIVLVPPYQKDGSKVEFCIRYETSVGTFWSNNNGTNYTFICQKKEQEPEPVKPWKEVPNRQIKGCLKVKSSKEESSVTSEENNFENPKNTDTYIPTIICSHEDKEDLEASNRNVKDVNREHDEHNEKELELMINQHLIRTRSTASRDERNTFSTDPVNFPNKAEGLEKKQIHGEICTDLFQRSLSPSSSAESSVKGDFYCNEKYSSGDDCTHQPSEETTSNMGEIKPSLGDTSSDELVQLHTGSKEVLDDNANPAHGNGTMQIPCPSSDQLMAGNLNKKHEGGAKKIEVKDLGCLRRDFHSDTSACLKESTEEGSSKEDYYGNGKDDEEQRIYLGVNEKQRKNFQTILHDQERKMGNPKISVAGIGASNRDLATLLSEHTAIPTRAITADVSHSPRTNLSWEEAVLTPEHHHLTSEGSALGGITGQVCSSRTGNVLRNDYLFQVEEKSGGINSEDQDNSPQHKQSWNVLESQGKSRENKTNITEHIKGQTDCEDVWGKRDNTRSLKATTEELFTCQETVCCELSSLADHGITEKAEAGTAYIIKTTSESTPESMSAREKAIIAKLPQETARSDRPIEVKETAFDPHEGRNDDSHYTLCQRDTVGVIYDNDFEKESRLGICNVRVDEMEKEETMSMYNPRKTHDREKCGTGNITSVEESSWVITEYQKATSKLDLQLGMLPTDKTVFSENRDHRQVQELSKKTDSDAIVHSAFNSDTNRAPQNSSPFSKHHTEISVSTNEQAIAVENAVTTMASQPISTKSENICNSTREIQGIEKHPYPESKPEEVSRSSGIVTSGSRKERCIGQIFQTEEYSVEKSLGPMILINKPLENMEEARHENEGLVSSGQSLYTSGEKESDSSASTSLPVEESQAQGNESLFSKYTNSKIPYFLLFLIFLITVYHYDLMIGLTFYVLSLSWLSWEEGRQKESVKKK

SEQ ID NO: 767091 - protein, 921 aa, Homo sapiens
MKKLLSNLVSPLNQVDEVLILLKTYTWIPHLQKEQEPEPVKPWKEVPNRQIKGCLKVKSSKEESSVTSEENNFENPKNTDTYIPTIICSHEDKEDLEASNRNVKDVNREHDEHNEKELELMINQHLIRTRSTASRDERNTFSTDPVNFPNKAEGLEKKQIHGEICTDLFQRSLSPSSSAESSVKGDFYCNEKYSSGDDCTHQPSEETTSNMGEIKPSLGDTSSDELVQLHTGSKEVLDDNANPAHGNGTMQIPCPSSDQLMAGNLNKKHEGGAKKIEVKDLGCLRRDFHSDTSACLKESTEEGSSKEDYYGNGKDDEEQRIYLGVNEKQRKNFQTILHDQERKMGNPKISVAGIGASNRDLATLLSEHTAIPTRAITADVSHSPRTNLSWEEAVLTPEHHHLTSEGSALGGITGQVCSSRTGNVLRNDYLFQVEEKSGGINSEDQDNSPQHKQSWNVLESQGKSRENKTNITEHIKGQTDCEDVWGKRDNTRSLKATTEELFTCQETVCCELSSLADHGITEKAEAGTAYIIKTTSESTPESMSAREKAIIAKLPQETARSDRPIEVKETAFDPHEGRNDDSHYTLCQRDTVGVIYDNDFEKESRLGICNVRVDEMEKEETMSMYNPRKTHDREKCGTGNITSVEESSWVITEYQKATSKLDLQLGMLPTDKTVFSENRDHRQVQELSKKTDSDAIVHSAFNSDTNRAPQNSSPFSKHHTEISVSTNEQAIAVENAVTTMASQPISTKSENICNSTREIQGIEKHPYPESKPEEVSRSSGIVTSGSRKERCIGQIFQTEEYSVEKSLGPMILINKPLENMEEARHENEGLVSSGQSLYTSGEKESDSSASTSLPVEESQAQGNESLFSKYTNSKIPYFLLFLIFLITVYHYDLMIGLTFYVLSLSWLSWEEGRQKESVKKK

SEQ ID NO: 767092 - protein, 583 aa, Homo sapiens
MKKLLSNLVSPLNQVDEVLILLKTYTWIPHLQKEQEPEPVKPWKEVPNRQIKGCLKVKSSKEESSVTSEENNFENPKNTDTYIPTIICSHEDKEDLEASNRNVKDVNREHDEHNEKELELMINQHLIRTRSTASRDERNTFSTDPVNFPNKAEGLEKKQIHGEICTDLFQRSLSPSSSAESSVKGDFYCNEKYSSGDDCTHQPSEETTSNMGEIKPSLGDTSSDELVQLHTGSKEVLDDNANPAHGNGTMQIPCPSSDQLMAGNLNKKHEGGAKKIEVKDLGCLRRDFHSDTSACLKESTEEGSSKEDYYGNGKDDEEQRIYLGVNEKQRKNFQTILHDQERKMGNPKISVAGIGASNRDLATLLSEHTAIPTRAITADVSHSPRTNLSWEEAVLTPEHHHLTSEGSALGGITGQVCSSRTGNVLRNDYLFQVEEKSGGINSEDQDNSPQHKQSWNVLESQGKSRENKTNITEHIKGQTDCEDVWGKRDNTRSLKATTEELFTCQETVCCELSSLADHGITEKAEAGTAYIIKTTSESTPESMSAREKAIIAKLPQETARSDRPIEVKETAFSLEGSFKKGRE

SEQ ID NO: 767093 - protein, 883 aa, Homo sapiens
MSGALANSLITSRENLGKNDSGKEESSVTSEENNFENPKNTDTYIPTIICSHEDKEDLEASNRNVKDVNREHDEHNEKELELMINQHLIRTRSTASRDERNTFSTDPVNFPNKAEGLEKKQIHGEICTDLFQRSLSPSSSAESSVKGDFYCNEKYSSGDDCTHQPSEETTSNMGEIKPSLGDTSSDELVQLHTGSKEVLDDNANPAHGNGTMQIPCPSSDQLMAGNLNKKHEGGAKKIEVKDLGCLRRDFHSDTSACLKESTEEGSSKEDYYGNGKDDEEQRIYLGVNEKQRKNFQTILHDQERKMGNPKISVAGIGASNRDLATLLSEHTAIPTRAITADVSHSPRTNLSWEEAVLTPEHHHLTSEGSALGGITGQVCSSRTGNVLRNDYLFQVEEKSGGINSEDQDNSPQHKQSWNVLESQGKSRENKTNITEHIKGQTDCEDVWGKRDNTRSLKATTEELFTCQETVCCELSSLADHGITEKAEAGTAYIIKTTSESTPESMSAREKAIIAKLPQETARSDRPIEVKETAFDPHEGRNDDSHYTLCQRDTVGVIYDNDFEKESRLGICNVRVDEMEKEETMSMYNPRKTHDREKCGTGNITSVEESSWVITEYQKATSKLDLQLGMLPTDKTVFSENRDHRQVQELSKKTDSDAIVHSAFNSDTNRAPQNSSPFSKHHTEISVSTNEQAIAVENAVTTMASQPISTKSENICNSTREIQGIEKHPYPESKPEEVSRSSGIVTSGSRKERCIGQIFQTEEYSVEKSLGPMILINKPLENMEEARHENEGLVSSGQSLYTSGEKESDSSASTSLPVEESQAQGNESLFSKYTNSKIPYFLLFLIFLITVYHYDLMIGLTFYVLSLSWLSWEEGRQKESVKKK

SEQ ID NO: 767094 - protein, 148 aa, Homo sapiens
  misc_feature (17)..(17): Xaa can be any naturally occurring amino acid
SHYNAVFTHNHHHKKLXKGRESRHLAQAHFKLLSTSDPSSWRPELLGLKAQWLISVRPATWKIEEGVSLESRSSDQIEQYKETPSQNKINKKKFNLYLWETGFHHIGQAGLELLTSSDPPALTSRSSGITTVNHCTRPISYLNDGEIL

SEQ ID NO: 767095 - protein, 119 aa, Homo sapiens
MNKILSSTVCFGLLTLLSVLIFLQSVHGRPYLTQGNEIFPDKKYTNREELLLALLNKNFDFQRPFNTDLALPNKLEELNQLEKLKEQLVEEKDSETSYAVDGLFSSHPSKRACFWKYCV

SEQ ID NO: 767096 - protein, 208 aa, Homo sapiens
VEEKHASLERVEQEQRWTGMSHDGAAGRAPLSSVLQNCRALPLPSAQKHSPHQAAAAGGWRDGVSDSRLFFLPVQHFFQRYEVKSRPSSHLVGSTVQVRGDAALHSPDWTPSPWNSQHTGEAERSKRTEKHKKIQPCHLVQILTVPRRKRGTQRSPAAGIQEELRCSRPTTSLPANSKLTVLLPCSQKWHWMDPIQVSPGCHFLPFCT

SEQ ID NO: 767097 - protein, 181 aa, Homo sapiens
TWRKSTRVWSGWSRNRGGLECHTTGQLEVHKNTLHTKLLLLGDGGMASAIQDCFSYLFSTSFSDMKLNPAHRSLSEEEPPLRSCTQGDSATARPTAHFEIMVLEPDVVIGCFGKVLTVPRRKRGTQRSPAAGIQEELRCSRPTTSLPANSKLTVLLPCSQKWHWMDPIQVSPGCHFLPFCT

SEQ ID NO: 767098 - protein, 171 aa, Homo sapiens
VEEKHASLERVEQEQRWTGMSHDGAAGRAPLSSVLQNCRALPLPSAQKHSPHQAAAAGGWRDGVSDSRLFFLPVQHFFQRYEVKSRPSSHLVGSTVQVRGDAALHSPDWTPSPWNSQHTGEAERSKRTEKHKKIQPCHLVQKSHRLECSGMISAPHNLCLRCSSDSPVSAC

SEQ ID NO: 767099 - protein, 113 aa, Homo sapiens
MASAIQDCFSYLFSTSFSDMKLNPDVVIIHLFKQEPKDHPRFLLTSSQSIPETAKPPAKFPPGGKHCAGSWGCSPAQPRLDSFPMELTTHGRGREIQAHRKTQEDSALSSCAK

SEQ ID NO: 767100 - protein, 170 aa, Homo sapiens
VEEKHASLERVEQEQRWTGMSHDGAAGRAPLSSVLQNCRALPLPSAQKHSPHQAAAAGGWRDGVSDSRLFFLPVQHFFQRYEVKSSVSASSPSTYSHTPGLPIFNINGLSWTPLPTSVTATLPEKEVYTLHSLSFTHFQPGSCYHWTVKSDSCQSHYSGYLLLCNNLLKI

SEQ ID NO: 767101 - protein, 142 aa, Homo sapiens
VEEKHASLERVEQEQRWTGMSHDGAAGRAPLSSVLQNCRALPLPSAQKHSPHQAAAAGGWRDGVSDSRLFFLPVQHFFQRYEVKSRPSSHLVGSTVQVRGDAALHSPDWTPSPWNSQHTGEAERSKRTEKHKKIQPCHLVQR

SEQ ID NO: 767102 - protein, 101 aa, Homo sapiens
VEEKHASLERVEQEQRWTGMSHDGAAGRAPLSSVLQNCRALPLPSAQKHSPHQAAAAGGWRDGVSDSRLFFLPVQHFFQRYEVKSRCRHHPLVQTRAQGSS

SEQ ID NO: 767103 - protein, 122 aa, Homo sapiens
MNYCMQEIYEVHPAAGSNCYMQSTDYYAYFEDSPGYSGCDAQAVPSNNIYMEQAWAVNQPYTCSYPGNMFKSKDSDLDMALNQYSQPEYFTEEKPTFSQVQSPSYSQKKGYIPSYLDKDELC

SEQ ID NO: 767104 - protein, 116 aa, Homo sapiens [sequence omitted]

SEQ ID NO: 767105 - protein, 110 aa, Homo sapiens
TCRPSRRCTLALSAQPTRGRRAGRAESGRGGGAARKACLAQALRPSDSSGPWRPGSCTFTWRLGAFFSAACGWMCMVWPGESLELHEHLKTERGNGSGGGHTQCRVDTVP

SEQ ID NO: 767106 - protein, 117 aa, Homo sapiens
PAAPAAAVHWRLALSRPEGAGLGGRSRAVGRGREEGLPSPGPPPIRLFRPLEAWLLYLHLASWRLFLSGLWVDVHGVAWRECRTPPPSSLELHEHLKTERGNGSGGGHTQCRVDTVP

SEQ ID NO: 767107 - protein, 981 aa, Homo sapiens
GWIPPLSRFPIDIFFTPKQEGDVNFNLICNVEKKVHPVTLNVKAEGYTMNVEIKCKDRTGSITLLTPNQTNIINFYEVELNECVQCEFNFINTGKFTFSFQAQLCGSKTLLQYLEFSPIDSTVDVGQSVHATLSFQPLKKCVLTDLELIIKISHGPTFMCNISGCAVSPAIHFSFTSYNFGTCFIYQAGMPPYKQTLVITNKEETPMSIDCLYTNTTHLEVNSRVDVVKPGNTLEIPITFYPRESINYQELIPFEINGLSQQTVEIKGKGTKMKILVLDPANRIVKLGAVLPGQVVKRTVSIMNNSLAQLTFNQSILFTIPELQEPKVLTLAPFHNITLKPKEVCKLEVIFAPKKRVPPFSEEVFMECMGLLRPLFLLSGCCQALEISLDQEHIPFGPVVYQTQATRRILMMNTGDVGARFKWDIKKFEPHFSISPEEGYITSGMEVSFEVTYHPTEVGKESLCKNILCYIQGGSPLSLTLSGVCVGPPAVKEVVNFTCQVRSKHTQTILLSNRTNQTWNLHPIFEGEHWEGPEFITLEAHQQNKPYEITYRPRTMNLENRKHQGTLFFPLPDGTGWLYALHGTSELPKAVANIYREVPCKTPYTELLPITNWLNKPQRFRVIVEILKPEKPDLSITMKGLDYIDVLSGSKKDYKLNFFSHKEGTYAAKVIFRNEVTNEFLYYNVSFRVIPSGIIKTIEMVTPVRQVASASIKLENPLPYSVTFSTECRMPDIALPSQFVVPANSEGTFSFEFQPLKAGETFGRLTLHNTDLGYYQYELYLKATPALPEKPVHFQTVLGSSQIILVKFINYTRQRTEYYCRTDCTDFHAEKLINAAPGGQGGTEASVEVLFEPSHLGETKGILILSSLAGGEYIIPLFGMALPPKPQGPFSIRAGYSIIIPFKNVFYHMVTFSIIVDNPAFTIRAGESVRPKKINNITVSFEGNPSGSKTPITTKLTVSCPPGEGSETGVKWVYYLKGITL

SEQ ID NO: 767108 - protein, 152 aa, Homo sapiens
GALMFVAWMTTVSIGVLVARFFKPVWSKAFLLGEAAWFQVHRMLMFTTTVLTCIAFVMPFIYRGGWSRHAGYHPYLGCIVMTLAVLQPLLAVFRPPLHDPRRQMFNWTHWSMGTAARIIAVAAMFLGMDLPGLNLPDSWKTYAMTGFVAWHV

SEQ ID NO: 767109 - protein, 136 aa, Homo sapiens
GALMFVAWMTTVSIGVLVARFFKPVWSKAFLLGEAAWFQVHRMLMFTTTVLTCIAFVMPFIYRGGWSRHAGYHPYLGCIVMTLAVLQPLLAVFRPPLHDPRRQMFNWTHWSMGTAARIIADLIQSGKCGCISFKDW

SEQ ID NO: 767110 - protein, 419 aa, Homo sapiens
MVEADHPGKLFIGGLNRETNEKMLKAVFGKHGPISEVLLIKDRTSKSRGFAFITFENPADAKNAAKDMNGTSLHGKAIKVEQAKKPSFQSGGRRRPPASSRNRSPSGSLRSARGSSGGTRGWLPSHEGHLDDGGYTPDLKMSYSRGLIPVKRGPSSRSGGPPPKKSAPSAVARSNSWMGSQGPMSQRRENYGVPPRRATISSWRNDRMSTRHDGYATNDGNHPSCQETRDYAPPSRGYAYRDNGHSNRDEHSSRGYRNHRSSRETRDYAPPSRGHAYRDYGHSRRDESYSRGYRNHRSSRETREYAPPSRGHGYRDYGHSRRHESYSRGYRNHPSSRETRDYAPPHRDYAYRDYGHSSWDEHSSRGYSYHDGYGEALGRDHSEHLSGSSYRDALQRDLSWCTTCKRASDVLWWKHLPRI

SEQ ID NO: 767111 - protein, 89 aa, Homo sapiens
SKSQLSNTEPPEPEIQVPAHKGSVNTLMCLFLLDKDVIARTRPLPWETQHWTSQALPTPEHAMEPQLVMEPKAVNSGTFETPQQACLLT

SEQ ID NO: 767112 - protein, 255 aa, Homo sapiens
DISAPPIAHPLKEHINEEIRSVLRQDFSSKMKSIILFVLSLLLILEKQAAVMGQKGGSKGQLPSGSSQFPHGQKGQHYFGQKDQQHTKSKGSFSIQHTYHVDINDHDWTRKSQQYDLNALHKATKSKQHLGGSQQLLNYKQEGRDHDKSKGHFHMIVIHHKGGQAHHGTQNPSQDQGNSPSGKGLSSQCSNTEKRLWVHGLSKEQASASGAQKGRTQGGSQSSYVLQTEELVVNKQQRETKNSHQNKGLTKMWLT

SEQ ID NO: 767113 - protein, 612 aa, Homo sapiens
DISAPPIAHPLKEHINEEIRSVLRQDFSSKMKSIILFVLSLLLILEKQAAVMGQKGGSKGQLPSGSSQFPHGQKGQHYFGQKDQQHTKSKGSFSIQHTYHVDINDHDWTRKSQQYDLNALHKATKSKQHLGGSQQLLNYKQEGRDHDKSKGHFHMIVIHHKGGQAHHGTQNPSQDQGNSPSGKGLSSQCSNTEKRLWVHGLSKEQASASGAQKGRTQGGSQSSYVLQTEELVVNKQQRETKNSHQNKGHYQNVVDVREEHSSKLQTSLHPAHQDRLQHGPKDIFTTQDELLVYNKNQHQTKNLSQDQEHGRKAHKISYPSSRTEERQLHHGEKSVQKDVSKGSISIQTEEKIHGKSQNQVTIHSQDQEHGHKENKISYQSSSTEERHLNCGEKGIQKGVSKGSISIQTEEQIHGKSQNQVRIPSQAQEYGHKENKISYQSSSTEERRLNSGEKDVQKGVSKGSISIQTEEKIHGKSQNQVTIPSQDQEHGHKENKMSYQSSSTEERRLNYGGKSTQKDVSQSSISFQIEKLVEGKSQIQTPNPNQDQWSGQNAKGKSGQSADSKQDLLSHEQKGRYKQESSESHNIVITEHEVAQDDHLTQQYNEDRNPIST

SEQ ID NO: 767114 - protein, 510 aa, Homo sapiens
DISAPPIAHPLKEHINEEIRSVLRQDFSSKMKSIILFVLSLLLILEKQAAVMGQKGGSKGQLPSGSSQFPHGQKGQHYFGQKDQQHTKSKGSFSIQHTYHVDINDHDWTRKSQQYDLNALHKATKSKQHLGGSQQLLNYKQEGRDHDKSKGHFHMIVIHHKGGQAHHGTQNPSQDQGNSPSGKGLSSQCSNTEKRLWVHGLSKEQASASGAQKGRTQGGSQSSYVLQTEELVVNKQQRETKNSHQNKGHYQNVVDVREEHSSKLQTSLHPAHQDRLQHGPKDIFTTQDELLVYNKNQHQTKNLSQDQEHGRKAHKISYPSSRTEERQLHHGEKSVQKDVSKGSISIQTEEKIHGKSQNQVTIHSQDQEHGHKENKISYQSSSTEERHLNCGEKGIQKGVSKGSISIQTEEQIHGKSQNQVRIPSQAQEYGHKENKISYQSSSTEERRLNSGEKDVQKGVSKAVLPTWKNIGRQTRKFLQTRRQETVSISGNATGTESPDPKKAHTKGKRK

SEQ ID NO: 767115 - protein, 116 aa, Homo sapiens
DISAPPIAHPLKEHINEEIRSVLRQDFSSKMKSIILFVLSLLLILEKQAAVMGQKGGSKGQLPSGSSQFPHGQKGQHYFGQKDQQHTKSKGSFSIQHTYHVDINVQTQKKGYGFMD

SEQ ID NO: 767116 - protein, 612 aa, Homo sapiens; identical to SEQ ID NO: 767113

SEQ ID NO: 767117 - protein, 612 aa, Homo sapiens; identical to SEQ ID NO: 767113

SEQ ID NO: 767118 - protein, 1579 aa, Homo sapiens
MAAMTICTAQWLKHHLYQQVQMNPAGPGSGGAGGHAPSRLAGRTSLPPPVSPSLSSRLLLRLQGQGVASALSASASASHLTWLLSMSVSLCQPPEKDTCDYIRAHPFNPGEPLHFMIFSKLASAQTPFPYKGTHSLVPGLRTLLQVPPPMMLCLPETCPLQLGLDPKPAGDLNFTGLSPWTVCSTMQFLGLNVISLGQDLEPAAHTRPPAVSQAMPWVDREVLNPSSGPLVCLATMLLTLLHLQTLRCHVRQGWGGAEGVALVPGFRMKYQSDATAHPGDMLTPNPRVRDPGLVWSLMWSPQSLRYIQKVLAMNGGAESCRASGLGWCPQEMEGLVDALLPQSWGSCLPGVGLWAQREALELQLRGMRGFVDCVLVHVVHVSPPPRRGSSVCTSPTSVLSAGPGRLSSHSMPAPLQPAGPQVLCEGPPRPSAEVEYAPSRQVASSLPVSDTSDEMDPSTQAILRAQGPGGTFLLSYLLRKKVALRSHQDAGAELTARERAEVTGGGKVIQSRLSTSWAGKLRLKVLVPGLRPRGDPSLWFLSTCLRPAPGTHNLEIPCFLVQGLRKWLPRSVSGCSEADGLGGSRKRQGLQGVRKAGVPGPTQWSNKLWVAFGPPRLPHWVCWCWRCWVRAARDPRHHCPSCEAARLGMSWVDSSFLLSSYMRQGLLDPKQMTEFQSQVHPLRAASVGGAASSTWRRVKVSLPLSREKNLGIPLSLQRCKCKASGVNLQRARGRVSVAVCRSVSEQEQERMAPAVPQGVGSWWLLSVPRGEEASCILGCLRFLCADRILSFLSTASLARVPGSKDTLPAHDWVLMVAWVVSSPGDEGWVSMVPWAVSSPRDEGRASTMPWAVCSYGNEGWVSKMPWAVSFPGDEGWMSKMPWAVYSPRNEGWVSKIPWAVSSPGDEGWVSMVPWAVSSPGDDGWVSMVPWAVFALGMRVGCYGILGRCFLSAQGLGDHDVLAMASLGCLFSAMWEEQGRFELVSAHHSLRISRRVSELSGQCSSFGIVFPTLTSIPSKPDMSCGSSEVGVGCSLGLGVSRGRGKERCWSKGMKFLLMGGVSSFDLLHSMVTIVNNNDYFKIAKRGDFKCSHHKMISVGGDGYATYLVLIIPQYRQALSLCIVPQESSHLLFCQLKIETQKERGESNRLFTEPWASASGYNKLQKGFPGNRSLFQPLVTGSRIWEICLDDIHMNGHIQENTVNVIKNSQRKVARNDIHMNGHIQEKTRERNENSQRKVARNDIHMNGHIIGETMVNVIKNSQRKVARNDIHMNGHIQENTVNVIKNSQRKVARNDIHMNGHIQEKTRNVIKNSQRKVARNDIHMNGHITGENTVNVIRIVREKYQKNLQRALVTPNLISFLKNDRYVGDGEVNVFFFKVKIWTLIMHTPLCALQINIIIEYLYIFAHLSQHRLRLSEWTPFGCWVSVSFWGEAAVIENELLAAISGIIKDCELYPQAMAISVPPNAPSNYTLTPVMCVKGSDDAENSTGCEKAGTVLKSKADVLFLFPSVTDSLPSGNKYPQLGLNFCTLLSVHSLTLTHTAGMWAMLGILCMSGMHIHTSTSISCPCICNLLFPCKNTS

SEQ ID NO: 767119 - protein, 2033 aa, Homo sapiens
MFKGLSKGSQGKGSPKGSPAKGSPKGSPSRHSRAATQELALLISRMQANADQVERDILETQKRLQQDRLNSEQSQALQHQQETGRSLKEAEVLLKDLFLDVDKARRLKHPQAEEIEKDIKQLHERVTQECAEYRALYEKMVLPPDVGPRVDWARVLEQKQKQVCAGQYGPGMAELEQQIAEHNILQKEIDAYGQQLRSLVGPDAATIRSQYRDLLKAASWRGQSLGSLYTHLQGCTRQLSALAEQQRRILQQDWSDLMADPAGVRREYEHFKQHELLSQEQSVNQLEDDGERMVELRHPAVGPIQAHQEALKMEWQNFLNLCICQETQLQHVEDYRRFQEEADSVSQTLAKLNSNLDAKYSPAPGGPPGAPTELLQQLEAEEKRLAVTERATGDLQRRSRDVAPLPQRRNPPQQPLHVDSICDWDSGEVQLLQGERYKLVDNTEPHAWVVQGPGGETKRAPAACFCIPAPDPDAVARASRLASELQALKQKLATVQSRLKASAVESLRPSQQAPSGSDLANPQAQKLLTQMTRLDGDLGQIERQVLAWARAPLSRPTPLEDLEGRIHSHEGTAQRLQSLGTEKETAQKECEAFLSTRPVGPAALQLPVALNSVKNKFSDVQVLCSLYGEKAKAALDLERQIQDADRVIRGFEATLVQEAPIPAEPGALQERVSELQRQRRELLEQQTCVLRLHRALKASEHACAALQNNFQEFCQDLPRQQRQVRALTDRYHAVGDQLDLREKVVQDAALTYQQFKNCKDNLSSWLEHLPRSQVRPSDGPSQIAYKLQAQKRLTQEIQSRERDRATASHLSQALQAALQDYELQADTYRCSLEPTLAVSAPKRPRVAPLQESIQAQEKNLAKAYTEVAAAQQQLLQQLEFARKMLEKKELSEDIRRTHDAKQGSESPAQAGRESEALKAQLEEERKRVARVQHELEAQRSQLLQLRTQRPLERLEEKEVVEFYRDPQLEGSLSRVKAQVEEEGKRRAGLQADLEVAAQKVVQLESKRKTMQPHLLTKEVTQVERDPGLDSQAAQLRIQIQQLRGEDAVISARLEGLKKELLALEKREVDVKEKVVVKEVVKVEKNLEMVKAAQALRLQMEEDAARRKQAEEAVAKLQARIEDLERAISSVEPKVIVKEVKKVEQDPGLLQESSRLRSLLEEERTKNATLARELSDLHSKYSVVEKQRPKVQLQERVHEIFQVDPETEQEITRLKAKLQEMAGKRSGVEKEVEKLLPDLEVLRAQKPTVEYKEVTQEVVRHERSPEVLREIDRLKAQLNELVNSHGRSQEQLIRLQGERDEWRRERAKVETKTVSKEVVRHEKDPVLEKEAERLRQEVREAAQKRRAAEDAVYELQSKRLLLERRKPEEKVVVQEVVVTQKDPKLREEHSRLSGSLDEEVGRRRQLELEVQQLRAGVEEQEGLLSFQEDRSKKLAVERELRQLTLRIQELEKRPPTVQEKIIMEEVVKLEKDPDLEKSTEALRWDLDQEKTQVTELNRECKNLQVQIDVLQKAKSQEKTIYKEVIRVQKDRVLEDERARVWEMLNRERTARQAREEEARRLRERIDRAETLGRTWSREESELQRARDQADQECGRLQQELRALERQKQQQTLQLQEESKLLSQKTESERQKAAQRGQELSRLEAAILREKDQIYEKERTLRDLHAKVSREELSQETQTRETNLSTKISILEPETGKDMSPYEAYKRGIIDRGQYLQLQELECDWEEVTTSGPCGEESVLLDRKSGKQYSIEAALRCRRISKEEYHLYKDGHLPISEFALLVAGETKPSSSLSIGSIISKSPLASPAPQSTSFFSPSFSLGLGDDSFPIAGIYDTTTDNKCSIKTAVAKNMLDPITGQKLLEAQAATGGIVDLLSRERYSVHKAMERGLIENTSTQRLLNAQKAFTGIEDPVTKKRLSVGEAVQKGWMPRESVLPHLQVQHLTGGLIDPKRTGRIPIQQALLSGMISEELAQLLQDESSYEKDLTDPISKERLSYKEAMGRCRKDPLSGLLLLPAALEGYRCYRSASPTVPRSLR

SEQ ID NO: 767120 - protein, 1166 aa, Homo sapiens
MELLISTAHPVLYPSSSLQKKELSEDIRRTHDAKQGSESPAQAGRESEALKAQLEEERKRVARVQHELEAQRSQLLQLRTQRPLERLEEKEVVEFYRDPQLEGSLSRVKAQVEEEGKRRAGLQADLEVAAQKVVQLESKRKTMQPHLLTKEVTQVERDPGLDSQAAQLRIQIQQLRGEDAVISARLEGLKKELLALEKREVDVKEKVVVKEVVKVEKNLEMVKAAQALRLQMEEDAARRKQAEEAVAKLQARIEDLERAISSVEPKVIVKEVKKVEQDPGLLQESSRLRSLLEEERTKNATLARELSDLHSKYSVVEKQRPKVQLQERVHEIFQVDPETEQEITRLKAKLQEMAGKRSGVEKEVEKLLPDLEVLRAQKPTVEYKEVTQEVVRHERSPEVLREIDRLKAQLNELVNSHGRSQEQLIRLQGERDEWRRERAKVETKTVSKEVVRHEKDPVLEKEAERLRQEVREAAQKRRAAEDAVYELQSKRLLLERRKPEEKVVVQEVVVTQKDPKLREEHSRLSGSLDEEVGRRRQLELEVQQLRAGVEEQEGLLSFQEDRSKKLAVERELRQLTLRIQELEKRPPTVQEKIIMEEVVKLEKDPDLEKSTEALRWDLDQEKTQVTELNRECKNLQVQIDVLQKAKSQEKTIYKEVIRVQKDRVLEDERARVWEMLNRERTARQAREEEARRLRERIDRAETLGRTWSREESELQRARDQADQECGRLQQELRALERQKQQQTLQLQEESKLLSQKTESERQKAAQRGQELSRLEAAILREKDQIYEKERTLRDLHAKVSREELSQETQTRETNLSTKISILEPETGKDMSPYEAYKRGIIDRGQYLQLQELECDWEEVTTSGPCGEESVLLDRKSGKQYSIEAALRCRRISKEEYHLYKDGHLPISEFALLVAGETKPSSSLSIGSIISKSPLASPAPQSTSFFSPSFSLGLGDDSFPIAGIYDTTTDNKCSIKTAVAKNMLDPITGQKLLEAQAATGGIVDLLSRERYSVHKAMERGLIENTSTQRLLNAQKAFTGIEDPVTKKRLSVGEAVQKGWMPRESVLPHLQVQHLTGGLIDPKRTGRIPIQQALLSGMISEELAQLLQDESSYEKDLTDPISKERLSYKEAMGRCRKDPLSGLLLLPAALEGYRCYRSASPTVPRSLR

SEQ ID NO: 767121 - protein, 1122 aa, Homo sapiens
MGPSRANQRGSEARNFARRVDNAAGQAGNEAEEIWPGESPMLQGRPEMRLGGLARESPMLQGRPEHEAGRFAQGAHHGLREGWKETQKVVQLESKRKTMQPHLLTKEVTQVERDPGLDSQAAQLRIQIQQLRGEDAVISARLEGLKKELLALEKREVDVKEKVVVKEVVKVEKNLEMVKAAQALRLQMEEDAARRKQAEEAVAKLQARIEDLERAISSVEPKVIVKEVKKVEQDPGLLQESSRLRSLLEEERTKNATLARELSDLHSKYSVVEKQRPKVQLQERVHEIFQVDPETEQEITRLKAKLQEMAGKRSGVEKEVEKLLPDLEVLRAQKPTVEYKEVTQEVVRHERSPEVLREIDRLKAQLNELVNSHGRSQEQLIRLQGERDEWRRERAKVETKTVSKEVVRHEKDPVLEKEAERLRQEVREAAQKRRAAEDAVYELQSKRLLLERRKPEEKVVVQEVVVTQKDPKLREEHSRLSGSLDEEVGRRRQLELEVQQLRAGVEEQEGLLSFQEDRSKKLAVERELRQLTLRIQELEKRPPTVQEKIIMEEVVKLEKDPDLEKSTEALRWDLDQEKTQVTELNRECKNLQVQIDVLQKAKSQEKTIYKEVIRVQKDRVLEDERARVWEMLNRERTARQAREEEARRLRERIDRAETLGRTWSREESELQRARDQADQECGRLQQELRALERQKQQQTLQLQEESKLLSQKTESERQKAAQRGQELSRLEAAILREKDQIYEKERTLRDLHAKVSREELSQETQTRETNLSTKISILEPETGKDMSPYEAYKRGIIDRGQYLQLQELECDWEEVTTSGPCGEESVLLDRKSGKQYSIEAALRCRRISKEEYHLYKDGHLPISEFALLVAGETKPSSSLSIGSIISKSPLASPAPQSTSFFSPSFSLGLGDDSFPIAGIYDTTTDNKCSIKTAVAKNMLDPITGQKLLEAQAATGGIVDLLSRERYSVHKAMERGLIENTSTQRLLNAQKAFTGIEDPVTKKRLSVGEAVQKGWMPRESVLPHLQVQHLTGGLIDPKRTGRIPIQQALLSGMISEELAQLLQDESSYEKDLTDPISKERLSYKEAMGRCRKDPLSGLLLLPAALEGYRCYRSASPTVPRSLR

SEQ ID NO: 767122 - protein, 1008 aa, Homo sapiens
MELLISTAHPVLYPSSSLQKDAVISARLEGLKKELLALEKREVDVKEKVVVKEVVKVEKNLEMVKAAQALRLQMEEDAARRKQAEEAVAKLQARIEDLERAISSVEPKVIVKEVKKVEQDPGLLQESSRLRSLLEEERTKNATLARELSDLHSKYSVVEKQRPKVQLQERVHEIFQVDPETEQEITRLKAKLQEMAGKRSGVEKEVEKLLPDLEVLRAQKPTVEYKEVTQEVVRHERSPEVLREIDRLKAQLNELVNSHGRSQEQLIRLQGERDEWRRERAKVETKTVSKEVVRHEKDPVLEKEAERLRQEVREAAQKRRAAEDAVYELQSKRLLLERRKPEEKVVVQEVVVTQKDPKLREEHSRLSGSLDEEVGRRRQLELEVQQLRAGVEEQEGLLSFQEDRSKKLAVERELRQLTLRIQELEKRPPTVQEKIIMEEVVKLEKDPDLEKSTEALRWDLDQEKTQVTELNRECKNLQVQIDVLQKAKSQEKTIYKEVIRVQKDRVLEDERARVWEMLNRERTARQAREEEARRLRERIDRAETLGRTWSREESELQRARDQADQECGRLQQELRALERQKQQQTLQLQEESKLLSQKTESERQKAAQRGQELSRLEAAILREKDQIYEKERTLRDLHAKVSREELSQETQTRETNLSTKISILEPETGKDMSPYEAYKRGIIDRGQYLQLQELECDWEEVTTSGPCGEESVLLDRKSGKQYSIEAALRCRRISKEEYHLYKDGHLPISEFALLVAGETKPSSSLSIGSIISKSPLASPAPQSTSFFSPSFSLGLGDDSFPIAGIYDTTTDNKCSIKTAVAKNMLDPITGQKLLEAQAATGGIVDLLSRERYSVHKAMERGLIENTSTQRLLNAQKAFTGIEDPVTKKRLSVGEAVQKGWMPRESVLPHLQVQHLTGGLIDPKRTGRIPIQQALLSGMISEELAQLLQDESSYEKDLTDPISKERLSYKEAMGRCRKDPLSGLLLLPAALEGYRCYRSASPTVPRSLR

SEQ ID NO: 767123 - protein, 703 aa, Homo sapiens
MVCAQEKLEQAEKKATDAEADVASLSRRFSWLRRKPEEKVVVQEVVVTQKDPKLREEHSRLSGSLDEEVGRRRQLELEVQQLRAGVEEQEGLLSFQEDRSKKLAVERELRQLTLRIQELEKRPPTVQEKIIMEEVVKLEKDPDLEKSTEALRWDLDQEKTQVTELNRECKNLQVQIDVLQKAKSQEKTIYKEVIRVQKDRVLEDERARVWEMLNRERTARQAREEEARRLRERIDRAETLGRTWSREESELQRARDQADQECGRLQQELRALERQKQQQTLQLQEESKLLSQKTESERQKAAQRGQELSRLEAAILREKDQIYEKERTLRDLHAKVSREELSQETQTRETNLSTKISILEPETGKDMSPYEAYKRGIIDRGQYLQLQELECDWEEVTTSGPCGEESVLLDRKSGKQYSIEAALRCRRISKEEYHLYKDGHLPISEFALLVAGETKPSSSLSIGSIISKSPLASPAPQSTSFFSPSFSLGLGDDSFPIAGIYDTTTDNKCSIKTAVAKNMLDPITGQKLLEAQAATGGIVDLLSRERYSVHKAMERGLIENTSTQRLLNAQKAFTGIEDPVTKKRLSVGEAVQKGWMPRESVLPHLQVQHLTGGLIDPKRTGRIPIQQALLSGMISEELAQLLQDESSYEKDLTDPISKERLSYKEAMGRCRKDPLSGLLLLPAALEGYRCYRSASPTVPRSLR

SEQ ID NO: 767124 - protein, 275 aa, Homo sapiens
GDGVTVETLDGHLPISEFALLVAGETKPSSSLSIGSIISKSPLASPAPQSTSFFSPSFSLGLGDDSFPIAGIYDTTTDNKCSIKTAVAKNMLDPITGQKLLEAQAATGGIVDLLSRERYSVHKAMERGLIENTSTQRLLNAQKAFTGIEDPVTKKRLSVGEAVQKGWMPRESVLPHLQVQHLTGGLIDPKRTGRIPIQQALLSGMISEELAQLLQDESSYEKDLTDPISKERLSYKEAMGRCRKDPLSGLLLLPAALEGYRCYRSASPTVPRSLR

SEQ ID NO: 767125 - protein, 1172 aa, Homo sapiens
MFKGLSKGSQGKGSPKGSPAKGSPKGSPSRHSRAATQELALLISRMQANADQVERDILETQKRLQQDRLNSEQSQALQHQQETGRSLKEAEVLLKDLFLDVDKARRLKHPQAEEIEKDIKQLHERVTQECAEYRALYEKMVLPPDVGPRVDWARVLEQKQKQVCAGQYGPGMAELEQQIAEHNILQKEIDAYGQQLRSLVGPDAATIRSQYRDLLKAASWRGQSLGSLYTHLQGCTRQLSALAEQQRRILQQDWSDLMADPAGVRREYEHFKQHELLSQEQSVNQLEDDGERMVELRHPAVGPIQAHQEALKMEWQNFLNLCICQETQLQHVEDYRRFQEEADSVSQTLAKLNSNLDAKYSPAPGGPPGAPTELLQQLEAEEKRLAVTERATGDLQRRSRDVAPLPQRRNPPQQPLHVDSICDWDSGEVQLLQGERYKLVDNTEPHAWVVQGPGGETKRAPAACFCIPAPDPDAVARASRLASELQALKQKLATVQSRLKASAVESLRPSQQAPSGSDLANPQAQKLLTQMTRLDGDLGQIERQVLAWARAPLSRPTPLEDLEGRIHSHEGTAQRLQSLGTEKETAQKECEAFLSTRPVGPAALQLPVALNSVKNKFSDVQVLCSLYGEKAKAALDLERQIQDADRVIRGFEATLVQEAPIPAEPGALQERVSELQRQRRELLEQQTCVLRLHRALKASEHACAALQNNFQEFCQDLPRQQRQVRALTDRYHAVGDQLDLREKVVQDAALTYQQFKNCKDNLSSWLEHLPRSQVRPSDGPSQIAYKLQAQKRLTQEIQSRERDRATASHLSQALQAALQDYELQADTYRCSLEPTLAVSAPKRPRVAPLQESIQAQEKNLAKAYTEVAAAQQQLLQQLEFARKMLEKKELSEDIRRTHDAKQGSESPAQAGRESEALKAQLEEERKRVARVQHELEAQRSQLLQLRTQRPLERLEEKEVVEFYRDPQLEGSLSRVKAQVEEEGKRRAGLQADLEVAAQKVVQLESKRKTMQPHLLTKEVTQVERDPGLDSQAAQLRIQIQQLRGEDAVISARLEGLKKELLALEKREVDVKEKVVVKEVVKVEKNLEMVKAAQALRLQMEEDAARRKQAEEAVAKLQARIEDLERAISSVEPKVIVKEVKKVEQDPGLLQESSRLRSLLEEERTIVATMVLS

SEQ ID NO: 767126 - protein, 933 aa, Homo sapiens
  misc_feature (930)..(930): Xaa can be any naturally occurring amino acid
MFKGLSKGSQGKGSPKGSPAKGSPKGSPSRHSRAATQELALLISRMQANADQVERDILETQKRLQQDRLNSEQSQALQHQQETGRSLKEAEVLLKDLFLDVDKARRLKHPQAEEIEKDIKQLHERVTQECAEYRALYEKMVLPPDVGPRVDWARVLEQKQKQVCAGQYGPGMAELEQQIAEHNILQKEIDAYGQQLRSLVGPDAATIRSQYRDLLKAASWRGQSLGSLYTHLQGCTRQLSALAEQQRRILQQDWSDLMADPAGVRREYEHFKQHELLSQEQSVNQLEDDGERMVELRHPAVGPIQAHQEALKMEWQNFLNLCICQETQLQHVEDYRRFQEEADSVSQTLAKLNSNLDAKYSPAPGGPPGAPTELLQQLEAEEKRLAVTERATGDLQRRSRDVAPLPQRRNPPQQPLHVDSICDWDSGEVQLLQGERYKLVDNTEPHAWVVQGPGGETKRAPAACFCIPAPDPDAVARASRLASELQALKQKLATVQSRLKASAVESLRPSQQAPSGSDLANPQAQKLLTQMTRLDGDLGQIERQVLAWARAPLSRPTPLEDLEGRIHSHEGTAQRLQSLGTEKETAQKECEAFLSTRPVGPAALQLPVALNSVKNKFSDVQVLCSLYGEKAKAALDLERQIQDADRVIRGFEATLVQEAPIPAEPGALQERVSELQRQRRELLEQQTCVLRLHRALKASEHACAALQNNFQEFCQDLPRQQRQVRALTDRYHAVGDQLDLREKVVQDAALTYQQFKNCKDNLSSWLEHLPRSQVRPSDGPSQIAYKLQAQKRLTQEIQSRERDRATASHLSQALQAALQDYELQADTYRCSLEPTLAVSAPKRPRVAPLQESIQAQEKNLAKAYTEVAAAQQQLLQQLEFARKMLEKKELSEDIRRTHDAKQGSESPAQAGRGRVRALGVSLKAQRKTLXKLR

SEQ ID NO: 767127 - protein, 88 aa, Homo sapiens
  misc_feature (1)..(1): Xaa can be any naturally occurring amino acid
XGLRNSARAQAAAMAGQEDPVQREIHQDWANREYIEIITSSIKKIADFLNSFDMSCRSRLATLNEKLTALERRIEYIEARVTKGETLT

SEQ ID NO: 767128 - protein, 88 aa, Homo sapiens; identical to SEQ ID NO: 767127
  misc_feature (1)..(1): Xaa can be any naturally occurring amino acid

SEQ ID NO: 767129 - protein, 147 aa, Homo sapiens [sequence omitted]

SEQ ID NO: 767130 - protein, 42 aa, Homo sapiens
QRLQWAKITPLHSSLGNRARLFRKESKQSWSPVCDYSVSESR

SEQ ID NO: 767131 - protein, 472 aa, Homo sapiens
MLYSIFHFGLMMEKKCTLYFLVLLPFFMILVTAELEESPEDSIQLGVTRNKIMTAQYECYQKIMQDPIQQAEGVYCNRTWDGWLCWNDVAAGTESMQLCPDYFQDFDPSEKVTKICDQDGNWFRHPASNRTWTNYTQCNVNTHEKVKTALNLFYLTIIGHGLSIASLLISLGIFFYFKSLSCQRITLHKNLFFSFVCNSVVTIIHLTAVANNQALVATNPVSCKVSQFIHLYLMGCNYFWMLCEGIYLHTLIVVAVFAEKQHLMWYYFLGWGFPLIPACIHAIARSLYYNDNCWISSDTHLLYIIHGPICAALLVNLFFLLNIVRVLITKLKVTHQAESNLYMKAVRATLILVPLLGIEFVLIPWRPEGKIAEEVYDYIMHILMHFQGLLVSTIFCFFNGEVQAILRRNWNQYKIQFGNSFSNSEALRSASYTVSTISDGPGYSHDCPSEHLNGKSIHDIENVLLKPENLYN

SEQ ID NO: 767132 - protein, 361 aa, Homo sapiens
MLYSIFHFGLMMEKKCTLYFLVLLPFFMILVTAELEESPEDSIQLGVTRNKIMTAQYECYQKIMQDPIQQAEGVYCNRTWDGWLCWNDVAAGTESMQLCPDYFQDFDPSEKVTKICDQDGNWFRHPASNRTWTNYTQCNVNTHEKVKTALNLFYLTIIGHGLSIASLLISLGIFFYFKSLSCQRITLHKNLFFSFVCNSVVTIIHLTAVANNQALVATNPVSCKVSQFIHLYLMGCNYFWMLCEGIYLHTLIVVAVFAEKQHLMWYYFLGWGFPLIPACIHAIARSLYYNDNCWISSDTHLLYIIHGPICAALLVNLFFLLNIVRVLITKLKVTHQAESNLYMKAVRATLILVPLMERYDN

SEQ ID NO: 767133 - protein, 472 aa, Homo sapiens; identical to SEQ ID NO: 767131

SEQ ID NO: 767134 - protein, 288 aa, Homo sapiens
RCVTCAMEPKVAELKQKIEDTLCPFGFEVYPFQVAWYNELLPPAFHLPLPGPTLAFLVLSTPAMFDRALKPFLQSCHLRMLTDPVDQCVAYHLGRVRESLPELQIEIIADYEVHPNRRPKILAQTAAHVAGAAYYYQRQDVEADPWGNQRISGVCIHPRFGGWFAIRGVVLLPGIEVPDLPPRKPHDCVPTRADRIALLEGFNFHWRDWTYRDAVTPQERYSEEQKAYFSTPPAQRLALLGLAQPSEKPSSPSPDLPFTTPAPKKPGNPSRARSWLSPRVSPPASPGP

SEQ ID NO: 767135 - protein, 893 aa, Homo sapiens
MDGAMGPRGLLLCMYLVSLLILQAMPALGSATGRSKSSEKRQAVDTAVDGVFIRSLKVNCKVTSRFAHYVVTSQVVNTANEAREVAFDLEIPKTAFISDFAVTADGNAFIGDIKDKVTAWKQYRKAAISGENAGLVRASGRTMEQFTIHLTVNPQSKVTFQLTYEEVLKRNHMQYEIVIKVKPKQLVHHFEIDVDIFEPQGISKLDAQASFLPKELAAQTIKKSFSGKKGHVLFRPTVSQQQSCPTCSTSLLNGHFKVTYDVTRDEICDLLVANNHFAHFFAPQNLTNMNKNVVFVIDISGSMRGQKVKQTKEALLKILGDMQPGDYFDLVLFGTRVQSWKGSLVQASEANLQAAQDFVRGFSLDEATNLNGGLLRGIEILNQVQESLPELSNHASILIMLTDGDPTEGVTDRSQILKNVRNAIRGRFPLYNLGFGHNVDFNFLEVMSMENNGRAQRIYEDHDATQQLQGFYSQVAKPLLVDVDLQYPQDAVLALTQNHHKQYYEGSEIVVAGRIADNKQSSFKADVQAHGEGQEFSITCLVDEEEMKKLLRERGHMLENHVERLWAYLTIQELLAKRMKVDREERANLSSQALQMSLDYGFVTPLTSMSIRGMADQDGLKPTIDKPSEDSPPLEMLGPRRTFVLSALQPSPTHSSSNTQRLPDRVTGVDTDPHFIIHVPQKEDTLCFNINEEPGVILSLVQDPNTGFSVNGQLIGNKARSPGQHDGTYFGRLGIANPATDFQLEVTPQNITLNPGFGGPVFSWRDQAVLRQDGVVVTINKKRNLVVSVDDGGTFEVVLHRVWKGSSVHQDFLGFYVLDSHRMSARTHGLLGQFFHPIGFEVSDIHPGSDPTKPDATMVGFAKRLQQGPVAWGRGVLLVHSQQWGWTHRWCLH

SEQ ID NO: 767136 - protein, 911 aa, Homo sapiens
MDGAMGPRGLLLCMYLVSLLILQAMPALGSATGRSKSSEKRQAVDTAVDGVFIRSLKVNCKVTSRFAHYVVTSQVVNTANEAREVAFDLEIPKTAFISDFAVTADGNAFIGDIKDKVTAWKQYRKAAISGENAGLVRASGRTMEQFTIHLTVNPQSKVTFQLTYEEVLKRNHMQYEIVIKVKPKQLVHHFEIDVDIFEPQGISKLDAQASFLPKELAAQTIKKSFSGKKGHVLFRPTVSQQQSCPTCSTSLLNGHFKVTYDVTRDEICDLLVANNHFAHFFAPQNLTNMNKNVVFVIDISGSMRGQKVKQTKEALLKILGDMQPGDYFDLVLFGTRVQSWKGSLVQASEANLQAAQDFVRGFSLDEATNLNGGLLRGIEILNQVQESLPELSNHASILIMLTDGDPTEGVTDRSQILKNVRNAIRGRFPLYNLGFGHNVDFNFLEVMSMENNGRAQRIYEDHDATQQLQGFYSQVAKPLLVDVDLQYPQDAVLALTQNHHKQYYEGSEIVVAGRIADNKQSSFKADVQAHGEGQEFSITCLVDEEEMKKLLRERGHMLENHVERLWAYLTIQELLAKRMKVDREERANLSSQALQMSLDYGFVTPLTSMSIRGMADQDGLKPTIDKPSEDSPPLEMLGPRRTFVLSALQPSPTHSSSNTQRLPDRVTGVDTDPHFIIHVPQKEDTLCFNINEEPGVILSLVQDPNTGFSVNGQLIGNKARSPGQHDGTYFGRLGIANPATDFQLEVTPQNITLNPGFGGPVFSWRDQAVLRQDGVVVTINKKRNLVVSVDDGGTFEVVLHRVWKGSSVHQDFLGFYVLDSHRMSARTHGLLGQFFHPIGFEVSDIHPGSDPTKPDATMVVRNRRLTVTRGLQKDYSKDPWHGAEVSCWFIHNNGAGLIDGAYTDYIVPDIF

SEQ ID NO: 767137 - protein, 157 aa, Homo sapiens
MQTAGALFISPALIRCCTRGLIRPVSASFLNSPVNSSKQPSYSNFPLQVARREFQTSVVSRDIDTAAKFIGAGAATVGVAGSGAGIGTVFGSLIIGYARNPSLKQQLFSYAILGFALSEAMGLFCLMGRLPHPLRHVRLHGGVTGLLLMEIETILGA

SEQ ID NO: 767138 - protein, 157 aa, Homo sapiens
MQTAGALFISPALIRCCTRGLIRPVSASFLNSPVNSSKQPSYSNFPLQVARREFQTSVVSRDIDTAAKFIGAGAATVGVAGSGAGIGTVFGSLIIGYARNPSLKQQLFSYAILGFALSEAMGLFCLMGRLPHPLRHVRLHGGVTGLLLMKSNTILGA

SEQ ID NO: 767139 - protein, 163 aa, Homo sapiens
FPRDHIQLFFPPKRPARLSINSSHRSLAGGTRSSATAQISTMKLLTGLVFCSLVLGVSSRSFFSFLGEAFDGARDMWRAYSDMREANYIGSDKYFHARGNYDAAKRGPGGVWAAEAISDARENIQRFFGHGAEDSLADQAANEWGRSGKDPNHFRPAGLPEKY

SEQ ID NO: 767140 - protein, 163 aa, Homo sapiens; identical to SEQ ID NO: 767139

SEQ ID NO: 767141 - protein, 147 aa, Homo sapiens
SSGINAEWPLRPGGTRSSATAQISTMKLLTGLVFCSLVLGVSSRSFFSFLGEAFDGARDMWRAYSDMREANYIGSDKYFHARGNYDAAKRGPGGVWAAEAISDARENIQRFFGHGAEDSLADQAANEWGRSGKDPNHFRPAGLPEKY

SEQ ID NO: 767142 - protein, 122 aa, Homo sapiens
MKLLTGLVFCSLVLGVSSRSFFSFLGEAFDGARDMWRAYSDMREANYIGSDKYFHARGNYDAAKRGPGGVWAAEAISDARENIQRFFGHGAEDSLADQAANEWGRSGKDPNHFRPAGLPEKY

SEQ ID NO: 767143 - protein, 122 aa, Homo sapiens; identical to SEQ ID NO: 767142

SEQ ID NO: 767144 - protein, 163 aa, Homo sapiens; identical to SEQ ID NO: 767139

SEQ ID NO: 767145 - protein, 122 aa, Homo sapiens; identical to SEQ ID NO: 767142

SEQ ID NO: 767146 - protein, 147 aa, Homo sapiens; identical to SEQ ID NO: 767141

SEQ ID NO: 767147 - protein, 145 aa, Homo sapiens
FPRDHIQLFFPPKRPARLSINSSHRSLAGGTRSSATAQISTMKLLTGLVFCSLVLGVSSRSFFSFLGEAFDGARDMWRAYSDMREANYIGSDKYFHARGNYDAAKRGPGGVWAAEAIRRCQREYPEILWPASAFRVDGVRPLSPS

SEQ ID NO: 767148 - protein, 169 aa, Homo sapiens
FPRDHIQLFFPPKRPARLSINSSHRSLAGGTRSSATAQISTMKLLTGLVFCSLVLGVSSRSFFSFLGEAFDGARDMWRAYSDMREANYIGSDKYFHARGNYDAAKRGPGGVWAAEAIRRCQSSDVEDEVEDERYDEEEEAERDRLNIKSPFSLSHVPHGKKKLHGEYKN

SEQ ID NO: 767149 - protein, 186 aa, Homo sapiens
FPRDHIQLFFPPKRPARLSINSSHRSLAGGTRSSATAQISTMKLLTGLVFCSLVLGVSSRSFFSFLGEAFDGARDMWRAYSDMREANYIGSDKYFHARGNYDAAKRGPGGVWAAEAISLVSQYFQTVTDYGKDLMEKVKSPELQAEAKSYFEKSKEQLTPLIKKAGTELVNFLSYFVELGTQPATQ

SEQ ID NO: 767150 - protein, 109 aa, Homo sapiens
FPRDHIQLFFPPKRPARLSINSSHRSLAGGTRSSATAQISTMKLLTGLVFCSLVLGVSSRSFFSFLGEAFDGARDMWRAYSDMREANYIGSDKSRPPGAQEILPLQPLE

SEQ ID NO: 767151 - protein, 95 aa, Homo sapiens
MPNKRCGRAGARGSKRRQKEEHRRGDHTQDKEPRDESREGGHQHTHRKKARRREDKRKVYSHNHKTRRDVRRKKQSERKRKSGQTDKAYTQKQPR

SEQ ID NO: 767152 - protein, 163 aa, Homo sapiens; identical to SEQ ID NO: 767139

SEQ ID NO: 767153 - protein, 122 aa, Homo sapiens; identical to SEQ ID NO: 767142

SEQ ID NO: 767154 - protein, 122 aa, Homo sapiens; identical to SEQ ID NO: 767142

SEQ ID NO: 767155 - protein, 129 aa, Homo sapiens
SFTGAPGVFSWAPLWGPLGVWFQRSRSFFSFLGEAFDGARDMWRAYSDMREANYIGSDKYFHARGNYDAAKRGPGGVWAAEAISDARENIQRFFGHGAEDSLADQAANEWGRSGKDPNHFRPAGLPEKY

SEQ ID NO: 767156 - protein, 148 aa, Homo sapiens
FPRDHIQLFFPPKRPARLSINSSHRSLAGGTRSSATAQISTMKLLTGLVFCSLVLGVSSRSFFSFLGEAFDGARDMWRAYSDMREANYIGSDKYFHARGNYDAAKRGPGGVWAAEAISDARENIQRFFGHGAEDSLADQAANEWSLVP

SEQ ID NO: 767157 - protein, 97 aa, Homo sapiens
  misc_feature (78)..(78): Xaa can be any naturally occurring amino acid
MKLLTGLVFCSLVLGVSSRSFFSFLGEAFDGARDMWRAYSDMREANYIGSDKYFHARGNYDAAKRGPGGVWAAEAIRXQLPGFQTLTSTTLTLSRQF

SEQ ID NO: 767158 - protein, 112 aa, Homo sapiens [sequence omitted]

SEQ ID NO: 767159 - protein, 112 aa, Homo sapiens [sequence omitted]

SEQ ID NO: 767160 - protein, 1723 aa, Homo sapiens
MREKEQEREEQLMEDKKRKKEDKKKKEATQKVTEQKTKVPEVTKPSLSQPTAASPIGSSPSPPVNGGNNAKRVAVPNGQPPSAARYMPREVPPRFRCQQDHKVLLKRGQPPPPSCMLLGGGAGPPPCTAPGANPNNAQVTGALLQSESGTAPDSTLGGAAASNYANSTWGSGASSNNGTSPNPIHIWDKVIVDGSDMEEWPCIASKDTESSSENTTDNNSASNPGSEKSTLPGSTTSNKGKGSQCQSASSGNECNLGVWKSDPKAKSVQSSNSTTENNNGLGNWRNVSGQDRIGPGSGFSNFNPNSNPSAWPALVQEGTSRKGALETDNSNSSAQVSTVGQTSREQQSKMENAGVNFVVSGREQAQIHNTDGPKNGNTNSLNLSSPNPMENKGMPFGMGLGNTSRSTDAPSQSTGDRKTGSVGSWGAARGPSGTDTVSGQSNSGNNGNNGKEREDSWKGASVQKSTGSKNDSWDNNNRSTGGSWNFGPQDSNDNKWGEGNKMTSGVSQGEWKQPTGSDELKIGEWSGPNQPNSSTGAWDNQKGHPLPENQGNAQAPCWGRSSSSTGSEVGGQSTGSNHKAGSSDSHNSGRRSYRPTHPDCQAVLQTLLSRTDLDPRVLSNTGWGQTQIKQDTVWDIEEVPRPEGKSDKGTEGWESAATQTKNSGGWGDAPSQSNQMKSGWGELSASTEWKDPKNTGGWNDYKNNNSSNWGGGRPDEKTPSSWNENPSKDQGWGGGRQPNQGWSSGKNGWGEEVDQTKNSNWESSASKPVSGWGEGGQNEIGTWGNGGNASLASKGGWEDCKRSPAWNETGRQPNSWNKQHQQQQPPQQPPPPQPEASGSWGGPPPPPPGNVRPSNSSWSSGPQPATPKDEEPSGWEEPSPQSISRKMDIDDGTSAWGDPNSYNYKNVNLWDKNSQGGPAPREPNLPTPMTSKSASDSKSMQDGWGESDGPVTGARHPSWEEEEDGGVWNTTGSQGSASSHNSASWGQGGKKQMKCSLKGGNNDSWMNPLAKQFSNMGLLSQTEDNPSSKMDLSVGSLSDKKFDVDKRAMNLGDFNDIMRKDRSGFRPPNSKDMGTTDSGPYFEKGGSHGLFGNSTAQSRGLHTPVQPLNSSPSLRAQVPPQFISPQVSASMLKQFPNSGLSPGLFNVGPQLSPQQIAMLSQLPQIPQFQLACQLLLQQQQQQQLLQNQRKISQAVRQQQEQQLARMVSALQQQQQQQQRQPGMKHSPSHPVGPKPHLDNMVPNALNVGLPDLQTKGPIPGYGSGFSSGGMDYGMVGGKEAGTESRFKQWTSMMEGLPSVATQEANMHKNGAIVAPGKTRGGSPYNQFDIIPGDTLGGHTGPAGDSWLPAKSPPTNKIGSKSSNASWPPEFQPGVPWKGIQNIDPESDPYVTPGSVLGGTATSPIVDTDHQLLRDNTTGSNSSLNTSLPSPGAWPYSASDNSFTNVHSTSAKFPDYKSTWSPDPIGHNPTHLSNKMWKNHISSRNTTPLPRPPPGLTNPKPSSPWSSTAPRSVRGWGTQDSRLASASTWSDGGSVRPSYWLVLHNLTPQIDGSTLRTICMQHGPLLTFHLNLTQGTALIRYSTKQEAAKAQTALHMCVLGNTTILAEFATDDEVSRFLAQAQPPTPAATPSAPAAGWQSLETGQNQSDPVGPALNLFGGSTGLGQWSSSAGGSSGADLAGASLWGPPNYSSSLWGVPTVEDPHRMGSPAPLLPGDLLGGGSDSI

SEQ ID NO: 767161 - protein, 1759 aa, Homo sapiens
MQTNEGEVSEESSSKVEQEDFVMEGHGKTPPPGEESKQEKEQEREEQLMEDKKRKKEDKKKKEATQKVTEQKTKVPEVTKPSLSQPTAASPIGSSPSPPVNGGNNAKRVAVPNGQPPSAARYMPREVPPRFRCQQDHKVLLKRGQPPPPSCMLLGGGAGPPPCTAPGANPNNAQVTGALLQSESGTAPDSTLGGAAASNYANSTWGSGASSNNGTSPNPIHIWDKVIVDGSDMEEWPCIASKDTESSSENTTDNNSASNPGSEKSTLPGSTTSNKGKGSQCQSASSGNECNLGVWKSDPKAKSVQSSNSTTENNNGLGNWRNVSGQDRIGPGSGFSNFNPNSNPSAWPALVQEGTSRKGALETDNSNSSAQVSTVGQTSREQQSKMENAGVNFVVSGREQAQIHNTDGPKNGNTNSLNLSSPNPMENKGMPFGMGLGNTSRSTDAPSQSTGDRKTGSVGSWGAARGPSGTDTVSGQSNSGNNGNNGKEREDSWKGASVQKSTGSKNDSWDNNNRSTGGSWNFGPQDSNDNKWGEGNKMTSGVSQGEWKQPTGSDELKIGEWSGPNQPNSSTGAWDNQKGHPLPENQGNAQAPCWGRSSSSTGSEVGGQSTGSNHKAGSSDSHNSGRRSYRPTHPDCQAVLQTLLSRTDLDPRVLSNTGWGQTQIKQDTVWDIEEVPRPEGKSDKGTEGWESAATQTKNSGGWGDAPSQSNQMKSGWGELSASTEWKDPKNTGGWNDYKNNNSSNWGGGRPDEKTPSSWNENPSKDQGWGGGRQPNQGWSSGKNGWGEEVDQTKNSNWESSASKPVSGWGEGGQNEIGTWGNGGNASLASKGGWEDCKRSPAWNETGRQPNSWNKQHQQQQPPQQPPPPQPEASGSWGGPPPPPPGNVRPSNSSWSSGPQPATPKDEEPSGWEEPSPQSISRKMDIDDGTSAWGDPNSYNYKNVNLWDKNSQGGPAPREPNLPTPMTSKSASDSKSMQDGWGESDGPVTGARHPSWEEEEDGGVWNTTGSQGSASSHNSASWGQGGKKQMKCSLKGGNNDSWMNPLAKQFSNMGLLSQTEDNPSSKMDLSVGSLSDKKFDVDKRAMNLGDFNDIMRKDRSGFRPPNSKDMGTTDSGPYFEKGGSHGLFGNSTAQSRGLHTPVQPLNSSPSLRAQVPPQFISPQVSASMLKQFPNSGLSPGLFNVGPQLSPQQIAMLSQLPQIPQFQLACQLLLQQQQQQQLLQNQRKISQAVRQQQEQQLARMVSALQQQQQQQQRQPGMKHSPSHPVGPKPHLDNMVPNALNVGLPDLQTKGPIPGYGSGFSSGGMDYGMVGGKEAGTESRFKQWTSMMEGLPSVATQEANMHKNGAIVAPGKTRGGSPYNQFDIIPGDTLGGHTGPAGDSWLPAKSPPTNKIGSKSSNASWPPEFQPGVPWKGIQNIDPESDPYVTPGSVLGGTATSPIVDTDHQLLRDNTTGSNSSLNTSLPSPGAWPYSASDNSFTNVHSTSAKFPDYKSTWSPDPIGHNPTHLSNKMWKNHISSRNTTPLPRPPPGLTNPKPSSPWSSTAPRSVRGWGTQDSRLASASTWSDGGSVRPSYWLVLHNLTPQIDGSTLRTICMQHGPLLTFHLNLTQGTALIRYSTKQEAAKAQTALHMCVLGNTTILAEFATDDEVSRFLAQAQPPTPAATPSAPAAGWQSLETGQNQSDPVGPALNLFGGSTGLGQWSSSAGGSSGADLAGASLWGPPNYSSSLWGVPTVEDPHRMGSPAPLLPGDLLGGGSDSI

SEQ ID NO: 767162 - protein, 1759 aa, Homo sapiens; identical to SEQ ID NO: 767161

SEQ ID NO: 767163 - protein, 1700 aa, Homo sapiens
MQTNEGEVSEESSSKVEQEDFVMEGHGKTPPPGEESKQEKEQEREEQLMEDKKRKKEDKKKKEATQKVTEQKTKVPEVTKPSLSQPTAASPIGSSPSPPVNGGNNAKRVAVPNGQPPSAARYMPREVPPRFRCQQDHKVLLKRGQPPPPSCMLLGGGAGPPPCTAPGANPNNAQVTGALLQSESGTAPDSTLGGAAASNYANSTWGSGASSNNGTSPNPIHIWDKVIVDGSDMEEWPCIASKDTESSSENTTDNNSASNPGSEKSTLPGSTTSNKGKGSQCQSASSGNECNLGVWKSDPKAKSVQSSNSTTENNNGLGNWRNVSGQDRIGPGSGFSNFNPNSNPSAWPALVQEGTSRKGALETDNSNSSAQVSTVGQTSREQQSKMENAGVNFVVSGREQAQIHNTDGPKNGNTNSLNLSSPNPMENKGMPFGMGLGNTSRSTDAPSQSTGDRKTGSVGSWGAARGPSGTDTVSGQSNSGNNGNNGKEREDSWKGASVQKSTGSKNDSWDNNNRSTGGSWNFGPQDSNDNKWGEGNKMTSGVSQGEWKQPTGSDELKIGEWSGPNQPNSSTGAWDNQKGHPLPENQGNAQAPCWGRSSSSTGSEVGGQSTGSNHKAGSSDSHNSGRRSYRPTHPDCQAVLQTLLSRTDLDPRVLSNTGWGQTQIKQDTVWDIEEVPRPEGKSDKGTEGWESAATQTKNSGGWGDAPSQSNQMKSGWGELSASTEWKDPKNTGGWNDYKNNNSSNWGGGRPDEKTPSSWNENPSKDQGWGGGRQPNQGWSSGKNGWGEEVDQTKNSNWESSASKPVSGWGEGGQNEIGTWGNGGNASLASKGGWEDCKRSPAWNETGRQPNSWNKQHQQQQPPQQPPPPQPEASGSWGGPPPPPPGNVRPSNSSWSSGPQPATPKDEEPSGWEEPSPQSISRKMDIDDGTSAWGDPNSYNYKNVNLWDKNSQGGPAPREPNLPTPMTSKSASDSKSMQDGWGESDGPVTGARHPSWEEEEDGGVWNTTGSQGSASSHNSASWGQGGKKQMKCSLKGGNNDSWMNPLAKQFSNMGLLSQTEDNPSSKMDLSVGSLSDKKFDVDKRAMNLGDFNDIMRKDRSGFRPPNSKDMGTTDSGPYFEKGGSHGLFGNSTAQSRGLHTPVQPLNSSPSLRAQVPPQFISPQVSASMLKQFPNSGLSPGLFNVGPQLSPQQIAMLSQLPQIPQFQLACQLLLQQQQQQQLLQNQRKISQAVRQQQEQQLARMVSALQQQQQQQQRQPGMKHSPSHPVGPKPHLDNMVPNALNVGLPDLQTKGPIPGYGSGFSSGGMDYGMVGGKEAGTESRFKQWTSMMEGLPSVATQEANMHKNEFQPGVPWKGIQNIDPESDPYVTPGSVLGGTATSPIVDTDHQLLRDNTTGSNSSLNTSLPSPGAWPYSASDNSFTNVHSTSAKFPDYKSTWSPDPIGHNPTHLSNKMWKNHISSRNTTPLPRPPPGLTNPKPSSPWSSTAPRSVRGWGTQDSRLASASTWSDGGSVRPSYWLVLHNLTPQIDGSTLRTICMQHGPLLTFHLNLTQGTALIRYSTKQEAAKAQTALHMCVLGNTTILAEFATDDEVSRFLAQAQPPTPAATPSAPAAGWQSLETGQNQSDPVGPALNLFGGSTGLGQWSSSAGGSSGADLAGASLWGPPNYSSSLWGVPTVEDPHRMGSPAPLLPGDLLGGGSDSI

SEQ ID NO: 767164 - protein, 656 aa, Homo sapiens
LGAIGTGLNPQNFAARQGGSHGLFGNSTAQSRGLHTPVQPLNSSPSLRAQVPPQFISPQVSASMLKQFPNSGLSPGLFNVGPQLSPQQIAMLSQLPQIPQFQLACQLLLQQQQQQQLLQNQRKISQAVRQQQEQQLARMVSALQQQQQQQQRQPGMKHSPSHPVGPKPHLDNMVPNALNVGLPDLQTKGPIPGYGSGFSSGGMDYGMVGGKEAGTESRFKQWTSMMEGLPSVATQEANMHKNGAIVAPGKTRGGSPYNQFDIIPGDTLGGHTGPAGDSWLPAKSPPTNKIGSKSSNASWPPEFQPGVPWKGIQNIDPESDPYVTPGSVLGGTATSPIVDTDHQLLRDNTTGSNSSLNTSLPSPGAWPYSASDNSFTNVHSTSAKFPDYKSTWSPDPIGHNPTHLSNKMWKNHISSRNTTPLPRPPPGLTNPKPSSPWSSTAPRSVRGWGTQDSRLASASTWSDGGSVRPSYWLVLHNLTPQIDGSTLRTICMQHGPLLTFHLNLTQGTALIRYSTKQEAAKAQTALHMCVLGNTTILAEFATDDEVSRFLAQAQPPTPAATPSAPAAGWQSLETGQNQSDPVGPALNLFGGSTGLGQWSSSAGGSSGADLAGASLWGPPNYSSSLWGVPTVEDPHRMGSPAPLLPGDLLGGGSDSI

SEQ ID NO: 767165 - protein, 814 aa, Homo sapiens
LHLQGIIILMIVLYSCCKELIHSFLKDSKSMQDGWGESDGPVTGARHPSWEEEEDGGVWNTTGSQGSASSHNSASWGQGGKKQMKCSLKGGNNDSWMNPLAKQFSNMGLLSQTEDNPSSKMDLSVGSLSDKKFDVDKRAMNLGDFNDIMRKDRSGFRPPNSKDMGTTDSGPYFEKGGSHGLFGNSTAQSRGLHTPVQPLNSSPSLRAQVPPQFISPQVSASMLKQFPNSGLSPGLFNVGPQLSPQQIAMLSQLPQIPQFQLACQLLLQQQQQQQLLQNQRKISQAVRQQQEQQLARMVSALQQQQQQQQRQPGMKHSPSHPVGPKPHLDNMVPNALNVGLPDLQTKGPIPGYGSGFSSGGMDYGMVGGKEAGTESRFKQWTSMMEGLPSVATQEANMHKNGAIVAPGKTRGGSPYNQFDIIPGDTLGGHTGPAGDSWLPAKSPPTNKIGSKSSNASWPPEFQPGVPWKGIQNIDPESDPYVTPGSVLGGTATSPIVDTDHQLLRDNTTGSNSSLNTSLPSPGAWPYSASDNSFTNVHSTSAKFPDYKSTWSPDPIGHNPTHLSNKMWKNHISSRNTTPLPRPPPGLTNPKPSSPWSSTAPRSVRGWGTQDSRLASASTWSDGGSVRPSYWLVLHNLTPQIDGSTLRTICMQHGPLLTFHLNLTQGTALIRYSTKQEAAKAQTALHMCVLGNTTILAEFATDDEVSRFLAQAQPPTPAATPSAPAAGWQSLETGQNQSDPVGPALNLFGGSTGLGQWSSSAGGSSGADLAGASLWGPPNYSSSLWGVPTVEDPHRMGSPAPLLPGDLLGGGSDSI

SEQ ID NO: 767166 - protein, 1639 aa, Homo sapiens
MQTNEGEVSEESSSKVEQEDFVMEGHGKTPPPGEESKQEKEQEREEQLMEDKKRKKEDKKKKEATQKVTEQKTKVPEVTKPSLSQPTAASPIGSSPSPPVNGGNNAKRVAVPNGQPPSAARYMPREVPPRFRCQQDHKVLLKRGQPPPPSCMLLGGGAGPPPCTAPGANPNNAQVTGALLQSESGTAPDSTLGGAAASNYANSTWGSGASSNNGTSPNPIHIWDKVIVDGSDMEEWPCIASKDTESSSENTTDNNSASNPGSEKSTLPGSTTSNKGKGSQCQSASSGNECNLGVWKSDPKAKSVQSSNSTTENNNGLGNWRNVSGQDRIGPGSGFSNFNPNSNPSAWPALVQEGTSRKGALETDNSNSSAQVSTVGQTSREQQSKMENAGVNFVVSGREQAQIHNTDGPKNGNTNSLNLSSPNPMENKGMPFGMGLGNTSRSTDAPSQSTGDRKTGSVGSWGAARGPSGTDTVSGQSNSGNNGNNGKEREDSWKGASVQKSTGSKNDSWDNNNRSTGGSWNFGPQDSNDNKWGEGNKMTSGVSQGEWKQPTGSDELKIGEWSGPNQPNSSTGAWDNQKGHPLPENQGNAQAPCWGRSSSSTGSEVGGQSTGSNHKAGSSDSHNSGRRSYRPTHPDCQAVLQTLLSRTDLDPRVLSNTGWGQTQIKQDTVWDIEEVPRPEGKSDKGTEGWESAATQTKNSGGWGDAPSQSNQMKSGWGELSASTEWKDPKNTGGWNDYKNNNSSNWGGGRPDEKTPSSWNENPSKDQGWGGGRQPNQGWSSGKNGWGEEVDQTKNSNWESSASKPVSGWGEGGQNEIGTWGNGGNASLASKGGWEDCKRSPAWNETGRQPNSWNKQHQQQQPPQQPPPPQPEASGSWGGPPPPPPGNVRPSNSSWSSGPQPATPKDEEPSGWEEPSPQSISRKMDIDDGTSAWGDPNSYNYKNVNLWDKNSQGGPAPREPNLPTPMTSKSASDSKSMQDGWGESDGPVTGARHPSWEEEEDGGVWNTTGSQGSASSHNSASWGQGGKKQMKCSLKGGNNDSWMNPLAKQFSNMGLLSQTEDNPSSKMDLSVGSLSDKKFDVDKRAMNLGDFNDIMRKDRSGFRPPNSKDMGTTDSGPYFEKGGSHGLFGNSTAQSRGLHTPVQPLNSSPSLRAQVPPQFISPQVSASMLKQFPNSGLSPGLFNVGPQLSPQQIAMLSQLPQIPQFQLACQLLLQQQQQQQLLQNQRKISQAVRQQQEQQLARMVSALQQQQQQQQRQPGMKHSPSHPVGPKPHLDNMVPNALNVGLPDLQTKGPIPGYGSGFSSGGMDYGMVLGGTATSPIVDTDHQLLRDNTTGSNSSLNTSLPSPGAWPYSASDNSFTNVHSTSAKFPDYKSTWSPDPIGHNPTHLSNKMWKNHISSRNTTPLPRPPPGLTNPKPSSPWSSTAPRSVRGWGTQDSRLASASTWSDGGSVRPSYWLVLHNLTPQIDGSTLRTICMQHGPLLTFHLNLTQGTALIRYSTKQEAAKAQTALHMCVLGNTTILAEFATDDEVSRFLAQAQPPTPAATPSAPAAGWQSLETGQNQSDPVGPALNLFGGSTGLGQWSSSAGGSSGADLAGASLWGPPNYSSSLWGVPTVEDPHRMGSPAPLLPGDLLGGGSDSI

SEQ ID NO: 767167 - protein, 249 aa, Homo sapiens
MWKNHISSRNTTPLPRPPPGLTNPKPSSPWSSTAPRSVRGWGTQDSRLASASTWSDGGSVRPSYWLVLHNLTPQIDGSTLRTICMQHGPLLTFHLNLTQGTALIRYSTKQEAAKAQTALHMCVLGNTTILAEFATDDEVSRFLAQAQPPTPAATPSAPAAGWQSLETGQNQSDPVGPALNLFGGSTGLGQWSSSAGGSSGADLAGASLWGPPNYSSSLWGVPTVEDPHRMGSPAPLLPGDLLGGGSDSI

SEQ ID NO: 767168 - protein, 1759 aa, Homo sapiens; identical to SEQ ID NO: 767161

SEQ ID NO: 767169 - protein, 985 aa, Homo sapiens
MQTNEGEVSEESSSKVEQEDFVMEGHGKTPPPGEESKQEKEQEREEQLMEDKKRKKEDKKKKEATQKVTEQKTKVPEVTKPSLSQPTAASPIGSSPSPPVNGGNNAKRVAVPNGQPPSAARYMPREVPPRFRCQQDHKVLLKRGQPPPPSCMLLGGGAGPPPCTAPGANPNNAQVTGALLQSESGTAPDSTLGGAAASNYANSTWGSGASSNNGTSPNPIHIWDKVIVDGSDMEEWPCIASKDTESSSENTTDNNSASNPGSEKSTLPGSTTSNKGKGSQCQSASSGNECNLGVWKSDPKAKSVQSSNSTTENNNGLGNWRNVSGQDRIGPGSGFSNFNPNSNPSAWPALVQEGTSRKGALETDNSNSSAQVSTVGQTSREQQSKMENAGVNFVVSGREQAQIHNTDGPKNGNTNSLNLSSPNPMENKGMPFGMGLGNTSRSTDAPSQSTGDRKTGSVGSWGAARGPSGTDTVSGQSNSGNNGNNGKEREDSWKGASVQKSTGSKNDSWDNNNRSTGGSWNFGPQDSNDNKWGEGNKMTSGVSQGEWKQPTGSDELKIGEWSGPNQPNSSTGAWDNQKGHPLPENQGNAQAPCWGRSSSSTGSEVGGQSTGSNHKAGSSDSHNSGRRSYRPTHPDCQAVLQTLLSRTDLDPRVLSNTGWGQTQIKQDTVWDIEEVPRPEGKSDKGTEGWESAATQTKNSGGWGDAPSQSNQMKSGWGELSASTEWKDPKNTGGWNDYKNNNSSNWGGGRPDEKTPSSWNENPSKDQGWGGGRQPNQGWSSGKNGWGEEVDQTKNSNWESSASKPVSGWGEGGQNEIGTWGNGGNASLASKGGWEDCKRSPAWNETGRQPNSWNKQHQQQQPPQQPPPPQPEASGSWGGPPPPPPGNVRPSNSSWSSGPQPATPKDEEPSGWEEPSPQSISRKMDIDDGTSAWGDPNSYNYKNVNLWDKNSQGGPAPREPNLPTPMTSKSASVWSKSTPPAPDNGT

SEQ ID NO: 767170 - protein, 1234 aa, Homo sapiens
MAGAQPGVHALQLEPPTVVETLRRGSKFIKWDEETSSRNLVTLRVDPNGFFLYWTGPNMEVDTLDISSIRDTRTGRYARLPKDPKIREVLGFGGPDARLEEKLMTVVSGPDPVNTVFLNFMAVQDDTAKVWSEELFKLAMNILAQNASRNTFLRKAYTKLKLQVNQDGRIPVKNILKMFSADKKRVETALESCGLKFNRSESIRPDEFSLEIFERFLNKLCLRPDIDKILLEIGAKGKPYLTLEQLMDFINQKQRDPRLNEVLYPPLRPSQARLLIEKYEPNQQFLERDQMSMEGFSRYLGGEENGILPLEALDLSTDMTQPLSAYFINSSHNTYLTAGQLAGTSSVEMYRQALLWGCRCVELDVWKGRPPEEEPFITHGFTMTTEVPLRDVLEAIAETAFKTSPYPVILSFENHVDSAKQQAKMAEYCRSIFGDALLIEPLDKYPLAPGVPLPSPQDLMGRILVKNKKRHRPSAGGPDSAGRKRPLEQSNSALSESSAATEPSSPQLGSPSSDSCPGLSNGEEVGLEKPSLEPQKSLGDEGLNRGPYVLGPADREDEEEDEEEEEQTDPKKPTTDEGTASSEVNATEEMSTLVNYIEPVKFKSFEAARKRNKCFEMSSFVETKAMEQLTKSPMEFVEYNKQQLSRIYPKGTRVDSSNYMPQLFWNVGCQLVALNFQTLDVAMQLNAGVFEYNGRSGYLLKPEFMRRPDKSFDPFTEVIVDGIVANALRVKVISGQFLSDRKVGIYVEVDMFGLPVDTRRKYRTRTSQGNSFNPVWDEEPFDFPKVVLPTLASLRIAAFEEGGKFVGHRILPVSAIRSGYHYVCLRNEANQPLCLPALLIYTEASDYIPDDHQDYAEALINPIKHVSLMDQRARQLAALIGESEAQAGQETCQDTQSQQLGSQPSSNPTPSPLDASPRRPPGPTTSPASTSLSSPGQRDDLIASILSEVAPTPLDELRGHKALVKLRSRQERDLRELRKKHQRKAVTLTRRLLDGLAQAQAEGRCRLRPGALGGAADVEDTKEGEDEAKRYQEFQNRQVQSLLELREAQVDAEAQRRLEHLRQALQRLREVVLDANTTQFKRLKEMNEREKKELQKILDRKRHNSISEAKMRDKHKKEAELTEINRRHITESVNSIRRLEEAQKQRHDRLVAGQQQVLQQLAEEEPKLLAQLAQECQEQRARLPQEIRRSLLGEMPEGLGDGPLVACASNGHAPGSSGHLSGADSESQEENTQL

SEQ ID NO: 767171 - protein, 1234 aa, Homo sapiens; identical to SEQ ID NO: 767170

SEQ ID NO: 767172 - protein, 1234 aa, Homo sapiens; identical to SEQ ID NO: 767170

SEQ ID NO: 767173 - protein, 791 aa, Homo sapiens
MTPLNPYWVNTICPRPLGLSPSHTALRVPLEFPTESPRHTLGKTPPDFLSSCVVLTPHPVALSSAGSPSSDSCPGLSNGEEVGLEKPSLEPQKSLGDEGLNRGPYVLGPADREDEEEDEEEEEQTDPKKPTTDEGTASSEVNATEEMSTLVNYIEPVKFKSFEAARKRNKCFEMSSFVETKAMEQLTKSPMEFVEYNKQQLSRIYPKGTRVDSSNYMPQLFWNVGCQLVALNFQTLDVAMQLNAGVFEYNGRSGYLLKPEFMRRPDKSFDPFTEVIVDGIVANALRVKVISGQFLSDRKVGIYVEVDMFGLPVDTRRKYRTRTSQGNSFNPVWDEEPFDFPKVVLPTLASLRIAAFEEGGKFVGHRILPVSAIRSGYHYVCLRNEANQPLCLPALLIYTEASDYIPDDHQDYAEALINPIKHVSLMDQRARQLAALIGESEAQAGQETCQDTQSQQLGSQPSSNPTPSPLDASPRRPPGPTTSPASTSLSSPGQRDDLIASILSEVAPTPLDELRGHKALVKLRSRQERDLRELRKKHQRKAVTLTRRLLDGLAQAQAEGRCRLRPGALGGAADVEDTKEGEDEAKRYQEFQNRQVQSLLELREAQVDAEAQRRLEHLRQALQRLREVVLDANTTQFKRLKEMNEREKKELQKILDRKRHNSISEAKMRDKHKKEAELTEINRRHITESVNSIRRLEEAQKQRHDRLVAGQQQVLQQLAEEEPKLLAQLAQECQEQRARLPQEIRRSLLGEMPEGLGDGPLVACASNGHAPGSSGHLSGADSESQEENTQL

SEQ ID NO: 767174 - protein, 1088 aa, Homo sapiens
TRNLRAAAVSSLAGCQGNTDLAKTHLGRDPGRGTCHTFEICVLNEPDKQTEGDSESIRPDEFSLEIFERFLNKLCLRPDIDKILLEIGAKGKPYLTLEQLMDFINQKQRDPRLNEVLYPPLRPSQARLLIEKYEPNQQFLERDQMSMEGFSRYLGGEENGILPLEALDLSTDMTQPLSAYFINSSHNTYLTAGQLAGTSSVEMYRQALLWGCRCVELDVWKGRPPEEEPFITHGFTMTTEVPLRDVLEAIAETAFKTSPYPVILSFENHVDSAKQQAKMAEYCRSIFGDALLIEPLDKYPLAPGVPLPSPQDLMGRILVKNKKRHRPSAGGPDSAGRKRPLEQSNSALSESSAATEPSSPQLGSPSSDSCPGLSNGEEVGLEKPSLEPQKSLGDEGLNRGPYVLGPADREDEEEDEEEEEQTDPKKPTTDEGTASSEVNATEEMSTLVNYIEPVKFKSFEAARKRNKCFEMSSFVETKAMEQLTKSPMEFVEYNKQQLSRIYPKGTRVDSSNYMPQLFWNVGCQLVALNFQTLDVAMQLNAGVFEYNGRSGYLLKPEFMRRPDKSFDPFTEVIVDGIVANALRVKVISGQFLSDRKVGIYVEVDMFGLPVDTRRKYRTRTSQGNSFNPVWDEEPFDFPKVVLPTLASLRIAAFEEGGKFVGHRILPVSAIRSGYHYVCLRNEANQPLCLPALLIYTEASDYIPDDHQDYAEALINPIKHVSLMDQRARQLAALIGESEAQAGQETCQDTQSQQLGSQPSSNPTPSPLDASPRRPPGPTTSPASTSLSSPGQRDDLIASILSEVAPTPLDELRGHKALVKLRSRQERDLRELRKKHQRKAVTLTRRLLDGLAQAQAEGRCRLRPGALGGAADVEDTKEGEDEAKRYQEFQNRQVQSLLELREAQVDAEAQRRLEHLRQALQRLREVVLDANTTQFKRLKEMNEREKKELQKILDRKRHNSISEAKMRDKHKKEAELTEINRRHITESVNSIRRLEEAQKQRHDRLVAGQQQVLQQLAEEEPKLLAQLAQECQEQRARLPQEIRRSLLGEMPEGLGDGPLVACASNGHAPGSSGHLSGADSESQEENTQL

SEQ ID NO: 767175 - protein, 945 aa, Homo sapiens
MAGAQPGVHALQLEPPTVVETLRRGSKFIKWDEETSSRNLVTLRVDPNGFFLYWTGPNMEVDTLDISSIRDTRTGRYARLPKDPKIREVLGFGGPDARLEEKLMTVVSGPDPVNTVFLNFMAVQDDTAKVWSEELFKLAMNILAQNASRNTFLRKAYTKLKLQVNQDGRIPVKNILKMFSADKKRVETALESCGLKFNRSESIRPDEFSLEIFERFLNKLCLRPDIDKILLEIGAKGKPYLTLEQLMDFINQKQRDPRLNEVLYPPLRPSQARLLIEKYEPNQQFLERDQMSMEGFSRYLGGEENGILPLEALDLSTDMTQPLSAYFINSSHNTYLTAGQLAGTSSVEMYRQALLWGCRCVELDVWKGRPPEEEPFITHGFTMTTEVPLRDVLEAIAETAFKTSPYPVILSFENHVDSAKQQAKMAEYCRSIFGDALLIEPLDKYPLAPGVPLPSPQDLMGRILVKNKKRHRPSAGGPDSAGRKRPLEQSNSALSESSAATEPSSPQLGSPSSDSCPGLSNGEEVGLEKPSLEPQKSLGDEGLNRGPYVLGPADREDEEEDEEEEEQTDPKKPTTDEGTASSEVNATEEMSTLVNYIEPVKFKSFEAARKRNKCFEMSSFVETKAMEQLTKSPMEFVEYNKQQLSRIYPKGTRVDSSNYMPQLFWNVGCQLVALNFQTLDVAMQLNAGVFEYNGRSGYLLKPEFMRRPDKSFDPFTEVIVDGIVANALRVKVISGQFLSDRKVGIYVEVDMFGLPVDTRRKYRTRTSQGNSFNPVWDEEPFDFPKVVLPTLASLRIAAFEEGGKFVGHRILPVSAIRSGYHYVCLRNEANQPLCLPALLIYTEASDYIPDDHQDYAEALINPIKHVSLMDQRARQLAALIGESEAQAGQETCQDTQSQQLGSQPSSNPTPSPLDASPRRPRGHRARAGAGWRAGGNDTNAFFFFF

SEQ ID NO: 767176 - protein, 600 aa, Homo sapiens
MSCGYNKQQLSRIYPKGTRVDSSNYMPQLFWNVGCQLVALNFQTLDVAMQLNAGVFEYNGRSGYLLKPEFMRRPDKSFDPFTEVIVDGIVANALRVKVISGQFLSDRKVGIYVEVDMFGLPVDTRRKYRTRTSQGNSFNPVWDEEPFDFPKVVLPTLASLRIAAFEEGGKFVGHRILPVSAIRSGYHYVCLRNEANQPLCLPALLIYTEASDYIPDDHQDYAEALINPIKHVSLMDQRARQLAALIGESEAQAGQETCQDTQSQQLGSQPSSNPTPSPLDASPRRPPGPTTSPASTSLSSPGQRDDLIASILSEVAPTPLDELRGHKALVKLRSRQERDLRELRKKHQRKAVTLTRRLLDGLAQAQAEGRCRLRPGALGGAADVEDTKEGEDEAKRYQEFQNRQVQSLLELREAQVDAEAQRRLEHLRQALQRLREVVLDANTTQFKRLKEMNEREKKELQKILDRKRHNSISEAKMRDKHKKEAELTEINRRHITESVNSIRRLEEAQKQRHDRLVAGQQQVLQQLAEEEPKLLAQLAQECQEQRARLPQEIRRSLLGEMPEGLGDGPLVACASNGHAPGSSGHLSGADSESQEENTQL

SEQ ID NO: 767177 - protein, 475 aa, Homo sapiens
MAVVSCGLVATVAQGSPAAQLQSGPQVVLPTLASLRIAAFEEGGKFVGHRILPVSAIRSGYHYVCLRNEANQPLCLPALLIYTEASDYIPDDHQDYAEALINPIKHVSLMDQRARQLAALIGESEAQAGQETCQDTQSQQLGSQPSSNPTPSPLDASPRRPPGPTTSPASTSLSSPGQRDDLIASILSEVAPTPLDELRGHKALVKLRSRQERDLRELRKKHQRKAVTLTRRLLDGLAQAQAEGRCRLRPGALGGAADVEDTKEGEDEAKRYQEFQNRQVQSLLELREAQVDAEAQRRLEHLRQALQRLREVVLDANTTQFKRLKEMNEREKKELQKILDRKRHNSISEAKMRDKHKKEAELTEINRRHITESVNSIRRLEEAQKQRHDRLVAGQQQVLQQLAEEEPKLLAQLAQECQEQRARLPQEIRRSLLGEMPEGLGDGPLVACASNGHAPGSSGHLSGADSESQEENTQL

SEQ ID NO: 767178 - protein, 602 aa, Homo sapiens
MAGAQPGVHALQLEPPTVVETLRRGSKFIKWDEETSSRNLVTLRVDPNGFFLYWTGPNMEVDTLDISSIRDTRTGRYARLPKDPKIREVLGFGGPDARLEEKLMTVVSGPDPVNTVFLNFMAVQDDTAKVWSEELFKLAMNILAQNASRNTFLRKAYTKLKLQVNQDGRIPVKNILKMFSADKKRVETALESCGLKFNRSESIRPDEFSLEIFERFLNKLCLRPDIDKILLEIGAKGKPYLTLEQLMDFINQKQRDPRLNEVLYPPLRPSQARLLIEKYEPNQQFLERDQMSMEGFSRYLGGEENGILPLEALDLSTDMTQPLSAYFINSSHNTYLTAGQLAGTSSVEMYRQALLWGCRCVELDVWKGRPPEEEPFITHGFTMTTEVPLRDVLEAIAETAFKTSPYPVILSFENHVDSAKQQAKMAEYCRSIFGDALLIEPLDKYPLAPGVPLPSPQDLMGRILVKNKKRHRPSAGGPDSAGRKRPLEQSNSALSESSAATEPSSPQLGSPSSDSCPGLSNGEEVGLEKPSLEPQKSLGDEGLNRGPYVLGPADREDEEEDEEEEEQTDPKKPTTDEGTASSEVNATEEMSTLVNYIEPVGR

SEQ ID NO: 767179 - protein, 589 aa, Homo sapiens
MAGAQPGVHALQLEPPTVVETLRRGSKFIKWDEETSSRNLVTLRVDPNGFFLYWTGPNMEVDTLDISSIRDTRTGRYARLPKDPKIREVLGFGGPDARLEEKLMTVVSGPDPVNTVFLNFMAVQDDTAKVWSEELFKLAMNILAQNASRNTFLRKAYTKLKLQVNQDGRIPVKNILKMFSADKKRVETALESCGLKFNRSESIRPDEFSLEIFERFLNKLCLRPDIDKILLEIGAKGKPYLTLEQLMDFINQKQRDPRLNEVLYPPLRPSQARLLIEKYEPNQQFLERDQMSMEGFSRYLGGEENGILPLEALDLSTDMTQPLSAYFINSSHNTYLTAGQLAGTSSVEMYRQALLWGCRCVELDVWKGRPPEEEPFITHGFTMTTEVPLRDVLEAIAETAFKTSPYPVILSFENHVDSAKQQAKMAEYCRSIFGDALLIEPLDKYPLAPGVPLPSPQDLMGRILVKNKKRHRPSAGGPDSAGRKRPLEQSNSALSESSAATEPSSPQLGSPSSDSCPGLSNGEEVGLEKPSLEPQKSLGDEGLNRGPYVLGPADREDEEEDEEEEEQTDPKKPTTDESGPVKALPKPEV

SEQ ID NO: 767180 - protein, 99 aa, Homo sapiens
RQLWTWVVAGQPLCPPLTASPCILAPQVWSEELFKLAMNILAQNASRNTFLRKAEPQATRGGAGGFTWPFSGCDLFICLPRYTKLKLQVNQDGRIPVKK

SEQ ID NO: 767181 - protein, 154 aa, Homo sapiens
ISQPLRYVTIMNTQLCVGLVVAAWVGGFVHSIVQLALILPLPFCGPNILDNFYCDVPQVLRLACTDTSLLEFLMISNSGLLVIIWFLLLLISYTVILVMLRSHSGKARRKAASTCTTHIIVVSMIFIPCIYIYTWPFTPFLMDKAVSISYTVMT

SEQ ID NO: 767182 - protein, 235 aa, Homo sapiens
MKYVFYLGVLAGTFFFADSSVQKEDPAPYLVYLKSHFNPCVGVLIKPSWVLAPAHCYLPNLKVMLGNFKSRVRDGTEQTINPIQIVRYWNYSHSAPQDDLMLIKLAKPAMLNPKVQPLPLATTNVRPGTVCLLSGLDWSQENSGRHPDLRQNLEAPVMSDRECQKTEQGKSHRNSLCVKFVKVFSRIFGEVAVATVICKDKLQGIEVGHFMGGDVGIYTNVYKYVSWIENTAKDK

SEQ ID NO: 767183 - protein, 256 aa, Homo sapiens
  misc_feature (9)..(9): Xaa can be any naturally occurring amino acid
MCLRFKEDXHNTVSSGELLAHFENVLYLGVLAGTFFFADSSVQKEDPAPYLVYLKSHFNPCVGVLIKPSWVLAPAHCYLPNLKVMLGNFKSRVRDGTEQTINPIQIVRYWNYSHSAPQDDLMLIKLAKPAMLNPKVQPLPLATTNVRPGTVCLLSGLDWSQENSGRHPDLRQNLEAPVMSDRECQKTEQGKSHRNSLCVKFVKVFSRIFGEVAVATVICKDKLQGIEVGHFMGGDVGIYTNVYKYVSWIENTAKDK

SEQ ID NO: 767184 - protein, 109 aa, Homo sapiens
HRGPAIPDWQRHNSHEQGRHPDLRQNLEAPVMSDRECQKTEQGKSHRNSLCVKFVKVFSRIFGEVAVATVICKDKLQGIEVGHFMGGDVGIYTNVYKYVSWIENTAKDK

SEQ ID NO: 767185 - protein, 126 aa, Homo sapiens [sequence omitted]

SEQ ID NO: 767186 - protein, 126 aa, Homo sapiens [sequence omitted]

SEQ ID NO: 767187 - protein, 292 aa, Homo sapiens
MEELTAFVSKSFDQKSKDGNGGGGGGGGKKDSITYREVLESGLARSRELGTSDSSLQDITEGGGHCPVHLFKDHVDNDKEKLKEFGTARVAEGIYECKEKREDVKSEDEDGQTKLKQRRSRTNFTLEQLNELERLFDETHYPDAFMREELSQRLGLSEARVQVWFQNRRAKCRKQENQMHKGVILGTANHLDACRVAPYVNMGALRMPFQQVQAQLQLEGVAHAHPHLHPHLAAHAPYLMFPPPPFGLPIASLAESASAAAVVAAAAKSNSKNSSIADLRLKARKHAEALGL

SEQ ID NO: 767188 - protein, 225 aa, Homo sapiens
MEELTAFVSKSFDQKSKDGNGGGGGGGGKKDSITYREVLESGLARSRELGTSDSSLQDITEGGGHCPVHLFKDHVDNDKEKLKEFGTARVAEGIYECKEKREDVKSEDEDGQTKLKQRRSRTNFTLEQLNELERLFDETHYPDAFMREELSQRLGLSEARVQVWFQNRRAKCRKQENQMHKGVILGTANHLDACRVAPYVNMGALRMPFQQMEFCSCRPGWSIMA

SEQ ID NO: 767189 - protein, 319 aa, Homo sapiens
GSTVKSSLITHQQTHTEEKSYMCSECGKGFTMKRYLIAHQRTHSGEKPYVCKECGKGFTVKSNLIVHQRTHTGEKPYICSECGKGFTMKRYLVVHQRTHTGEKPYMCSECGKGFTVKSNLIVHQRSHTGEKSYICSECGKGFTVKRTLVIHQRTHTGEKSYICNECGKGFTTKRTLIIHQRTHTGEKPYECNECGKAFSQKICLIQHERCHTGKTPFVCTECGKSYSHKYGLITHQRIHTGEKPYECNECGKAFTTKSVLNVHQRTHTGERPYGCSDCEKAFSHLSNLVKHKKMHTREMGRISQVENSCNGESQLLPYK

SEQ ID NO: 767190 - protein, 319 aa, Homo sapiens; identical to SEQ ID NO: 767189

SEQ ID NO: 767191 - protein, 319 aa, Homo sapiens; identical to SEQ ID NO: 767189

SEQ ID NO: 767192 - protein, 159 aa, Homo sapiens
SRLVWSGNFRIDSPGYMGPTRAGSEECVFYTDETASPLAPDLAKASPKRLSLPNTAWGSPSPEAAGYPGAGAEDEQQQLAANRHSLVEKLGELVAGAHALGEGQFPFPTALSATPTEETPTPPPAATSDPPAEDMLVAIRRGVRLRRTVTNDRSAPRIL

SEQ ID NO: 767193 - protein, 795 aa, Homo sapiens
  misc_feature (40)..(40): Xaa can be any naturally occurring amino acid
AASCPRRAPRAARQPRCDMARAARRRPRPRSAARPAAERXWRREARPGLGASARAAWPPPLRCSPRSVRLAAAAARPSQSMETAEKECGALGGLFQAIVNDMKSSYPIWEDFNSKATKLHSQLRTTVLAAVAFLDAFQKVADMATNTRGATRDIGSALTRMCMRHRSIETKLRQFTNALLESLINPLQERIEDWKKAANQLDKDHAKEYKRARHEIKKKSSDTLKLQKKARKELLGKGDLQPQLDSALQDVNDMYLLLEETEKQAVRRALIEERGRFCTFITFLQPVVNGELTMLGEITHLQGIIDDLVVLTAEPHKLPPASEQVIKDLKGSDYSWSYQTPPSSPSSSSSRKSSMCSLAQPATTTARLSSVSSHDSGFVSQDATYSKPPSPMPSDITSQKSSSSASSEASETCQSVSECSSPTSDWSKVGSHEQPSGATLQRRKDRVELLRDTEPGPASGGTLGPSGEEAPRPRMSPATIAAKHGEEVSPAASDLAMVLTRGLSLEHQKSSRDSLQYSSGYSTQTTTPSCSEDTIPSQGSDYDCYSVNGDADSEGPPEFDKSSTIPRNSNIAQNYRRLIQTKRPASTAGLPTAGLPTGTGLPSGRTPRVATIRRTPSTKPTVRRALSSAGPIPIRPPIVPVKTPTVPDSPGYMGPTRAGSEECVFYTDETASPLAPDLAKASPKRLSLPNTAWGSPSPEAAGYPGAGAEDEQQQLAANRHSLVEKLGELVAGAHALGEGQFPFPTALSATPTEETPTPPPAATSDPPAEDMLVAIRRGVRLRRTVTNDRSAPRIL

SEQ ID NO: 767194 - protein, 346 aa, Homo sapiens
  misc_feature (40)..(40): Xaa can be any naturally occurring amino acid
AASCPRRAPRAARQPRCDMARAARRRPRPRSAARPAAERXWRREARPGLGASARAAWPPPLRCSPRSVRLAAAAARPSQSMETAEKECGALGGLFQAIVNDMKSSYPIWEDFNSKATKLHSQLRTTVLAAVAFLDAFQKVADMATNTRGATRDIGSALTRMCMRHRSIETKLRQFTNALLESLINPLQERIEDWKKAANQLDKDHAKEYKRARHEIKKKSSDTLKLQKKARKELLGKGDLQPQLDSALQDVNDMYLLLEETEKQAVRRALIEERGRFCTFITFLQPVVNGELTMLGEITHLQGIIDDLVVLTAEPHKLPPASEQVIKDLKGSDYSWSYQTPPLRPI

SEQ ID NO: 767195 - protein, 827 aa, Homo sapiens
  misc_feature (40)..(40): Xaa can be any naturally occurring amino acid
AASCPRRAPRAARQPRCDMARAARRRPRPRSAARPAAERXWRREARPGLGASARAAWPPPLRCSPRSVRLAAAAARPSQSMETAEKECGALGGLFQAIVNDMKSSYPIWEDFNSKATKLHSQLRTTVLAAVAFLDAFQKVADMATNTRGATRDIGSALTRMCMRHRSIETKLRQFTNALLESLINPLQERIEDWKKAANQLDKDHAKEYKRARHEIKKKSSDTLKLQKKARKELLGKGDLQPQLDSALQDVNDMYLLLEETEKQAVRRALIEERGRFCTFITFLQPVVNGELTMLGEITHLQGIIDDLVVLTAEPHKLPPASEQVIKDLKGSDYSWSYQTPPSSPSSSSSRKSSMCSAPSSSSSAKGGGAPWPGGAQTYSPSSTCRYRSLAQPATTTARLSSVSSHDSGFVSQDATYSKPPSPMPSDITSQKSSSSASSEASETCQSVSECSSPTSDWSKVGSHEQPSGATLQRRKDRVELLRDTEPGPASGGTLGPSGEEAPRPRMSPATIAAKHGEEVSPAASDLAMVLTRGLSLEHQKSSRDSLQYSSGYSTQTTTPSCSEDTIPSQGSDYDCYSVNGDADSEGPPEFDKSSTIPRNSNIAQNYRRLIQTKRPASTAGLPTAGLPTGTGLPSGRTPRVATIRRTPSTKPTVRRALSSAGPIPIRPPIVPVKTPTVPDSPGYMGPTRAGSEECVFYTDETASPLAPDLAKASPKRLSLPNTAWGSPSPEAAGYPGAGAEDEQQQLAANRHSLVEKLGELVAGAHALGEGQFPFPTALSATPTEETPTPPPAATSDPPAEDMLVAIRRGVRLRRTVTNDRSAPRIL

SEQ ID NO: 767196 - protein, 199 aa, Homo sapiens
KLMARYDGCGVIRMCMRHRSIETKLRQFTNALLESLINPLQERIEDWKKAANQLDKDHAKEYKRARHEIKKKSSDTLKLQKKARKELLGKGDLQPQLDSALQDVNDMYLLLEETEKQAVRRALIEERGRFCTFITFLQPVVNGELTMLGEITHLQGIIDDLVVLTAEPHKLPPASEQVIKDLKGSDYSWSYQTPPLRPI

SEQ ID NO: 767197 - protein, 403 aa, Homo sapiens
  misc_feature (40)..(40): Xaa can be any naturally occurring amino acid
AASCPRRAPRAARQPRCDMARAARRRPRPRSAARPAAERXWRREARPGLGASARAAWPPPLRCSPRSVRLAAAAARPSQSMETAEKECGALGGLFQAIVNDMKSSYPIWEDFNSKATKLHSQLRTTVLAAVAFLDAFQKVADMATNTRGATRDIGSALTRMCMRHRSIETKLRQFTNALLESLINPLQERIEDWKKAANQLDKDHAKEYKRARHEIKKKSSDTLKLQKKARKELLGKGDLQPQLDSALQDVNDMYLLLEETEKQAVRRALIEERGRFCTFITFLQPVVNGELTMLGEITHLQGIIDDLVVLTAEPHKLPPASEQVIKDLKGSDYSWSYQTPPSSPSSSSSRKSSMCSLAQPATTTARLSSVSSHDSGFVSQDATYSKPPSPMPSDITSQVRGR

SEQ ID NO: 767198 - protein, 537 aa, Homo sapiens
FIVGQHCFTHTSNRPKKINSNFITFLQPVVNGELTMLGEITHLQGIIDDLVVLTAEPHKLPPASEQVIKDLKGSDYSWSYQTPPSSPSSSSSRKSSMCSLAQPATTTARLSSVSSHDSGFVSQDATYSKPPSPMPSDITSQKSSSSASSEASETCQSVSECSSPTSDWSKVGSHEQPSGATLQRRKDRVELLRDTEPGPASGGTLGPSGEEAPRPRMSPATIAAKHGEEVSPAASDLAMVLTRGLSLEHQKSSRDSLQYSSGYSTQTTTPSCSEDTIPSQGSDYDCYSVNGDADSEGPPEFDKSSTIPRNSNIAQNYRRLIQTKRPASTAGLPTAGLPTGTGLPSGRTPRVATIRRTPSTKPTVRRALSSAGPIPIRPPIVPVKTPTVPDSPGYMGPTRAGSEECVFYTDETASPLAPDLAKASPKRLSLPNTAWGSPSPEAAGYPGAGAEDEQQQLAANRHSLVEKLGELVAGAHALGEGQFPFPTALSATPTEETPTPPPAATSDPPAEDMLVAIRRGVRLRRTVTNDRSAPRIL

SEQ ID NO: 767199 - protein, 416 aa, Homo sapiens
SSLLPAGPSVCNRLLASAWQKSSSSASSEASETCQSVSECSSPTSDWSKVGSHEQPSGATLQRRKDRVELLRDTEPGPASGGTLGPSGEEAPRPRMSPATIAAKHGEEVSPAASDLAMVLTRGLSLEHQKSSRDSLQYSSGYSTQTTTPSCSEDTIPSQGSDYDCYSVNGDADSEGPPEFDKSSTIPRNSNIAQNYRRLIQTKRPASTAGLPTAGLPTGTGLPSGRTPRVATIRRTPSTKPTVRRALSSAGPIPIRPPIVPVKTPTVPDSPGYMGPTRAGSEECVFYTDETASPLAPDLAKASPKRLSLPNTAWGSPSPEAAGYPGAGAEDEQQQLAANRHSLVEKLGELVAGAHALGEGQFPFPTALSATPTEETPTPPPAATSDPPAEDMLVAIRRGVRLRRTVTNDRSAPRIL

SEQ ID NO: 767200 - protein, 334 aa, Homo sapiens
EERYGRVSRSHKPWCGEHQRAAENILLELFLHVPARQLLLNCRLVCSLWRDLIELVTLWKRKLLREGFITEDTIPSQGSDYDCYSVNGDADSEGPPEFDKSSTIPRNSNIAQNYRRLIQTKRPASTAGLPTAGLPTGTGLPSGRTPRVATIRRTPSTKPTVRRALSSAGPIPIRPPIVPVKTPTVPDSPGYMGPTRAGSEECVFYTDETASPLAPDLAKASPKRLSLPNTAWGSPSPEAAGYPGAGAEDEQQQLAANRHSLVEKLGELVAGAHALGEGQFPFPTALSATPTEETPTPPPAATSDPPAEDMLVAIRRGVRLRRTVTNDRSAPRIL

SEQ ID NO: 767201 - protein, 72 aa, Homo sapiens
RLAGGTVRSRRMRPGPRGYGAIAAAGAGAHPRANHHKELKAAGARVAAGVGAVKEDGQGDSSMVRVVGAGHR

SEQ ID NO: 767202 - protein, 83 aa, Homo sapiens
RLAGGTVRSRRMRPGPRGYGAIAAAGAGAHPRANHHKELKAAGARVAAGVGAGFSGFARPAAPCQEEEETPRACDTMARLAAV

SEQ ID NO: 767203 - protein, 72 aa, Homo sapiens; identical to SEQ ID NO: 767201

SEQ ID NO: 767204 - protein, 72 aa, Homo sapiens; identical to SEQ ID NO: 767201

SEQ ID NO: 767205 - protein, 72 aa, Homo sapiens; identical to SEQ ID NO: 767201

SEQ ID NO: 767206 - protein, 120 aa, Homo sapiens
MGGEFYVKIIFLKEFLIRSIFSSAVGFKNLNSKRDGIRISISSLPSAHALNFTCRFDNVLLLGMLPLLPLQHFFSYFCQDRAYVLYGEKNRFFFQNFIAISPLSFCFQYSIQNAQSHFEA

SEQ ID NO: 767207 - protein, 680 aa, Homo sapiens
MKMKKFQIPVSFQDLTVNFTQEEWQQLDPAQRLLYRDVMLENYSNLVSVGYHVSKPDVIFKLEQGEEPWIVEEFSNQNYPDIDDALEKNKEIQDKHLTQTVFFSNKTLITERENVFGETLNLGMNSVPSRKMPYKCNPGGNSLKTNSEVIVAKKSKENRKIPDGYSGFGKHEKSHLGMKKYRYNPMRKASNQNENLILHQNIQILKQPFDYNKCGKTFFKRAILITQKGRQTERKPNECNECRKTFSKRSTLIVHQRIHTGEKPYVCSDCRKTFRVKTSLTRHRRIHTGERPYECSECRKTFIDKSALIVHQKIHGGEKSYECNECGKTFFRKSALAEHFRSHTGEKPYECKECGNAFSKKSYLVVHQRTHRGEKPNECKECGKTFFCQSALTAHQRIHTGEKPYECSECEKTFFCQSALNVHRRGHTGEKPYECSQCGKFLCTKSALIAHQITHRGKKSYECNECGKFFCHKSTLTIHQRTHTGEKHGVFNKCGRISIVKSNCSQCKRMNTKENLYECSEHGHAVSKNSHLIVHQRTIWERPYECNECGRTYCRKSALTHHQRTHTGQRPYECNECGKTFCQKFSFVEHQRTHTGEKPYECNECGKSFCHKSAFRVHRRIHTGEKPYECNQCGKTYRRLWTLTEHQKIHTGEKPYECNKCEKTFRHKSNFLLHQKSHKE

SEQ ID NO: 767208 - protein, 412 aa, Homo sapiens
ECDKAFNRSLKLTAHKKILMEEKPYKCKECGKAFNLSSTLIVHQKIHGGEKSYECNECGKTFFRKSALAEHFRSHTGEKPYECKECGNAFSKKSYLVVHQRTHRGEKPNECKECGKTFFCQSALTAHQRIHTGEKPYECSECEKTFFCQSALNVHRRGHTGEKPYECSQCGKFLCTKSALIAHQITHRGKKSYECNECGKFFCHKSTLTIHQRTHTGEKHGVFNKCGRISIVKSNCSQCKRMNTKENLYECSEHGHAVSKNSHLIVHQRTIWERPYECNECGRTYCRKSALTHHQRTHTGQRPYECNECGKTFCQKFSFVEHQRTHTGEKPYECNECGKSFCHKSAFRVHRRIHTGEKPYECNQCGKTYRRLWTLTEHQKIHTGEKPYECNKCEKTFRHKSNFLLHQKSHKE

SEQ ID NO: 767209 - protein, 642 aa, Homo sapiens
MLENYSNLVSVGYHVSKPDVIFKLEQGEEPWIVEEFSNQNYPDIDDALEKNKEIQDKHLTQTVFFSNKTLITERENVFGETLNLGMNSVPSRKMPYKCNPGGNSLKTNSEVIVAKKSKENRKIPDGYSGFGKHEKSHLGMKKYRYNPMRKASNQNENLILHQNIQILKQPFDYNKCGKTFFKRAILITQKGRQTERKPNECNECRKTFSKRSTLIVHQRIHTGEKPYVCSDCRKTFRVKTSLTRHRRIHTGERPYECSECRKTFIDKSALIVHQKIHGGEKSYECNECGKTFFRKSALAEHFRSHTGEKPYECKECGNAFSKKSYLVVHQRTHRGEKPNECKECGKTFFCQSALTAHQRIHTGEKPYECSECEKTFFCQSALNVHRRGHTGEKPYECSQCGKFLCTKSALIAHQITHRGKKSYECNECGKFFCHKSTLTIHQRTHTGEKHGVFNKCGRISIVKSNCSQCKRMNTKENLYECSEHGHAVSKNSHLIVHQRTIWERPYECNECGRTYCRKSALTHHQRTHTGQRPYECNECGKTFCQKFSFVEHQRTHTGEKPYECNECGKSFCHKSAFRVHRRIHTGEKPYECNQCGKTYRRLWTLTEHQKIHTGEKPYECNKCEKTFRHKSNFLLHQKSHKE

SEQ ID NO: 767210 - protein, 642 aa, Homo sapiens; identical to SEQ ID NO: 767209

SEQ ID NO: 767211 - protein, 76 aa, Homo sapiens
ALMGILSNSLFKTPRTWTTFSHHPLPLTDWEQCGVVAKPHGVIKRAGNLGSMFGFALHISYVTFSKISGSLAFFSF

SEQ ID NO: 767212 - protein, 105 aa, Homo sapiens
MGDVEKGKKIFIMKCSQCHTVEKGGKHKTGPNLHGLFGRKTGQAPGYSYTAANKNKGIIWGEDTLMEYLENPKKYIPGTKMIFVGIKKKEERADLIAYLKKATNE

SEQ ID NO: 767213 - protein, 48 aa, Homo sapiens
VRSEEVLLSQPPLHWEKKERGKWGDDDTSNHFLPVSSWAKKKYFKSTV

SEQ ID NO: 767214 - protein, 135 aa, Homo sapiens
MHTREKPTSQEANALSHLHFSQVFWDVKGTCPTSRSFVTAIKEAMRGTRPHSRQCERRLHLDRVAASRSNRAQNQEPAGTEPQSSRFPVSAPLYCLHTRHHLAHPAAPHDRHGACGALLCLKPEPFPGAHIQVAN

SEQ ID NO: 767215 - protein, 256 aa, Homo sapiens
MDFSRNLYDIGEQLDSEDLASLKFLSLDYIPQRKQEPIKDALMLFQRLQEKRMLEESNLSFLKELLFRINRLDLLITYLNTRKEEMERELQTPGRAQISAYRVMLYQISEEVSRSELRSFKFLLQEEISKCKLDDDMNLLDIFIEMEKRVILGEGKLDILKRVCAQINKSLLKIINDYEEFSKERSSSLEGSPDEFSNGEELCGVMTISDSPREQDSESQTLDKVYQMKSKPRGYCLIINKICLKSFKNSNDFYKF

SEQ ID NO: 767216 - protein, 235 aa, Homo sapiens
MDFSRNLYDIGEQLDSEDLASLKFLSLDYIPQRKQEPIKDALMLFQRLQEKRMLEESNLSFLKELLFRINRLDLLITYLNTRKEEMERELQTPGRAQISAYRVMLYQISEEVSRSELRSFKFLLQEEISKCKLDDDMNLLDIFIEMEKRVILGEGKLDILKRVCAQINKSLLKIINDYEEFSKERSSSLEGSPDEFSNDFGQSLPNEKQTSGILSDHQQSQFCKSTGESAQTSQH

SEQ ID NO: 767217 - protein, 159 aa, Homo sapiens
MLYQISEEVSRSELRSFKFLLQEEISKCKLDDDMNLLDIFIEMEKRVILGEGKLDILKRVCAQINKSLLKIINDYEEFSKGEELCGVMTISDSPREQDSESQTLDKVYQMKSKPRGYCLIINNHNFAKAREKVPKLHSIRDRNGTHLDAGFENVFSWWQ

SEQ ID NO: 767218 - protein, 327 aa, Homo sapiens
MADGELNVDSLITRLLEVRGCRPGKIVQMTEAEVRGLCIKSREIFLSQPILLELEAPLKICGDIHGQYTDLLRLFEYGGFPPEANYLFLGDYVDRGKQSLETICLLLAYKIKYPENFFLLRGNHECASINRIYGFYDECKRRFNIKLWKTFTDCFNCLPIAAIVDEKIFCCHGGLSPDLQSMEQIRRIMRPTDVPDTGLLCDLLWSDPDKDVQGWGENDRGVSFTFGADVVSKFLNRHDLDLICRAHQVVEDGYEFFAKRQLVTLFSAPNYCGEFDNAGGMMSVDETLMCSFQILKPSEKKAKYQYGGLNSGRPVTPPRTANPPKKR

SEQ ID NO: 767219 - protein, 327 aa, Homo sapiens; identical to SEQ ID NO: 767218

SEQ ID NO: 767220 - protein, 327 aa, Homo sapiens; identical to SEQ ID NO: 767218

SEQ ID NO: 767221 - protein, 207 aa, Homo sapiens
MADGELNVDSLITRLLEVRGCRPGKIVQMTEAEVRGLCIKSREIFLSQPILLELEAPLKICGDIHGQYTDLLRLFEYGGFPPEANYLFLGDYVDRGKQSLETICLLLAYKIKYPENFFLLRGNHECASINRIYGFYDECKRRFNIKLWKTFTDCFNCLPIAAIVDEKIFCCHGGRLVNLPYRFFFSSIIRKIPIIIKRLWENKAVLV

SEQ ID NO: 767222 - protein, 262 aa, Homo sapiens
MCSFQILKPSEKKAKYQYGGLNSGRPVTPPRTANPPKKREERNSVKKPSDLLRTYFIIYKCASINRIYGFYDECKRRFNIKLWKTFTDCFNCLPIAAIVDEKIFCCHGGLSPDLQSMEQIRRIMRPTDVPDTGLLCDLLWSDPDKDVQGWGENDRGVSFTFGADVVSKFLNRHDLDLICRAHQVVEDGYEFFAKRQLVTLFSAPNYCGEFDNAGGMMSVDETLMCSFQILKPSEKKAKYQYGGLNSGRPVTPPRTANPPKKR

SEQ ID NO: 767223 - protein, 184 aa, Homo sapiens
MADGELNVDSLITRLLEAAIVDEKIFCCHGGLSPDLQSMEQIRRIMRPTDVPDTGLLCDLLWSDPDKDVQGWGENDRGVSFTFGADVVSKFLNRHDLDLICRAHQVVEDGYEFFAKRQLVTLFSAPNYCGEFDNAGGMMSVDETLMCSFQILKPSEKKAKYQYGGLNSGRPVTPPRTANPPKKR

SEQ ID NO: 767224 - protein, 110 aa, Homo sapiens
MADGELNVDSLITRLLEVRGCRPGKIVQMTEAEVRGLCIKSREIFLSQPILLELEAPLKICEDFMDIYHFPSQNLIISYELSLNLVNPGIFFKLRMYVASDPVMIVYLPP

SEQ ID NO: 767225 - protein, 327 aa, Homo sapiens; identical to SEQ ID NO: 767218

SEQ ID NO: 767226 - protein, 363 aa, Homo sapiens
NSAGKIEAAAGAGSRDTGEPQAALGVLRPQRASRGGASLAKGTGSEECAHPQAVRGCRPGKIVQMTEAEVRGLCIKSREIFLSQPILLELEAPLKICGDIHGQYTDLLRLFEYGGFPPEANYLFLGDYVDRGKQSLETICLLLAYKIKYPENFFLLRGNHECASINRIYGFYDECKRRFNIKLWKTFTDCFNCLPIAAIVDEKIFCCHGGLSPDLQSMEQIRRIMRPTDVPDTGLLCDLLWSDPDKDVQGWGENDRGVSFTFGADVVSKFLNRHDLDLICRAHQVVEDGYEFFAKRQLVTLFSAPNYCGEFDNAGGMMSVDETLMCSFQILKPSEKKAKYQYGGLNSGRPVTPPRTANPPKKR

SEQ ID NO: 767227 - protein, 127 aa, Homo sapiens
MADGELNVDSLITRLLEVRGCRPGKIVQMTEAEVRGLCIKSREIFLSQPILLELEAPLKICGEIHGQYTDLHENPFLTSLGKLTLSLFPPSIRRMYLNECWSVGHFVNYGYWVLNCLILPCECCIRL

SEQ ID NO: 767228 - protein, 187 aa, Homo sapiens
LFVGVVVVDGGSACAYLAAGAAIVDEKIFCCHGGLSPDLQSMEQIRRIMRPTDVPDTGLLCDLLWSDPDKDVQGWGENDRGVSFTFGADVVSKFLNRHDLDLICRAHQVVEDGYEFFAKRQLVTLFSAPNYCGEFDNAGGMMSVDETLMCSFQILKPSEKKAKYQYGGLNSGRPVTPPRTANPPKKR

SEQ ID NO: 767229 - protein, 88 aa, Homo sapiens
GPAAVPCVLPRGPRWQHGLRTGASVSEKGPSRTCCSAHTSPMRCTLGRAAARVLLLNVVGPSVPSVAGQLTLLHVKDQPGQHGETRLY

SEQ ID NO: 767230 - protein, 199 aa, Homo sapiens
AEASFCFPGLKKMQSSLKLVDCIIEVHDARIPLSGRNPLFQETLGLKPHLLVLNKMDLADLTEQQKIMQHLEGEGLKNVIFTNCVKDENVKQIIPMVTELIGRSHRYHRKENLEYCIMVIGVPNVGKSSLINSLRRQHLRKGYWRVRLITSGKVLARVADVLMPPSFLEGTCPRSTASLLLTPQPQSTSCLVQSSSQEG

SEQ ID NO: 767231 - protein, 369 aa, Homo sapiens
RKPAVPEARSAGTSEAGRSGAEEVSCGSVSGDGAAMRLTPRALCSAAQAAWRENFPLCGRDVARWFPGHMAKGLKKMQSSLKLVDCIIEVHDARIPLSGRNPLFQETLGLKPHLLVLNKMDLADLTEQQKIMQHLEGEGLKNVIFTNCVKDENVKQIIPMVTELIGRSHRYHRKENLEYCIMVIGVPNVGKSSLINSLRRQHLRKGKATRVGGEPGITRAVMSKIQVSERPLMFLLDTPGVLAPRIESVETGLKLALCGTVLDHLVGEETMADYLLYTLNKHQRFGYVQHYGLGSACDNVERVLKSVAVKLGKTQKVKVLTGTGNVNVIQPNYPAAARDFLQTFRRGLLGSVMLDLDVLRGHPPAETLP

SEQ ID NO: 767232 - protein, 378 aa, Homo sapiens
RKPAVPEARSAGTSEAGRSGAEEVSCGSVSGDGAAMRLTPRALCSAAQAAWRENFPLCGRDVARWFPGHMAKGLKKMQSSLKLVDCIIEVHDARIPLSGRNPLFQETLGLKPHLLVLNKMDLADLTEQQKIMQHLEGEGLKNVIFTNCVKDENVKQIIPMVTELIGRSHRYHRKENLEYCIMVIGVPNVGKSSLINSLRRQHLRKGKATRVGGEPGITRAVMSKIQVSERPLMFLLDTPGVLAPRIESVETGLKLALCVLTSAAASTGTVLDHLVGEETMADYLLYTLNKHQRFGYVQHYGLGSACDNVERVLKSVAVKLGKTQKVKVLTGTGNVNVIQPNYPAAARDFLQTFRRGLLGSVMLDLDVLRGHPPAETLP

SEQ ID NO: 767233 - protein, 150 aa, Homo sapiens [sequence omitted]

SEQ ID NO: 767234 - protein, 150 aa, Homo sapiens [sequence omitted]

SEQ ID NO: 767235 - protein, 175 aa, Homo sapiens
SGHCVRKTRSGGKATRVGGEPGITRAVMSKIQVSERPLMFLLDTPGVLAPRIESVETGLKLALCGTVLDHLVGEETMADYLLYTLNKHQRFGYVQHYGLGSACDNVERVLKSVAVKLGKTQKVKVLTGTGNVNVIQPNYPAAARDFLQTFRRGLLGSVMLDLDVLRGHPPAETLP

SEQ ID NO: 767236 - protein, 286 aa, Homo sapiens
RKPAVPEARSAGTSEAGRSGAEEVSCGSVSGDGAAMRLTPRALCSAAQAAWRENFPLCGRDVARWFPGHMAKGLKKMQSSLKLVDCIIEVHDARIPLSGRNPLFQETLGLKPHLLVLNKMDLADLTEQQKIMQHLEGEGLKNVIFTNCVKDENVKQIIPMVTELIGRSHRYHRKENLEYCIMVIGVPNVGKSSLINSLRRQHLRKGKATRVGGEPGITRAVMSKIQVSERPLMFLLDTPGVLAPRIESVETGLKLALCGTVLDHLVGEETMADYLLYTLNKHQRFG

SEQ ID NO: 767237 - protein, 320 aa, Homo sapiens
PEARSAGGPQRRNLRGGSQRRRGGLKKMQSSLKLVDCIIEVHDARIPLSGRNPLFQETLGLKPHLLVLNKMDLADLTEQQKIMQHLEGEGLKNVIFTNCVKDENVKQIIPMVTELIGRSHRYHRKENLEYCIMVIGVPNVGKSSLINSLRRQHLRKGKATRVGGEPGITRAVMSKIQVSERPLMFLLDTPGVLAPRIESVETGLKLALCGTVLDHLVGEETMADYLLYTLNKHQRFGYVQHYGLGSACDNVERVLKSVAVKLGKTQKVKVLTGTGNVNVIQPNYPAAARDFLQTFRRGLLGSVMLDLDVLRGHPPAETLP

SEQ ID NO: 767238 - protein, 369 aa, Homo sapiens; identical to SEQ ID NO: 767231

SEQ ID NO: 767239 - protein, 256 aa, Homo sapiens
RKPAVPEARSAGTSEAGRSGAEEVSCGSVSGDGAAMRLTPRALCSAAQAAWRENFPLCGRDVARWFPGHMAKGLKKMQSSLKLVDCIIEVHDARIPLSGRNPLFQETLGLKPHLLVLNKMDLADLTEQQKIMQHLEGEGLKNVIFTNCVKDENVKQIIPMVTELIGRSHRYHRKENLEYCIMVIGVPNVGKSSLINSLRRQHLRKGKATRVGGEPGITRAVMSKIQRWSPQGPGPALCQELCRRLAPADLCVASGC

SEQ ID NO: 767240 - protein, 148 aa, Homo sapiens [sequence omitted]

SEQ ID NO: 767241 - protein, 215 aa, Homo sapiens
RKPAVPEARSAGTSEAGRSGAEEVSCGSVSGDGAAMRLTPRALCSAAQAAWRENFPLCGRDVARWFPGHMAKGLKKMQSSLKLVDCIIEVHDARIPLSGRNPLFQETLGLKPHLLVLNKMDLADLTEQQKIMQHLEGEGLKNVIFTNCVKDENVKQIIPMVTELIGRSHRYHRKENLEYCIMVIGVPNVGKSSLINSLRRQHLRKVDTRLPSGRP

SEQ ID NO: 767242 - protein, 256 aa, Homo sapiens; identical to SEQ ID NO: 767239

SEQ ID NO: 767243 - protein, 38 aa, Homo sapiens
RVLLIQITSESTEEFPEDGVAMLPVRKTGLDSDLDGEN

SEQ ID NO: 767244 - protein, 109 aa, Homo sapiens [sequence omitted]

SEQ ID NO: 767245 - protein, 125 aa, Homo sapiens
RPESPAPVGCFKDPTWEETIFSLLALLREGCVGQSCPLPLTAVGLPLPISVPRPEPYSLLQGLSCPGNCSGAIGERTERWPGAVAHACNPSTLGGQGRWIVRSGVRDQPGQHSETPSLLKIQKLA

SEQ ID NO: 767246 - protein, 167 aa, Homo sapiens
MERFVVTAPPARNRSKTALYVTPLDRVTEFGGELHEDGGKLFCTSCNVVLNHVRKSAISDHLKSKTHTKRKAEFEEQNVRKKQRPLTASLQCNSTAQTEKVSVIQDFVKMCLEANIPLEKADHPAVRAFLSRHVKNGGSIPKSDQLRRAYLPDGYENENQLLNSQDC

SEQ ID NO: 767247 - protein, 125 aa, Homo sapiens
CWGPPTGSAIGGAGGRGAAGDTAAAAGLDRATAATAAATDPPPPLFPCSSFFLFFSFPAGPRPLSLTAASILRYQGAREAEGGPDRWCGLWGPGPSVQKLEPGAGLGHSCLQEEEGGDGKLDSRP

SEQ ID NO: 767248 - protein, 167 aa, Homo sapiens; identical to SEQ ID NO: 767246

SEQ ID NO: 767249 - protein, 167 aa, Homo sapiens; identical to SEQ ID NO: 767246

SEQ ID NO: 767250 - protein, 167 aa, Homo sapiens; identical to SEQ ID NO: 767246

SEQ ID NO: 767251 - protein, 72 aa, Homo sapiens
LGTAYGLCHRRCRRTGRGGGHGGRRGARSGNGGDGGSDGSSSSLIPLLLFLPFLFLSGRASSTFPNGGLDPT

SEQ ID NO: 767252 - protein, 167 aa, Homo sapiens; identical to SEQ ID NO: 767246

SEQ ID NO: 767253 - protein, 167 aa, Homo sapiens; identical to SEQ ID NO: 767246

SEQ ID NO: 767254 - protein, 145 aa, Homo sapiens
ELGTRLSFGGELHEDGGKLFCTSCNVVLNHVRKSAISDHLKSKTHTKRKAEFEEQNVRKKQRPLTASLQCNSTAQTEKVSVIQDFVKMCLEANIPLEKADHPAVRAFLSRHVKNGGSIPKSDQLRRAYLPDGYENENQLLNSQDC

SEQ ID NO: 767255 - protein, 167 aa, Homo sapiens; identical to SEQ ID NO: 767246

SEQ ID NO: 767256 - protein, 167 aa, Homo sapiens; identical to SEQ ID NO: 767246

SEQ ID NO: 767257 - protein, 167 aa, Homo sapiens; identical to SEQ ID NO: 767246

SEQ ID NO: 767258 - protein, 167 aa, Homo sapiens; identical to SEQ ID NO: 767246

SEQ ID NO: 767259 - protein, 175 aa, Homo sapiens
AAASARRLPPPPLRLPPSRLSSSRAHSWHLGLGLAQLAGSGRLGAGVLGLAPEERAQTPGTSRAPPLPRPRPNPRAWGAGGGAKRADHRGGPGRGSVRVNVGIGFVVTYKVILETPAWWQLLTFLFIFSVTLLPSPIFSFHLFFVFYSKGMTSWHHRENRVQAQKLFPHHHLLKN

SEQ ID NO: 767260 - protein, 167 aa, Homo sapiens; identical to SEQ ID NO: 767246

SEQ ID NO: 767261 - protein, 167 aa, Homo sapiens; identical to SEQ ID NO: 767246

SEQ ID NO: 767262 - protein, 175 aa, Homo sapiens; identical to SEQ ID NO: 767259

SEQ ID NO: 767263 - protein, 173 aa, Homo sapiens
AAASARRLPPPPLRLPPSRLSSSRAHSWHLGLGLAQLAGSGRLGAGVLGLAPEERAQTPGTSRAPPLPRPRPNPRAWGAGGGAKRADHRGGPGRGSVRVNVGIGFVVTYKVILETPAWWQLLTFLFIFSVTLLPSPIFSFHLFFVFYSKGMTSWHHRENRVQAQKLFPHHHLI

SEQ ID NO: 767264 - protein, 167 aa, Homo sapiens; identical to SEQ ID NO: 767246

SEQ ID NO: 767265 - protein, 167 aa, Homo sapiens; identical to SEQ ID NO: 767246

SEQ ID NO: 767266 - protein, 167 aa, Homo sapiens; identical to SEQ ID NO: 767246

SEQ ID NO: 767267 - protein, 167 aa, Homo sapiens; identical to SEQ ID NO: 767246

SEQ ID NO: 767268 - protein, 167 aa, Homo sapiens; identical to SEQ ID NO: 767246

SEQ ID NO: 767269 - protein, 167 aa, Homo sapiens; identical to SEQ ID NO: 767246

SEQ ID NO: 767270 - protein, 110 aa, Homo sapiens
MWTVPSFTNDSYQVYNVFSTNSFQLLTVKRTPHEAWRVPLTTKTNKTKGLPDCPKKPTNGPFIVTSILWDNCNAPKAVVLQTLAMGIVIDWAPKGHYWQDCSSKNTLCSE

SEQ ID NO: 767271 - protein, 384 aa, Homo sapiens
ARRATPAASQEALRSCFQPLSECQPSQGTSSQSQRRVASASVARAVPVGSRVRGGGAAGRPAAAMGDIPAVGLSSWKASPGKVTEAVKEAIDAGYRHFDCAYFYHNEREVGAGIRCKIKEGAVRREDLFIATKLWCTCHKKSLVETACRKSLKALKLNYLDLYLIHWPMGFKPPHPEWIMSCSELSFCLSHPRVQDLPLDESNMVIPSDTDFLDTWEAMEDLVITGLVKNIGVSNFNHEQLERLLNKPGLRFKPLTNQIECHPYLTQKNLISFCQSRDVSVTAYRPLGGSCEGVDLIDNPVIKRIAKEHGKSPAQILIRFQIQRNVIVIPGSITPSHIKENIQVFDFELTQHDMDNILSLNRNLRLAMFPITKNHKDYPFHIEY

SEQ ID NO: 767272 - protein, 371 aa, Homo sapiens
ARRATPAASQEALRSCFQPLSECQPSQGTSSQSQRRVASASVARAVPVGSRVRGGGAAGRPAAAMGDIPAVGLSSWKASPGKVTEAVKEAIDAGYRHFDCAYFYHNEREVGAGIRCKIKEGAVRREDLFIATKLWCTCHKKSLVETACRKSLKALKLNYLDLYLIHWPMGFKPPHPEWIMSCSELSFCLSHPRVQDLPLDESNMVIPSDTDFLDTWEAMEDLVITGLVKNIGVSNFNHEQLERLLNKPGLRFKPLTNQIECHPYLTQKNLISFCQSRDVSVTAYRPLGGSCEGVDLIDNPVIKRIAKEHGKSPAQILIRFQIQRNVIVIPGSITPSHIKENIQVFDFELTQHDMDNILSLNRNLRLAMFPM

SEQ ID NO: 767273 - protein, 203 aa, Homo sapiens
MGFKPPHPEWIMSCSELSFCLSHPRVQDLPLDESNMVIPSDTDFLDTWEAMEDLVITGLVKNIGVSNFNHEQLERLLNKPGLRFKPLTNQIECHPYLTQKNLISFCQSRDVSVTAYRPLGGSCEGVDLIDNPVIKRIAKEHGKSPAQILIRFQIQRNVIVIPGSITPSHIKENIQVFDFELTQHDMDNILSLNRNLRLAMFPM

SEQ ID NO: 767274 - protein, 254 aa, Homo sapiens
MQVIFSTAPWPNLPRAQASPGKVTEAVKEAIDAGYRHFDCAYFYHNEREVGAGIRCKIKEGAVRREDLFIATKLWCTCHKKSLVETACRKSLKALKLNYLDLYLIHWPMGFKPPHPEWIMSCSELSFCLSHPRVQDLPLDESNMVIPSDTDFLDTWEAMEDLVITGLVKNIGVSNFNHEQLERLLNKPGLRFKPLTNQILIRFQIQRNVIVIPGSITPSHIKENIQVFDFELTQHDMDNILSLNRNLRLAMFPM

SEQ ID NO: 767275 - protein, 371 aa, Homo sapiens; identical to SEQ ID NO: 767272

SEQ ID NO: 767276 - protein, 197 aa, Homo sapiens [sequence omitted]

SEQ ID NO: 767277 - protein, 237 aa, Homo sapiens
MQVIFSTAPWPNLPRAQASPGKVTEAVKEAIDAGYRHFDCAYFYHNEREVGAGIRCKIKEGAVRREDLFIATKLWCTCHKKSLVETACRKSLKALKLNYLDLYLIHWPMGFKPPHPEWIMSCSELSFCLSHPRVQDLPLDESNMVIPSDTDFLDTWEAMEDLVITGLVKNIGVSNFNHEQLERLLNKPGLRFKPLTNQILIRFQIQRNVIVIPGSITPSHIKENIQVCYTLRGNAIL

SEQ ID NO: 767278 - protein, 114 aa, Homo sapiens
  misc_feature (1)..(1): Xaa can be any naturally occurring amino acid
  misc_feature (107)..(107): Xaa can be any naturally occurring amino acid
XGRKIRLKCFLGRCRSVKEFEKLNRIGEGTYGIVYRARDTQTDEIVALKKVRMDKEKDGIPISSLREITLLLRLRHPNILTDFLPSPCTLEGKVWRLHPWLQGSQCXPSSPCLE

SEQ ID NO: 767279 - protein, 280 aa, Homo sapiens [sequence omitted]

SEQ ID NO: 767280 - protein, 231 aa, Homo sapiens
  misc_feature (7)..(7): Xaa can be any naturally occurring amino acid
MDFCWDXWQRCFQTTNGYLSDSRSRPGNYNVAALATSSLVGVVQSIKDHITKPTAMAQGRVAHLIEWKGWSAQRAGWELSPAEDEHYCCLPDELREARFAAGVAEQFAITEATLSAWSSLDEEELHPENSPQGIVQLQDLESIYLQDSLPSGPSQDDSLQAFSSPSPSPDSCPSPEEPPSTAGIPQPPSPELQHRRRLPGAQGPEGGTHPPGSLPSMDSGSLWEEDEVFYN

SEQ ID NO: 767281 - protein, 88 aa, Homo sapiens
GGARSRPAESGSWVPGPLTSLGCTGRCEPEALSRPSGTGHKRATEMGRELCPQGGGFPSHPRGWLGKGGGFSCGETFRAGLARSLTLG

SEQ ID NO: 767282 - protein, 90 aa, Homo sapiens
SSWYPFPLSKDPNIVIAKMDATANDVPSPYEVRGFPTIYFSPANKKLNPKKYEGGRELSDFISYLQREATNPPVIQEEKPKKKKKAQEDL

SEQ ID NO: 767283 - protein, 505 aa, Homo sapiens
MRLRRLALFPGVALLLAAARLAAASDVLELTDDNFESSISDTGSAGLMLVEFFAPWCGHCKRLAPEYEAAATRLKGIVPLAKVDCTANTNTCNKYGVSGYPTLKIFRDGEEAGAYDGPRTADGIVSHLKKQAGPASVPLRTEEEFKKFISDKDASIVGFFDDSFSEAHSEFLKAASNLRDNYRFAHTNVESLVNEYDDNGEGIILFRPSHLTNKFEDKTVAYTEQKMTSGKIKKFIQENIFGICPHMTEDNKDLIQGKDLLIAYYDVDYEKNAKGSNYWRNRVMMVAKKFLDAGHKLNFAVASRKTFSHELSDFGLESTAGEIPVVAIRTAKGEKFVMQEEFSRDGKALERFLQDYFDGNLKRYLKSEPIPESNDGPVKVVVAENFDEIVNNENKDVLIEFYAPWCGHCKNLEPKYKELGEKLSKDPNIVIAKMDATANDVPSPYEVRGFPTIYFSPANKKLNPKKYEGGRELSDFISYLQREATNPPVIQEEKPKKKKKAQEDL

SEQ ID NO: 767284 - protein, 505 aa, Homo sapiens; identical to SEQ ID NO: 767283

SEQ ID NO: 767285 - protein, 259 aa, Homo sapiens [sequence omitted]

SEQ ID NO: 767286 - protein, 468 aa, Homo sapiens
MRLRRLALFPGVALLLAAARLAAASDVLELTDDNFESSISDTGSAGLMLVEFFAPWCGHCKRLAPEYEAAATRLKGIVPLAKVDCTANTNTCNKYGVSGYPTLKIFRDGEEAGAYDGPRTADGIVSHLKKQAGPASVPLRTEEEFKKFISDKDASIVGFFDDSFSEAHSEFLKAASNLRDNYRFAHTNVESLVNEYDDNGEGIILFRPSHLTNKFEDKTVAYTEQKMTSGKIKKFIQENIFGICPHMTEDNKDLIQGKDLLIAYYDVDYEKNAKGSNYWRNSAGEIPVVAIRTAKGEKFVMQEEFSRDGKALERFLQDYFDGNLKRYLKSEPIPESNDGPVKVVVAENFDEIVNNENKDVLIEFYAPWCGHCKNLEPKYKELGEKLSKDPNIVIAKMDATANDVPSPYEVRGFPTIYFSPANKKLNPKKYEGGRELSDFISYLQREATNPPVIQEEKPKKKKKAQEDL

SEQ ID NO: 767287 - protein, 414 aa, Homo sapiens
MRLRRLALFPGVALLLAAARLAAASDVLELTDDNFESSISDTGSAGLMLVEFFAPWCGHCKRLAPEYEAAATRLKGIVPLAKVDCTANTNTCNKYGVSGYPTLKIFRDGEEAGAYDGPRTADGIVSHLKKQAGPASVPLRTEEEFKKFISDKDASIVGFFDDSFSEAHSEFLKAASNLRDNYRFAHTNVESLVNEYDDNGEGIILFRPSHLTNKFEDKTVAYTEQKMTSGKIKKFIQENIFGICPHMTEDNKDLIQGKDLLIAYYDVDYEKNAKGSNYWRNRVMMVAKKFLDAGHKLNFAVASRKTFSHELSDFGLESTAGEIPVVAIRTAKGEKFVMQEEFSRDGKALERFLQDYFDGNLKRYLKSEPIPESNDGPVKVVVAENFDEIVNNENKDVLIEFYAPWCDPSANNEH

SEQ ID NO: 767288 - protein, 383 aa, Homo sapiens
AEVRLGQTRERSSGLVVARPTSAVPAEPRPFRPSPPHLAAMRLRRLALFPGVALLIAAARLAAASDVLELTDDNFESSISDTGSAGLMLVEFFAPWCGHCKRLAPEYEAAATRLKGIVPLAKVDCTANTNTCNKYGVSGYPTLKIFRDGEEAGAYDGPRTADGIVSHLKKQAGPASVPLRTEEEFKKFISDKDASIVGFFDDSFSEAHSEFLKAASNLRDNYRFAHTNVESLVNEYDDNGEGIILFRPSHLTNKFEDKTVAYTEQKMTSGKIKKFIQENIFGICPHMTEDNKDLIQGKDLLIAYYDVDYEKNAKGSNYWRNRVMMVAKKFLDAGHKLNFAVASRKTFSHELSDFGLESTAGEIPVVAIRTAKGEKFVMQEEFS

SEQ ID NO: 767289 - protein, 168 aa, Homo sapiens [sequence omitted]

SEQ ID NO: 767290 - protein, 97 aa, Homo sapiens
LALLQVIQSDPVQSEYPNIVLAQMDADEMNDSSLLRHEVRSFPTIYFSPANKKLNPKKYEGGRELSDFISYLQREATNPPVIQEEKPKKKKKAQEDL

SEQ ID NO: 767291 - protein, 183 aa, Homo sapiens
LAHRVAAHCVVMSAFCQGLSDILLVGTVRKLEDEISELLALERHGLSPHLSARSIDQSPVLINNIYNRDQFSGMRSKGDIGHPANLQKRLNTMLAALGEKLSKDPNIVIAKMDATANDVPSPYEVRGFPTIYFSPANKKLNPKKYEGGRELSDFISYLQREATNPPVIQEEKPKKKKKAQEDL

SEQ ID NO: 767292 - protein, 186 aa, Homo sapiens
MAGLTDLQRLQARVEELERWVYGPGGARGSRKVADGLVKVQVALGNISSKRERVKILYKKIEDLIKYLDPEYIDRIAIPDASKLQFILAEEQFILSQVALLEQVNALVPMLDSAHIKAVPEHAARLQRLAQIHIQQQDQCVEITEESKALLEEYNKTTMLLSKQFVQWDELLCQLEAATQVKPAEE

SEQ ID NO: 767293 - protein, 186 aa, Homo sapiens; identical to SEQ ID NO: 767292

SEQ ID NO: 767294 - protein, 146 aa, Homo sapiens
HEVLKPCFTELERVKILYKKIEDLIKYLDPEYIDRIAIPDASKLQFILAEEQFILSQVALLEQVNALVPMLDSAHIKAVPEHAARLQRLAQIHIQQQDQCVEITEESKALLEEYNKTTMLLSKQFVQWDELLCQLEAATQVKPAEE

SEQ ID NO: 767295 - protein, 186 aa, Homo sapiens; identical to SEQ ID NO: 767292

SEQ ID NO: 767296 - protein, 186 aa, Homo sapiens; identical to SEQ ID NO: 767292

SEQ ID NO: 767297 - protein, 158 aa, Homo sapiens
MAGLTDLQRLQARVEELERWVYGPGGARGSRKVADGLVKVQVALGNISSKRERVKILYKKIEDLIKYLDPEYIDRIAIPDASKLQFILAAVPEHAARLQRLAQIHIQQQDQCVEITEESKALLEEYNKTTMLLSKQFVQWDELLCQLEAATQVKPAEE

SEQ ID NO: 767298 - protein, 154 aa, Homo sapiens
MAGLTDLQRLQARVEELERWVYGPGGARGSRKVADGLVKVQVALGNISSKRERVKILYKKIEDLIKYLDPEYIDRIAIPDASKLQFILAEEQFILSQVALLEQVNALVPMLDSAHIKAVPEHAARLQRLAQIHIQQQFLSVLHFGPTGPVCGNH

SEQ ID NO: 767299 - protein, 176 aa, Homo sapiens
MAGLTDLQRLQARVEELERWVYGPGGARGSRKVADGLVKVQVALGNISSKRERVKILYKKIEDLIKYLDPEYIDRIAIPDASKLQFILAEEQFILSQVALLEQVNALVPMLDSAHIKAVPEHAARLQRLAQIHIQQQIPILTLTYNQTMLLSKQFVQWDELLCQLEAATQVKPAEE

SEQ ID NO: 767300 - protein, 186 aa, Homo sapiens; identical to SEQ ID NO: 767292

SEQ ID NO: 767301 - protein, 176 aa, Homo sapiens
MAGLTDLQRLQARVEELERWVYGPGGARGSRKVADGLVKVQVALGNISSKRERVKILYKKIEDLIKYLDPEYIDRIAIPDASKLQFILAEEQFILSQVALLEQVNALVPMLDSAHIKAVPEHAARLQRLAQIHIQQQAPWGVGVRDEAGSLVEDVGFAQFLSVLHFGPTGPVCGNH

SEQ ID NO: 767302 - protein, 186 aa, Homo sapiens; identical to SEQ ID NO: 767292

SEQ ID NO: 767303 - protein, 129 aa, Homo sapiens
LQECNLGKDKLLLCKDELQLRGIRYGNAVDVLRIQVLDQIFNLFVENLHPLPLAGQLLTSTVPEHAARLQRLAQIHIQQQDQCVEITEESKALLEEYNKTTMLLSKQFVQWDELLCQLEAATQVKPAEE

SEQ ID NO: 767304 - protein, 163 aa, Homo sapiens
MAGLTDLQRLQARVEELERWVYGPGGARGSRKVADGLVKVQVALGNISSKRERVKILYKKIEDLIKYLDPEYIDRIAIPDASKLQFILAEEQFILSQVALLEQVNALVPMLDSAHIKAVPEHAARLQRLAQIHIQQQDQCVEITEESKALLEEYNKTVSFLLN

SEQ ID NO: 767305 - protein, 167 aa, Homo sapiens
MAGLTDLQRLQARVEELERWVYGPGGARGSRKVADGLVKVQVALGNISSKRERVKILYKKIEDLIKYLDPEYIDRIAIPDASKLQFILAGNAGLHVYMHLRMWVVGEVKHRDGLSIQSSGGYKPWMLLSGIVAWFWVEDPMDPLVDIEYSIPLHQLQAMVPATVGAS

SEQ ID NO: 767306 - protein, 75 aa, Homo sapiens
LNPSGYPFKYSEQFSQLLVFKCLLERQSFSIHLPSSFGLREGSHTHAFGLLMRLETARAELDDPSHSPSFTALFV

SEQ ID NO: 767307 - protein, 305 aa, Homo sapiens
MENSQLCKLFIGGLNVQTSESGLRGHFEAFGTLTDCVVVVNPQTKRSRCFGFVTYSNVEEADAAMAASPHAVDGNTVELKRAVSREDSARPGAHAKVKKLFVGGLKGDVAEGDLIEHFSQFGTVEKAEIIADKQSGKKRGFGFVYFQNHDAADKAAVVKFHPIQGHRVEVKKAVPKEDIYSGGGGGGSRSSRGGRGGRGRGGGRDQNGLSKGGGGGYNSYGGYGGGGGGGYNAYGGGGGGSSYGGSDYGNGFGGFGSYSQHQSSYGPMKSGGGGGGGGSSWGGRSNSGPYRGGYGGGGGYGGSSF

SEQ ID NO: 767308 - protein, 86 aa, Homo sapiens
LSSGRGRRGGGYNAYGGGGGGSSYGGSDYGNGFGGFGSYSQHQSSYGPMKSGGGGGGGGSSWGGRSNSGPYRGGYGGGGGYGGSSF

SEQ ID NO: 767309 - protein, 305 aa, Homo sapiens; identical to SEQ ID NO: 767307

SEQ ID NO: 767310 - protein, 305 aa, Homo sapiens; identical to SEQ ID NO: 767307

SEQ ID NO: 767311 - protein, 305 aa, Homo sapiens; identical to SEQ ID NO: 767307

SEQ ID NO: 767312 - protein, 305 aa, Homo sapiens; identical to SEQ ID NO: 767307

SEQ ID NO: 767313 - protein, 305 aa, Homo sapiens; identical to SEQ ID NO: 767307

SEQ ID NO: 767314 - protein, 305 aa, Homo sapiens; identical to SEQ ID NO: 767307

SEQ ID NO: 767315 - protein, 305 aa, Homo sapiens; identical to SEQ ID NO: 767307

SEQ ID NO: 767316 - protein, 305 aa, Homo sapiens; identical to SEQ ID NO: 767307

SEQ ID NO: 767317 - protein, 305 aa, Homo sapiens; identical to SEQ ID NO: 767307

SEQ ID NO: 767318 - protein, 305 aa, Homo sapiens; identical to SEQ ID NO: 767307

SEQ ID NO: 767319 - protein, 305 aa, Homo sapiens; identical to SEQ ID NO: 767307

SEQ ID NO: 767320 - protein, 193 aa, Homo sapiens
QFEEEPIERLSVPDIPKEHFGQRLLVKCLSLKFEIEIEPIFASLALYDVKEKKKISENFYFDLNSEQMKGLLRPHVPPAAITTLARSAIFSITYPSQDVFLVIKLEKVLQQGDIGECAEPYMIFKEADATKNKEKLEKLKSQADQFCQRLGKYRMPFAWTAIHLMNIVSSAGSLERDSTEVEISTGGKSVSYK

SEQ ID NO: 767321 - protein, 140 aa, Homo sapiens
MDRSNPVKPALDYFSNRLVNYQISVKCSNQFKLEVCLLNAENKVVDNQAGTQGQLKVLGANLWWPYLMHEHPASLYSWEDGDCSHQSLGPLPACDLCDQLHLRSRQGGSVCGCDPCEQLLLLVSQLRAPGVDSAAAGRPV

SEQ ID NO: 767322 - protein, 140 aa, Homo sapiens; identical to SEQ ID NO: 767321

SEQ ID NO: 767323 - protein, 140 aa, Homo sapiens; identical to SEQ ID NO: 767321

SEQ ID NO: 767324 - protein, 140 aa, Homo sapiens; identical to SEQ ID NO: 767321

SEQ ID NO: 767325 - protein, 140 aa, Homo sapiens; identical to SEQ ID NO: 767321

SEQ ID NO: 767326 - protein, 155 aa, Homo sapiens
MVIAHTKALDPSQPVTFVTNSTYAADKGALYVDVIRVNSYYSWYRNYGHLELIQLQLAAQFENWCKTSQSHYSERVWSGNACRVSPVFPRNSDEVFQQNERVNQEEDDIRSRRYNRGDNLQDACEERSLDPRMIIGQVVHNPAGQKTSRETHSRR

SEQ ID NO: 767327 - protein, 140 aa, Homo sapiens; identical to SEQ ID NO: 767321

SEQ ID NO: 767328 - protein, 186 aa, Homo sapiens
MVIAHTKALDPSQPVTFVTNSTYAADKGALYVDVIRVNSYYSWYRNYGHLELIQLQLAAQFENWCKTSQSHYSERVWSGNACRVSPGLVNYQISVKCSNQFKLEVCLLNAENKVVDNQAGTQGQLKVLGANLWWPYLMHEHPASLYSWEDGDCSHQSLGPLPACDLCDNSTYAADKGALYVDVIRV

SEQ ID NO: 767329 - protein, 140 aa, Homo sapiens; identical to SEQ ID NO: 767321

SEQ ID NO: 767330 - protein, 75 aa, Homo sapiens
SPCVSVLLFGGGGGGKMAAHGGSAASSALKGLIQQFTTITDRVLLCHPGWSTMVRSQLTATSASRVQAVLLASAS

SEQ ID NO: 767331 - protein, 505 aa, Homo sapiens
SPCVSVLLFGGGGGGKMAAHGGSAASSALKGLIQQFTTITGASESVGKHMLEACNNNLEMAVTMFLDGGGIAEEPSTSSASVSTVRPHTEEEVRAPIPQKQEILVEPEPLFGAPKRRRPARSIFDGFRDFQTETIRQEQELRNGGAIDKKLTTLADLFRPPIDLMHKGSFETAKECGQMQNKWLMINIQNVQDFACQCLNRDVWSNEAVKNIIREHFIFWQVYHDSEEGQRYIQFYKLGDFPYVSILDPRTGQKLVEWHQLDVSSFLDQVTGFLGEHGQLDGLSSSPPKKCARSESLIDASEDSQLEAAIRASLQETHFDSTQTKQDSRSDEESESELFSGSEEFISVCGSDEEEEVENLAKSRKSPHKDLGHRKEENRRPLTEPPVRTDPGTATNHQGLPAVDSEILEMPPEKADGVVEGIDVNGPKAQLMLRYPDGKREQITLPEQAKLLALVKHVQSKGYPNERFELLTNFPRRKLSHLDYDITLQEAGLCPQETVFVQERN

SEQ ID NO: 767332 - protein, 505 aa, Homo sapiens; identical to SEQ ID NO: 767331

SEQ ID NO: 767333 - protein, 435 aa, Homo sapiens
LVYPPAVQFMQVPTVRPYTEEEVRAPIPQKQEILVEPEPLFGAPKRRRPARSIFDGFRDFQTETIRQEQELRNGGAIDKKLTTLADLFRPPIDLMHKGSFETAKECGQMQNKWLMINIQNVQDFACQCLNRDVWSNEAVKNIIREHFIFWQVYHDSEEGQRYIQFYKLGDFPYVSILDPRTGQKLVEWHQLDVSSFLDQVTGFLGEHGQLDGLSSSPPKKCARSESLIDASEDSQLEAAIRASLQETHFDSTQTKQDSRSDEESESELFSGSEEFISVCGSDEEEEVENLAKSRKSPHKDLGHRKEENRRPLTEPPVRTDPGTATNHQGLPAVDSEILEMPPEKADGVVEGIDVNGPKAQLMLRYPDGKREQITLPEQAKLLALVKHVQSKGYPNERFELLTNFPRRKLSHLDYDITLQEAGLCPQETVFVQERN

SEQ ID NO: 767334 - protein, 505 aa, Homo sapiens; identical to SEQ ID NO: 767331

SEQ ID NO: 767335 - protein, 120 aa, Homo sapiens
HLMEHTIPAASTRRGLILTLQFGHQIGKKEKCGGRGIDVNGPKAQLMLRYPDGKREQITLPEQAKLLALVKHVQSKGYPNERFELLTNFPRRKLSHLDYDITLQEAGLCPQETVFVQERN

SEQ ID NO: 767336 - protein, 700 aa, Homo sapiens
MLGRKRTRKIDFESDKRKIQGDGMETTRKAGRGGSCLESQHFGRRRWADHLRSGDRGQPEQHGETPSLLKIQKLPGCGGVHLYIPATQRLRQGNGLNLGGRGCSEPRSHHYTPAWATKRHSISNLKKKKKKKKKTSGKKDERNTFLKLVSEGTGEEKTTVPNEKRTGNLILIGMHQILLCTFASSISRRIVQNVYFLPMLRKQVERTYSGLIASEWQIRIGIQSPCCGLLQQENQATQMILFSLFGFVKCHLVLFPSNIEEVVGLKLWDLHYAYTFLFMPLFGEADYCFFKMMHWRRCESKIATWHYLPRINEKGKKTIFSFFKHFSEKIQLPFLIGERHHARLIFDIFSETPSLLKNTKISQAWWLSVIPANGEAEAQESLEPEEAEVAVSRDHTTALHPGQWSETLSQKIINEDMIPACFIQLERHTTHEIIGEHVNVYLLVQLRKREEYVLVSKVLNKTEVASTVAHVFFGLTFFFSSTFCNFYDLGHEVLPLRHNQYPSRKGLLIPGVKIPSLRGSHYGSPGVKIPSSQESYLQHLGKIPEGATSNRKMKERFNFSTQVTNPMHSIVYVICRKGTGGVRALWVTALLVVTFTLLFLLNLWFLVLKNEIIGQINSSQPFLEQQIRLSLKSFSKISCFQSLPVIAIIPRLIKSVLVNQFLYFFFLSFFYSVFRYHLTNNLLFNLTAMTEISKEESIVV

SEQ ID NO: 767337 - protein, 210 aa, Homo sapiens
SPCVSVLLFGGGGGGKMAAHGGSAASSALKGLIQQFTTITGASESVGKHMLEACNNNLEMAVTMFLDGGGIAEEPSTSSASVSTVRPHTEEEVRAPIPQKQEILVEPEPLFGAPKRRRPARSIFDGFRDFQTETIRQEQELRNGGAIDKKLTTLADLFRPPIDLMHKGSFETAKECGQMQNKWLMINIQNVQRSCEEYYPGTFHFLAGLS

SEQ ID NO: 767338 - protein, 505 aa, Homo sapiens; identical to SEQ ID NO: 767331

SEQ ID NO: 767339 - protein, 505 aa, Homo sapiens; identical to SEQ ID NO: 767331

SEQ ID NO: 767340 - protein, 470 aa, Homo sapiens
SPCVSVLLFGGGGGGKMAAHGGSAASSALKGLIQQFTTITGASESVGKHMLEACNNNLEMAVTMFLDGGGIAEEPSTSSASVSTVRPHTEEEVRAPIPQKQEILVEPEPLFGAPKRRRPARSIFDGFRDFQTETIRQEQELRNGGAIDKKLTTLADLFRPPIDLMHKGSFETAKECGQMQNKWLMINIQNVQDFACQCLNRDVWSNEAVKNIIREHFIFWQVYHDSEEGQRYIQFYKLGDFPYVSILDPRTGQKLVEWHQLDVSSFLDQVTGFLGEHGQLDGLSSSPPKKCARSESLIDASEDSQLEAAIRASLQETHFDSTQTKQDSRSDEESESELFSGSEEFISVCGSDEEEEVENLAKSRKSPHKDLGHRKEENRRPLTEPPVRTDPGTATNHQGLPAVDSEILEMPPEKADGVVEGIDVNGPKAQLMLRYPDGKREQITLPEQAKLLALVSTCSLKTRCYRQHEL

SEQ ID NO: 767341 - protein, 321 aa, Homo sapiens
SPCVSVLLFGGGGGGKMAAHGGSAASSALKGLIQQFTTITGASESVGKHMLEACNNNLEMAVTMFLDGGGIAEEPSTSSASVSTVRPHTEEEVRAPIPQKQEILVEPEPLFGAPKRRRPARSIFDGFRDFQTETIRQEQELRNGGAIDKKLTTLADLFRPPIDLMHKGSFETAKECGQMQNKWLMINIQNVQDFACQCLNRDVWSNEAVKNIIREHFIFWQVYHDSEEGQRYIQFYKLGDFPYVSILDPRTGQKLVEWHQLDVSSFLDQVTGFLGEHGQLDGLSSSPPKKCARSESLIDASEDSQLEAAIRASLQETHQIN

SEQ ID NO: 767342 - protein, 422 aa, Homo sapiens
MGRNVMRHMSDDLGSYVSLSCDDFSSQELEIFICSFSSSWLQMFVAEAVFKKLCLQSSGSVSSEPLSLQKMVYSYLPALGKTGVLGSGKIQVSKKIGQRPCFDSQRTLLMLNGTKQKQVEGLPELLDLNLAKCSSSLKKLKKKSEGELSCSKENCPSVVKKMNFHKTNLKGETALHRACINNQVEKLILLLSLPGIDINVKDNAGWTPLHEACNYGNTVCVQEILQRCPEVDLLTQVDGVTPLHDALSNGHVEIGKLLLQHGGPVLLQQRNAKGELPLDYVVSPQIKEELFAITKIEDTVENFHAQAEKHFHYQQLEFGSFLLSRMLLNFCSIFDLSSEFILASKGLTHLNELLMACKSHKETTSVHTDWLLDLYAGNIKTLQKLPHILKELPENLKVCPGVHTEALMITLEMMCRSVMEFS

SEQ ID NO: 767343 - protein, 422 aa, Homo sapiens; identical to SEQ ID NO: 767342

SEQ ID NO: 767344 - protein, 422 aa, Homo sapiens; identical to SEQ ID NO: 767342

SEQ ID NO: 767345 - protein, 116 aa, Homo sapiens
LSFFLNLLLSLTKPKELQPNSKSHPTQDQNWMSQKCVLFLQELIDMPVSDLPRMRPQLPVAHEPRLAFSILGVSLHHLSIHPSLHSFNHETIHSSLNGSFFKRFVIELSPSTSTLS

SEQ ID NO: 767346 - protein, 73 aa, Homo sapiens
SQKRLRNDLMEEIQKTQTDLTGMRNYNIDSGNYPGWGNRLDFTEETMRHLEDTSVETICICWASRETEPIGDS

SEQ ID NO: 767347 - protein, 115 aa, Homo sapiens
VPYVPGPFSDTPEFTYQPQQPGQDFPVSPWLTLCPVGCPECPPHLWDTEEHLKLSSASLKVYSKLALGPLQLQRSVAGSFLEAVIMHCRTAQPRCTSCLSRGPNLAPTTGRARGH

SEQ ID NO: 767348 - protein, 91 aa, Homo sapiens
TEKAPGNRTSAHKPCIRAASGLSEGGDLGKSSDFRRCEGGKGSRCDGSFQSAGMGPLPRLLELRAPLRPAPPHPQQYASLACFRIHLEFGL

SEQ ID NO: 767349 - protein, 132 aa, Homo sapiens
LFSAINKTEAVRCEYEDTHKAFAKAFWRMDRLLGLGRKEVSRVQWSGCSAVTCILEGKPKSPYAHKNWKRKNTHDGLAESSPSQEMPKIISGILHVANTDVILGVICHICKMSILSHNPSQLCQHFPSKLQT

SEQ ID NO: 767350 - protein, 756 aa, Homo sapiens
MAQQGQQGQMASGDSNLNFRMVAEIQNVEGQNLQEQVCPEPIFRFFRENKVEIASAITRPFPFLMGLRDRSFISEQMYEHFQEAFRNLVPVTRVMYCVLSELEKTFGWSHLEALFSRINLMAYPDLNEIYRSFQNVCYEHSPLQMNNVNDLEDRPRLLPYGKQENSNACHEMDDIAVPQEALSSSARCEPGFSSESCEQLALPKAGGGDAEDAPSLLPGGGVSCKLAIQIDEGESEEMPKLLPYDTEETFDLKTPQVTNEGEPEKGLCLLPGEGEEGSDDCSEMCDGEERQEASSSLARRGSVSSELENHPMNEEGESEELASSLLYDNVPGAEQSAYENEKCSCVMCFSEEVPGSPEARTESDQACGTMDTVDIANNSTLGKPKRKRRKKRGHGWSRMRMRRQKNSQQNDNSKADGQVVSSEKKANVNLKDLSKIRGRKRGKPGTRFTQSDRAAQKRVRSRASRKHKDETVDFKAPLLPVTCGGVKGILHKKKLQQGILVKCIQTEDGKWFTPTEFEIKGGHARSKNWRLSVRCGGWPLRWLMENGFLPDPPRIRYRKKKRILKSQNNSSVDPCMRNLDECEVCRDGGELFCCDTCSRVFHEDCHIPPVEAERTPWNCIFCRMKESPGSQQCCQESEVLERQMCPEEQLKCEFLLLKVYCCSESSFFAKIPYYYYIREACQGLKEPMWLDKIKKRLNEHGYPQVEGFVQDMRLIFQNHRASYKYKDFGQMGFRLEAEFEKNFKEVFAIQETNGNN

SEQ ID NO: 767351 - protein, 770 aa, Homo sapiens
MAQQGQQGQMASGDSNLNFRMVAEIQNVEGQNLQEQVCPEPIFRFFRENKVEIASAITRPFPFLMGLRDRSFISEQMYEHFQEAFRNLVPVTRVMYCVLSELEKTFGWSHLEALFSRINLMAYPDLNEIYRSFQNVCYEHSPLQMNNVNDLEDRPRLLPYGKQENSNACHEMDDIAVPQEALSSSARCEPGFSSESCEQLALPKAGGGDAEDAPSLLPGGGVSCKLAIQIDEGESEEMPKLLPYDTEVLESNGMIDAARTYSTAPGEKQGEEEGRNSPRKRNQDKEKYQESPEGRDKETFDLKTPQVTNEGEPEKGLCLLPGEGEEGSDDCSEMCDGEEPQEASSSLARCGSEGSDDCSEMCDGEERQEAQKQGRKVIKRVAQWILWILQTTPLWENPRGKEEKRGGMAGAEMRMRRQKNSQQNDNSKADGQVVSSEKKANVNLKDLSKIRGRKRGKPGTRFTQSDRAAQKRVRSRASRKHKDETVDFKAPLLPVTCGGVKGILHKKKLQQGILVKCIQTEDGKWFTPTEFEIKGGHARSKNWRLSVRCGGWPLRWLMENGFLPDPPRIRYRKKKRILKSQNNSSVDPCMRNLDECEVCRDGGELFCCDTCSRVFHEDCHIPPVEAERTPWNCIFCRMKESPGSQQCCQESEVLERQMCPEEQLKCEFLLLKVYCCSESSFFAKIPYYYYIREACQGLKEPMWLDKIKKRLNEHGYPQVEGFVQDMRLIFQNHRASYKYKDFGQMGFRLEAEFEKNFKEVFAIQETNGNN

SEQ ID NO: 767352 - protein, 152 aa, Homo sapiens
MAQQGQQGQMASGDSNLNFRMVAEIQNVEGQNLQEQVCPEPIFRFFRENKVEIASAITRPFPFLMGLRDRSFISEQMYEHFQEAFRNLVPVTRVMYCVLSELEKTFGWSHLEALFSRINLMAYPDLNEIYRSFQNGNYSSQQLWGIQAHFIH

SEQ ID NO: 767353 - protein, 847 aa, Homo sapiens
MVAEIQNVEGQNLQEQVCPEPIFRFFRENKVEIASAITRPFPFLMGLRDRSFISEQMYEHFQEAFRNLVPVTRVMYCVLSELEKTFGWSHLEALFSRINLMAYPDLNEIYRSFQNVCYEHSPLQMNNVNDLEDRPRLLPYGKQENSNACHEMDDIAVPQEALSSSARCEPGFSSESCEQLALPKAGGGDAEDAPSLLPGGGVSCKLAIQIDEGESEEMPKLLPYDTEVLESNGMIDAARTYSTAPGEKQGEEEGRNSPRKRNQDKEKYQESPEGRDKETFDLKTPQVTNEGEPEKGLCLLPGEGEEGSDDCSEMCDGEEPQEASSSLARCGSVSCLSAETFDLKTPQVTNEGEPEKELSLLPGEGEEGSDDCSEMCDGEERQEASSSLARRGSVSSELENHPMNEEGESEELASSLLYDNVPGAEQSAYENEKCSCVMCFSEEVPGSPEARTESDQACGTMDTVDIANNSTLGKPKRKRRKKRGHGWSRMRMRRQKNSQQNDNSKADGQVVSSEKKANVNLKDLSKIRGRKRGKPGTRFTQSDRAAQKRVRSRASRKHKDETVDFKAPLLPVTCGGVKGILHKKKLQQGILVKCIQTEDGKWFTPTEFEIKGGHARSKNWRLSVRCGGWPLRWLMENGFLPDPPRIRYRKKKRILKSQNNSSVDPCMRNLDECEVCRDGGELFCCDTCSRVFHEDCHIPPVEAERTPWNCIFCRMKESPGSQQCCQESEVLERQMCPEEQLKCEFLLLKVYCCSESSFFAKIPYYYYIREACQGLKEPMWLDKIKKRLNEHGYPQVEGFVQDMRLIFQNHRASYKYKDFGQMGFRLEAEFEKNFKEVFAIQETNGNN

SEQ ID NO: 767354 - protein, 172 aa, Homo sapiens
MAQQGQQGQMASGDSNLNFRMVAEIQNVEGQNLQEQVCPEPIFRFFRENKVEIASAITRPFPFLMGLRDRSFISEQMYEHFQEAFRNLVPVTRVMYCVLSELEKTFGWSHLEALFSRINLMAYPDLNEIYRSFQNENLSSSAVLCQLVSPNKDWRSHEESLAHTGTLRRSCM

SEQ ID NO: 767355 - protein, 152 aa, Homo sapiens
MVAEIQNVEGQNLQEQVCPEPIFRFFRENKVEIASAITRPFPFLMGLRDRSFISEQMYEHFQEAFRNLVPVTRVMYCVLSELEKTFGWSHLEALFSRINLMAYPDLNEIYRSFQNENLSSSAVLCQLVSPNKDWRSHEESLAHTGTLRRSCM

SEQ ID NO: 767356 - protein, 867 aa, Homo sapiens
MAQQGQQGQMASGDSNLNFRMVAEIQNVEGQNLQEQVCPEPIFRFFRENKVEIASAITRPFPFLMGLRDRSFISEQMYEHFQEAFRNLVPVTRVMYCVLSELEKTFGWSHLEALFSRINLMAYPDLNEIYRSFQNVCYEHSPLQMNNVNDLEDRPRLLPYGKQENSNACHEMDDIAVPQEALSSSARCEPGFSSESCEQLALPKAGGGDAEDAPSLLPGGGVSCKLAIQIDEGESEEMPKLLPYDTEVLESNGMIDAARTYSTAPGEKQGEEEGRNSPRKRNQDKEKYQESPEGRDKETFDLKTPQVTNEGEPEKGLCLLPGEGEEGSDDCSEMCDGEEPQEASSSLARCGSVSCLSAETFDLKTPQVTNEGEPEKELSLLPGEGEEGSDDCSEMCDGEERQEASSSLARRGSVSSELENHPMNEEGESEELASSLLYDNVPGAEQSAYENEKCSCVMCFSEEVPGSPEARTESDQACGTMDTVDIANNSTLGKPKRKRRKKRGHGWSRMRMRRQKNSQQNDNSKADGQVVSSEKKANVNLKDLSKIRGRKRGKPGTRFTQSDRAAQKRVRSRASRKHKDETVDFKAPLLPVTCGGVKGILHKKKLQQGILVKCIQTEDGKWFTPTEFEIKGGHARSKNWRLSVRCGGWPLRWLMENGFLPDPPRIRYRKKKRILKSQNNSSVDPCMRNLDECEVCRDGGELFCCDTCSRVFHEDCHIPPVEAERTPWNCIFCRMKESPGSQQCCQESEVLERQMCPEEQLKCEFLLLKVYCCSESSFFAKIPYYYYIREACQGLKEPMWLDKIKKRLNEHGYPQVEGFVQDMRLIFQNHRASYKYKDFGQMGFRLEAEFEKNFKEVFAIQETNGNN

SEQ ID NO: 767357 - protein, 723 aa, Homo sapiens
MNNVNDLEDRPRLLPYGKQENSNACHEMDDIAVPQEALSSSARCEPGFSSESCEQLALPKAGGGDAEDAPSLLPGGGVSCKLAIQIDEGESEEMPKLLPYDTEVLESNGMIDAARTYSTAPGEKQGEEEGRNSPRKRNQDKEKYQESPEGRDKETFDLKTPQVTNEGEPEKGLCLLPGEGEEGSDDCSEMCDGEEPQEASSSLARCGSVSCLSAETFDLKTPQVTNEGEPEKELSLLPGEGEEGSDDCSEMCDGEERQEASSSLARRGSVSSELENHPMNEEGESEELASSLLYDNVPGAEQSAYENEKCSCVMCFSEEVPGSPEARTESDQACGTMDTVDIANNSTLGKPKRKRRKKRGHGWSRMRMRRQKNSQQNDNSKADGQVVSSEKKANVNLKDLSKIRGRKRGKPGTRFTQSDRAAQKRVRSRASRKHKDETVDFKAPLLPVTCGGVKGILHKKKLQQGILVKCIQTEDGKWFTPTEFEIKGGHARSKNWRLSVRCGGWPLRWLMENGFLPDPPRIRYRKKKRILKSQNNSSVDPCMRNLDECEVCRDGGELFCCDTCSRVFHEDCHIPPVEAERTPWNCIFCRMKESPGSQQCCQESEVLERQMCPEEQLKCEFLLLKVYCCSESSFFAKIPYYYYIREACQGLKEPMWLDKIKKRLNEHGYPQVEGFVQDMRLIFQNHRASYKYKDFGQMGFRLEAEFEKNFKEVFAIQETNGNN

SEQ ID NO: 767358 - protein, 104 aa, Homo sapiens
MLKAFSKWHPKICRWFATDFKMRSLGHSTCREGLFSEPPSSAQRQILKRKFNHHESQPQVSHQPGKSKWDHREGCWQRHHPIQALTSSPEGCSRQHLLPRRPFV

SEQ ID NO: 767359 - protein, 581 aa, Homo sapiens
MNNVNDLEDRPRLLPYGKQENSNACHEMDDIAVPQEALSSSARCEPGFSSESCEQLALPKAGGGDAEDAPSLLPGGGVSCKLAIQIDEGESEEMPKLLPYDTEVLESNGMIDAARTYSTAPGEKQGEEEGRNSPRKRNQDKEKYQESPEGRDKETFDLKTPQVTNEGEPEKGLCLLPGEGEEGSDDCSEMCDGEEPQEASSSLARCGSVSCLSAETFDLKTPQVTNEGEPEKELSLLPGEGEEGSDDCSEMCDGEERQEASSSLARRGSVSSELENHPMNEEGESEELASSLLYDNVPGAEQSAYENEKCSCVMCFSEEVPGSPEARTESDQACGTMDTVDIANNSTLGKPKRKRRKKRGHGWSRMRMRRQKNSQQNDNSKADGQVVSSEKKANVNLKDLSKIRGRKRGKPGTRFTQSDRAAQKRVRSRASRKHKDETVDFKAPLLPVTCGGVKGILHKKKLQQGILVKCIQTEDGKWFTPTEFEIKGGHARSKNWRLSVRCGGWPLRWLMENGFLPDPPRIRYRKKKRILKSQNNSSVDPCMRNLDECEVCRDGGELFCCDTCSRVFHEDCHIPPVEAER

SEQ ID NO: 767360 - protein, 137 aa, Homo sapiens
RVRMRYPQGHYDCALGDEVILKGTTTVPLGMRYPLKMVSVLYDNQEFPDPEKFKPEHFLNENGKFKYSDYFKPFSTGKRVCAGEGLARMELFLLLCAILQHFNLKPLVDPKDIDLSPIHIGFGCIPPRYKLCVIPRS

SEQ ID NO: 767361 - protein, 493 aa, Homo sapiens
MSALGVTVALLVWAAFLLLVSMWRQVHSSWNLPPGPFPLPIIGNLFQLELKNIPKSFTRLAQRFGPVFTLYVGSQRMVVMHGYKAVKEALLDYKDEFSGRGDLPAFHAHRDRGIIFNNGPTWKDIRRFSLTTLRNYGMGKQGNESRIQREAHFLLEALRKTQGQPFDPTFLIGCAPCNVIADILFRKHFDYNDEKFLRLMYLFNENFHLLSTPWLQLYNNFPSFLHYLPGSHRKVIKNVAEVKEYVSERVKEHHQSLDPNCPRDLTDCLLVEMEKEKHSAERLYTMDGITVTVADLFFAGTETTSTTLRYGLLILMKYPEIEEKLHEEIDRVIGPSRIPAIKDRQEMPYMDAVVHEIQRFITLVPSNLPHEATRDTIFRGYLIPKGTVVVPTLDSVLYDNQEFPDPEKFKPEHFLNENGKFKYSDYFKPFSTGKRVCAGEGLARMELFLLLCAILQHFNLKPLVDPKDIDLSPIHIGFGCIPPRYKLCVIPRS

SEQ ID NO: 767362 - protein, 258 aa, Homo sapiens
MSALGVTVALLVWAAFLLLVSMWRQVHSSWNLPPGPFPLPIIGNLFQLELKNIPKSFTRLAQRFGPVFTLYVGSQRMVVMHGYKAVKEALLDYKDEFSGRGDLPAFHAHRDRGIIFNNGPTWKDIRRFSLTTLRNYGMGKQGNESRIQREAHFLLEALRKTQGQPFDPTFLIGCAPCNVIADILFRKHFDYNDEKFLRLMYLFNENFHLLSTPWLQLYNNFPSFLHYLPGSHRKVIKNVAEVPDLPMAVLKWRGKPVP

SEQ ID NO: 767363 - protein, 493 aa, Homo sapiens; identical to SEQ ID NO: 767361

SEQ ID NO: 767364 - protein, 475 aa, Homo sapiens
MSALGVTVALLVWAAFLLLVSMWRQVHSSWNLPPGPFPLPIIGNLFQLELKNIPKSFTRLAQRFGPVFTLYVGSQRMVVMHGYKAVKEALLDYKDEFSGRGDLPAFHAHRDRGIIFNNGPTWKDIRRFSLTTLRNYGMGKQGNESRIQREAHFLLEALRKTQGQPFDPTFLIGCAPCNVIADILFRKHFDYNDEKFLRLMYLFNENFHLLSTPWLQLYNNFPSFLHYLPGSHRKVIKNVAEVKEYVSERVKEHHQSLDPNCPRDLTDCLLVEMEKADLFFAGTETTSTTLRYGLLILMKYPEIEEKLHEEIDRVIGPSRIPAIKDRQEMPYMDAVVHEIQRFITLVPSNLPHEATRDTIFRGYLIPKGTVVVPTLDSVLYDNQEFPDPEKFKPEHFLNENGKFKYSDYFKPFSTGKRVCAGEGLARMELFLLLCAILQHFNLKPLVDPKDIDLSPIHIGFGCIPPRYKLCVIPRS

SEQ ID NO: 767365 - protein, 272 aa, Homo sapiens
MSALGVTVALLVWAAFLLLVSMWRQVHSSWNLPPGPFPLPIIGNLFQLELKNIPKSFTRLAQRFGPVFTLYVGSQRMVVMHGYKAVKEALLDYKDEFSGRGDLPAFHAHRDRGIIFNNGPTWKDIRRFSLTTLRNYGMGKQGNESRIQREAHFLLEALRKTQGQPFDPTFLIGCAPCNVIADILFRKHFDYNDEKFLRLMYLFNENFHLLSTPWLQLYNNFPSFLHYLPGSHRKVIKNVAEVVPGTSPTACSWKWRRKSTVQSACTQWTVSP

SEQ ID NO: 767366 - protein, 417 aa, Homo sapiens
MVVMHGYKAVKEALLDYKDEFSGRGDLPAFHAHRDRGIIFNNGPTWKDIRRFSLTTLRNYGMGKQGNESRIQREAHFLLEALRKTQGQPFDPTFLIGCAPCNVIADILFRKHFDYNDEKFLRLMYLFNENFHLLSTPWLQLYNNFPSFLHYLPGSHRKVIKNVAEVKEYVSERVKEHHQSLDPNCPRDLTDCLLVEMEKEKHSAERLYTMDGITVTVADLFFAGTETTSTTLRYGLLILMKYPEIEEKLHEEIDRVIGPSRIPAIKDRQEMPYMDAVVHEIQRFITLVPSNLPHEATRDTIFRGYLIPKGTVVVPTLDSVLYDNQEFPDPEKFKPEHFLNENGKFKYSDYFKPFSTGKRVCAGEGLARMELFLLLCAILQHFNLKPLVDPKDIDLSPIHIGFGCIPPRYKLCVIPRS

SEQ ID NO: 767367 - protein, 622 aa, Homo sapiens
MSALGVTVALLVWAAFLLLVSMWRQVHSSWNLPPGPFPLPIIGNLFQLELKNIPKSFTRLAQRFGPVFTLYVGSQRMVVMHGYKAVKEALLDYKDEFSGRGDLPAFHAHRDRGIIFNNGPTWKDIRRFSLTTLRNYGMGKQGNESRIQREAHFLLEALRKTQGAYLLPSRAQSSCRPAVWGALAGTPRLHLNHRDLRTRRGSRESPDTAFYNSRFQLHSSGSKVAIKHVTCILNTVEKQRKLKQVQTFTIFVNWQFSGHLLTGLGEPQWVTEQVEESPHPHLLVALTACFVGQPFDPTFLIGCAPCNVIADILFRKHFDYNDEKFLRLMYLFNENFHLLSTPWLQLYNNFPSFLHYLPGSHRKVIKNVAEVKEYVSERVKEHHQSLDPNCPRDLTDCLLVEMEKEKHSAERLYTMDGITVTVADLFFAGTETTSTTLRYGLLILMKYPEIEEKLHEEIDRVIGPSRIPAIKDRQEMPYMDAVVHEIQRFITLVPSNLPHEATRDTIFRGYLIPKGTVVVPTLDSVLYDNQEFPDPEKFKPEHFLNENGKFKYSDYFKPFSTGKRVCAGEGLARMELFLLLCAILQHFNLKPLVDPKDIDLSPIHIGFGCIPPRYKLCVIPRS

SEQ ID NO: 767368 - protein, 475 aa, Homo sapiens
MSALGVTVALLVWAAFLLLVSMWRQVHSSWNLPPGPFPLPIIGNLFQLELKNIPKSFTRLAQRFGPVFTLYVGSQRMVVMHGYKAVKEALLDYKDEFSGRGDLPAFHAHRDRGIIFNNGPTWKDIRRFSLTTLRNYGMGKQGNESRIQREAHFLLEALRKTQGQPFDPTFLIGCAPCNVIADILFRKHFDYNDEKFLRLMYLFNENFHLLSTPWLQLYNNFPSFLHYLPGSHRKVIKNVAEVKEYVSERVKEHHQSLDPNCPRDLTDCLLVEMEKEKHSAERLYTMDGITVTVADLFFAGTETTSTTLRYGLLILMKYPEIEEKLHEEIDRVIGPSRIPAIKDRQEMPYMDAVVHEIQRFITLVPSNLPHEATRDTIFRGYLIPKGTVVVPTLDSVLYDNQEFPDPEKFKPEHFLNENGKFKYSDYFKPFSTVCAILQHFNLKPLVDPKDIDLSPIHIGFGCIPPRYKLCVIPRS

SEQ ID NO: 767369 - protein, 367 aa, Homo sapiens
MSALGVTVALLVWAAFLLLVSMWRQVHSSWNLPPGPFPLPIIGNLFQLELKNIPKSFTRLAQRFGPVFTLYVGSQRMVVMHGYKAVKEALLDYKDEFSGRGDLPAFHAHRDRGIIFNNGPTWKDIRRFSLTTLRNYGMGKQGNESRIQREAHFLLEALRKTQGQPFDPTFLIGCAPCNVIADILFRKHFDYNDEKFLRLMYLFNENFHLLSTPWLQLYNNFPSFLHYLPGSHRKVIKNVAEVKEYVSERVKEHHQSLDPNCPRDLTDCLLVEMEKEKHSAERLYTMDGITVTVADLFFAGTETTSTTLRYGLLILMKYPEIEEKLHEEIDRVIGPSRIPAIKDRQEMPYMDAVVHEIQRFITLVAQS

SEQ ID NO: 767370 - protein, 356 aa, Homo sapiens [sequence omitted]

SEQ ID NO: 767371 - protein, 304 aa, Homo sapiens
MGWGNRAMRAGSRGRPTSCWKHSGRPKLYNNFPSFLHYLPGSHRKVIKNVAEVKEYVSERVKEHHQSLDPNCPRDLTDCLLVEMEKEKHSAERLYTMDGITVTVADLFFAGTETTSTTLRYGLLILMKYPEIEEKLHEEIDRVIGPSRIPAIKDRQEMPYMDAVVHEIQRFITLVPSNLPHEATRDTIFRGYLIPKGTVVVPTLDSVLYDNQEFPDPEKFKPEHFLNENGKFKYSDYFKPFSTGKRVCAGEGLARMELFLLLCAILQHFNLKPLVDPKDIDLSPIHIGFGCIPPRYKLCVIPRS

SEQ ID NO: 767372 - protein, 347 aa, Homo sapiens
MSALGVTVALLVWAAFLLLVSMWRQVHSSWNLPPGPFPLPIIGNLFQLELKNIPKSFTRLAQRFGPVFTLYVGSQRMVVMHGYKAVKEALLDYKDEFSGRGDLPAFHAHRDRGIIFNNGPTWKDIRRFSLTTLRNYGMGKQGNESRIQREAHFLLEALRKTQGQPFDPTFLIGCAPCNVIADILFRKHFDYNDEKFLRLMYLFNENFHLLSTPWLQLYNNFPSFLHYLPGSHRKVIKNVAEVKEYVSERVKEHHQSLDPNCPRDLTDCLLVEMEKEKHSAERLYTMDGITVTVADLFFAGTETTSTTLRYGLLILMKYPEIEGPPTCPMKQPETPFSEDTSSPRAQS

SEQ ID NO: 767373 - protein, 443 aa, Homo sapiens
MSALGVTVALLVWAAFLLLVSMWRQVHSSWNLPPGPFPLPIIGNLFQLELKNIPKSFTRLAQRFGPVFTLYVGSQRMVVMHGYKAVKEALLDYKDEFSGRGDLPAFHAHRDRGIIFNNGPTWKDIRRFSLTTLRNYGMGKQGNESRIQREAHFLLEALRKTQGQPFDPTFLIGCAPCNVIADILFRKHFDYNDEKFLRLMYLFNENFHLLSTPWLQLYNNFPSFLHYLPGSHRKVIKNVAEVKEYVSERVKEHHQSLDPNCPRDLTDCLLVEMEKEKHSAERLYTMDGITVTVADLFFAGTETTSTTLRYGLLILMKYPEIEEKLHEEIDRVIGPSRIPAIKDRQEMPYMDAVVHEIQRFITLVPSNLPHEATRDTIFRGYLIPKGTVVVPTLDSVLYDNQEFPDPEKFKPEHFLNENECVLEKAWLAWSCFFCCVPFCSILI

SEQ ID NO: 767374 - protein, 338 aa, Homo sapiens
MGKQGNESRIQREAHFLLEALRKTQGQPFDPTFLIGCAPCNVIADILFRKHFDYNDEKFLRLMYLFNENFHLLSTPWLQLYNNFPSFLHYLPGSHRKVIKNVAEVKEYVSERVKEHHQSLDPNCPRDLTDCLLVEMEKADLFFAGTETTSTTLRYGLLILMKYPEIEEKLHEEIDRVIGPSRIPAIKDRQEMPYMDAVVHEIQRFITLVPSNLPHEATRDTIFRGYLIPKGTVVVPTLDSVLYDNQEFPDPEKFKPEHFLNENGKFKYSDYFKPFSTGKRVCAGEGLARMELFLLLCAILQHFNLKPLVDPKDIDLSPIHIGFGCIPPRYKLCVIPRS

SEQ ID NO: 767375 - protein, 192 aa, Homo sapiens
MGGCPTGQEPIPEICPIHILAEKLHEEIDRVIGPSRIPAIKDRQEMPYMDAVVHEIQRFITLVPSNLPHEATRDTIFRGYLIPKGTVVVPTLDSVLYDNQEFPDPEKFKPEHFLNENGKFKYSDYFKPFSTGKRVCAGEGLARMELFLLLCAILQHFNLKPLVDPKDIDLSPIHIGFGCIPPRYKLCVIPRS

SEQ ID NO: 767376 - protein, 166 aa, Homo sapiens [sequence omitted]

SEQ ID NO: 767377 - protein, 75 aa, Homo sapiens
MSHAVVQKPNSRWPTGTLKFLYCYCLCFYHNKYPDPSLLRIQNCPPSFIGLVRFYPLSYLQFSRISVECAGNGIS

SEQ ID NO: 767378 - protein, 75 aa, Homo sapiens; identical to SEQ ID NO: 767377

SEQ ID NO: 767379 - protein, 52 aa, Homo sapiens
MWERWVPVTVLPGCVGCRTVAALASWTVRDVKERIFAETGFPVSEQRLWRGG

SEQ ID NO: 767380 - protein, 55 aa, Homo sapiens
METKENRWVPVTVLPGCVGCRTVAALASWTVRDVKERIFAETGFPVSEQRLWRGG

SEQ ID NO: 767381 - protein, 93 aa, Homo sapiens
AVLGGGKEGGSRGVGQGSSRAEVGLGSQRERSGTCGAEAAAAAAQLIAGTGSSLPYLHSLRHRNWYIQATCATSGDGLYEGLDWLANQLKNKK

SEQ ID NO: 767382 - protein, 108 aa, Homo sapiens
LPRVKVRVPLCRTGGWEPAQQELPTPETDARAPLKGPARSCFTDMSHPGQHFHSAFVPTHECSAACHYVYPRGWLMSPHAGKSRSDKLNGKLNAWQGTHKPATRSHQR

SEQ ID NO: 767383 - protein, 794 aa, Homo sapiens
MNIDDKLEGLFLKCGGIDEMQSSRTMVVMGGVSGQSTVSGELQDSVLQDRSMPHQEILAADEVLQESEMRQQDMISHDELMVHEETVKNDEEQMETHERLPQGLQYALNVPISVKQEITFTDVSEQLMRDKKQIREPVDLQKKKKRKQRSPAKILTINEDGSLGLKTPKSHVCEHCNAAFRTNYHLQRHVFIHTGEKPFQCSQCDMRFIQKYLLQRHEKIHTGEKPFRCDECGMRFIQKYHMERHKRTHSGEKPYQCEYCLQYFSRTDRVLKHKRMCHENHDKKLNRCAIKGGLLTSEEDSGFSTSPKDNSLPKKKRQKTEKKSSGMDKESALDKSDLKKDKNDYLPLYSSSTKVKDEYMVAEYAVEMPHSSVGGSHLEDASGEIHPPKLVLKKINSKRSLKQPLEQNQTISPLSTYEESKVSKYAFELVDKQALLDSEGNADIDQVDNLQEGPSKPVHSSTNYDDAMQFLKKKRYLQAASNNSREYALNVGTIASQPSVTQAAVASVIDESTTASILESQALNVEIKSNHDKNVIPDEVLQTLLDHYSHKANGQHEISFSVADTEVTSSISINSSEVPEVTPSENVGSSSQASSSDKANMLQEYSKFLQQALDRTSQNDAYLNSPSLNFVTDNQTLPNQPAFSSIDKQVYATMPINSFRSGMNSPLRTTPDKSHFGLIVGDSQHSFPFSGDETNHASATSTQDFLDQVTSQKKAEAQPVHQAYQMSSFEQPFRAPYHGSRAGIATQFSTANGQVNLRGPGTSAEFSEFPLVNVNDNRAGMTSSPDATTGQTFG

SEQ ID NO: 767384 - protein, 794 aa, Homo sapiens; identical to SEQ ID NO: 767383

SEQ ID NO: 767385 - protein, 913 aa, Homo sapiens
MEFLTDVTNTFHQLILKDFQINGQNNEILALRDLFHLVLVCFLRNVINEIFEESSYLVMYVTSLTFIFICLFLRQGLILSPRWSAVVQSQLTAAPTSWAQAILLLSLPSSWDHRQLYLSMNIDDKLEGLFLKCGGIDEMQSSRTMVVMGGVSGQSTVSGELQDSVLQDRSMPHQEILAADEVLQESEMRQQDMISHDELMVHEETVKNDEEQMETHERLPQGLQYALNVPISVKQEITFTDVSEQLMRDKKQIREPVDLQKKKKRKQRSPAKILTINEDGSLGLKTPKSHVCEHCNAAFRTNYHLQRHVFIHTGEKPFQCSQCDMRFIQKYLLQRHEKIHTGEKPFRCDECGMRFIQKYHMERHKRTHSGEKPYQCEYCLQYFSRTDRVLKHKRMCHENHDKKLNRCAIKGGLLTSEEDSGFSTSPKDNSLPKKKRQKTEKKSSGMDKESALDKSDLKKDKNDYLPLYSSSTKVKDEYMVAEYAVEMPHSSVGGSHLEDASGEIHPPKLVLKKINSKRSLKQPLEQNQTISPLSTYEESKVSKYAFELVDKQALLDSEGNADIDQVDNLQEGPSKPVHSSTNYDDAMQFLKKKRYLQAASNNSREYALNVGTIASQPSVTQAAVASVIDESTTASILESQALNVEIKSNHDKNVIPDEVLQTLLDHYSHKANGQHEISFSVADTEVTSSISINSSEVPEVTPSENVGSSSQASSSDKANMLQEYSKFLQQALDRTSQNDAYLNSPSLNFVTDNQTLPNQPAFSSIDKQVYATMPINSFRSGMNSPLRTTPDKSHFGLIVGDSQHSFPFSGDETNHASATSTQDFLDQVTSQKKAEAQPVHQAYQMSSFEQPFRAPYHGSRAGIATQFSTANGQVNLRGPGTSAEFSEFPLVNVNDNRAGMTSSPDATTGQTFG

SEQ ID NO: 767386 - protein, 557 aa, Homo sapiens
MNIDDKLEGLFLKCGGIDEMQSSRTMVVMGGVSGQSTVSGELQDSVLQDRSMPHQEILAADEVLQESEMRQQDMISHDELMVHEETVKNDEEQMETHERLPQGLQYALNVPISVKQEITFTDVSEQLMRDKKQIREPVDLQKKKKRKQRSPAKILTINEDGSLGLKTPKSHVCEHCNAAFRTNYHLQRHVFIHTGEKPFQCSQCDMRFIQKYLLQRHEKIHTGEKPFRCDECGMRFIQKYHMERHKRTHSGEKPYQCEYCLQYFSRTDRVLKHKRMCHENHDKKLNRCAIKGGLLTSEEDSGFSTSPKDNSLPKKKRQKTEKKSSGMDKESALDKSDLKKDKNDYLPLYSSSTKVKDEYMVAEYAVEMPHSSVGGSHLEDASGEIHPPKLVLKKINSKRSLKQPLEQNQTISPLSTYEESKVSKYAFELVDKQALLDSEGNADIDQVDNLQEGPSKPVHSSTNYDDAMQFLKKKRYLQAASNNSREYALNVGTIASQPSVTQAAVASVIDESTTASILESQALNVEIKSNHDKNVIPDEVMRQTMLLPHQHRTFWIK

SEQ ID NO: 767387 - protein, 516 aa, Homo sapiens
  misc_feature (508)..(508): Xaa can be any naturally occurring amino acid
  misc_feature (516)..(516): Xaa can be any naturally occurring amino acid
MNIDDKLEGLFLKCGGIDEMQSSRTMVVMGGVSGQSTVSGELQDSVLQDRSMPHQEILAADEVLQESEMRQQDMISHDELMVHEETVKNDEEQMETHERLPQGLQYALNVPISVKQEITFTDVSEQLMRDKKQIREPVDLQKKKKRKQRSPAKILTINEDGSLGLKTPKSHVCEHCNAAFRTNYHLQRHVFIHTGEKPFQCSQCDMRFIQKYLLQRHEKIHTGEKPFRCDECGMRFIQKYHMERHKRTHSGEKPYQCEYCLQYFSRTDRVLKHKRMCHENHDKKLNRCAIKGGLLTSEEDSGFSTSPKDNSLPKKKRQKTEKKSSGMDKESALDKSDLKKDKNDYLPLYSSSTKVKDEYMVAEYAVEMPHSSVGGSHLEDASGEIHPPKLVLKKINSKRSLKQPLEQNQTISPLSTYEESKVSKYAFELVDKQALLDSEGNADIDQVDNLQEGPSKPVHSSTNYDDAMQFLKKKRYLQAASNNSREYALNVGTIASQPSWVKKTPNPXKRGPPKGX

SEQ ID NO: 767388 - protein, 794 aa, Homo sapiens; identical to SEQ ID NO: 767383

SEQ ID NO: 767389 - protein, 794 aa, Homo sapiens; identical to SEQ ID NO: 767383

SEQ ID NO: 767390 - protein, 712 aa, Homo sapiens
IPESGLWPAQRMGQNGAACCLPLQTSLFAISVKQEITFTDVSEQLMRDKKQIREPVDLQKKKKRKQRSPAKILTINEDGSLGLKTPKSHVCEHCNAAFRTNYHLQRHVFIHTGEKPFQCSQCDMRFIQKYLLQRHEKIHTGEKPFRCDECGMRFIQKYHMERHKRTHSGEKPYQCEYCLQYFSRTDRVLKHKRMCHENHDKKLNRCAIKGGLLTSEEDSGFSTSPKDNSLPKKKRQKTEKKSSGMDKESALDKSDLKKDKNDYLPLYSSSTKVKDEYMVAEYAVEMPHSSVGGSHLEDASGEIHPPKLVLKKINSKRSLKQPLEQNQTISPLSTYEESKVSKYAFELVDKQALLDSEGNADIDQVDNLQEGPSKPVHSSTNYDDAMQFLKKKRYLQAASNNSREYALNVGTIASQPSVTQAAVASVIDESTTASILESQALNVEIKSNHDKNVIPDEVLQTLLDHYSHKANGQHEISFSVADTEVTSSISINSSEVPEVTPSENVGSSSQASSSDKANMLQEYSKFLQQALDRTSQNDAYLNSPSLNFVTDNQTLPNQPAFSSIDKQVYATMPINSFRSGMNSPLRTTPDKSHFGLIVGDSQHSFPFSGDETNHASATSTQDFLDQVTSQKKAEAQPVHQAYQMSSFEQPFRAPYHGSRAGIATQFSTANGQVNLRGPGTSAEFSEFPLVNVNDNRAGMTSSPDATTGQTFG

SEQ ID NO: 767391 - protein, 144 aa, Homo sapiens
MKGEKPFQCSQCDMRFIQKYLLQRHEKIHTGEKPFRCDECGDETNHASATSTQDFLDQVTSQKKAEAQPVHQAYQMSSFEQPFRAPYHGSRAGIATQFSTANGQVNLRGPGTSAEFSEFPLVNVNDNRAGMTSSPDATTGQTFG

SEQ ID NO: 767392 - protein, 106 aa, Homo sapiens
IAIEGDCAPEEKIWEELSMLEVFEGREDSVFAHPRKLLMQDLVQENYLEYRQVPGSDPACYEFLWGPRALIETSYVKVLHHTLKIGGEPHISYPPLHERALREGEE

SEQ ID NO: 767393 - protein, 138 aa, Homo sapiens
LLWSSVTWTSALCLMASIYKPNPVTKAVSLSSTSPVTFSFWHLPLANADSFTHSSSCKVLVCQCLFIKSPLFLVSFQAHYVCSLQTTTVLIRFHPSIHLYVYSSRIFSVFSNNMLGSGFADMNQFNPCSSGKIKQAER

SEQ ID NO: 767394 - protein, 168 aa, Homo sapiens
MKTSLDLTNYPLMMLTAGLLISNCLCHFFIFPWCQPCLHIRAAFYDPMALTSTDHNTKPTMIRRPPAVVCYICGREYGTKSISIHEPQCLKKWHNENNLLPKELRRPVPKKPEVRTITAKGFYDLDALNEAAWTSAHSQLVPCNVCGRTFLPDRLIVHQRSCKPKAAK

SEQ ID NO: 767395 - protein, 120 aa, Homo sapiens
MKTSLDLTNYPLMMLTAGLLISNCLCHFFIFPWCQPCLHIRAAFYDPMALTSTDHNTKPTMIRRPPAVVCYICGREYGTKSISIHEPQCLKKWHNENNLLPKELRRPVPKKPEVRTITDK

SEQ ID NO: 767396 - protein, 194 aa, Homo sapiens
MERGKKKRISNKLQQTFHHSKEPTFLINQAGLLSSDSYSSLSPETESVNPGENIKTDTQKKRPGTVILSKLSSRRIISESQLSPPVIPARRPGFRVCYICGREFGSQSIAIHEPQCLQKWHIENSKLPKHLRRPEPSKPQSLSSSGSYSLQATNEAAFQSAQAQLLPCESCGRTFLPDHLLVHHRSCKPKGEGP

SEQ ID NO: 767397 - protein, 187 aa, Homo sapiens
RPLGPLVLALGGAAAVLGSVLFILWKTYFGRGRERRWDRGEAWWGAEAARLPEWDEWDPEDEEDEEPALEELEQREVLVLGLDGAGKSTFLRVLSGKPPLEGHIPTWGFNSVRLPTKDFEVDLLEIGGSQNLRFYWKEFVSEVDVLVFVVDSADRLRLPWARQELHKLLDKDPDLPVVVVANKQMLK

SEQ ID NO: 767398 - protein, 110 aa, Homo sapiens
GSWKCQGVSTWEQPLNNTVGFGGQIPQRPCPSAGKLQGACSMLAFESPSGIQLQLPTVVGNCLIPTFCLLLSLPKFTSPLSCWSFLGLPPKSMPCTCILVSGFASGKTQL

SEQ ID NO: 767399 - protein, 80 aa, Homo sapiens
MGPDGSGSEPASLVAPNSPSFLFTCHGRRWGTEGLLVKSEEGRFNRGSIWALRINKRLKIPASWELATERVDWFQYSCLK

SEQ ID NO: 767400 - protein, 398 aa, Homo sapiens
MHHEWLGAGAGHPVGLAHPQWLPTGGGGGGDWAGAHLEHGKAGGGGTGRADDGGGGGGFHARLVHQGAAHAGAAWAQGSTAHHLGPAMSPSPGASGGHQPQPLGLYAQAAYPGGGGGGLAGMLAAGGGGAGPGLHHALHEDGHEAQLEPSPPPHLGAHGHAHGHAHAGGLHAAAAHLHPGAGGGGSSVGEHSDEDAPSSDDLEQFAKQFKQRRIKLGFTQADVGLALGTLYGNVFSQTTICRFEALQLSFKNMCKLKPLLNKWLEETDSSSGSPTNLDKIAAQGRKRKKRTSIEVGVKGALESHFLKCPKPSAHEITGLADSLQLEKEVVRVWFCNRRQKEKRMTPAAGAGHPPMDDVYAPGELGPGGGGASPPSAPPPPPPAALHHHHHHTLPGSVQ

SEQ ID NO: 767401 - protein, 463 aa, Homo sapiens
ERRRRRRRRARGGMATTAQYLPRGPGGGAGGTGPLMHPDAAAAAAAAAAAERLHAGAAYREVQKLMHHEWLGAGAGHPVGLAHPQWLPTGGGGGGDWAGAHLEHGKAGGGGTGRADDGGGGGGFHARLVHQGAAHAGAAWAQGSTAHHLGPAMSPSPGASGGHQPQPLGLYAQAAYPGGGGGGLAGMLAAGGGGAGPGLHHALHEDGHEAQLEPSPPPHLGAHGHAHGHAHAGGLHAAAAHLHPGAGGGGSSVGEHSDEDAPSSDDLEQFAKQFKQRRIKLGFTQADVGLALGTLYGNVFSQTTICRFEALQLSFKNMCKLKPLLNKWLEETDSSSGSPTNLDKIAAQGRKRKKRTSIEVGVKGALESHFLKCPKPSAHEITGLADSLQLEKEVVRVWFCNRRQKEKRMTPAAGAGHPPMDDVYAPGELGPGGGGASPPSAPPPPPPAALHHHHHHTLPGSVQ

SEQ ID NO: 767402 - protein, 433 aa, Homo sapiens
MHHEWLGAGAGHPVGLAHPQWLPTGGGGGGDWAGAHLEHGKAGGGGTGRADDGGGGGGFHARLVHQGAAHAGAAWAQGSTAHHLGPAMSPSPGASGGHQPQPLGLYAQAAYPGGGGGGLAGMLAAGGGGAGPGLHHALHEDGHEAQLEPSPPPHLGAHGHAHGHAHAGGLHAAAAHLHPGAGGGGSSVGEHSDEDAPSSDDLEQFAKQFKQRRIKLGFTQADVGLALGTLYGNVFSQTTICRFEALQLSFKNMCKLKPLLNKWLEETDSSSGSPTNLDKIAAQGRKRKKRTSIEVGVKGALESHFLKCPKPSAHEITGLADSLQLEKEVVRVWFCNRRQKEKRMTPATKVTSTNPVLIVLKAIRRLWWHNTTRGDADNRLAHSERQDLLHHHAASLTYYTAYQHTHVDRRLAEVTHEGRAPAARMQARRAARP

SEQ ID NO: 767403 - protein, 211 aa, Homo sapiens
RSVLCPGPEAQPGHQVEHQLRVAQRSVPSTEPPAAAEMLRTESCRPRSPAGQVAAASPLLLLLLLLAWCAGACRGAPILPQGLQPEQQLQLWNEIDDTCSSFLSIDSQPQASNALEELCFMIMGMLPKPQEQDEKDNTKRFLFHYSKTQKLGKSNVVSSVVHPLLQLVPHLHERRMKRFRVDEEFQSPFASQSRGYFLFRPRNGRRSAGFI

SEQ ID NO: 767404 - protein, 186 aa, Homo sapiens
RSVLCPGPEAQPGHQVEHQLRVAQRSVPSTEPPAAAEMLRTESCRPRSPAGQVAAASPLLLLLLLLAWCAGACRGAPILPQGLQPEQQLQLWNEIDDTCSSFLSIDSQPQASNALEELCFMIMGMLPKPQEQDEKDNTKRFLFHYSKTQKLGKSNVVEEFQSPFASQSRGYFLFRPRNGRRSAGFI

SEQ ID NO: 767405 - protein, 184 aa, Homo sapiens
RSVLCPGPEAQPGHQVEHQLRVAQRSVPSTEPPAAAEMLRTESCRPRSPAGQVAAASPLLLLLLLLAWCAGACRGAPILPQGLQPEQQLQLWNEIDDTCSSFLSIDSQPQASNALEELCFMIMGMLPKPQSSVVHPLLQLVPHLHERRMKRFRVDEEFQSPFASQSRGYFLFRPRNGRRSAGFI

SEQ ID NO: 767406 - protein, 375 aa, Homo sapiens
HEPRNKDFTDKVPWNQREAGMETPNTTEDYDTTTEFDYGDATPCQKVNERAFGAQLLPPLYSLVFVIGLVGNILVVLVLVQYKRLKNMTSIYLLNLAISDLLFLFTLPFWIDYKLKDDWVFGDAMCKILSGFYYTGLYSEIFFIILLTIDRYLAIVHAVFALRARTVTFGVITSIIIWALAILASMPGLYFSKTQWEFTHHTCSLHFPHESLREWKLFQALKLNLFGLVLPLLVMIICYTGIIKILLRRPNEKKSKAVRLIFVIMIIFFLFWTPYNLTILISVFQDFLFTHECEQSRHLDLAVQVTEVIAYTHCCVNPVIYAFVGERFRKYLRQLFHRRVAVHLVKWLPFLSVDRLERVSSTSPSTGEHELSAGF

SEQ ID NO: 767407 - protein, 565 aa, Homo sapiens
MNVIDHVRDMAAAGLHSNVRLLSSLLLTMSNNNPELFSPPQKYQLLVYHADSLFHDKEYRNAVSKYTMALQQKKALSKTSKVRPSTGNSASTPQSQCLPSEIEVKYKMAECYTMLKQDKDAIAILDGIPSRQRTPKINMMLANLYKKAGRERPSVTSYKEVLRQCPLALDAILGLLSLSVKGAEVASMTMNVIQTVPNLDWLSVWIKAYAFVHTGDNSRAISTICSLEKKSLLRDNVDLLGSLADLYFRAGDNKNSVLKFEQAQMLDPYLIKGMDVYGYLLAREGRLEDVENLGCRLFNISDQHAEPWVVSGCHSFYSKRYSRALYLGAKAIQLNSNSVQALLLKGAALRNMGRVQEAIIHFREAIRLAPCRLDCYEGLIECYLASNSIREAMVMANNVYKTLGANAQTLTLLATVCLEDPVTQEKAKTLLDKALTQRPDYIKAVVKKAELLSREQKYEDGIALLRNALANQSDCVLHRILGDFLVAVNEYQEAMDQYSIALSLDPNDQKSLEGMQKMEKEESPTDATQEEDVDDMEGSGEEGDLEGSDSEAAQWADQEQWFGMQ

SEQ ID NO: 767408 - protein, 273 aa, Homo sapiens
MNVINAARVEEYAEKICQGLCGFGVLSCFFVLMSTLCQKVIPLFSSTYWHEELRVDSSQGGLLIGRLAVGVERGKGCQLQSVWCMGLIECYLASNSIREAMVMANNVYKTLGANAQTLTLLATVCLEDPVTQEKAKTLLDKALTQRPDYIKAVVKKAELLSREQKYEDGIALLRNALANQSDCVLHRILGDFLVAVNEYQEAMDQYSIALSLDPNDQKSLEGMQKMEKEESPTDATQEEDVDDMEGSGEEGDLEGSDSEAAQWADQEQWFGMQ

SEQ ID NO: 767409 - protein, 557 aa, Homo sapiens
MNVIDHVRDMAAAGLHSNVRLLSSLLLTMSNNNPELFSPPQKYQLLVYHADSLFHDKEYRNAVSKYTMALQQKKALSKTSKVRPSTGNSASTPQSQCLPSEIEVKYKMAECYTMLKQDKDAIAILDGIPSRQRTPKINMMLANLYKKAGRERPSVTSYKEVLRQCPLALDAILGLLSLSVKGAEVASMTMNVIQTVPNLDWLSVWIKAYAFVHTGDNSRAISTICSLEKKSLLRDNVDLLGSLADLYFRAGDNKNSVLKFEQAQMLDPYLIKGMDVYGYLLAREGRLEDVENLGCRLFNISDQHAEPWVVSGCHSFYSKRYSRALYLGAKAIQLNSNSVQALLLKGAALRNMGRVQEAIIHFREAIRLAPCRLDCYEGLIECYLASNSIREAMVMANNVYKTLGANAQTLTLLATVCLEDPVTQEKAKTLLDKALTQRPDYIKAVVKKAELLSREQKYEDGIALLRNALANQSDCVLHRILGDFLVAVNEYQEAMDQYSIALSLDPNDQKSLEGMQKMEKEESPTDATQEEDVDDMEGIWAKKESLFKLNFLGLGEV

SEQ ID NO: 767410 - protein, 565 aa, Homo sapiens; identical to SEQ ID NO: 767407

SEQ ID NO: 767411 - protein, 197 aa, Homo sapiens [sequence omitted]

SEQ ID NO: 767412 - protein, 173 aa, Homo sapiens
MVMANNVYKTLGANAQTLTLLATVCLEDPVTQEKAKTLLDKALTQRPDYIKAVVKKAELLSREQKYEDGIALLRNALANQSDCVLHRILGDFLVAVNEYQEAMDQYSIALSLDPNDQKSLEGMQKMEKEESPTDATQEEDVDDMEGSGEEGDLEGSDSEAAQWADQEQWFGMQ

SEQ ID NO: 767413 - protein, 173 aa, Homo sapiens; identical to SEQ ID NO: 767412

SEQ ID NO: 767414 - protein, 155 aa, Homo sapiens
GRVGRPTRPDPVTQEKAKTLLDKALTQRPDYIKAVVKKAELLSREQKYEDGIALLRNALANQSDCVLHRILGDFLVAVNEYQEAMDQYSIALSLDPNDQKSLEGMQKMEKEESPTDATQEEDVDDMEGSGEEGDLEGSDSEAAQWADQEQWFGMQ

SEQ ID NO: 767415 - protein, 503 aa, Homo sapiens
MNVIDHVRDMAAAGLHSNVRLLSSLLLTMSNNNPELFSPPQKYQLLVYHADSLFHDKEYRNAVSKYTMALQQKKALSKTSKVRPSTGNSASTPQSQCLPSEIEVKYKMAECYTMLKQDKDAIAILDGIPSRQRTPKINMMLANLYKKAGRERPSVTSYKEVLRQCPLALDAILGLLSLSVKGAEVASMTMNVIQTVPNLDWLSVWIKAYAFVHTGDNSRAISTICSLEKKSLLRDNVDLLGSLADLYFRAGDNKNSVLKFEQAQMLDPYLIKGMDVYGYLLAREGRLEDVENLGCRLFNISDQHAEPWVVSGCHSFYSKRYSRALYLGAKAIQLNSNSVQALLLKGAALRNMGRVQEAIIHFREAIRLAPCRLDCYEGLIECYLASNSIREAMVMANNVYKTLGANAQTLTLLATVCLEDPVTQEKAKTLLDKALTQRPDYIKAVVKKAELLSREQKYEDGIALLRNALANQSDCVLHRILGDFLVAVNEYQEAMDQYSIALR

SEQ ID NO: 767416 - protein, 133 aa, Homo sapiens
GHKVSRVLGHQVRKCSQKARGRNAVCLQCFCKVERLFFQEKATSSSSQPCAVTPTPQAGEWNHRCFPSWSQSQSGWAKCPEKSHLLGSHQPGHSRTPRQGPIPEAQLNACSHCRKVWKVVLQPTRHGEPKTQP

SEQ ID NO: 767417 - protein, 98 aa, Homo sapiens
MTLLGICPRGMKASIPCKLILTQQRDSRRPKAETPQTSISGQTGRCNALSVPWDVTQPYEGKTPVRMSPGTTVLRDPVTHGQNRHGPEPEAGRMRAGG

SEQ ID NO: 767418 - protein, 98 aa, Homo sapiens; identical to SEQ ID NO: 767417

SEQ ID NO: 767419 - protein, 1240 aa, Homo sapiens
MDLAPYFTSEPLSAVQKLGGPVVLHCSAQPVTTRISWLHNGKTLDGNLEHIKIHQGTLTILSLNSSLLGYYQCLANNSIGAIVSGPATVSVAVLGDFGSSTKHVITAEEKSAGFIGCRVPESNPKAEVRYKIRGKWLEHSTENYLILPSGNLQILNVSLEDKGSYKCAAYNPVTHQLKVEPIGRKLLVSRPSSDDVHILHPTHSQALAVLSRSPVTLECVVSGVPAPQVYWLKDGQDIAPGSNWRRLYSHLATDSVDPADSGNYSCMAGNKSGDVEYVTYMVNVLEHASISKGLQDQIVSLGATVHFTCDVHGNPAPNCTWFHNAQPIHPSARHLTAGNGLKISGVTVEDVGMYQCVADNGIGFMHSTGRLEIENDGGFKPVIITAPVSAKVADGDFVTLSCNASGLPVPVIRWYDSHGLITSHPSQVLRSKSRKSQLSRPEGLNLEPVYFVLSQAGASSLHIQAVTQEHAGKYICEAANEHGTTQAEASLMVVPFETNTKAETVTLPDAAQNDDRSKRDGSETGLLSSFPVKVHPSAVESAPEKNASGISVPDAPIILSPPQTHTPDTYNLVWRAGKDGGLPINAYFVKYRKLDDGVGMLGSWHTVRVPGSENELHLAELEPSSLYEVLMVARSAAGEGQPAMITFRTSKEKTASSKNTQASSPPVGIPKYPVVSEAANNNFGVVLTDSSRHSGVPEAPDRPTISTASETSVYVTWIPRANGGSPITAFKVEYKRMRTSNWLVAAEDIPPSKLSVEVRSLEPGSTYKFRVIAINHYGESFRSSASRPYQVVGFPNRFSSRPITGPHIAYTEAVSDTQIMLKWTYIPSSNNNTPIQGFYIYYRPTDSDNDSDYKRDVVEGSKQWHMIGHLQPETSYDIKMQCFNEGGESEFSNVMICETKVKRVPGASEYPVKDLSTPPNSLGSGGNVGPATSPARSSDMLYLIVGCVLGVMVLILMVFIAMCLWKNRQQNTIQKYDPPGYLYQGSDMNGQMVDYTTLSGASQINGNVHGGFLTNGGLSSGYSHLHHKVPNAVNGIVNGSLNGGLYSGHSNSLTRTHVDFEHPHHLVNGGGMYTAVPQIDPLECVNCRNCRNNNRCFTKTNSTFSSSPPPVVPVVAPYPQDGLEMKPLSHVKVPVCLTSAVPDCGQLPEESVKDNVEPVPTQRTCCQDIVNDVSSDGSEDPAEFSRGDSCAHSETEINIVSWNALILPPVPEGCAEKTMWSPPGIPLDSPTEVLQQPRET

SEQ ID NO: 767420 - protein, 216 aa, Homo sapiens
RARATGGDLEEQQHAEGSPEPGTPAAPTPESFTVHFLPLNSAQTLHHKSCYNGRFQLLYVACGMVHLLIPELGACVAPGGNLIVELARYLVDVRQEQLQGFNTRVRELAQAAGFAPQTGARPSETFARFCKSQESALGNTVPAVEPGTPPLDILAQPLEASNPALEGLTQPLQGGTPHCEPCQLPSESPGSLSEVLAQPQGALAPPNCESDSKTGV

SEQ ID NO: 767421 - protein, 201 aa, Homo sapiens
WGCLEVPSTVVSESPSMILPCSISPWQKKSKISASRKLQLKTLLLQIAKQELEREAEERRGEKGRALSTRCQPLELAGLGFAELQDLCRQLHARVDKVDEERYDIEAKVTKNITEIADLTQKIFDLRGKFKRPTLRRVRISADAMMQALLGARAKESLDLRAHLKQVKKEDTEKENREVGDWRKNIDALSGMEGRKKKFES

SEQ ID NO: 767422 - protein, 107 aa, Homo sapiens
MEELGVREMEGEVPTTLVCPQIADLTQKIFDLRGKFKRPTLRRVRISADAMMQALLGARAKESLDLRAHLKQVKKEDTEKENREVGDWRKNIDALSGMEGRKKKFES

SEQ ID NO: 767423 - protein, 432 aa, Homo sapiens
RARATGGDLEEQQHAEGSPEPGTPAAPTPESFTVHFLPLNSAQTLHHKSCYNGRFQLLYVACGMVHLLIPELGACVAPGGNLIVELARYLVDVRQEQLQGFNTRVRELAQAAGFAPQTGARPSETFARFCKSQESALGNTVPAVEPGTPPLDILAQPLEASNPALEGLTQPLQGGMSSGSPSSPEETDGPWDPEGHPGGPLTDPPNAPVLALPPAIPGLSLSMADGSSDAAREPRPAPAPIRRRSSNYRAYATEPHAKKKSKISASRKLQLKTLLLQIAKQELEREAEERRGEKGRALSTRCQPLELAGLGFAELQDLCRQLHARVDKVDEERYDIEAKVTKNITEIADLTQKIFDLRGKFKRPTLRRVRISADAMMQALLGARAKESLDLRAHLKQVKKEDTEKENREVGDWRKNIDALSGMEGRKKKFES

SEQ ID NO: 767424 - protein, 369 aa, Homo sapiens
MVHLLIPELGACVAPGGNLIVELARYLVDVRQEQLQGFNTRVRELAQAAGFAPQTGARPSETFARFCKSQESALGNTVPAVEPGTPPLDILAQPLEASNPALEGLTQPLQGGMSSGSPSSPEETDGPWDPEGHPGGPLTDPPNAPVLALPPAIPGLSLSMADGSSDAAREPRPAPAPIRRRSSNYRAYATEPHAKKKSKISASRKLQLKTLLLQIAKQELEREAEERRGEKGRALSTRCQPLELAGLGFAELQDLCRQLHARVDKVDEERYDIEAKVTKNITEIADLTQKIFDLRGKFKRPTLRRVRISADAMMQALLGARAKESLDLRAHLKQVKKEDTEKENREVGDWRKNIDALSGMEGRKKKFES

SEQ ID NO: 767425 - protein, 153 aa, Homo sapiens [sequence omitted]

SEQ ID NO: 767426 - protein, 216 aa, Homo sapiens
RARATGGDLEEQQHAEGSPEPGTPAAPTPESFTVHFLPLNSAQTLHHKSCYNGRFQLLYVACGTQTPVLPPLLPHCLGSQSPILPPDLELNLSLSSVLSAVMVHLLIPELGACVAPGGNLIVELARYLVDVRQEQLQGFNTRVRELAQAAGFAPQTGARPSETFARFCKSQESALGNTVPAVEPGTPPLDILAQPLEASNPALEGLTQPLQGGTCG

SEQ ID NO: 767427 - protein, 145 aa, Homo sapiens
RARATGGDLEEQQHAEGSPEPGTPAAPTPESFTVHFLPLNSAQTLHHKSCYNGRFQLLYVACGTQTPVLPPLLPHCLGSQSPILPPDLELNLSLSSVLSAVMVHLLIPELGACVAPGGNLIVELARYLVDVRQEQLQGFNTRECW

SEQ ID NO: 767428 - protein, 206 aa, Homo sapiens
VLLGVGRGLGTVETKLEGLEGQRRFPTPGLYPEAPGGLRFPPTPLQTLLLQIAKQELEREAEERRGEKGRALSTRCQPLELAGLGFAELQDLCRQLHARVDKVDEERYDIEAKVTKNITEIADLTQKIFDLRGKFKRPTLRRVRISADAMMQALLGARAKESLDLRAHLKQVKKEDTEKENREVGDWRKNIDALSGMEGRKKKFES

SEQ ID NO: 767429 - protein, 470 aa, Homo sapiens
RARATGGDLEEQQHAEGSPEPGTPAAPTPESFTVHFLPLNSAQTLHHKSCYNGRFQLLYVACGTQTPVLPPLLPHCLGSQSPILPPDLELNLSLSSVLSAVMVHLLIPELGACVAPGGNLIVELARYLVDVRQEQLQGFNTRVRELAQAAGFAPQTGARPSETFARFCKSQESALGNTVPAVEPGTPPLDILAQPLEASNPALEGLTQPLQGGMSSGSPSSPEETDGPWDPEGHPGGPLTDPPNAPVLALPPAIPGLSLSMADGSSDAAREPRPAPAPIRRRSSNYRAYATEPHAKKKSKISASRKLQLKTLLLQIAKQELEREAEERRGEKGRALSTRCQPLELAGLGFAELQDLCRQLHARVDKVDEERYDIEAKVTKNITEIADLTQKIFDLRGKFKRPTLRRVRISADAMMQALLGARAKESLDLRAHLKQVKKEDTEKENREVGDWRKNIDALSGMEGRKKKFES

SEQ ID NO: 767430 - protein, 196 aa, Homo sapiens
PSFPRTQTPVLPPLLPHCLGSQSPILPPDLELNLSLSSVLSAVMVHLLIPELGACVAPGGNLIVELARYLVDVRQEQLQGFNTRVRELAQAAGFAPQTGARPSETFARFCKSQESALGNTVPAVEPGTPPLDILAQPLEASNPALEGLTQPLQGGTPHCEPCQLPSESPGSLSEVLAQPQGALAPPNCESDSKTGV

SEQ ID NO: 767431 - protein, 122 aa, Homo sapiens
RARATGGDLEEQQHAEGSPEPGTPAAPTPESFTVHFLPLNSAQTLHHKSCYNGRFQLLYVACGTQTPVLPPLLPHCLGSQSPILPPDLELNLSLSSVLSAVVLNFILIIPTQYPPPPPRECW

SEQ ID NO: 767432 - protein, 326 aa, Homo sapiens
  misc_feature (3)..(3): Xaa can be any naturally occurring amino acid
DQXCAVLAIKYLTIMKVKNDKHLKNIYKEAYRIGTLFHLTKHKTDEMEDKIAEVRRKFKGREEFLKKLTQGEVAAGMVLQKKLYSIYEVQALERKELIKNRAICAMSLAELQEPLLQLEDEAERIRSLNKEHSVMLNNIIDQKDLIRRKVGKVKKKLRKKGKKTLDALIETESKRSAIFKDLEATKSKTMIFYAKINELNEELKAKEEEKKSFDQTLEILKNKFITMRFKREHAQTVFDHYMQEKKDCEERIFEEDQRFRVLLAVRQKTLQDTQKIIADSLEENLRLAQEYQQLQITFLKEKDNYFNIYDKQLSLDTSIRDKKQVL

SEQ ID NO: 767433 - protein, 214 aa, Homo sapiens
  misc_feature (6)..(6): Xaa can be any naturally occurring amino acid
LSLSHXYRICCWKMVPGINDSNILPLVLKESLIPSVGRFLAYSDDKVHAIFLDGITLTLNWNFSSPIEKRQVNQGLNLGWCKLTFPDGQEQLIQIEHPEPYERYVTTVTSWCRRLTQTSPREMPTHSSSSVLQENWSVASELEKIQKFNLLLENSGILNQISNKKNEQQSFDHYKPGSSETLLGEVNENRVSIALKKTSEILHDIDCLLSNSKK

SEQ ID NO: 767434 - protein, 214 aa, Homo sapiens; identical to SEQ ID NO: 767433
  misc_feature (6)..(6): Xaa can be any naturally occurring amino acid

SEQ ID NO: 767435 - protein, 53 aa, Homo sapiens
MSQLRVPWSSYNWPCRKHPQPCDEGIPARRRIWWPDSPASLRQASPPRALPGT

SEQ ID NO: 767436 - protein, 183 aa, Homo sapiens [sequence omitted]

SEQ ID NO: 767437 - protein, 277 aa, Homo sapiens
MGDLFCLTLGSPDVLKPETLLAEVWLTSCRAIASKYTVVEPRPNLHLPRLLSSSFGLSESKAAHISSPRGSCSVQPRPRGKLCICPVQPYTAVQAGAPHTHTPLDITLAAGSRQLTSLLDPEKQEVGGLTWALCLAVSPDTKLGPEAFWFNSGREAVATQLSESYYILRPEVVESYMYLWRQTHNPIYREWGWEVVLALEKYCRTEAGFSGIQDVYSSTPNHDNKQQSFFLAETLKYLYLLFSEDDLLSLEDWVFNTEAHPLPVNHSDSSGRAWGRH

SEQ ID NO: 767438 - protein, 614 aa, Homo sapiens
KARAPARRGGLGRRGGCGARPVAAGPGPKPCRSARPGPAEAAAPPPPRGRTRSKLPELRGQSPEAAKLSGLATLPRDPHPGRRSGRPPLTAPPQTRAWTPRASGATGRATMLMRKVPGFVPASPWGLRLPQKFLFLLFLSGLVTLCFGALFLLPHSSRLKRLFLAPRTQQPGLEVVAEIAGHAPAREQEPPPNPAPAAPAPGEDDPSSWASPRRRKGGLRRTRPTGPREEATAARGNSIPASRPGDEGVPFRFDFNAFRSRLRHPVLGTRADESQEPQSQVRAQREKIKEMMQFAWQSYKRYAMGKNELRPLTKDGYEGNMFGGLSGATVIDSLDTLYLMELKEEFQEAKAWVGESFHLNVSGEASLFEVNIRYIGGLLSAFYLTGEEVFRIKAIRLGEKLLPAFNTPTGIPKGVVSFKSGNWGWATAGSSSILAEFGSLHLEFLHLTELSGNQVFAEKVRNIRKVLRKIEKPFGLYPNFLSPVSGNWVQHHVSVGGLGDSFYEYLIKSWLMSGKTDMEAKNMYYEALEAIETYLLNVSPGGLTYIAEWRGGILDHKMGHLACFSGGMIALGAEDAKEEKRAHYRELAAQITKTCHESYARSGNPARGRGSRRD

SEQ ID NO: 767439 - protein, 740 aa, Homo sapiens
KARAPARRGGLGRRGGCGARPVAAGPGPKPCRSARPGPAEAAAPPPPRGRTRSKLPELRGQSPEAAKLSGLATLPRDPHPGRRSGRPPLTAPPQTRAWTPRASGATGRATMLMRKVPGFVPASPWGLRLPQKFLFLLFLSGLVTLCFGALFLLPHSSRLKRLFLAPRTQQPGLEVVAEIAGHAPAREQEPPPNPAPAAPAPGEDDPSSWASPRRRKGGLRRTRPTGPREEATAARGNSIPASRPGDEGVPFRFDFNAFRSRLRHPVLGTRADESQEPQSQVRAQREKIKEMMQFAWQSYKRYAMGKNELRPLTKDGYEGNMFGGLSGATVIDSLDTLYLMELKEEFQEAKAWVGESFHLNVSGEASLFEVNIRYIGGLLSAFYLTGEEVFRIKAIRLGEKLLPAFNTPTGIPKGVVSFKSGNWGWATAGSSSILAEFGSLHLEFLHLTELSGNQVFAEKVRNIRKVLRKIEKPFGLYPNFLSPVSGNWVQHHVSVGGLGDSFYEYLIKSWLMSGKTDMEAKNMYYEALEAIETYLLNVSPGGLTYIAEWRGGILDHKMGHLACFSGGMIALGAEDAKEEKRAHYRELAAQITKTCHESYARSDTKLGPEAFWFNSGREAVATQLSESYYILRPEVVESYMYLWRQTHNPIYREWGWEVVLALEKYCRTEAGFSGIQDVYSSTPNHDNKQQSFFLAETLKYLYLLFSEDDLLSLEDWVFNTEAHPLPVNHSDSSGRAWGRH

SEQ ID NO: 767440 - protein, 614 aa, Homo sapiens; identical to SEQ ID NO: 767438

SEQ ID NO: 767441 - protein, 210 aa, Homo sapiens
LADSNKKTPLGAGRRGAQAHCVLSLGTPVGETMALNKNHSEGGGVIVNNTESILMSYDHVELTFNDMKNVPEAFKGTKKGTVYLTPYRVIFLSKGKDAMQSFMMPFYLMKDCEIKQPVFGANYIKGTVKAEAGGGWEGSASYKLTFTAGGAIEFGQRMLQVASQASRGEVPSGAYGYSYMPSGAYVYPPPVANGMYRRALLGYPLSTGPT

SEQ ID NO: 767442 - protein, 210 aa, Homo sapiens; identical to SEQ ID NO: 767441

SEQ ID NO: 767443 - protein, 210 aa, Homo sapiens; identical to SEQ ID NO: 767441

SEQ ID NO: 767444 - protein, 187 aa, Homo sapiens
ASSWVIGEGMALNKNHSEGGGVIVNNTESILMSYDHVELTFNDMKNVPEAFKGTKKGTVYLTPYRVIFLSKGKDAMQSFMMPFYLMKDCEIKQPVFGANYIKGTVKAEAGGGWEGSASYKLTFTAGGAIEFGQRMLQVASQASRGEVPSGAYGYSYMPSGAYVYPPPVANGMYRRALLGYPLSTGPT

SEQ ID NO: 767445 - protein, 195 aa, Homo sapiens
RTRGSTHASLGTPVGETMALNKNHSEGGGVIVNNTESILMSYDHVELTFNDMKNVPEAFKGTKKGTVYLTPYRVIFLSKGKDAMQSFMMPFYLMKDCEIKQPVFGANYIKGTVKAEAGGGWEGSASYKLTFTAGGAIEFGQRMLQVASQASRGEVPSGAYGYSYMPSGAYVYPPPVANGMYRRALLGYPLSTGPT

SEQ ID NO: 767446 - protein, 178 aa, Homo sapiens
MALNKNHSEGGGVIVNNTESILMSYDHVELTFNDMKNVPEAFKGTKKGTVYLTPYRVIFLSKGKDAMQSFMMPFYLMKDCEIKQPVFGANYIKGTVKAEAGGGWEGSASYKLTFTAGGAIEFGQRMLQVASQASRGEVPSGAYGYSYMPSGAYVYPPPVANGMYRRALLGYPLSTGPT

SEQ ID NO: 767447 - protein, 197 aa, Homo sapiens
  misc_feature (10)..(10): Xaa can be any naturally occurring amino acid
RLSRGWVNRXSLGTPVGETMALNKNHSEGGGVIVNNTESILMSYDHVELTFNDMKNVPEAFKGTKKGTVYLTPYRVIFLSKGKDAMQSFMMPFYLMKDCEIKQPVFGANYIKGTVKAEAGGGWEGSASYKLTFTAGGAIEFGQRMLQVASQASRGEVPSGAYGYSYMPSGAYVYPPPVANGMYRRALLGYPLSTGPT

SEQ ID NO: 767448 - protein, 195 aa, Homo sapiens; identical to SEQ ID NO: 767445

SEQ ID NO: 767449 - protein, 210 aa, Homo sapiens; identical to SEQ ID NO: 767441

SEQ ID NO: 767450 - protein, 210 aa, Homo sapiens; identical to SEQ ID NO: 767441

SEQ ID NO: 767451 - protein, 192 aa, Homo sapiens
TSGSVDGHYGWMGSMALNKNHSEGGGVIVNNTESILMSYDHVELTFNDMKNVPEAFKGTKKGTVYLTPYRVIFLSKGKDAMQSFMMPFYLMKDCEIKQPVFGANYIKGTVKAEAGGGWEGSASYKLTFTAGGAIEFGQRMLQVASQASRGEVPSGAYGYSYMPSGAYVYPPPVANGMYRRALLGYPLSTGPT

SEQ ID NO: 767452 - protein, 178 aa, Homo sapiens; identical to SEQ ID NO: 767446

SEQ ID NO: 767453 - protein, 210 aa, Homo sapiens; identical to SEQ ID NO: 767441

SEQ ID NO: 767454 - protein, 190 aa, Homo sapiens
HQLGRGPAVIGRMALNKNHSEGGGVIVNNTESILMSYDHVELTFNDMKNVPEAFKGTKKGTVYLTPYRVIFLSKGKDAMQSFMMPFYLMKDCEIKQPVFGANYIKGTVKAEAGGGWEGSASYKLTFTAGGAIEFGQRMLQVASQASRGEVPSGAYGYSYMPSGAYVYPPPVANGMYRRALLGYPLSTGPT

SEQ ID NO: 767455 - protein, 210 aa, Homo sapiens; identical to SEQ ID NO: 767441

SEQ ID NO: 767456 - protein, 355 aa, Homo sapiens
LADSNKKTPLGAGRRGAQAHCVLSLGTPVGETMALNKNHSEGGGVIVNNTESILMSYDHVELTFNDMKNVPEAFKGTKKGTVYLTPYRVIFLSKGKDAMQSFMMPFYLMKDCEIKQPVFGANYIKGTVKAEAGGGWEGSASYKLTFTAGGAIEFGQRMLQVASQASRGEVPSGAYGYSYMPSGAYVYPPPVANGMYRRALLGYPLSTGPTWECVLCCPHSPHEPTYPGSPQARETLFLSCFRTNEGAGEAPLTREGAAAGCSPCPCYSLTSKFYPGPPMMDGAMGYVQPPPPPYPGPMEPPVSGPDVPSTPAAEAKAAEAAASAYYNPGNPHNVYMPTSQPPPPPYYPPEDKKTQ

SEQ ID NO: 767457 - protein, 248 aa, Homo sapiens
LADSNKKTPLGAGRRGAQAHCVLSLGTPVGETMALNKNHSEGGGVIVNNTESILMSYDHVELTFNDMKNVPEAFKGTKKGTVYLTPYRVIFLSKGKDAMQSFMMPFYLMKDCEIKQPVFGANYIKGTVKAEAGGGWEGSASYKLTFTAGGAIEFGQRMLQVASQEFYPGPPMMDGAMGYVQPPPPPYPGPMEPPVSGPDVPSTPAAEAKAAEAAASAYYNPGNPHNVYMPTSQPPPPPYYPPEDKKTQ

SEQ ID NO: 767458 - protein, 156 aa, Homo sapiens
MSYDHVELTFNDMKNVPEAFKGTKKGTVYLTPYRVIFLSKGKDAMQSFMMPFYLMKDCEIKQPVFGANYIKGTVKAEAGGGWEGSASYKLTFTAGGAIEFGQRMLQVASQASRGEVPSGAYGYSYMPSGAYVYPPPVANGMYRRALLGYPLSTGPT

SEQ ID NO: 767459 - protein, 156 aa, Homo sapiens; identical to SEQ ID NO: 767458

SEQ ID NO: 767460 - protein, 219 aa, Homo sapiens
LADSNKKTPLGAGRRGAQAHCVLSLGTPVGETMALNKNHSEGGGVIVNNTESILMSYDHVELTFNDMKNVPEAFKGTKKGTVYLTPYRVIFLSKGKDAMQSFMMPFYLMKDCEIKQPVFGANYIKGTVKAEAGGGWEGSASYKLTFTAGGAIEFGQRMLQVASQAVSGPDVPSTPAAEAKAAEAAASAYYNPGNPHNVYMPTSQPPPPPYYPPEDKKTQ

SEQ ID NO: 767461 - protein, 120 aa, Homo sapiens
MATLTCPAGPMSIPRQSPMECTAVPSWATPYPPAPPEFYPGPPMMDGAMGYVQPPPPPYPGPMEPPVSGPDVPSTPAAEAKAAEAAASAYYNPGNPHNVYMPTSQPPPPPYYPPEDKKTQ

SEQ ID NO: 767462 - protein, 120 aa, Homo sapiens; identical to SEQ ID NO: 767461

SEQ ID NO: 767463 - protein, 210 aa, Homo sapiens; identical to SEQ ID NO: 767441

SEQ ID NO: 767464 - protein, 131 aa, Homo sapiens
MPARSPQCCPAYLPHRLGLFWEHGASPVPVSLSASPLEGTLWPPPPPQSSSLSLAPTATLSLMSHFRPARCLPGPCQTLLTFPLLVCAGLRRPPRPHSTQPGSSCSPRHPSFPSLSWVMLLPPCVTFEAVK

SEQ ID NO: 767465 - protein, 202 aa, Homo sapiens
LADSNKKTPLGAGRRGAQAHCVLSLGTPVGETMALNKNHSEGGGVIVNNTESILMSYDHVELTFNDMKNVPEAFKGTKKGTVYLTPYRVIFLSKGKDAMQSFMMPFYLMKDCEIKQPVFGANYIKGTVKAEAGGGWEGSASYKLTFTAGGAIEFGQRMLQVASQASRGEVPSGAYGYSYMPSGAYVYPPPVANGMYRRALLG

SEQ ID NO: 767466 - protein, 131 aa, Homo sapiens; identical to SEQ ID NO: 767464

SEQ ID NO: 767467 - protein, 194 aa, Homo sapiens
GRVGRPTRPSSLYPTPPIGAVLGLGEGRGRLVLPPGLIINNYQELALWDIRAPGLGRGAAQLPMPARSPQCCPAYLPHRLGLFWEHGASPVPVSLSASPLEGTLWPPPPPQSSSLSLAPTATLSLMSHFRPARCLPGPCQTLLTFPLLVCAGLRRPPRPHSTQPGSSCSPRHPSFPSLSWVMLLPPCVTFEAVK

SEQ ID NO: 767468 - protein, 173 aa, Homo sapiens
LADSNKKTPLGAGRRGAQAHCVLSLGTPVGETMALNKNHSEGGGVIVNNTESILMSYDHVELTFNDMKNVPEAFKGTKKGTVYLTPYRVIFLSKGKDAMQSFMMPFYLMKDCEIKQPVFGANYIKGTVKAEAGGGWEGSASYKLTFTAGGAIEFGQRMLQVASQGIQAPKIRG

SEQ ID NO: 767469 - protein, 135 aa, Homo sapiens
LADSNKKTPLGAGRRGAQAHCVLSLGTPVGETMALNKNHSEGGGVIVNNTESILMSYDHVELTFNDMKNVPEAFKGTKKGTVYLTPYRVIFLSKGKDAMQSFMMPFYLMKDCEIKQPVFGANYIKGTVKAEAGGR

SEQ ID NO: 767470 - protein, 112 aa, Homo sapiens
MQSFMMPFYLMKDCEIKQPVFGANYIKGTVKAEAGGGWEGSASYKLTFTAGGAIEFGQRMLQVASQASRGEVPSGAYGYSYMPSGAYVYPPPVANGMYRRALLGYPLSTGPT

SEQ ID NO: 767471 - protein, 262 aa, Homo sapiens
  misc_feature (5)..(5): Xaa can be any naturally occurring amino acid
NSRPXRTRLREDDGECRAAVMAAALWGFFPVLLLLLLSGDVQSSEVPGAAAEGSGGSGVGIGDRFKIEGRAVVPGVKPQDWISAARVLVDGEEHVGFLKTDGSFVVHDIPSGSYVVEVVSPAYRFDPVRVDITSKGKMRARYVNYIKTSEVVRLPYPLQMKSSGPPSYFIKRESWGWTDFLMNPMVMMMVLPLLIFVLLPKVVNTSDPDMRREMEQSMNMLNSNHELPDVSEFMTRLFSSKSSGKSSSGSSKTGKSGAGKRR

SEQ ID NO: 767472 - protein, 279 aa, Homo sapiens
DRNGRAVMTTSSRQRRRWRPGDWEGFRGCRSECRAAVMAAALWGFFPVLLLLLLSGDVQSSEVPGAAAEGSGGSGVGIGDRFKIEGRAVVPGVKPQDWISAARVLVDGEEHVGFLKTDGSFVVHDIPSGSYVVEVVSPAYRFDPVRVDITSKGKMRARYVNYIKTSEVVRLPYPLQMKSSGPPSYFIKRESWGWTDFLMNPMVMMMVLPLLIFVLLPKVVNTSDPDMRREMEQSMNMLNSNHELPDVSEFMTRLFSSKSSGKSSSGSSKTGKSGAGKRR

SEQ ID NO: 767473 - protein, 279 aa, Homo sapiens; identical to SEQ ID NO: 767472

SEQ ID NO: 767474 - protein, 210 aa, Homo sapiens
LGTDYAPRRGDRFKIEGRAVVPGVKPQDWISAARVLVDGEEHVGFLKTDGSFVVHDIPSGSYVVEVVSPAYRFDPVRVDITSKGKMRARYVNYIKTSEVVRLPYPLQMKSSGPPSYFIKRESWGWTDFLMNPMVMMMVLPLLIFVLLPKVVNTSDPDMRREMEQSMNMLNSNHELPDVSEFMTRLFSSKSSGKSSSGSSKTGKSGAGKRR

SEQ ID NO: 767475 - protein, 208 aa, Homo sapiens
  misc_feature (6)..(6): Xaa can be any naturally occurring amino acid
IRGRYXHGCEKTTGSAELLSWRPLCGASFPSCCCCCYRGMSRARRTDGSFVVHDIPSGSYVVEVVSPAYRFDPVRVDITSKGKMRARYVNYIKTSEVVRLPYPLQMKSSGPPSYFIKRESWGWTDFLMNPMVMMMVLPLLIFVLLPKVVNTSDPDMRREMEQSMNMLNSNHELPDVSEFMTRLFSSKSSGKSSSGSSKTGKSGAGKRR

SEQ ID NO: 767476 - protein, 243 aa, Homo sapiens
  misc_feature (19)..(19): Xaa can be any naturally occurring amino acid
  misc_feature (42)..(42): Xaa can be any naturally occurring amino acid
MVPRAFGKGGPPGAWLGLXGNPGKGKVGGPGIREDPPFKELXGPVPVWSQGVEALKNWDLGRPRVALVRREKEPRRVSLKTDGSFVVHDIPSGSYVVEVVSPAYRFDPVRVDITSKGKMRARYVNYIKTSEVVRLPYPLQMKSSGPPSYFIKRESWGWTDFLMNPMVMMMVLPLLIFVLLPKVVNTSDPDMRREMEQSMNMLNSNHELPDVSEFMTRLFSSKSSGKSSSGSSKTGKSGAGKRR

SEQ ID NO: 767477 - protein, 239 aa, Homo sapiens
DRNGRAVMTTSSRQRRRWRPGDWEGFRGCRSECRAAVMAAALWGFFPVLLLLLLSGDVQSSEVPGAAAEGSGGSGVGIGDRFKIEGRAVVPGVKPQDWISAARVLVDGEEHVGFLKARYVNYIKTSEVVRLPYPLQMKSSGPPSYFIKRESWGWTDFLMNPMVMMMVLPLLIFVLLPKVVNTSDPDMRREMEQSMNMLNSNHELPDVSEFMTRLFSSKSSGKSSSGSSKTGKSGAGKRR

SEQ ID NO: 767478 - protein, 157 aa, Homo sapiens
DRNGRAVMTTSSRQRRRWRPGDWEGFRGCRSECRAAVMAAALWGFFPVLLLLLLSGDVQSSEVPGAAAEGSGGSGVGIGDRFKIEGRAVVPGVKPQDWISAARVLVDGEEHVGFLNMVPGVISLNWLCARRLPSEISGFLQGICNAYDTYGFSPQYL

SEQ ID NO: 767479 - protein, 279 aa, Homo sapiens; identical to SEQ ID NO: 767472

SEQ ID NO: 767480 - protein, 279 aa, Homo sapiens; identical to SEQ ID NO: 767472

SEQ ID NO: 767481 - protein, 151 aa, Homo sapiens
MQNYKYDKAIVPESKNGGSPALNNNPRRSGSKRVLLICLDLFCLFMAGLPFLIIETSTIKPYHRGFYCNDESIKYPLKTGETINDAVLCAVGIVIAILAIITGEFYRIYYLKKSRSTIQNPYVAALYKQVGAASSLAVPSASLSQTLPKCP

SEQ ID NO: 767482 - protein, 151 aa, Homo sapiens; identical to SEQ ID NO: 767481

SEQ ID NO: 767483 - protein, 151 aa, Homo sapiens; identical to SEQ ID NO: 767481

SEQ ID NO: 767484 - protein, 151 aa, Homo sapiens; identical to SEQ ID NO: 767481

SEQ ID NO: 767485 - protein, 105 aa, Homo sapiens [sequence omitted]

SEQ ID NO: 767486 - protein, 151 aa, Homo sapiens; identical to SEQ ID NO: 767481

SEQ ID NO: 767487 - protein, 108 aa, Homo sapiens
MQNYKYDKAIVPESKNGGRARLLRPLLQFTLIMMAFYTGLSRVSDHKHHPSDVLAGFAQGALVACCIVFFVSDLFKTKTTLSLPAPAIRKEILSPVDIIDRNNHHNMM

SEQ ID NO: 767488 - protein, 125 aa, Homo sapiens
MVKGHSFSIQVSKKRPILLLAGLPFLIIETSTIKPYHRGFYCNDESIKYPLKTGETINDAVLCAVGIVIAILAIITGEFYRIYYLKKSRSTIQNPYVAALYKQVGAASSLAVPSASLSQTLPKCP

SEQ ID NO: 767489 - protein, 120 aa, Homo sapiens
  misc_feature (86)..(86): Xaa can be any naturally occurring amino acid
  misc_feature (95)..(95): Xaa can be any naturally occurring amino acid
MQNYKYDKAIVPESKNGGSPALNNNPRRSGSKRVLLICLDLFCLFMAGLPFLIIETSTMANVSTRLRPLLESGHCWCSLPKSQNLXICSNPVTSXLPFTLSVDSFILVISFSIVKVLCLS

SEQ ID NO: 767490 - protein, 151 aa, Homo sapiens; identical to SEQ ID NO: 767481

SEQ ID NO: 767491 - protein, 151 aa, Homo sapiens; identical to SEQ ID NO: 767481

SEQ ID NO: 767492 - protein, 133 aa, Homo sapiens
MQNYKYDKAIVPESKNGGSPALNNNPRRSGSKRVLLICLDLFCLFMAGLPFLIIETSTIKPYHRGFYCNDESIKYPLAILAIITGEFYRIYYLKKSRSTIQNPYVAALYKQVGAASSLAVPSASLSQTLPKCP

SEQ ID NO: 767493 - protein, 151 aa, Homo sapiens; identical to SEQ ID NO: 767481

SEQ ID NO: 767494 - protein, 139 aa, Homo sapiens
RPEEQPQVQSDLSKEVLLEFHKTLVLKEDKEGEENCTDRLYLQARFTWRGARLLRPLLQFTLIMMAFYTGLSRVSDHKHHPSDVLAGFAQGALVACCIVFFVSDLFKTKTTLSLPAPAIRKEILSPVDIIDRNNHHNMM

SEQ ID NO: 767495 - protein, 165 aa, Homo sapiens
MQNYKYDKAIVPESKNGGSPALNNNPRRSGSKRVLLICLDLFCLFMAGLPFLIIETSTIKPYHRGFYCNDESIKYPLKTGETINDAVLCAVGIVIAILAIITGEFYRIYYLKKSRSTIQNPYVAALYKQVGAASSLAVPSASLSQTLPKIHIAAHDARNSTESRK

SEQ ID NO: 767496 - protein, 511 aa, Homo sapiens
MRVACGTWASLILVMCYVWICLGGLTLAVDRSSFKTCDRGRSFCKRQRIVRQGSLHTETLLDSLHALDLITLDGSTLIHEVTKVLLVLELQGLQKNMTRFRIDELEPRGPRYRVPDVLVADPPIARLSVSGRDENSVELTMAEGPYKIILTARPFRLDLLEDRSLLLSVNARGLLEFEHQRAPRVSQGSKDPAEGDGAQPEETPRDGDKPEETQGKAEKDEPGAWEETFKTHSDSKPYGPMSVGLDFSLPGMEHVYGIPEHADNLRLKVTEGGEPYRLYNLDVFQYELYNPMALYGSVPVLLAHNPHRDLGIFWLNAAETWVDISSNTAGKTLFGKMMDYLQGSGETPQTDVRWMSETGIIDVFLLLGPSSLMFSGNMLVSQEPGVAPTLLPRYHQSRWNYRDELMCWKWNRDMMITNLPCDCHTGKTMDKLTAKRDYHLGPQSLPQPGACLRRLVTRGRKLVASQNPHQGLRYRVHEELGPGAVLNLDGLNIGGSQHGSPVYPKRRGKSK

SEQ ID NO: 767497 - protein, 96 aa, Homo sapiens
FGMRKHPGMATPEETQGKAEKDEPGAWEETFKTHSDSKPYGPMSVGLDFSLPGMEHVYGIPYLGALNSPRVYPFMPLVCWCHFLEEDEGNELGLLF

SEQ ID NO: 767498 - protein, 532 aa, Homo sapiens
MRVACGTWASLILVMCYVWICLGGLTLAVDRSSFKTCDRGRSFCKRQRIVRQGSLHTETLLDSLHALDLITLDGSTLIHEVTKVLLVLELQGLQKNMTRFRIDELEPRGPRYRVPDVLVADPPIARLSVSGRDENSVELTMAEGPYKIILTARPFRLDLLEDRSLLLSVNARGLLEFEHQRAPRVSFSDKVNLTLGSIWDKIKNLFLQGSKDPAEGDGAQPEETPRDGDKPEETQGKAEKDEPGAWEETFKTHSDSKPYGPMSVGLDFSLPGMEHVYGIPEHADNLRLKVTEGGEPYRLYNLDVFQYELYNPMALYGSVPVLLAHNPHRDLGIFWLNAAETWVDISSNTAGKTLFGKMMDYLQGSGETPQTDVRWMSETGIIDVFLLLGPSSLMFSGNMLVSQEPGVAPTLLPRYHQSRWNYRDELMCWKWNRALMITNLPCDVTLARQMDKLMAKRDYHLGPQSLPQPGACLRRLVTRGRKLVASQNPHQGLRYRVHEELGPGAVLNLDGLNIGGSQHGSPVYPKRRGKSK

SEQ ID NO: 767499 - protein, 203 aa, Homo sapiens
MAGPELLLDSNIRLWVVLPIVIITFFVGMIRHYVSILLQSDKKLTQEQVSDRKYLSGLVQWLTPIIPALWGAEMGGSLEPRNLRPTLAACQVLIRSRVLRENGKYIPKQSFLTRKYYFNNPEDGFFKKTKRKVVPPSPMTDPTMLTDMMKGNVTNVLPMILIGGWINMTFSGFVTTKVPFPLTLRFKPMLQQGIELLTLDASW

SEQ ID NO: 767500 - protein, 261 aa, Homo sapiens
MAGPELLLDSNIRLWVVLPIVIITFFVGMIRHYVSILLQSDKKLTQEQVSDSQVLIRSRVLRENGKYIPKQSFLTRKYYFNNPEDGFFKKTKRKVVPPSPMTDPTMLTDMMKGNVTNVLPMILIGGWINMTFSGFVTTKVPFPLTLRFKPMLQQGIELLTLDASWVSSASWYFLNVFGLRSIYSLILGQDNAADQSRMMQEQMTGAAMAMPADTNKAFKTEWEALELTDHQWALDDVEEELMAKDLHFEGMFKKELQTSIF

SEQ ID NO: 767501 - protein, 212 aa, Homo sapiens
MFSTKPPHLASEQKSCPCCGWKRSVLEEGKSGVPRVLGGRAEPHEPSLSQCLLGTPISAGAPAGAGEQRVPVAVGRQPVQGPRHLLLLLCEEMCTKGLGAQTGVLRMKGVNLSCVRTCMVVAEERPRIALTQSFSKLFKDLGLPARAVSTTFGCRVNVAICLQVRCLGPAVLESWLLAAWRPSFPVVNVPFCSRLIYFSFSGPLISHFHVTF

SEQ ID NO: 767502 - protein, 251 aa, Homo sapiens
MICPFRHYYLCSKFCTEIVPFIFRVRLVERGSPHSLPLMESGKILPGVKVIIAHTETKGPLGDSHLGEIWVSSPHNATGYYTVYGEEALHADHFSARLSFGDTQTIWARTGYLGFLRRTELTDASGGRHDALYVVGSLDETLELRGMRYHPIDIETSVIRAHRSIAECAVFTWTNLLVVVVELDGLEQDALDLVALVTNVVLEEHYLVVGVVVIVDPGVIPINSRGEKQRMHLRDGFLADQLDPIYVAYNM

SEQ ID NO: 767503 - protein, 411 aa, Homo sapiens
MFSTKPPHLASEQKSCPCCGWKRSVLEEGKSGVPRVLGGRAEPHEPSLSQCLLGTPISAGAPAGAGEQRVPVAVGRQPVQGPRHLLLLLCEEMCTKGLGAQTGVLRMKGVNLSCVRTCMVVAEERPRIALTQSFSKLFKDLGLPARAVSTTFGCRVNVAICLQGTAGPDPTTVYVDMRALRHDRVRLVERGSPHSLPLMESGKILPGVKVIIAHTETKGPLGDSHLGEIWVSSPHNATGYYTVYGEEALHADHFSARLSFGDTQTIWARTGYLGFLRRTELTDASGGRHDALYVVGSLDETLELRGMRYHPIDIETSVIRAHRSIAECAVFTWTNLLVVVVELDGLEQDALDLVALVTNVVLEEHYLVVGVVVIVDPGVIPINSRGEKQRMHLRDGFLADQLDPIYVAYNM

SEQ ID NO: 767504 - protein, 251 aa, Homo sapiens; identical to SEQ ID NO: 767502

SEQ ID NO: 767505 - protein, 232 aa, Homo sapiens
FNVTESRESRVMFSLTRDIALLLPDPPRREGHHRTHRDQRTLGDSHLGEIWVSSPHNATGYYTVYGEEALHADHFSARLSFGDTQTIWARTGYLGFLRRTELTDASGGRHDALYVVGSLDETLELRGMRYHPIDIETSVIRAHRSIAECAVFTWTNLLVVVVELDGLEQDALDLVALVTNVVLEEHYLVVGVVVIVDPGVIPINSRGEKQRMHLRDGFLADQLDPIYVAYNM

SEQ ID NO: 767506 - protein, 200 aa, Homo sapiens
PTRRGRVGSGKAFGMPTMRLLSFVVLALFAVTQAEEGARLLASKSLLNRYAVEGRDLTLQYNIYNVGSSAALDVELSDDSFPPEDFGIVSGMLNVKWDRIAPASNVSHTVVLRPLKAGYFNFTSATITYLAQEDGPVVIGSTSAPGQGGILAQREFDRRFSPHFLDWAAFGVMTLPSIGIPLLLWYSSKRKYDTPKTKKN

SEQ ID NO: 767507 - protein, 186 aa, Homo sapiens [sequence omitted]

SEQ ID NO: 767508 - protein, 209 aa, Homo sapiens
VLISGFRMLTLSSCLCGSGKAFGMPTMRLLSFVVLALFAVTQAEEGARLLASKSLLNRYAVEGRDLTLQYNIYNVGSSAALDVELSDDSFPPEDFGIVSGMLNVKWDRIAPASNVSHTVVLRPLKAGYFNFTSATITYLAQEDGPVVIGSTSAPGQGGILAQREFDRRFSPHFLDWAAFGVMTLPSIGIPLLLWYSSKRKYDTPKTKKN

SEQ ID NO: 767509 - protein, 183 aa, Homo sapiens
MRLLSFVVLALFAVTQAEEGARLLASKSLLNRYAVEGRDLTLQYNIYNVGSSAALDVELSDDSFPPEDFGIVSGMLNVKWDRIAPASNVSHTVVLRPLKAGYFNFTSATITYLAQEDGPVVIGSTSAPGQGGILAQREFDRRFSPHFLDWAAFGVMTLPSIGIPLLLWYSSKRKYDTPKTKKN

SEQ ID NO: 767510 - protein, 165 aa, Homo sapiens
VLISGFRMLTLSSCLCGSGKAFGMPTMRLLSFVVLALFAVTQAEEGARLLASKSLLNRYAVEGRDLTLQYNIYNVGSSAALDVELSDDSFPPEDFGIVSGMLNVKWDRIAPASNVSHTVVLRPLKAGYFNFTSATITYLAQEDGPVVVLMAHHALTGGLLTDLRL

SEQ ID NO: 767511 - protein, 186 aa, Homo sapiens [sequence omitted]

SEQ ID NO: 767512 - protein, 186 aa, Homo sapiens [sequence omitted]

SEQ ID NO: 767513 - protein, 186 aa, Homo sapiens [sequence omitted]

SEQ ID NO: 767514 - protein, 183 aa, Homo sapiens; identical to SEQ ID NO: 767509

SEQ ID NO: 767515 - protein, 197 aa, Homo sapiens
DLELVSGKAFGMPTMRLLSFVVLALFAVTQAEEGARLLASKSLLNRYAVEGRDLTLQYNIYNVGSSAALDVELSDDSFPPEDFGIVSGMLNVKWDRIAPASNVSHTVVLRPLKAGYFNFTSATITYLAQEDGPVVIGSTSAPGQGGILAQREFDRRFSPHFLDWAAFGVMTLPSIGIPLLLWYSSKRKYDTPKTKKN

SEQ ID NO: 767516 - protein, 200 aa, Homo sapiens; identical to SEQ ID NO: 767506

SEQ ID NO: 767517 - protein, 121 aa, Homo sapiens
MAIGVSECSSVEVGPGVARPCVPASNVSHTVVLRPLKAGYFNFTSATITYLAQEDGPVVIGSTSAPGQGGILAQREFDRRFSPHFLDWAAFGVMTLPSIGIPLLLWYSSKRKYDTPKTKKN

SEQ ID NO: 767518 - protein, 105 aa, Homo sapiens
DLELVSGKAFGMPTMRLLSFVVLALFAVTQAEEGARLLASKSLLNRYAVEGRDLTLQYNIYNVGSSAALDVELSDDSFPPEDFGIVSGMLNVKWDRIAPYPLGTW

SEQ ID NO: 767519 - protein, 200 aa, Homo sapiens; identical to SEQ ID NO: 767506

SEQ ID NO: 767520 - protein, 200 aa, Homo sapiens; identical to SEQ ID NO: 767506

SEQ ID NO: 767521 - protein, 96 aa, Homo sapiens
RRYEDPQKCGLKSRGNMTLPKRRRTDWGFHSPPLPRNPGSSPKKSRCFPDSKGYLKCNLFSLSPWPLSPGSCPALSHSEGPALGVCESLLGSIVKP

SEQ ID NO: 767522 - protein, 186 aa, Homo sapiens [sequence omitted]

SEQ ID NO: 767523 - protein, 209 aa, Homo sapiens; identical to SEQ ID NO: 767508

SEQ ID NO: 767524 - protein, 212 aa, Homo sapiens
PTRRGRVGSGKAFGMPTMRLLSFVVLALFAVTQAEEGARLLASKSLLNRYAVEGRDLTLQYNIYNVGSSAALDVELSDDSFPPEDFGIVSGMLNVKWDRIAPASNVSHTVVLRPLKAGYFNFTSATITYLAQEDGPVVIGSTSAPGQGGILAQREFDRRFSPHFLDWAAFGVMTLPSIGIPLLLWYSSKRKYDTPKRLSGATKTGREPWGRR

SEQ ID NO: 767525 - protein, 209 aa, Homo sapiens; identical to SEQ ID NO: 767508

SEQ ID NO: 767526 - protein, 209 aa, Homo sapiens; identical to SEQ ID NO: 767508

SEQ ID NO: 767527 - protein, 186 aa, Homo sapiens [sequence omitted]

SEQ ID NO: 767528 - protein, 186 aa, Homo sapiens [sequence omitted]

SEQ ID NO: 767529 - protein, 186 aa, Homo sapiens
VLISGFRMLTLSSCLCGSGKAFGMPTMRLLSFVVLALFAVTQAEEGARLLASKSLLNRYAVEGRDLTLQYNIYNVGSSAALDVELSDDSFPPEDFGIVSGMLNVKWDRIAPASNVSHTVVLRPLKAGYFNFTSATITYLAQEDGPVVIGSTSAPGQGGILAQREFDRRFSPHFVSFLVFSLISSLV

SEQ ID NO: 767530 - protein, 121 aa, Homo sapiens
MLTLSSCLCGSGKAFGMPTMRLLSFVVLALFAVTQAEEGARLLASKSLLNRYAVEGRDLTLQYNIYNVGSSAALDVELSDDSFPPEDFGIVSGMLNVKWDRIAPHFLLDPALLSAIVKDQP

SEQ ID NO: 767531 - protein, 183 aa, Homo sapiens; identical to SEQ ID NO: 767509

SEQ ID NO: 767532 - protein, 183 aa, Homo sapiens; identical to SEQ ID NO: 767509

SEQ ID NO: 767533 - protein, 191 aa, Homo sapiens
  misc_feature (4)..(4): Xaa can be any naturally occurring amino acid
VLHXRMPTMRLLSFVVLALFAVTQAEEGARLLASKSLLNRYAVEGRDLTLQYNIYNVGSSAALDVELSDDSFPPEDFGIVSGMLNVKWDRIAPASNVSHTVVLRPLKAGYFNFTSATITYLAQEDGPVVIGSTSAPGQGGILAQREFDRRFSPHFLDWAAFGVMTLPSIGIPLLLWYSSKRKYDTPKTKKN

SEQ ID NO: 767534 - protein, 164 aa, Homo sapiens
ANDEAAVISLLNRYAVEGRDLTLQYNIYNVGSSAALDVELSDDSFPPEDFGIVSGMLNVKWDRIAPASNVSHTVVLRPLKAGYFNFTSATITYLAQEDGPVVIGSTSAPGQGGILAQREFDRRFSPHFLDWAAFGVMTLPSIGIPLLLWYSSKRKYDTPKTKKN

SEQ ID NO: 767535 - protein, 95 aa, Homo sapiens
ITGDPGIPGSQAGYFNFTSATITYLAQEDGPVVIGSTSAPGQGGILAQREFDRRFSPHFLDWAAFGVMTLPSIGIPLLLWYSSKRKYDTPKTKKN

SEQ ID NO: 767536 - protein, 127 aa, Homo sapiens
SRTSLRKGVWDANDEAAVICGVGSICCHSSRGRSQAFGFQITAEQIRRGGTRPDLAVQHLQCWLKIGSTSAPGQGGILAQREFDRRFSPHFLDWAAFGVMTLPSIGIPLLLWYSSKRKYDTPKTKKN

SEQ ID NO: 767537 - protein, 239 aa, Homo sapiens
VLISGFRMLTLSSCLCGSGKAFGMPTMRLLSFVVLALFAVTQAEEGARLLASKSLLNRYAVEGRDLTLQYNIYNVGSSAALDVELSDDSFPPEDFGIVSGMLNVKWDRIAPASNVSHTVVLRPLKAGYFNFTSATITYLAQEDGPVVIGSTSAPGQGGILAQCHNGTWIAPASNVSHTVVLRPLKAGYFNFTSATITYLAQEDGPVVIGSFSGLGSLWGHDPSLHRHPPAIVVLQQEEI

SEQ ID NO: 767538 - protein, 244 aa, Homo sapiens
  misc_feature (4)..(4): Xaa can be any naturally occurring amino acid
VLHXRMPTMRLLSFVVLALFAVTQAEEGARLLASKSLLNRYAVEGRDLTLQYNIYNVGSSAALDVELSDDSFPPEDFGIVSGMLNVKWDRIAPASNVSHTVVLRPLKAGYFNFTSATITYLAQEDGPVVIGSTSAPGQGGILAQREFDRRFSPHFLDWAAFGVMTLPSIGIPLLLWYSSKRKYDTPSSSPKKSRCFPDSKGYLKCNLFSLSPWPLSPGSCPALSHSEGPALGVCESLLGSIVKP

SEQ ID NO: 767539 - protein, 109 aa, Homo sapiens
  misc_feature (5)..(5): Xaa can be any naturally occurring amino acid
DVVHXFHLNDYRSVKDVVEAASHIEQRGGTETRTAFGIEFARSEAFQNEEELIGASTALLSQEIQAPLPRNPGAFQTPKGILNAISSLLALGHFLLDPALLSAIVKDQP

SEQ ID NO: 767540 - protein, 200 aa, Homo sapiens; identical to SEQ ID NO: 767506

SEQ ID NO: 767541 - protein, 150 aa, Homo sapiens
PTRRGRVGSGKAFGMPTMRLLSFVVLALFAVTQAEEGARLLASKSLLNRYAVEGRDLTLQYNIYNVGSSAALDVELSDDSFPPEDFGIVSGMLNVKWDRIAPASNVSHTVVLRPLKAGYFNFTSATITYLAQEDGPVVNQPQDSLVLPGS

SEQ ID NO: 767542 - protein, 725 aa, Homo sapiens
RPARRRWSLRTVGGELSLAYPRLGWPGCHFCLPALQTMDGSFVQHSVRVLQELNKQREKGQYCDATLDVGGLVFKAHWSVLACCSHFFQSLYGDGSGGSVVLPAGFAEIFGLLLDFFYTGHLALTSGNRDQVLLAARELRVPEAVELCQSFKPKTSVGQAAGGQSGLGPPASQNVNSHVKEPAGLEEEEVSRTLGLVPRDQEPRGSHSPQRPQLHSPAQSEGPSSLCGKLKQALKPCPLEDKKPEDCKVPPRPLEAEGAQLQGGSNEWEVVVQVEDDGDGDYMSEPEAVLTRRKSNVIRKPCAAEPALSAGSLAAEPAENRKGTAVPVECPTCHKKFLSKYYLKVHNRKHTGEKPFECPKCGKCYFRKENLLEHEARNCMNRSEQVFTCSVCQETFRRRMELRVHMVSHTGEMPYKCSSCSQQFMQKKDLQSHMIKLHGAPKPHACPTCAKCFLSRTELQLHEAFKHRGEKLFVCEECGHRASSRNGLQMHIKAKHRNERPHVCEFCSHAFTQKANLNMHLRTHTGEKPFQCHLCGKTFRTQASLDKHNRTHTGERPFSCEFCEQRFTEKGPLLRHVASRHQEGRPHFCQICGKTFKAVEQLRVHVRRHKGVRKFECTECGYKFTRQAHLRRHMEIHDRVENYNPRQRKLRNLIIEDEKMVVVALQPPAELEVGSAEVIVESLAQGGLASQLPGQRLCAEESFTGPGVLEPSLIITAAVPEDCDT

SEQ ID NO: 767543 - protein, 620 aa, Homo sapiens
SSRADAYYYYYYYSCEKTTEWGNRDQVLLAARELRVPEAVELCQSFKPKTSVGQAAGGQSGLGPPASQNVNSHVKEPAGLEEEEVSRTLGLVPRDQEPRGSHSPQRPQLHSPAQSEGPSSLCGKLKQALKPCPLEDKKPEDCKVPPRPLEAEGAQLQGGSNEWEVVVQVEDDGDGDYMSEPEAVLTRRKSNVIRKPCAAEPALSAGSLAAEPAENRKGTAVPVECPTCHKKFLSKYYLKVHNRKHTGEKPFECPKCGKCYFRKENLLEHEARNCMNRSEQVFTCSVCQETFRRRMELRVHMVSHTGEMPYKCSSCSQQFMQKKDLQSHMIKLHGAPKPHACPTCAKCFLSRTELQLHEAFKHRGEKLFVCEECGHRASSRNGLQMHIKAKHRNERPHVCEFCSHAFTQKANLNMHLRTHTGEKPFQCHLCGKTFRTQASLDKHNRTHTGERPFSCEFCEQRFTEKGPLLRHVASRHQEGRPHFCQICGKTFKAVEQLRVHVRRHKGVRKFECTECGYKFTRQAHLRRHMEIHDRVENYNPRQRKLRNLIIEDEKMVVVALQPPAELEVGSAEVIVESLAQGGLASQLPGQRLCAEESFTGPGVLEPSLIITAAVPEDCDT

SEQ ID NO: 767544 - protein, 443 aa, Homo sapiens [sequence omitted]

SEQ ID NO: 767545 - protein, 326 aa, Homo sapiens
MELRVHMVSHTGEMPYKCSSCSQQFMQKKDLQSHMIKLHGAPKPHACPTCAKCFLSRTELQLHEAFKHRGEKLFVCEECGHRASSRNGLQMHIKAKHRNERPHVCEFCSHAFTQKANLNMHLRTHTGEKPFQCHLCGKTFRTQASLDKHNRTHTGERPFSCEFCEQRFTEKGPLLRHVASRHQEGRPHFCQICGKTFKAVEQLRVHVRRHKGVRKFECTECGYKFTRQAHLRRHMEIHDRVENYNPRQRKLRNLIIEDEKMVVVALQPPAELEVGSAEVIVESLAQGGLASQLPGQRLCAEESFTGPGVLEPSLIITAAVPEDCDT

SEQ ID NO: 767546 - protein, 725 aa, Homo sapiens; identical to SEQ ID NO: 767542

SEQ ID NO: 767547 - protein, 688 aa, Homo sapiens
MDGSFVQHSVRVLQELNKQREKGQYCDATLDVGGLVFKAHWSVLACCSHFFQSLYGDGSGGSVVLPAGFAEIFGLLLDFFYTGHLALTSGNRDQVLLAARELRVPEAVELCQSFKPKTSVGQAAGGQSGLGPPASQNVNSHVKEPAGLEEEEVSRTLGLVPRDQEPRGSHSPQRPQLHSPAQSEGPSSLCGKLKQALKPCPLEDKKPEDCKVPPRPLEAEGAQLQGGSNEWEVVVQVEDDGDGDYMSEPEAVLTRRKSNVIRKPCAAEPALSAGSLAAEPAENRKGTAVPVECPTCHKKFLSKYYLKVHNRKHTGEKPFECPKCGKCYFRKENLLEHEARNCMNRSEQVFTCSVCQETFRRRMELRVHMVSHTGEMPYKCSSCSQQFMQKKDLQSHMIKLHGAPKPHACPTCAKCFLSRTELQLHEAFKHRGEKLFVCEECGHRASSRNGLQMHIKAKHRNERPHVCEFCSHAFTQKANLNMHLRTHTGEKPFQCHLCGKTFRTQASLDKHNRTHTGERPFSCEFCEQRFTEKGPLLRHVASRHQEGRPHFCQICGKTFKAVEQLRVHVRRHKGVRKFECTECGYKFTRQAHLRRHMEIHDRVENYNPRQRKLRNLIIEDEKMVVVALQPPAELEVGSAEVIVESLAQGGLASQLPGQRLCAEESFTGPGVLEPSLIITAAVPEDCDT

SEQ ID NO: 767548 - protein, 688 aa, Homo sapiens; identical to SEQ ID NO: 767547

SEQ ID NO: 767549 - protein, 466 aa, Homo sapiens
MRSAGPPCRPLCWPDPWQPLRTCVSFLPLHSPLQSLHAGGGFWACPCTLTSRCHLRTLVPLRRDPEGALGEGEMGNPLSPPTPVASPGRKHTGEKPFECPKCGKCYFRKENLLEHEARNCMNRSEQVFTCSVCQETFRRRMELRVHMVSHTGEMPYKCSSCSQQFMQKKDLQSHMIKLHGAPKPHACPTCAKCFLSRTELQLHEAFKHRGEKLFVCEECGHRASSRNGLQMHIKAKHRNERPHVCEFCSHAFTQKANLNMHLRTHTGEKPFQCHLCGKTFRTQASLDKHNRTHTGERPFSCEFCEQRFTEKGPLLRHVASRHQEGRPHFCQICGKTFKAVEQLRVHVRRHKGVRKFECTECGYKFTRQAHLRRHMEIHDRVENYNPRQRKLRNLIIEDEKMVVVALQPPAELEVGSAEVIVESLAQGGLASQLPGQRLCAEESFTGPGVLEPSLIITAAVPEDCDT

SEQ ID NO: 767550 - protein, 725 aa, Homo sapiens; identical to SEQ ID NO: 767542

SEQ ID NO: 767551 - protein, 151 aa, Homo sapiens
VGTQVLRAEGTGIGGTLWEAFGVGFPRPLAHLHLGFGEGEPLQGMAAGKGPLATPSNPTAGFCVRARRNPGPLFLEACQQPLGPGTVGEATRTLPPVCLGLRRAWCAVGLQHSVMVRPGRLCVALSHPSVPTLPRQTLPSSKRKPGQRLLS

SEQ ID NO: 767552 - protein, 873 aa, Homo sapiens
MASRRKSTTPCMVLASEQDPDLELISDLDEGPPVLTPVENTRAESISSDEEVHESVDSDNQQNKKVEGGYECKYCTFQTPDLNMFTFHVDSEHPNVVLNSSYVCVECNFLTKRYDALSEHNLKYHPGEENFKLTMVKRNNQTIFEQTINDLTFDGSFVKEENAEQAESTEVSSSGISISKTPIMKMMKNKVENKRIAVHHNSVEDVPEEKENEIKPDREEIVENPSSSASESNTSTSIVNRIHPSTASTVVTPAAVLPGLAQVITAVSAQQNSNLIPKVLIPVNSIPTYNAALDNNPLLLNTYNKFPYPTMSEITVLSAQAKYTEEQIKIWFSAQRLKHGVSWTPEEVEEARRKQFNGTVHTVPQTITVIPTHISTGSNGLPSILQTCQIVGQPGLVLTQVAGTNTLPVTAPIALTVAGVPSQNNIQKSQVPAAQPTAETKPATAAVPTSQSVKHETALVNPDSFGIRAKKTKEQLAELKVSYLKNQFPHDSEIIRLMKITGLTKGEIKKWFSDTRYNQRNSKSNQCLHLNNDSSTTIIIDSSDETTESPTVGTAQPKQSWNPFPDFTPQKFKEKTAEQLRVLQASFLNSSVLTDEELNRLRAQTKLTRREIDAWFTEKKKSKALKEEKMEIDESNAGSSKEEAGETSPADESGAPKSGSTGKICKKTPEQLHMLKSAFVRTQWPSPEEYDKLAKESGLARTDIVSWFGDTRYAWKNGNLKWYYYYQSANSSSMNGLSSLRKRGRGRPKGRGRGRPRGRPRGSKRINNWDRGPSLIKFKTGTAILKDYYLKHKFLNEQDLDELVNKSHMGYEQVREWFAERQRRSELGIELFEENEEEDEVIDDQEEDEEETDDSDTWEPPRHVKRKLSKSDD

SEQ ID NO: 767553 - protein, 380 aa, Homo sapiens
MDSGCWLFGGEFEDSVFEERPERRSGPPASYCAKLCEPQWFYEETESSDDVEVLTLKKFKGDLAYRRQEYQKALQEYSSISEKLSSTNFAMKRDVQEGQARCLAHLGRHMEALEIAANLENKATNTDHLTTVLYLQLAICSSLQNLEKTIFCLQKLISLHPFNPWNWGKLAEAYLNLGPALSAALASSQKQHSFTSSDKTIKSFFPHSGKDCLLCFPETLPESSLFSVEANSSNSQKNEKALTNIQNCMAEKRETVLIETQLKACASFIRTRLLLQFTQPQQTSFALERNLRTQQEIEDKMKGFSFKEDTLLLIAEVMGEDIPEKIKDEVHPEVKCVGSVALTALVTVSSEEFEDKWFRKIKDHFCPFENQFHTEIQILA

SEQ ID NO: 767554 - protein, 133 aa, Homo sapiens
MDSGCWLFGGEFEDSVFEERPERRSGPPASYCAKLCEPQWFYEETESSDDVEVLTLKKFKGDLAYRRQEYQKALQEYSSISEKLSSTNFAMKRDVQEGQARCLAHLGRHMEALEIAANLENKATRKPQAGYRA

SEQ ID NO: 767555 - protein, 873 aa, Homo sapiens; identical to SEQ ID NO: 767552

SEQ ID NO: 767556 - protein, 873 aa, Homo sapiens; identical to SEQ ID NO: 767552

SEQ ID NO: 767557 - protein, 264 aa, Homo sapiens
RVADAWVDPRVKSKALKEEKMEIDESNAGSSKEEAGETSPADESGAPKSGSTGKICKKTPEQLHMLKSAFVRTQWPSPEEYDKLAKESGLARTDIVSWFGDTRYAWKNGNLKWYYYYQSANSSSMNGLSSLRKRGRGRPKGRGRGRPRGRPRGSKRINNWDRGPSLIKFKTGTAILKDYYLKHKFLNEQDLDELVNKSHMGYEQVREWFAERQRRSELGIELFEENEEEDEVIDDQEEDEEETDDSDTWEPPRHVKRKLSKSDD

SEQ ID NO: 767558 - protein, 348 aa, Homo sapiens
MLRKLWQWFYEETESSDDVEVLTLKKFKGDLAYRRQEYQKALQEYSSISEKLSSTNFAMKRDVQEGQARCLAHLGRHMEALEIAANLENKATNTDHLTTVLYLQLAICSSLQNLEKTIFCLQKLISLHPFNPWNWGKLAEAYLNLGPALSAALASSQKQHSFTSSDKTIKSFFPHSGKDCLLCFPETLPESSLFSVEANSSNSQKNEKALTNIQNCMAEKRETVLIETQLKACASFIRTRLLLQFTQPQQTSFALERNLRTQQEIEDKMKGFSFKEDTLLLIAEVMGEDIPEKIKDEVHPEVKCVGSVALTALVTVSSEEFEDKWFRKIKDHFCPFENQFHTEIQILA

SEQ ID NO: 767559 - protein, 325 aa, Homo sapiens
MLPQGYPEPTDYKKYQKALQEYSSISEKLSSTNFAMKRDVQEGQARCLAHLGRHMEALEIAANLENKATNTDHLTTVLYLQLAICSSLQNLEKTIFCLQKLISLHPFNPWNWGKLAEAYLNLGPALSAALASSQKQHSFTSSDKTIKSFFPHSGKDCLLCFPETLPESSLFSVEANSSNSQKNEKALTNIQNCMAEKRETVLIETQLKACASFIRTRLLLQFTQPQQTSFALERNLRTQQEIEDKMKGFSFKEDTLLLIAEVMGEDIPEKIKDEVHPEVKCVGSVALTALVTVSSEEFEDKWFRKIKDHFCPFENQFHTEIQILA

SEQ ID NO: 767560 - protein, 334 aa, Homo sapiens
LPRCPRRGREMDSGCWLFGGEFEDSVFEERPERRSGPPASYCAKLCEPQWFYEETESSDDVEVLTLKKFKGDLAYRRQEYQKALQEYSSISEKLSSTNFAMKRDVQEGQARCLAHLGRHMEALEIAANLENKATNTDHLTTVLYLQLAICSSLQNLEKTIFCLQKLISLHPFNPWNWGKLAEAYLNLGPALSAALASSQKQHSFTSSDKTIKSFFPHSGKDCLLCFPETLPESSLFSVEANSSNSQKNEKALTNIQNCMAEKRETVLIETQLKACASFIRTRLLLQFTQPQQTSFALERNLRTQQEIEDKMKGFSFKEDTLLLIAEVSVSLGFM

SEQ ID NO: 767561 - protein, 873 aa, Homo sapiens; identical to SEQ ID NO: 767552

SEQ ID NO: 767562 - protein, 322 aa, Homo sapiens
LPRCPRRGREMDSGCWLFGGEFEDSVFEERPERRSGPPASYCAKLCEPQWFYEETESSDDVEVLTLKKFKGDLAYRRQEYQKALQEYSSISEKLSSTNFAMKRDVQEGQARCLAHLGRHMEALEIAANLENKATNTDHLTTVLYLQLAICSSLQNLEKTIFCLQKLISLHPFNPWNWGKLAEAYLNLGPALSAALASSQKQHSFTSSDKTIKSFFPHSGKDCLLCFPETLPESSLFSVEANSSNSQKNEKALTNIQNCMAEKRETVLIETQLKACASFIRTRLLLQFTQPQQTSFALERNLRTQQEIEDKMKGFSFKEDTIA

SEQ ID NO: 767563 - protein, 873 aa, Homo sapiens; identical to SEQ ID NO: 767552

SEQ ID NO: 767564 - protein, 113 aa, Homo sapiens
SKSEALGIEMIVLVRVGTCFLTWWDLQPTQYLGFLNISSRLSFIWKRWDFSPRIETFRFFRLLLQFTQPQQTSFALERNLRTQQEIEDKMKGFSFKEDTLLLIAEVSVSLGFM

SEQ ID NO: 767565 - protein, 292 aa, Homo sapiens
MLRKLWQWFYEETESSDDVEVLTLKKFKGDLAYRRQEYQKALQEYSSISEKLSSTNFAMKRDVQEGQARCLAHLGRHMEALEIAANLENKATNTDHLTTVLYLQLAICSSLQNLEKTIFCLQKLISLHPFNPWNWGKLAEAYLNLGPALSAALASSQKQHSFTSSDKTIKSFFPHSGKDCLLCFPETLPESSLFSVEANSSNSQKNEKALTNIQNCMAEKRETVLIETQLKACASFIRTRLLLQFTQPQQTSFALERNLRTQQEIEDKMKGFSFKEDTLLLIAEVSVSLGFM

SEQ ID NO: 767566 - protein, 873 aa, Homo sapiens; identical to SEQ ID NO: 767552

SEQ ID NO: 767567 - protein, 873 aa, Homo sapiens; identical to SEQ ID NO: 767552

SEQ ID NO: 767568 - protein, 873 aa, Homo sapiens; identical to SEQ ID NO: 767552

SEQ ID NO: 767569 - protein, 380 aa, Homo sapiens; identical to SEQ ID NO: 767553

SEQ ID NO: 767570 - protein, 380 aa, Homo sapiens; identical to SEQ ID NO: 767553

SEQ ID NO: 767571 - protein, 371 aa, Homo sapiens
  misc_feature (360)..(360): Xaa can be any naturally occurring amino acid
  misc_feature (362)..(362): Xaa can be any naturally occurring amino acid
MDSGCWLFGGEFEDSVFEERPERRSGPPASYCAKLCEPQWFYEETESSDDVEVLTLKKFKGDLAYRRQEYQKALQEYSSISEKLSSTNFAMKRDVQEGQARCLAHLGRHMEALEIAANLENKATNTDHLTTVLYLQLAICSSLQNLEKTIFCLQKLISLHPFNPWNWGKLAEAYLNLGPALSAALASSQKQHSFTSSDKTIKSFFPHSGKDCLLCFPETLPESSLFSVEANSSNSQKNEKALTNIQNCMAEKRETVLIETQLKACASFIRTRLLLQFTQPQQTSFALERNLRTQQEIEDKMKGFSFKEDTLLLIAEYGKISKKKKKKFFQKKKKKKGGKILGKKKGFFFPKPPPPQEERXVXKKVWVVLAP

SEQ ID NO: 767572 - protein, 319 aa, Homo sapiens
MDSGCWLFGGEFEDSVFEERPERRSGPPASYCAKLCEPQWFYEETESSDDVEVLTLKKFKGDLAYRRQEYQKALQEYSSISEKLSSTNFAMKRDVQEGQARCLAHLGRHMEALEIAANLENKATNTDHLTTVLYLQLAICSSLQNLEKTIFCLQKLISLHPFNPWNWGKLAEAYLNLGPALSAALASSQKQHSFTSSDKTIKSFFPHSGKDCLLCFPETLPESSLFSVEANSSNSQKNEKALTNIQNCMAEKRETVLIETQLKACASFIRTRLLLQFTQPQQTSFALERNLRTQQEIEDKMKGFSFKEDTLLLIAEGQI

SEQ ID NO: 767573 - protein, 153 aa, Homo sapiens
MDSGCWLFGGEFEDSVFEERPERRSGPPASYCAKLCEPQWFYEETESSDDVEVLTLKKFKGDLAYRRQEYQKALQEYSSISEKLSSTNFAMKRDVQEGQARCLAHLGRHMEALEIAANLENKATNTDHLTTVLYLQLAICSSLQNLEKREKQC

SEQ ID NO: 767574 - protein, 156 aa, Homo sapiens
MWKRSDHQPKIKAEDGPLVGQFEVLGSVPEPAMPHPLELSEFESFPVFQDIRLHIREVGAQLVKKVNAVFQLDITKNGKTILRWTIDLKNGSGDMYPGPARLPADTVFTIPESVFMELVLGKMNPQKAFLAGKFKVSGKVLLSWKLERVFKDWAKF

SEQ ID NO: 767575 - protein, 156 aa, Homo sapiens; identical to SEQ ID NO: 767574

SEQ ID NO: 767576 - protein, 97 aa, Homo sapiens
MNQENPPPYPGPGPTAPYPPYPPQPMGPGPMGGPYPPPQGYPYQGYPQYGWQGGPQEPPKTTVYVVEDQRRDELGPSTCLTACWTALCCCCLWDMLT

SEQ ID NO: 767577 - protein, 97 aa, Homo sapiens; identical to SEQ ID NO: 767576

SEQ ID NO: 767578 - protein, 117 aa, Homo sapiens
MTIDSGQEDKHGYSALYRSPMNQENPPPYPGPGPTAPYPPYPPQPMGPGPMGGPYPPPQGYPYQGYPQYGWQGGPQEPPKTTVYVVEDQRRDELGPSTCLTACWTALCCCCLWDMLT

SEQ ID NO: 767579 - protein, 97 aa, Homo sapiens; identical to SEQ ID NO: 767576

SEQ ID NO: 767580 - protein, 120 aa, Homo sapiens
MKDNTIYSSSPIPTVYSALYRSPMNQENPPPYPGPGPTAPYPPYPPQPMGPGPMGGPYPPPQGYPYQGYPQYGWQGGPQEPPKTTVYVVEDQRRDELGPSTCLTACWTALCCCCLWDMLT

SEQ ID NO: 767581 - protein, 97 aa, Homo sapiens; identical to SEQ ID NO: 767576

SEQ ID NO: 767582 - protein, 97 aa, Homo sapiens; identical to SEQ ID NO: 767576

SEQ ID NO: 767583 - protein, 134 aa, Homo sapiens
AGGRAGFWDSAKNSRCSLTSPALPIPFDCLRSPVSLSSTADSKSPQKQTTARCTEVRSRAVERERRIRGILEGHREAVRRVRCTGELRVDRWSVPISFAVRMMRQHRRSCYLEKMTKNWAGLVACDCSPSYSGG

SEQ ID NO: 767584 - protein, 86 aa, Homo sapiens
NVEPVPTQRTCCQDIVNDVSSDGSEDPAEFSRGDSCAHSETENNIVSWNALILPPVPEGCAEKTMWSPPGIPLDSPTEVLQQPRET

SEQ ID NO: 767585 - protein, 799 aa, Homo sapiens
SAPVRARVSSPQLRVFRSGRPRRLRVLRINRTSVALRLAGTGRFVAKTPGHPGSWEMGLLTFRDVAVEFSLEEWEHLEPAQKNLYQDVMLENYRNLVSLGLVVSKPDLITFLEQRKEPWNVKSEETVAIQPDVFSHYNKDLLTEHCTEASFQKVISRRHGSCDLENLHLRKRWKREECEGHNGCYDEKTFKYDQFDESSVESLFHQQILSSCAKSYNFDQYRKVFTHSSLLNQQEEIDIWGKHHIYDKTSVLFRQVSTLNSYRNVFIGEKNYHCNNSEKTLNQSSSPKNHQENYFLEKQYKCKEFEEVFLQSMHGQEKQEQSYKCNKCVEVCTQSLKHIQHQTIHIRENSYSYNKYDKDLSQSSNLRKQIIHNEEKPYKCEKCGDSLNHSLHLTQHQIIPTEEKPYKWKECGKVFNLNCSLYLTKQQQIDTGENLYKCKACSKSFTRSSNLIVHQRIHTGEKPYKCKECGKAFRCSSYLTKHKRIHTGEKPYKCKECGKAFNRSSCLTQHQTTHTGEKLYKCKVCSKSYARSSNLIMHQRVHTGEKPYKCKECGKVFSRSSCLTQHRKIHTGENLYKCKVCAKPFTCFSNLIVHERIHTGEKPYKCKECGKAFPYSSHLIRHYRIHTGEKPYKCKACSKSFSDSSGLSVHRRTHTGEKPYTCKECGKAFSYSSDVIQHRRIHTGQRPYKCEECGKAFNYRSYLTTHQRSHTGERPYKCEECGKAFNSRSYLTTHRRRHTGERPYKCDECGKAFSYRSYLTTHRRSHSGERPYKCEECGKAFNSRSYLIAHQRSHTREKL

SEQ ID NO: 767586 - protein, 623 aa, Homo sapiens
SAPVRARVSSPQLRVFRSGRPRRLRVLRINRTSVALRLAGTGRFVAKTPGHPGSWEMGLLTFRDVAVEFSLEEWEHLEPAQKNLYQDVMLENYRNLVSLGLVVSKPDLITFLEQRKEPWNVKSEETVAIQPDVFSHYNKDLLTEHCTEASFQKVISRRHGSCDLENLHLRKRWKREECEGHNGCYDEKTFKYDQFDESSVESLFHQQILSSCAKSYNFDQYRKVFTHSSLLNQQEEIDIWGKHHIYDKTSVLFRQVSTLNSYRNVFIGEKNYHCNNSEKTLNQSSSPKNHQENYFLEKQYKCKEFEEVFLQSMHGQEKQEQSYKCNKCVEVCTQSLKHIQHQTIHIRENSYSYNKYDKDLSQSSNLRKQIIHNEEKPYKCEKCGDSLNHSLHLTQHQIIPTEEKPYKWKECGKVFNLNCSLYLTKQQQIDTGENLYKCKACSKSFTRSSNLIVHQRIHTGEKPYKCKECGKAFRCSSYLTKHKRIHTGEKPYKCKECGKAFNRSSCLTQHQTTHTGEKHTNVKHVANLLVTPQVFLCIGELILERNPIHVKNVAKPLVIVQMLFSIGEFILARDPTNVKNVAKPSTIGHTSLHIREVILEKNFKNVKHGADFLLVTHVLLCIR

SEQ ID NO: 767587 - protein, 799 aa, Homo sapiens; identical to SEQ ID NO: 767585

SEQ ID NO: 767588 - protein, 715 aa, Homo sapiens
SAPVRARVSSPQLRVFRSGRPRRLRVLRINRTSVALRLAGTGRFVAKTPGHPGSWEMGLLTFRDVAVEFSLEEWEHLEPAQKNLYQDVMLENYRNLVSLGLVVSKPDLITFLEQRKEPWNVKSEETVAIQPDVFSHYNKDLLTEHCTEASFQKVISRRHGSCDLENLHLRKRWKREECEGHNGCYDEKTFKYDQFDESSVESLFHQQILSSCAKSYNFDQYRKVFTHSSLLNQQEEIDIWGKHHIYDKTSVLFRQVSTLNSYRNVFIGEKNYHCNNSEKTLNQSSSPKNHQENYFLEKQYKCKEFEEVFLQSMHGQEKQEQSYKCNKCVEVCTQSLKHIQHQTIHIRENSYSYNKYDKDLSQSSNLRKQIIHNEEKPYKCEKCGDSLNHSLHLTQHQIIPTEEKPYKWKECGKVFNLNCSLYLTKQQQIDTGENLYKCKACSKSFTRSSNLIVHQRIHTGEKPYKCKECGKAFRCSSYLTKHKRIHTGEKPYKCKECGKAFNRSSCLTQHQTTHTGEKLYKCKVCSKSYARSSNLIMHQRVHTGEKPYKCKECGKVFSRSSCLTQHRKIHTGENLYKCKVCAKPFTCFSNLIVHERIHTGEKPYKCKECGKAFPYSSHLIRHYRIHTGEKPYKCKACSKSFSDSSGLSVHRRTHTGEKPYTCKECGKAFSYSSDVIQHRRIHTGQRPYKCEECGKAFNYRSYLIAHQRSHTREKL

SEQ ID NO: 767589 - protein, 69 aa, Homo sapiens
NLSGSQREPQTEGSMDGWRRMPRWGLLLLLWGSCTFGLPTDTTTFKRFIRKFYTEFDRRNNRIGFALAR

SEQ ID NO: 767590 - protein, 368 aa, Homo sapiens
MPSIRESLKERGVDMARLGPEWSQPMKRLTLGNTTSSVILTNYMDTQYYGEIGIGTPPQTFKVVFDTGSSNVWVPSSKCSRLYTACVYHKLFDASDSSSYKHNGTELTLRYSTGTVSGFLSQDIITVGGITVTQMFGEVTEMPALPFMLAEFDGVVGMGFIEQAIGRVTPIFDNIISQGVLKEDVFSFYYNRDSENSQSLGGQIVLGGSDPQHYEGNFHYINLIKTGVWQIQMKGVSVGSSTLLCEDGCLALVDTGASYISGSTSSIEKLMEALGAKKRLFDYVVKCNEGPTLPDISFHLGGKEYTLTSADYVFQESYSSKKLCTLAIHAMDIPPPTGPTWALGATFIRKFYTEFDRRNNRIGFALAR

SEQ ID NO: 767591 - protein, 420 aa, Homo sapiens
NLSGSQREPQTEGSMDGWRRMPRWGLLLLLWGSCTFGLPTDTTTFKRIFLKRMPSIRESLKERGVDMARLGPEWSQPMKRLTLGNTTSSVILTNYMDTQYYGEIGIGTPPQTFKVVFDTGSSNVWVPSSKCSRLYTACVYHKLFDASDSSSYKHNGTELTLRYSTGTVSGFLSQDIITVGGITVTQMFGEVTEMPALPFMLAEFDGVVGMGFIEQAIGRVTPIFDNIISQGVLKEDVFSFYYNRDSENSQSLGGQIVLGGSDPQHYEGNFHYINLIKTGVWQIQMKGVSVGSSTLLCEDGCLALVDTGASYISGSTSSIEKLMEALGAKKRLFDYVVKCNEGPTLPDISFHLGGKEYTLTSADYVFQESYSSKKLCTLAIHAMDIPPPTGPTWALGATFIRKFYTEFDRRNNRIGFALAR

SEQ ID NO: 767592 - protein, 420 aa, Homo sapiens; identical to SEQ ID NO: 767591

SEQ ID NO: 767593 - protein, 153 aa, Homo sapiens
TRHGLPKCWDYRREPPCPARKYILYSKCYRLRRQFLGLAVKLFRIFFKWCSQELFSGKLEAIGKASRSLLFFAMEGQLWDLYTWACFSMEWSQDSLLRTLPETFPVCFVFNFFLAILLACKYVSRQCVWKKQGVQLHKASFFWSETYCVQEVS

SEQ ID NO: 767594 - protein, 254 aa, Homo sapiens
MDPAASSCMRSLQPPAPVWGCLRNPHSEGNGASGLPHYPPTPFSFHQKPDFLATATAAYPDFSASCLAATPHSLPQEEHIFTEQHPAFPQSPNWHFPVSDARRRPNSGPAGGSKEMGTSSLGLVDTTGGPGDDYGVLGSTANETEKKSSRRRKESSDNQENRGKPEGSSKARKERTAFTKEQLRELEAEFAHHNYLTRLRRYEIAVNLDLSERQVKVWFQNRRMKWKRVKGGQPISPNGQDPEDGDSTASPSSE

SEQ ID NO: 767595 - protein, 194 aa, Homo sapiens
MDPAASSCMRSLQPPAPVWGCLRNPHSEGNGASGLPHYPPTPFSFHQKPDFLATATAAYPDFSASCLAATPHSLPQEEHIFNETEKKSSRRRKESSDNQENRGKPEGSSKARKERTAFTKEQLRELEAEFAHHNYLTRLRRYEIAVNLDLSERQVKVWFQNRRMKWKRVKGGQPISPNGQDPEDGDSTASPSSE

SEQ ID NO: 767596 - protein, 163 aa, Homo sapiens [sequence omitted]

SEQ ID NO: 767597 - protein, 224 aa, Homo sapiens
ALCRHLLWAPGRTPRQLKPDFLATATAAYPDFSASCLAATPHSLPQEEHIFTEQHPAFPQSPNWHFPVSDARRRPNSGPAGGSKEMGTSSLGLVDTTGGPGDDYGVLGSTANETEKKSSRRRKESSDNQENRGKPEGSSKARKERTAFTKEQLRELEAEFAHHNYLTRLRRYEIAVNLDLSERQVKVWFQNRRMKWKRVKGGQPISPNGQDPEDGDSTASPSSE

SEQ ID NO: 767598 - protein, 184 aa, Homo sapiens
MDPAASSCMRSLQPPAPVWGCLRNPHSEGNGASGLPHYPPTPFSFHQKPDFLATATAAYPDFSASCLAATPHSLPQEEHIFTEQHPAFPQSPNWHFPVSDARRRPNSGPAGGSKEMGTSSLGLVDTTGGPGDDYGVLGSTANETEKKSSRRRKESSGQSVVPEPKDEVEACEGRSAHLPQWAGP

SEQ ID NO: 767599 - protein, 365 aa, Homo sapiens
MGNITADNSSMSCTIDHTIHQTLAPVVYVTVLVVGFPANCLSLYFGYLQIKARNELGVYLCNLTVADLFYICSLPFWLQYVLQHDNWSHGDLSCQVCGILLYENIYISVGFLCCISVDRYLAVAHPFRFHQFRTLKAAVGVSVVIWAKELLTSIYFLMHEEVIEDENQHRVCFEHYPIQAWQRAINYYRFLVGFLFPICLLLASYQGILRAVRRSHGTQKSRKDQIQRLVLSTVVIFLACFLPYHVLLLVRSVWEASCDFAKGVFNAYHFSLLLTSFNCVADPVLYCFVSETTHRDLARLRGACLAFLTCSRTGRAREAYPLGAPEASGKSGAQGEEPELLTKLHPAFQTPNSPGSGGFPTGRLA

SEQ ID NO: 767600 - protein, 265 aa, Homo sapiens
MGNITADNSSMSCTIDHTIHQTLAPVVYVTVLVVGFPANCLSLYFGYLQIKARNELGVYLCNLTVADLFYICSLPFWLQYVLQHDNWSHGDLSCQVCGILLYENIYISVGFLCCISVDRYLAVAHPFRFHQFRTLKAAVGVSVVIWAKELLTSIYFLMHEEVIEDENQHRVCFEHYPIQAWQRAINYYRFLVGFLFPPALKRLILCAVSLSPFIGDAQRQQPRLEVPQGRVLTVVPGLHLALTAQPLLRSLWRVSDDLGRFSSPS

SEQ ID NO: 767601 - protein, 294 aa, Homo sapiens
MGNITADNSSMSCTIDHTIHQTLAPVVYVTVLVVGFPANCLSLYFGYLQIKARNELGVYLCNLTVADLFYICSLPFWLQYVLQHDNWSHGDLSCQVCGILLYENIYISVGFLCCISVDRYLAVAHPFRFHQFRTLKAAVGVSVVIWAKELLTSIYFLMHEEVIEDENQHRVCFEHYPIQAWQRAINYYRFLVGFLFPPALKRLILCAVSLSPFIGDAQRQQPRLEVLFPFLEEEVTKFEGGRNGHTAKKSPCNSVQDFTGSVTLVEAFMPPHSTALPPMLTLNTGFPLIQTGMS

SEQ ID NO: 767602 - protein, 136 aa, Homo sapiens
MQTAGALFISPALIRCCTRGLIRPVSASFLNSPVNSSKQPSYSNFPLQVARREFQTSVVSRDIDTAAKFIGAGAATVGVAGSGAGIGTVFGSLIIGYARNPSLKQQLFSYAILGFALSEAMGLFCLMVAFLILFAM

SEQ ID NO: 767603 - protein, 136 aa, Homo sapiens; identical to SEQ ID NO: 767602

SEQ ID NO: 767604 - protein, 136 aa, Homo sapiens; identical to SEQ ID NO: 767602

SEQ ID NO: 767605 - protein, 136 aa, Homo sapiens; identical to SEQ ID NO: 767602

SEQ ID NO: 767606 - protein, 136 aa, Homo sapiens; identical to SEQ ID NO: 767602

SEQ ID NO: 767607 - protein, 93 aa, Homo sapiens
MPSYSNFPLQVARREFQTSVVSRDIDTAAKFIGAGAATVGVAGSGAGIGTVFGSLIIGYARNPSLKQQLFSYAILGFALSGLVGESGLSGYYV

SEQ ID NO: 767608 - protein, 136 aa, Homo sapiens; identical to SEQ ID NO: 767602

SEQ ID NO: 767609 - protein, 141 aa, Homo sapiens
MGRILRDTCPDVAFRFYRIRCCTRGLIRPVSASFLNSPVNSSKQPSYSNFPLQVARREFQTSVVSRDIDTAAKFIGAGAATVGVAGSGAGIGTVFGSLIIGYARNPSLKQQLFSYAILGFALSEAMGLFCLMVAFLILFAM

SEQ ID NO: 767610 - protein, 136 aa, Homo sapiens; identical to SEQ ID NO: 767602

SEQ ID NO: 767611 - protein, 136 aa, Homo sapiens; identical to SEQ ID NO: 767602

SEQ ID NO: 767612 - protein, 111 aa, Homo sapiens
MNNAPAVLHFFSLHPSYSNFPLQVARREFQTSVVSRDIDTAAKFIGAGAATVGVAGSGAGIGTVFGSLIIGYARNPSLKQQLFSYAILGFALSEAMGLFCLMVAFLILFAM

SEQ ID NO: 767613 - protein, 136 aa, Homo sapiens; identical to SEQ ID NO: 767602

SEQ ID NO: 767614 - protein, 114 aa, Homo sapiens
MQTAGALFISPALIRCCTRGLIRPVSASFLNSPVNSSKQPSYSNFPLQVARREFQTSVVSRDIDTAAKFIGAGAATVGVAGSGAGIGTVFGSLIIGYARNPSLNQATLVTELIT

SEQ ID NO: 767615 - protein, 99 aa, Homo sapiens
SSLAHLNLPGWPTLLVHPNPQDLCRLGPLPGVTVPIHLTLLCPPLPSPLPLPQLAMISVPPRNPSLKQQLFSYAILGFALSEAMGLFCLMVAFLILFAM

SEQ ID NO: 767616 - protein, 136 aa, Homo sapiens; identical to SEQ ID NO: 767602

SEQ ID NO: 767617 - protein, 136 aa, Homo sapiens; identical to SEQ ID NO: 767602

SEQ ID NO: 767618 - protein, 136 aa, Homo sapiens; identical to SEQ ID NO: 767602

SEQ ID NO: 767619 - protein, 165 aa, Homo sapiens
PSPVCCLTTDSKTNSQHTLQSEYSAFTRQFANSFRAQVGGVKEVESATCPYAILSLCYLACLASLSSLPSYSNFPLQVARREFQTSVVSRDIDTAAKFIGAGAATVGVAGSGAGIGTVFGSLIIGYARNPSLKQQLFSYAILGFALSEAMGLFCLMVAFLILFAM

SEQ ID NO: 767620 - protein, 165 aa, Homo sapiens; identical to SEQ ID NO: 767619

SEQ ID NO: 767621 - protein, 98 aa, Homo sapiens
MQTAGALFISPALIRCCTRGLIRPVSASFLIRLREDDRRESTRGRERPSLLGSPCHTQSPTTLNLPSSQFPCRPLEEGRGLGSRTLSCTINKVPCAQP

SEQ ID NO: 767622 - protein, 136 aa, Homo sapiens; identical to SEQ ID NO: 767602

SEQ ID NO: 767623 - protein, 136 aa, Homo sapiens; identical to SEQ ID NO: 767602

SEQ ID NO: 767624 - protein, 136 aa, Homo sapiens; identical to SEQ ID NO: 767602

SEQ ID NO: 767625 - protein, 131 aa, Homo sapiens
MQTAGALFISPALIRCCTRGLIRPVSASFLNSPVNSSKQPSYSNFPLQVARREFQTSVVSRDIDTAAKFIGAGAATVGVAGSGAGIGTVFGSLIIGYARNPSLKQQLFSYAILGFALSGLVGESGLSGYYV

SEQ ID NO: 767626 - protein, 110 aa, Homo sapiens
MQTAGALFISPALPSYSNFPLQVARREFQTSVVSRDIDTAAKFIGAGAATVGVAGSGAGIGTVFGSLIIGYARNPSLKQQLFSYAILGFALSEAMGLFCLMVAFLILFAM

SEQ ID NO: 767627 - protein, 99 aa, Homo sapiens; identical to SEQ ID NO: 767615

SEQ ID NO: 767628 - protein, 257 aa, Homo sapiens [sequence omitted]

SEQ ID NO: 767629 - protein, 166 aa, Homo sapiens
MKQRKQQATAIMKEVHGNDVDGMDLGKKVSIPRDIMLEELSHLSNRGARLFKMRQRRSDKYTFENFQYQSRAQINHSIAMQNGKVDGSNLEGGSQQAPLTPPNTPDPRSPPNPDNIAPGYSGPLKEIPPEKFNTTAVPKYYQSPWEQAISNDPELLEALYPKLFKP

SEQ ID NO: 767630 - protein, 257 aa, Homo sapiens [sequence omitted]

SEQ ID NO: 767631 - protein, 257 aa, Homo sapiens [sequence omitted]

SEQ ID NO: 767632 - protein, 257 aa, Homo sapiens [sequence omitted]

SEQ ID NO: 767633 - protein, 116 aa, Homo sapiens
MKQRKQQATAIMKEVHGNDVDGMDLGKKVSIPRDIMLEELSHLSNRGARLFKMRQRRSDKYTFENFQYQSRAQINHSIAMQNGKVDGSNLEGGRHPLISTPVRAQPKIPGFGQGIP

SEQ ID NO: 767634 - protein, 101 aa, Homo sapiens
AVPLSQKRQPEGKAELPDYRSFNRVATPFGGFEKASRMVKFKVPDFELLLLTDPRFMSFVNPLSGRRSFNRTPKGWISENIPIVITTEPTDDTTVPESEDL

SEQ ID NO: 767635 - protein, 317 aa, Homo sapiens
MPWDARRPGGGADGGPEASGAARSRAQKQCRKSSFAFYQAVRDLLPVWLLEDMRASEAFHWDERGRAAAYSPSEALLYALVHDHQAYAHYLLATFPRRALAPPSAGFRCCAAPGPHVALAVRYNRVGILRRILRTLRDFPAEERARVLDRRGCSRVEGGGTSLHVACELARPECLFLLLGHGASPGLRDGGGLTPLELLLRQLGRDAGATPSAAGAPASAPGEPRQRRLLLLDLLALYTPVGAAGSARQELLGDRPRWQRLLGEDKFQWLAGLAPPSLFARAMQVLVTAISPGRFPEALDELPLPPFLQPLDLTGKG

SEQ ID NO: 767636 - protein, 317 aa, Homo sapiens; identical to SEQ ID NO: 767635

SEQ ID NO: 767637 - protein, 317 aa, Homo sapiens; identical to SEQ ID NO: 767635

SEQ ID NO: 767638 - protein, 290 aa, Homo sapiens
MPWDARRPGGGADGGPEASGAARSRAQKQCRKSSFAFYQAVRDLLPVWLLEDMRASEAFHWDERGRAAAYSPSEALLYALVHDHQAYAHYLLATFPRRALAPPSAGFRCCAAPGPHVALAVRYNRVGILRRILRTLRDFPAEERARVLDRRGCSRVEGGGTSLHVACELARPECLFLLLGHGASPGLRDGGGLTPLECCWTSWRCTPPWVPPARPARSCWATGRAGSGCWVRTSSSGWRAWRRPRSSRAPCRCWSPPSLQAASPRPWTSCRCPHSCSRWTSLAKARPGAP

SEQ ID NO: 767639 - protein, 185 aa, Homo sapiens
MREIVHIQAGQCGNQIGAKFWEVISDEHGIDPSGNYVGDSDLQLERISVYYNEASSHKYVPRAILVDLEPGTMDSVRSGAFGHLFRPDNFIFGQSGAGNNWAKGHYTEGAELVDSVLDVVRKECENCDCLQGFQLTHSLGGGTGSGMGWGHGGLHRAKGCQVREVSPDPSFIEPPFQAVRWPFNP

SEQ ID NO: 767640 - protein, 83 aa, Homo sapiens
RLSASHGLQEFGTRQRTAIQELFKRISEQFTAMFRRKAFLHWYTGEGMDEMEFTEAESNMNDLVSEYQQYQDATAEEEVRGGG

SEQ ID NO: 767641 - protein, 125 aa, Homo sapiens
MREIVHLQAGQCGNQIGAKFEEVISDEHGIDPTGTYHGDSDLQLERINVYYNEATGGSTAIQELFKRISEQFTAMFRRKAFLHWYTGEGMDEMEFTEAESNMNDLVSEYQQYQDATAEEEVRGGG

SEQ ID NO: 767642 - protein, 83 aa, Homo sapiens; identical to SEQ ID NO: 767640

SEQ ID NO: 767643 - protein, 311 aa, Homo sapiens
MREIVHIQAGQCGNQIGAKFWEVISDEHGIDPSGNYVGDSDLQLERISVYYNEASSHKYVPRAILVDLEPGTMDSVRSGAFGHLFRPDNFIFGQSGAGNNWAKGHYTEGAELVDSVLDVVRKECENCDCLQGFQLTHSLGGGTGSGMGTLLISKVREEYPDRIMNTFSVVPSPKVSDTVVEPYNATLSIHQLVENTDETYCIDNEALYDICFRTLKLATPTYGDLNHLVSATMSGVTTSLRFPGQLNADLRKLGRQHGALPAPALLHARLRPPHSPGQPAVPGPDRARAHPADVRCQEHDGRLRPRATAAT

SEQ ID NO: 767644 - protein, 311 aa, Homo sapiens; identical to SEQ ID NO: 767643

SEQ ID NO: 767645 - protein, 311 aa, Homo sapiens; identical to SEQ ID NO: 767643

SEQ ID NO: 767646 - protein, 311 aa, Homo sapiens; identical to SEQ ID NO: 767643

SEQ ID NO: 767647 - protein, 311 aa, Homo sapiens; identical to SEQ ID NO: 767643

SEQ ID NO: 767648 - protein, 432 aa, Homo sapiens
MREIVHIQAGQCGNQIGAKFWEVISDEHGIDPSGNYVGDSDLQLERISVYYNEASSHKYVPRAILVDLEPGTMDSVRSGAFGHLFRPDNFIFGQSGAGNNWAKGHYTEGAELVDSVLDVVRKECENCDCLQGFQLTHSLGGGTGSGMGTLLISKVREEYPDRIMNTFSVVPSPKVSDTVVEPYNATLSIHQLVENTDETYCIDNEALYDICFRTLKLATPTYGDLNHLVSATMSGVTTSLRFPGQLNADLRKLGRQHGALPAPALLHARLRPPHSPGQPAVPGPDRARAHPADVRCQEHDGRMSMKEVDEQMLAIQSKNSSYFVEWIPNNVKVAVCDIPPRGLKMSSTFIGNSTAIQELFKRISEQFTAMFRRKAFLHWYTGEGMDEMEFTEAESNMNDLVSEYQQYQDATAEEEGEMYEDDEEESEAQGPK

SEQ ID NO: 767649 - protein, 311 aa, Homo sapiens; identical to SEQ ID NO: 767643

SEQ ID NO: 767650 - protein, 311 aa, Homo sapiens; identical to SEQ ID NO: 767643

SEQ ID NO: 767651 - protein, 311 aa, Homo sapiens; identical to SEQ ID NO: 767643

SEQ ID NO: 767652 - protein, 311 aa, Homo sapiens; identical to SEQ ID NO: 767643

SEQ ID NO: 767653 - protein, 311 aa, Homo sapiens; identical to SEQ ID NO: 767643

SEQ ID NO: 767654 - protein, 311 aa, Homo sapiens; identical to SEQ ID NO: 767643

SEQ ID NO: 767655 - protein, 363 aa, Homo sapiens
ASLENKEMPLPAPQCARVAAVGQGGASLENKRSISRLSKLESFLREKRETGTGPRHPHTALCTQTGHRRPQFWEVISDEHGIDPSGNYVGDSDLQLERISVYYNEASSHKYVPRAILVDLEPGTMDSVRSGAFGHLFRPDNFIFGQSGAGNNWAKGHYTEGAELVDSVLDVVRKECENCDCLQGFQLTHSLGGGTGSGMGTLLISKVREEYPDRIMNTFSVVPSPKVSDTVVEPYNATLSIHQLVENTDETYCIDNEALYDICFRTLKLATPTYGDLNHLVSATMSGVTTSLRFPGQLNADLRKLGRQHGALPAPALLHARLRPPHSPGQPAVPGPDRARAHPADVRCQEHDGRLRPRATAAT

SEQ ID NO: 767656 - protein, 391 aa, Homo sapiens
ELAALRLQNFFPRGDREAPQTLTPDSLEQGQGGTPGSSDPSSSHTSTLWGREGHLLRTKDPFLDFPKLESFLREKRETGTGPRHPHTALCTQTGHRRPQFWEVISDEHGIDPSGNYVGDSDLQLERISVYYNEASSHKYVPRAILVDLEPGTMDSVRSGAFGHLFRPDNFIFGQSGAGNNWAKGHYTEGAELVDSVLDVVRKECENCDCLQGFQLTHSLGGGTGSGMGTLLISKVREEYPDRIMNTFSVVPSPKVSDTVVEPYNATLSIHQLVENTDETYCIDNEALYDICFRTLKLATPTYGDLNHLVSATMSGVTTSLRFPGQLNADLRKLGRQHGALPAPALLHARLRPPHSPGQPAVPGPDRARAHPADVRCQEHDGRLRPRATAAT

SEQ ID NO: 767657 - protein, 305 aa, Homo sapiens
LSTLRCLEGGSVQFWEVISDEHGIDPSGNYVGDSDLQLERISVYYNEASSHKYVPRAILVDLEPGTMDSVRSGAFGHLFRPDNFIFGQSGAGNNWAKGHYTEGAELVDSVLDVVRKECENCDCLQGFQLTHSLGGGTGSGMGTLLISKVREEYPDRIMNTFSVVPSPKVSDTVVEPYNATLSIHQLVENTDETYCIDNEALYDICFRTLKLATPTYGDLNHLVSATMSGVTTSLRFPGQLNADLRKLGRQHGALPAPALLHARLRPPHSPGQPAVPGPDRARAHPADVRCQEHDGRLRPRATAAT

SEQ ID NO: 767658 - protein, 396 aa, Homo sapiens
MREIVHIQAGQCGNQIGAKFWEVISDEHGIDPSGNYVGDSDLQLERISVYYNEASSDSLDMLPRLVSNSWTQAIHLPWPPKVLGVQTRAPASGGRLTESCLSCSVLSCSVLKHSEAYRVKKVAEACLWSRTLTSEYRLLGSHKYVPRAILVDLEPGTMDSVRSGAFGHLFRPDNFIFGQSGAGNNWAKGHYTEGAELVDSVLDVVRKECENCDCLQGFQLTHSLGGGTGSGMGTLLISKVREEYPDRIMNTFSVVPSPKVSDTVVEPYNATLSIHQLVENTDETYCIDNEALYDICFRTLKLATPTYGDLNHLVSATMSGVTTSLRFPGQLNADLRKLGRQHGALPAPALLHARLRPPHSPGQPAVPGPDRARAHPADVRCQEHDGRLRPRATAAT

SEQ ID NO: 767659 - protein, 311 aa, Homo sapiens; identical to SEQ ID NO: 767643

SEQ ID NO: 767660 - protein, 393 aa, Homo sapiens
MREIVHIQAGQCGNQIGAKFWEVISDEHGIDPSGNYVGDSDLQLERISVYYNEASSHKYVPRAILVDLEPGTMDSVRSGAFGHLFRPDNFIFAHPAGRCQLASSPQLPGILGWLFGLLALPVGRKVCWSRRADPFTQDPLRRQSLALLGPQVLKTLSRALVLSTQQHRLREATAGQSGAGNNWAKGHYTEGAELVDSVLDVVRKECENCDCLQGFQLTHSLGGGTGSGMGTLLISKVREEYPDRIMNTFSVVPSPKVSDTVVEPYNATLSIHQLVENTDETYCIDNEALYDICFRTLKLATPTYGDLNHLVSATMSGVTTSLRFPGQLNADLRKLGRQHGALPAPALLHARLRPPHSPGQPAVPGPDRARAHPADVRCQEHDGRLRPRATAAT

SEQ ID NO: 767661 - protein, 130 aa, Homo sapiens
MSMKEVDEQMLAIQSKNSSYFVEWIPNNVKVAVCDIPPRGLKMSSTFIGNSTAIQELFKRISEQFTAMFRRKAFLHWYTGEGMDEMEFTEAESNMNDLVSEYQQYQDATAEEEGEMYEDDEEESEAQGPK

SEQ ID NO: 767662 - protein, 315 aa, Homo sapiens
  misc_feature (97)..(102): Xaa can be any naturally occurring amino acid
  misc_feature (107)..(107): Xaa can be any naturally occurring amino acid
  misc_feature (109)..(112): Xaa can be any naturally occurring amino acid
  misc_feature (114)..(114): Xaa can be any naturally occurring amino acid
  misc_feature (138)..(138): Xaa can be any naturally occurring amino acid
MREIVHIQAGQCGNQIGAKFWEVISDEHGIDPSGNYVGDSDLQLERISVYYNEASSHKYVPRAILVDLEPGTMDSVRSGAFGHLFRPDNFIFAKWGXXXXXXKITKXEXXXXMXSVLRKEEKKKKKKNIKNKKKKLSXLTHSLGGGTGSGMGTLLISKVREEYPDRIMNTFSVVPSPKVSDTVVEPYNATLSIHQLVENTDETYCIDNEALYDICFRTLKLATPTYGDLNHLVSATMSGVTTSLRFPGQLNADLRKLGRQHGALPAPALLHARLRPPHSPGQPAVPGPDRARAHPADVRCQEHDGRLRPRATAAT

SEQ ID NO: 767663 - protein, 130 aa, Homo sapiens; identical to SEQ ID NO: 767661

SEQ ID NO: 767664 - protein, 130 aa, Homo sapiens; identical to SEQ ID NO: 767661

SEQ ID NO: 767665 - protein, 130 aa, Homo sapiens; identical to SEQ ID NO: 767661

SEQ ID NO: 767666 - protein, 270 aa, Homo sapiens
MASTPAATTWATRTCSWSGSASTTTRPLLTSTCLEPFWWTWNPEPWTVSAQGPLDISSGLTISSLVRVGPATTGPRVTTRKECENCDCLQGFQLTHSLGGGTGSGMGTLLISKVREEYPDRIMNTFSVVPSPKVSDTVVEPYNATLSIHQLVENTDETYCIDNEALYDICFRTLKLATPTYGDLNHLVSATMSGVTTSLRFPGQLNADLRKLGRQHGALPAPALLHARLRPPHSPGQPAVPGPDRARAHPADVRCQEHDGRLRPRATAAT

SEQ ID NO: 767667 - protein, 111 aa, Homo sapiens
LKMSSTFIGRPRGGMSHTARGLKMSSTFIGNSTAIQELFKRISEQFTAMFRRKAFLHWYTGEGMDEMEFTEAESNMNDLVSEYQQYQDATAEEEGEMYEDDEEESEAQGPK

SEQ ID NO: 767668 - protein, 333 aa, Homo sapiens
  misc_feature (203)..(203): Xaa can be any naturally occurring amino acid
  misc_feature (209)..(209): Xaa can be any naturally occurring amino acid
MREIVHIQAGQCGNQIGAKFWEVISDEHGIDPSGNYVGDSDLQLERISVYYNEASSHKYVPRAILVDLEPGTMDSVRSGAFGHLFRPDNFIFGQSGAGNNWAKGHYTEGAELVDSVLDVVRKECENCDCLQGFQLTHSLGGGTGSGMGTLLISKVREEYPDRIMNTFSVVPSPKVSDTVVEPYNATLSIHQLVENTDETYWQXFPRGKXQKTPGKGAPGPLPLNGKPKICFRTLKLATPTYGDLNHLVSATMSGVTTSLRFPGQLNADLRKLGRQHGWAPPFFFFFSPPHPPPPPRGGGGPPGGAPPPPFFGGPQKKPLFSSFSMAPGFAPPH

SEQ ID NO: 767669 - protein, 283 aa, Homo sapiens
MREIVHIQAGQCGNQIGAKFWEVISDEHGIDPSGNYVGDSDLQLERISVYYNEASSHKYVPRAILVDLEPGTMDSVRSGAFGHLFRPDNFIFAGHWRPRERVLWGEQKPLMHFKWNEVYKQTEAYRIARELVRQNGASRGLRGPGARGLAAVKRSGRSHACVLGLGRGCHVPTSVSWGGAVDATFPRLCPGAGPWMPRSHVCVLGRGRGCHVPTPVSWGGAVDATFPRLCPGAGPWMPRSHACVLGRGRGCHVPMPVSWGGAVDATFPCLCPGAGPWTRHRNR

SEQ ID NO: 767670 - protein, 331 aa, Homo sapiens
MREIVHIQAGQCGNQIGAKFWEVISDEHGIDPSGNYVGDSDLQLERISVYYNEASSHKYVPRAILVDLEPGTMDSVRSGAFGHLFRPDNFIFGKFPLLQALMADPITGKPRSVDGDGCEKQGMVSSSHDPEWWELISPFYSWALEAQRKGSVGRTETTHAFQVECSVKQTEAYRIARELVRQNGASRGLRGPGARGLAAVKRSGRSHACVLGLGRGCHVPTSVSWGGAVDATFPRLCPGAGPWMPRSHVCVLGRGRGCHVPTPVSWGGAVDATFPRLCPGAGPWMPRSHACVLGRGRGCHVPMPVSWGGAVDATFPCLCPGAGPWTRHRNR

SEQ ID NO: 767671 - protein, 113 aa, Homo sapiens
MSPSPRWGFLCVLFTAVHPAPSTAPVQDKCPVNTWEAMQASSQQLLQTDPRPKPFLLPPLPPLLLISAGTEVSSLVFQKSPLHTQPEGAIKTAGQPTSVHSKVLSKGSLLLGE

SEQ ID NO: 767672 - protein, 113 aa, Homo sapiens; identical to SEQ ID NO: 767671

SEQ ID NO: 767673 - protein, 87 aa, Homo sapiens
QLGCGRAGVPAPVPIAGQLPHLAPNLGPRGEAQAPGVAGDPRGKWQGQDPGAEPVECHHRPGGDFCVFCSLLYTQPPAQRLSRTSAQ

SEQ ID NO: 767674 - protein, 103 aa, Homo sapiens
SHILLNIILFSGWNVTIAQVGIFVCFVHCCTPSPQHSACPGQVPSKHLGSNASVLPAAPANRPPTQALPSASTATTAAHLCWHRSLFPGLPEIPSPHSARGSY

SEQ ID NO: 767675 - protein, 309 aa, Homo sapiens
GNSSYGRELALSPPELWLWALDKSKAPPPNMDSRYNSTAGIGDLNQLSAAIPATRVEVSVSCRNLLDRDTFSKSDPICVLYVQGVGNKEWREFGRTEVIDNTLNPDFVRKFILDYFFEERENLRFDLYDVDSKSPNLSKHDFLGQVFCTLGEIVGSQGSRLEKPIVGIPGKKCGTIILTAEELNCCRDAVLMQFCANKLDKKDFFGKSDPFLVFYRSNEDGSFTICHKTEVVKNTLNPVWQAFKISVRALCNGDYDRTIKVEVYDWDRDGSHDFIGEFTTSYRELSRGQSQFNVYEVVNPKKKGKKGVL

SEQ ID NO: 767676 - protein, 328 aa, Homo sapiens
GNSSYGRELALSPPELWLWALDKSKAPPPNMDSRYNSTAGIGDLNQLSAAIPATRVEVSVSCRNLLDRDTFSKSDPICVLYVQGVGNKEWREFGRTEVIDNTLNPDFVRKFILDYFFEERENLRFDLYDVDSKSPNLSKHDFLGQVFCTLGEIVGSQGSRLEKPIVGIPGKKCGTIILTAEELNCCRDAVLMQFCANKLDKKDFFGKSDPFLVFYRSNEDGSFTICHKTEVVKNTLNPVWQAFKISVRALCNGDYDRTIKVEVYDWDRDGSHDFIGEFTTSYRELSRGQSQFNVYESACSSNYLEELRNSSNLKIKHYLSPPNNLLHI

SEQ ID NO: 767677 - protein, 184 aa, Homo sapiens
  misc_feature (152)..(152): Xaa can be any naturally occurring amino acid
  misc_feature (173)..(173): Xaa can be any naturally occurring amino acid
  misc_feature (180)..(180): Xaa can be any naturally occurring amino acid
GNSSYGRELALSPPELWLWALDKSKAPPPNMDSRYNSTAGIGDLNQLSAAIPATRVEVSVSCRNLLDRDTFSKSDPICVLYVQGVGNKEWREFGRTEVIDNTLNPDFVRKFILDYFFEERENLRFDFDDVDSKSPNLSNMTFGQSVCLGEIXGYRGSRWKPIVGLLLGPTRIXYGIAVLXKCIR

SEQ ID NO: 767678 - protein, 535 aa, Homo sapiens
MKKISLKTLRKSFNLNKSKEETDFMVVQQPSLASDFGKDDSLFGSCYGKDMASCDINGEDEKGGKNRSKSESLMGTLKRRLSAKQKSKGKAGTPSGSSADEDTFSSSSAPIVFKDVRAQRPIRSTSLRSHHYSPAPWPLRPTNSEETCIKMEVRVKALVHSSSPSPALNGVRKDFHDLQSETTCQEQANSLKSSASHNGDLHLHLDEHVPVVIGLMPQDYIQYTVPLDEGMYPLEGSRSYCLDSSSPMEVSAVPPQVGGRAFPEDESQVDQDLVVAPEIFVDQSVNGLLIGTTGVMLQSPRAGHDDVPPLSPLLPPMQNNQIQRNFSGLTGTEAHVAESMRCHLNFDPNSAPGVARVYDSVQSSGPMVVTSLTEELKKLAKQGWYWGPITRWEAEGKLANVPDGSFLVRDSSDDRYLLSLSFRSHGKTLHTRIEHSNGRFSFYEQPDVEGHTSIVDLIEHSIRDSENGAFCYSRSRLPGSATYPVRLTNPVSRFMQVRSLQYLCRFVIRQYTRIDLIQKLPLPNKMKDYLQEKHY

SEQ ID NO: 767679 - protein, 535 aa, Homo sapiens; identical to SEQ ID NO: 767678

SEQ ID NO: 767680 - protein, 144 aa, Homo sapiens
SPVDPNQRILGVWRWETKDRSRSLEGSPATDPPSGPTGQEREHCRPDFPTMSPCPPSLLLALLTQLCLPLFHSSTLPYMEDKWTPGVLTLLVPAPAYPRCQQTLVHRRLPQLWSQERISLHWMDCILRLKIIFLIFLLISMLSL

SEQ ID NO: 767681 - protein, 156 aa, Homo sapiens
TGQVSAGWDPVPGRRIGAELGISVCTCIAGRRTPRNQGVRQEQPPASSLPVTQEGICAFFPAALGTAELEVLVPGDGGRGYISGHRACPVTHKPRLPSGASGSLWGDHQAGESTTVLAGTTDPSQRVEAGPRLHRGHVGNSGDLRGHLMVALASCH

SEQ ID NO: 767682 - protein, 450 aa, Homo sapiens
  misc_feature (6)..(6): Xaa can be any naturally occurring amino acid
  misc_feature (25)..(25): Xaa can be any naturally occurring amino acid
  misc_feature (30)..(30): Xaa can be any naturally occurring amino acid
AHPPQXPPGTKRTAAAALSTCIDHXSAPRXGSPERTAASAPPLAAPEQSGSGRKHLGSALSGVPSALCSVFLSAWEEEEEEEEEEEEEEEEEEEEEEEEDVWSRLGGGQRQQQQPPPPPPLPPPPERERQESPRLGNPKVSATLHGRLPSSFMGKVWKQQMYPQYATYYYPQYLQAKQSLVPAHPMAPPSPSTTSSNNNSSSSSNSGWDQLSKTNLYIRGLPPHTTDQDLVKLCQPYGKIVSTKAILDKTTNKCKGYGFVDFDSPAAAQKAVSALKASGVQAQMAKQQEQDPTNLYISNLPLSMDEQELENMLKPFGQVISTRILRDSSGTSRGVGFARMESTEKCEAVIGHFNGKFIKTPPGVSAPTEPLLCKFADGGQKKRQNPNKYIPNGRPWHREGEVRLTGMTLTYDPTTAAIQNGFYPSPYSIATNRMITQTSITPYIVSPVSA

SEQ ID NO: 767683 - protein, 265 aa, Homo sapiens
MAPPSPSTTSSNNNSSSSSNSGWDQLSKTNLYIRGLPPHTTDQDLVKLCQPYGKIVSTKAILDKTTNKCKGYGFVDFDSPAAAQKAVSALKASGVQAQMAKQQEQDPTNLYISNLPLSMDEQELENMLKPFGQVISTRILRDSSGTSRGVGFARMESTEKCEAVIGHFNGKFIKTPPGVSAPTEPLLCKFADGGQKKRQNPNKYIPNGRPWHREGEVRLTGMTLTYDPTTAAIQNGFYPSPYSIATNRMITQTSITPYIVSPVSA

SEQ ID NO: 767684 - protein, 812 aa, Homo sapiens
MPTVISASVAPRTAAEPRSPGPVPHPAQSKATEAGGGNPSGIYSAIISRNFPIIGVKEKTFEQLHKKCLEKKVLYVDPEFPPDETSLFYSQKFPIQFVWKRPPEICENPRFIIDGANRTDICQGELGDCWFLAAIACLTLNQHLLFRVIPHDQSFIENYAGIFHFQFWRYGEWVDVVIDDCLPTYNNQLVFTKSNHRNEFWSALLEKAYAKLHGSYEALKGGNTTEAMEDFTGGVAEFFEIRDAPSDMYKIMKKAIERGSLMGCSIDDGTNMTYGTSPSGLNMGELIARMVRNMDNSLLQDSDLDPRGSDERPTRTIIPVQYETRMACGLVRGHAYSVTGLDEVPFKGEKVKLVRLRNPWGQVEWNGSWSDRWKDWSFVDKDEKARLQHQVTEDGEFWMSYEDFIYHFTKLEICNLTADALQSDKLQTWTVSVNEGRWVRGCSAGGCRNFPDTFWTNPQYRLKLLEEDDDPDDSEVICSFLVALMQKNRRKDRKLGASLFTIGFAIYEVMHGNKQHLQKDFFLYNASKARSKTYINMREVSQRFRLPPSEYVIVPSTYEPHQEGEFILRVFSEKRNLSEEVENTISVDRPVPIIFVSDRANSNKELGVDQESEEGKGKTSPDKQKQSPQPQPGSSDQESEEQQQFRNIFKQIAGDDMEICADELKKVLNTVVNKHKDLKTHGFTLESCRSMIALMDTDGSGKLNLQEFHHLWNKIKAWQKIFKHYDTDQSGTINSYEMRNAVNDAGFHLNNQLYDIITMRYADKHMNIDFDSFICCFVRLEGMFRAFHAFDKDGDGIIKLNVLEWLQLTMYA

SEQ ID NO: 767685 - protein, 726 aa, Homo sapiens
MPTVISASVAPRTAAEPRSPGPVPHPAQSKATEAGGGNPSGIYSAIISRNFPIIGVKEKTFEQLHKKCLEKKVLYVDPEFPPDETSLFYSQKFPIQFVWKRPPEICENPRFIIDGANRTDICQGELGDCWFLAAIACLTLNQHLLFRVIPHDQSFIENYAGIFHFQFWRYGEWVDVVIDDCLPTYNNQLVFTKSNHRNEFWSALLEKAYAKLHGSYEALKGGNTTEAMEDFTGGVAEFFEIRDAPSDMYKIMKKAIERGSLMGCSIDTIIPVQYETRMACGLVRGHAYSVTGLDEVPFKGEKVKLVRLRNPWGQVEWNGSWSDRWKDWSFVDKDEKARLQHQVTEDGEFWMSYEDFIYHFTKLEICNLTADALQSDKLQTWTVSVNEGRWVRGCSAGGCRNFPDTFWTNPQYRLKLLEEDDDPDDSEVICSFLVALMQKNRRKDRKLGASLFTIGFAIYEVMHGNKQHLQKDFFLYNASKARSKTYINMREVSQRFRLPPSEYVIVPSTYEPHQEGEFILRVFSEKRNLSEEVENTISVDRPVPQPGSSDQESEEQQQFRNIFKQIAGDDMEICADELKKVLNTVVNKHKDLKTHGFTLESCRSMIALMDTDGSGKLNLQEFHHLWNKIKAWQKIFKHYDTDQSGTINSYEMRNAVNDAGFHLNNQLYDIITMRYADKHMNIDFDSFICCFVRLEGMFRAFHAFDKDGDGIIKLNVLEWLQLTMYA

SEQ ID NO: 767686 - protein, 902 aa, Homo sapiens
EAEVSVSQDCTSALQPGDRVRLRLKKIPIYLSVYLLLFLPGHFLFVSQEICENPRFIIDGANRTDICQGELGDCWFLAAIACLTLNQHLLFRVIPHDQSFIENYAGIFHFQFWRYGEWVDVVIDDCLPTYNNQLVFTKSNHRNEFWSALLEKAYAKLHGSYEALKGGNTTEAMEDFTGGVAEFFEIRDAPSDMYKIMKKAIERGSLMGCSIDDGTNMTYGTSPSGLNMGELIARMVRNMDNSLLQDSDLDPRGSDERPTRTIIPVQYETRMACGLVRGHAYSVTGLDEVPFKGEKVKLVRLRNPWGQVEWNGSWSDRWKDWSFVDKDEKARLQHQVTEDGEFWMSYEDFIYHFTKLEICNLTADALQSDKLQTWTVSVNEGRWVRGCSAGGCRNFPDTFWTNPQYRLKLLEEDDDPDDSEVICSFLVALMQKNRRKDRKLGASLFTIGFAIYEVFPKRYSSSSGQQLCAALPRGPRVCLWLVEKLPGGVCGQDCDRRGPCLCYFHCRAGASGHCMTHDYHPQDVHFLPRTSTARHTHAFAHSPSSTLTATHTVTQTRSEGGCPLWDGGITSLRTQPSPLGLLGGPSSLRGFGAEEQLFWMHGNKQHLQKDFFLYNASKARSKTYINMREVSQRFRLPPSEYVIVPSTYEPHQEGEFILRVFSEKRNLSEEVENTISVDRPVPIIFVSDRANSNKELGVDQESEEGKGKTSPDKQKQSPQPQPGSSDQESEEQQQFRNIFKQIAGDDMEICADELKKVLNTVVNKHKDLKTHGFTLESCRSMIALMDTDGSGKLNLQEFHHLWNKIKAWQKIFKHYDTDQSGTINSYEMRNAVNDAGFHLNNQLYDIITMRYADKHMNIDFDSFICCFVRLEGMFRAFHAFDKDGDGIIKLNVLEWLQLTMYA

SEQ ID NO: 767687 - protein, 456 aa, Homo sapiens
MPTVISASVAPRTAAEPRSPGPVPHPAQSKATEAGGGNPSGIYSAIISRNFPIIGVKEKTFEQLHKKCLEKKVLYVDPEFPPDETSLFYSQKFPIQFVWKRPPEICENPRFIIDGANRTDICQGELGDCWFLAAIACLTLNQHLLFRVIPHDQSFIENYAGIFHFQFWRYGEWVDVVIDDCLPTYNNQLVFTKSNHRNEFWSALLEKAYAKLHGSYEALKGGNTTEAMEDFTGGVAEFFEIRDAPSDMYKIMKKAIERGSLMGCSIDDGTNMTYGTSPSGLNMGELIARMVRNMDNSLLQDSDLDPRGSDERPTRTIIPVQYETRMACGLVRGHAYSVTGLDEVPFKGEKVKLVRLRNPWGQVEWNGSWSDRWKDWSFVDKDEKARLQHQVTEDGEFWMSYEDFIYHFTKLEICNLTADALQSDKLQTWTVSVNEGRWVRGCSAGGCRNFPGGRCS

SEQ ID NO: 767688 - protein, 148 aa, Homo sapiens [sequence omitted]

SEQ ID NO: 767689 - protein, 957 aa, Homo sapiens
MPTVISASVAPRTAAEPRSPGPVPHPAQSKATEAGGGNPSGIYSAIISRNFPIIGVKEKTFEQLHKKCLEKKVLYVDPEFPPDETSLFYSQKFPIQFVWKRPPEICENPRFIIDGANRTDICQGELGDCWFLAAIACLTLNQHLLFRVIPHDQSFIENYAGIFHFQFWRYGEWVDVVIDDCLPTYNNQLVFTKSNHRNEFWSALLEKAYAKLHGSYEALKGGNTTEAMEDFTGGVAEFFEIRDAPSDMYKIMKKAIERGSLMGCSIDDGTNMTYGTSPSGLNMGELIARMVRNMDNSLLQDSDLDPRGSDERPTRTIIPVQYETRMACGLVRGHAYSVTGLDEVPFKGEKVKLVRLRNPWGQVEWNGSWSDRWKDWSFVDKDEKARLQHQVTEDGEFWMSYEDFIYHFTKLEICNLTADALQSDKLQTWTVSVNEGRWVRGCSAGGCRNFPDTFWTNPQYRLKLLEEDDDPDDSEVICSFLVALMQKNRRKDRKLGASLFTIGFAIYEVFPKRYSSSSGQQLCAALPRGPRVCLWLVEKLPGGVCGQDCDRRGPCLCYFHCRAGASGHCMTHDYTPRMCTFSLAPDTARHTHAFAHSPSSTLTATHTVTQTRSEGGCPLWDGGITSLRTQPSPLGLLGGPSSLRGFGAEEQLFWMHGNKQHLQKDFFLYNASKARSKTYINMREVSQRFRLPPSEYVIVPSTYEPHQEGEFILRVFSEKRNLSEEVENTISVDRPVPIIFVSDRANSNKELGVDQESEEGKGKTSPDKQKQSPQPQPGSSDQESEEQQQFRNIFKQIAGDDMEICADELKKVLNTVVNKHKDLKTHGFTLESCRSMIALMDTDGSGKLNLQEFHHLWNKIKAWQKIFKHYDTDQSGTINSYEMRNAVNDAGFHLNNQLYDIITMRYADKHMNIDFDSFICCFVRLEGMFRAFHAFDKDGDGIIKLNVLEWLQLTMYA

SEQ ID NO: 767690 - protein, 919 aa, Homo sapiens
MPTVISASVAPRTAAEPRSPGPVPHPAQSKATEAGGGNPSGIYSAIISRNFPIIGVKEKTFEQLHKKCLEKKVLYVDPEFPPDETSLFYSQKFPIQFVWKRPPEICENPRFIIDGANRTDICQGELGDCWFLAAIACLTLNQHLLFRVIPHDQSFIENYAGIFHFQFWRYGEWVDVVIDDCLPTYNNQLVFTKSNHRNEFWSALLEKAYAKLHGSYEALKGGNTTEAMEDFTGGVAEFFEIRDAPSDMYKIMKKAIERGSLMGCSIDDGTNMTYGTSPSGLNMGELIARMVRNMDNSLLQDSDLDPRGSDERPTRTIIPVQYETRMACGLVRGHAYSVTGLDEVPFKGEKVKLVRLRNPWGQVEWNGSWSDRWKDWSFVDKDEKARLQHQVTEDGEFWMSYEDFIYHFTKLEICNLTADALQSDKLQTWTVSVNEGRWVRGCSAGGCRNFPDTFWTNPQYRLKLLEEDDDPDDSEVICSFLVALMQKNRRKDRKLGASLFTIGFAIYEVFPKRYSSSSGQQLCAALPRGPRVCLWLVEKLPGGVCGQDCDRRGPCLCYFHCRAGASGHCMTHDYTPRMCTFSLAPDTARHTHAFAHSPSSTLTATHTVTQTRSEGGCPLWDGGITSLRTQPSPLGLLGGPSSLRGFGAEEQLFWMHGNKQHLQKDFFLYNASKARSKTYINMREVSQRFRLPPSEYVIVPSTYEPHQEGEFILRVFSEKRNLSEEVENTISVDRPVPQPGSSDQESEEQQQFRNIFKQIAGDDMEICADELKKVLNTVVNKHKDLKTHGFTLESCRSMIALMDTDGSGKLNLQEFHHLWNKIKAWQKIFKHYDTDQSGTINSYEMRNAVNDAGFHLNNQLYDIITMRYADKHMNIDFDSFICCFVRLEGMFRAFHAFDKDGDGIIKLNVLEWLQLTMYA

SEQ ID NO: 767691 - protein, 494 aa, Homo sapiens
MFEIKKICCIGAGYVGGPTCSVIAHMCPEIRVTVVDVNESRINAWNSPTLPIYEPGLKEVVESCRGKNLFFSTNIDDAIKEADLVFISVNTPTKTYGMGKGRAADLKYIEACARRIVQNSNGYKIVTEKSTVPVRAAESIRRIFDANTKPNLNLQVLSNPEFLAEGTAIKDLKNPDRVLIGGDETPEGQRAVQALCAVYEHWVPREKILTTNTWSSELSKLAANAFLAQRISSINSISALCEATGADVEEVATAIGMDQRIGNKFLKASVGFGGSCFQKDVLNLVYLCEALNLPEVARYWQQVIDMNDYQRRRFASRIIDSLFNTVTDKKIAILGFAFKKDTGDTRESSSIYISKYLMDEGAHLHIYDPKVPREQIVVDLSHPGVSEDDQVSRLVTISKDPYEACDGAHAVVICTEWDMFKELDYERIHKKMLKPAFIFDGRRVLDGLHNELQTIGFQIETIGKKVSSKRIPYAPSGEIPKFSLQDPPNKKPKV

SEQ ID NO: 767692 - protein, 205 aa, Homo sapiens
RIPRDPVQLVWGEVIDMNDYQRRRFASRIIDSLFNTVTDKKIAILGFAFKKDTGDTRESSSIYISKYLMDEGAHLHIYDPKVPREQIVVDLSHPGVSEDDQVSRLVTISKDPYEACDGAHAVVICTEWDMFKELDYERIHKKMLKPAFIFDGRRVLDGLHNELQTIGFQIETIGKKVSSKRIPYAPSGEIPKFSLQDPPNKKPKV

SEQ ID NO: 767693 - protein, 494 aa, Homo sapiens; identical to SEQ ID NO: 767691

SEQ ID NO: 767694 - protein, 494 aa, Homo sapiens; identical to SEQ ID NO: 767691

SEQ ID NO: 767695 - protein, 289 aa, Homo sapiens
EPENLRATAALFTKAPGARGRALPASGKAGRARGSAGGSAARGHWSLARFPAPRGSHLPARRSSGRVSTPILRPVSSIPLALSRESRTAEESSLTPQPQVGLVHIMTSFEDADTEETVTCLQMTVYHPGQLQCGIFQSISFNREKLPSSEVVKFGRNSNICHYTFQDKQVSRVQFSLQLFKKFNSSVLSFEIKNMSKKTNLIVDSRELGYLNKMDLPYRCMVRFGEYQFLMEKEDGESLEFFETQFILSPRSLLQENNWPPHRPIPEYGTYSLCSSQSSSPTEMDENES

SEQ ID NO: 767696 - protein, 289 aa, Homo sapiens; identical to SEQ ID NO: 767695

SEQ ID NO: 767697 - protein, 289 aa, Homo sapiens; identical to SEQ ID NO: 767695

SEQ ID NO: 767698 - protein, 184 aa, Homo sapiens
MTSFEDADTEETVTCLQMTVYHPGQLQCGIFQSISFNREKLPSSEVVKFGRNSNICHYTFQDKQVSRVQFSLQLFKKFNSSVLSFEIKNMSKKTNLIVDSRELGYLNKMDLPYRCMVRFGEYQFLMEKEDGESLEFFETQFILSPRSLLQENNWPPHRPIPEYGTYSLCSSQSSSPTEMDENES

SEQ ID NO: 767699 - protein, 289 aa, Homo sapiens; identical to SEQ ID NO: 767695

SEQ ID NO: 767700 - protein, 154 aa, Homo sapiens
MSGEENPASKPTPVQDVQGDGRWMSLHHRFLADSKDKEPEVVFIGDSLVQLMHQCEIWRESFSPLHALNFGIGGDGTQHVLWRLENGELEHIRPKIVVVWVGTNNHGHTAEQVTGGIKAIVQLVNERQPRPGLWCWACFREANIPTHFGRRTDR

SEQ ID NO: 767701 - protein, 206 aa, Homo sapiens
MSGEENPASKPTPVQDVQGDGRWMSLHHRFLADSKDKEPEVVFIGDSLVQLMHQCEIWRESFSPLHALNFGIGGDGTQHVLWRLENGELEHIRPKIVVVWVGTNNHGHTAEQLLPRGQHPNPLREKNRQVNELVRAALAGHPRAHFLDADPGFVHSDGTISHHDMYDYLHLSRLGYTPVCRALHSLLLRLLAQDQGQGAPLLEPAP

SEQ ID NO: 767702 - protein, 702 aa, Homo sapiens
PAWCAGAVSPLPRQLDPGVVRRRSLRRDWRDCAAATADMSGVRGLSRLLSARRLALAKAWPTVLQTGTRGFHFTVDGNKRASAKVSDSISAQYPVVDHEFDAVVVGAGGAGLRAAFGLSEAGFNTACVTKLFPTRSHTVAAQGGINAALGNMEEDNWRWHFYDTVKGSDWLGDQDAIHYMTEQAPAAVVELENYGMPFSRTEDGKIYQRAFGGQSLKFGKGGQAHRCCCVADRTGHSLLHTLYGRSLRYDTSYFVEYFALDLLMENGECRGVIALCIEDGSIHRIRAKNTVVATGGYGRTYFSCTSAHTSTGDGTAMITRAGLPCQDLEFVQFHPTGIYGAGCLITEGCRGEGGILINSQGERFMERYAPVAKDLASRDVVSRSMTLEIREGRGCGPEKDHVYLQLHHLPPEQLATRLPGISETAMIFAGVDVTKEPIPVLPTVHYNMGGIPTNYKGQVLRHVNGQDQIVPGLYACGEAACASVHGANRLGANSLLDLVVFGRACALSIEESCRPGDKVPPIKPNAGEESVMNLDKLRFADGSIRTSELRLSMQKSMQNHAAVFRVGSVLQEGCGKISKLYGDLKHLKTFDRGMVWNTDLVETLELQNLMLCALQTIYGAEARKESRGAHAREDYKVRIDEYDYSKPIQGQQKKPFEEHWRKHTLSYVDVGTGKVTLEYRPVIDKTLNEADCATVPPAIRSY

SEQ ID NO: 767703 - protein, 295 aa, Homo sapiens
PAWCAGAVSPLPRQLDPGVVRRRSLRRDWRDCAAATADMSGVRGLSRLLSARRLALAKAWPTVLQTGTRGFHFTVDGNKRASAKVSDSISAQYPVVDHEFDAVVVGAGGAGLRAAFGLSEAGFNTACVTKLFPTRSHTVAAQGGINAALGNMEEDNWRWHFYDTVKGSDWLGDQDAIHYMTEQAPAAVVELENYGMPFSRTEDGKIYQRAFGGQSLKFGKGGQAHRCCCVADRTGHSLLHTLYGRSLRYDTSYFVEYFALDLLMENGECRGVIALCIEDGSIHRIRAKNTVVATG

SEQ ID NO: 767704 - protein, 702 aa, Homo sapiens; identical to SEQ ID NO: 767702

SEQ ID NO: 767705 - protein, 702 aa, Homo sapiens; identical to SEQ ID NO: 767702

SEQ ID NO: 767706 - protein, 684 aa, Homo sapiens
PAWCAGAVSPLPRQLDPGVVRRRSLRRDWRDCAAATADMSGVRGLSRLLSARRLALAKAWPTVLQTGTRGFHFTVDGNKRASAKVSDSISAQYPVVDHEFDAVVVGAGGAGLRAAFGLSEAGFNTACVTKLFPTRSHTVAAQGGINAALGNMEEDNWRWHFYDTVKGSDWLGDQDAIHYMTEQAPAAVVELENYGMPFSRTEDGKIYQRAFGGQSLKFGKGGQAHRCCCVADRTGHSLLHTLYGRSLRYDTSYFVEYFALDLLMENGECRGVIALCIEDGSIHRIRAKNTVVATGGYGRTYFSCTSAHTSTGDGTAMITRAGLPCQDLEFVQFHPTGIYGAGCLITEGCRGEGGILINSQGERFMERYAPVAKDLASRDVVSRSMTLEIREGRGCGPEKDHVYLQLHHLPPEQLATRLPGISETAMIFAGVDVTKEPIPVLPTVHYNMGGIPTNYKGQVLRHVNGQDQIVPGLYACGEAACASVHGANRLGANSLLDLVVFGRACALSIEESCRPGDKVPPIKPNAGEESVMNLDKLRFADGSIRTSELRLSMQKSMQNHAAVFRVGSVLQEGCGKISKLYGDLKHLKTFDRGMVWNTDLVETLELQNLMLCALQTIYGAEARKESRGAHAREDYKVRIDEYDYSKPIQGQQKKPFEEHWRKHTLSYVDVGTGKVTLEYRPVID

SEQ ID NO: 767707 - protein, 489 aa, Homo sapiens
PAWCAGAVSPLPRQLDPGVVRRRSLRRDWRDCAAATADMSGVRGLSRLLSARRLALAKAWPTVLQTGTRGFHFTVDGNKRASAKVSDSISAQYPVVDHEFDAVVVGAGGAGLRAAFGLSEAGFNTACVTKLFPTRSHTVAAQGGINAALGNMEEDNWRWHFYDTVKGSDWLGDQDAIHYMTEQAPAAVVELENYGMPFSRTEDGKIYQRAFGGQSLKFGKGGQAHRCCCVADRTGHSLLHTLYGRSLRYDTSYFVEYFALDLLMENGECRGVIALCIEDGSIHRIRAKNTVVATGGYGRTYFSCTSAHTSTGDGTAMITRAGLPCQDLEFVQFHPTGIYGAGCLITEGCRGEGGILINSQGERFMERYAPVAKDLASRDVVSRSMTLEIREGRGCGPEKDHVYLQLHHLPPEQLATRLPGISETAMIFAGVDVTKEPIPVLPTVHYNMGGIPTNYKGQVMVLAPPPQLERRLGRRGPPRSCLFRSYRKR

SEQ ID NO: 767708 - protein, 682 aa, Homo sapiens
GEVQPKPIIDRGVLLSCLAALSVALERLVLDHMVVGQTDVADSRNPRFTDSACGCDAREASAYSFIISISAQYPVVDHEFDAVVVGAGGAGLRAAFGLSEAGFNTACVTKLFPTRSHTVAAQGGINAALGNMEEDNWRWHFYDTVKGSDWLGDQDAIHYMTEQAPAAVVELENYGMPFSRTEDGKIYQRAFGGQSLKFGKGGQAHRCCCVADRTGHSLLHTLYGRSLRYDTSYFVEYFALDLLMENGECRGVIALCIEDGSIHRIRAKNTVVATGGYGRTYFSCTSAHTSTGDGTAMITRAGLPCQDLEFVQFHPTGIYGAGCLITEGCRGEGGILINSQGERFMERYAPVAKDLASRDVVSRSMTLEIREGRGCGPEKDHVYLQLHHLPPEQLATRLPGISETAMIFAGVDVTKEPIPVLPTVHYNMGGIPTNYKGQVLRHVNGQDQIVPGLYACGEAACASVHGANRLGANSLLDLVVFGRACALSIEESCRPGDKVPPIKPNAGEESVMNLDKLRFADGSIRTSELRLSMQKSMQNHAAVFRVGSVLQEGCGKISKLYGDLKHLKTFDRGMVWNTDLVETLELQNLMLCALQTIYGAEARKESRGAHAREDYKVRIDEYDYSKPIQGQQKKPFEEHWRKHTLSYVDVGTGKVTLEYRPVIDKTLNEADCATVPPAIRSY

SEQ ID NO: 767709 - protein, 551 aa, Homo sapiens
MEEDNWRWHFYDTVKGSDWLGDQDAIHYMTEQAPAAVVELENYGMPFSRTEDGKIYQRAFGGQSLKFGKGGQAHRCCCVADRTGHSLLHTLYGRSLRYDTSYFVEYFALDLLMENGECRGVIALCIEDGSIHRIRAKNTVVATGGYGRTYFSCTSAHTSTGDGTAMITRAGLPCQDLEFVQFHPTGIYGAGCLITEGCRGEGGILINSQGERFMERYAPVAKDLASRDVVSRSMTLEIREGRGCGPEKDHVYLQLHHLPPEQLATRLPGISETAMIFAGVDVTKEPIPVLPTVHYNMGGIPTNYKGQVLRHVNGQDQIVPGLYACGEAACASVHGANRLGANSLLDLVVFGRACALSIEESCRPGDKVPPIKPNAGEESVMNLDKLRFADGSIRTSELRLSMQKSMQNHAAVFRVGSVLQEGCGKISKLYGDLKHLKTFDRGMVWNTDLVETLELQNLMLCALQTIYGAEARKESRGAHAREDYKVRIDEYDYSKPIQGQQKKPFEEHWRKHTLSYVDVGTGKVTLEYRPVIDKTLNEADCATVPPAIRSY

SEQ ID NO: 767710 - protein, 677 aa, Homo sapiens
PAWCAGAVSPLPRQLDPGVVRRRSLRRDWRDCAAATADMSGVRGLSRLLSARRLALAKAWPTVLQTGTRGFHFTVDGNKRASAKVSDSISAQYPVVDHEFDAVVVGAGGAGLRAAFGLSEAGFNTACVTKLFPTRSHTVAAQGGINAALGNMEEDNWRWHFYDTVLENYGMPFSRTEDGKIYQRAFGGQSLKFGKGGQAHRCCCVADRTGHSLLHTLYGRSLRYDTSYFVEYFALDLLMENGECRGVIALCIEDGSIHRIRAKNTVVATGGYGRTYFSCTSAHTSTGDGTAMITRAGLPCQDLEFVQFHPTGIYGAGCLITEGCRGEGGILINSQGERFMERYAPVAKDLASRDVVSRSMTLEIREGRGCGPEKDHVYLQLHHLPPEQLATRLPGISETAMIFAGVDVTKEPIPVLPTVHYNMGGIPTNYKGQVLRHVNGQDQIVPGLYACGEAACASVHGANRLGANSLLDLVVFGRACALSIEESCRPGDKVPPIKPNAGEESVMNLDKLRFADGSIRTSELRLSMQKSMQNHAAVFRVGSVLQEGCGKISKLYGDLKHLKTFDRGMVWNTDLVETLELQNLMLCALQTIYGAEARKESRGAHAREDYKVRIDEYDYSKPIQGQQKKPFEEHWRKHTLSYVDVGTGKVTLEYRPVIDKTLNEADCATVPPAIRSY

SEQ ID NO: 767711 - protein, 507 aa, Homo sapiens
MPFSRTEDGKIYQRAFGGQSLKFGKGGQAHRCCCVADRTGHSLLHTLYGRSLRYDTSYFVEYFALDLLMENGECRGVIALCIEDGSIHRIRAKNTVVATGGYGRTYFSCTSAHTSTGDGTAMITRAGLPCQDLEFVQFHPTGIYGAGCLITEGCRGEGGILINSQGERFMERYAPVAKDLASRDVVSRSMTLEIREGRGCGPEKDHVYLQLHHLPPEQLATRLPGISETAMIFAGVDVTKEPIPVLPTVHYNMGGIPTNYKGQVLRHVNGQDQIVPGLYACGEAACASVHGANRLGANSLLDLVVFGRACALSIEESCRPGDKVPPIKPNAGEESVMNLDKLRFADGSIRTSELRLSMQKSMQNHAAVFRVGSVLQEGCGKISKLYGDLKHLKTFDRGMVWNTDLVETLELQNLMLCALQTIYGAEARKESRGAHAREDYKVRIDEYDYSKPIQGQQKKPFEEHWRKHTLSYVDVGTGKVTLEYRPVIDKTLNEADCATVPPAIRSY

SEQ ID NO: 767712 - protein, 413 aa, Homo sapiens
MLLWGTWRRTTGGGISTTPCSTGDGTAMITRAGLPCQDLEFVQFHPTGIYGAGCLITEGCRGEGGILINSQGERFMERYAPVAKDLASRDVVSRSMTLEIREGRGCGPEKDHVYLQLHHLPPEQLATRLPGISETAMIFAGVDVTKEPIPVLPTVHYNMGGIPTNYKGQVLRHVNGQDQIVPGLYACGEAACASVHGANRLGANSLLDLVVFGRACALSIEESCRPGDKVPPIKPNAGEESVMNLDKLRFADGSIRTSELRLSMQKSMQNHAAVFRVGSVLQEGCGKISKLYGDLKHLKTFDRGMVWNTDLVETLELQNLMLCALQTIYGAEARKESRGAHAREDYKVRIDEYDYSKPIQGQQKKPFEEHWRKHTLSYVDVGTGKVTLEYRPVIDKTLNEADCATVPPAIRSY

SEQ ID NO: 767713 - protein, 337 aa, Homo sapiens
GRVGSTHASLASRDVVSRSMTLEIREGRGCGPEKDHVYLQLHHLPPEQLATRLPGISETAMIFAGVDVTKEPIPVLPTVHYNMGGIPTNYKGQVLRHVNGQDQIVPGLYACGEAACASVHGANRLGANSLLDLVVFGRACALSIEESCRPGDKVPPIKPNAGEESVMNLDKLRFADGSIRTSELRLSMQKSMQNHAAVFRVGSVLQEGCGKISKLYGDLKHLKTFDRGMVWNTDLVETLELQNLMLCALQTIYGAEARKESRGAHAREDYKVRIDEYDYSKPIQGQQKKPFEEHWRKHTLSYVDVGTGKVTLEYRPVIDKTLNEADCATVPPAIRSY

SEQ ID NO: 767714 - protein, 101 aa, Homo sapiens
LQNLMLCALQTIYGAEARKESRGAHAREDYKVGLLTTPTCTCLFLPPGGTQPHPCIFSAFSFVAPKVNPKNAFFPPGNFDPWVLAIFWITVTFSLLWVGIH

SEQ ID NO: 767715 - protein, 165 aa, Homo sapiens
PAWCAGAVSPLPRQLDPGVVRRRSLRRDWRDCAAATADMSGVRGLSRLLSARRLALAKAWPTVLQTGTRGFHFTVDGNKRASAKVSDSISAQYPVVDHEFDAVVVGAGGAGLRAAFGLSEAGFNTACVTKLFPTRSHTVAAQVRERCPTVLPLRAGPAQPRTFYL

SEQ ID NO: 767716 - protein, 843 aa, Homo sapiens
PAWCAGAVSPLPRQLDPGVVRRRSLRRDWRDCAAATADMSGVRGLSRLLSARRLALAKAWPTVLQTGTRGFHFTVDGNKRASAKVSDSISAQYPVVDHEFDAVVVGAGGAGLRAAFGLSEAGFNTACVTKLFPTRSHTVAAQGGINAALGNMEEDNWRWHFYDTVKGSDWLGDQDAIHYMTEQAPAAVVELENYGMPFSRTEDGKIYQRAFGGQSLKFGKGGQAHRCCCVADRTGHSLLHTLYGRSLRYDTSYFVEYFALDLLMENGECRGVIALCIEDGSIHRIRAKNTVVATGGYGRTYFSCTSAHTSTGDGTAMITRAGLPCQDLEFVQFHPTGIYGAGCLITEGCRGEGGILINSQGERFMERYAPVAKDLASRDVVSRSMTLEIREGRCCVIYHQHCLSGHTGRGCFCEFQHRSPSPSCAGACAQPPLLAAGRRLLVCDIFLKTYILKILASFFLKSVEQSFSYVCEYVTEYGRERHTPNLKSACEPWVLCLIPTDVFWQLSKCVGYLAFSKTVLQLFHCLTLFFNVMTFAKYLLVWPLEVLHFYIKKTEKSGVSHHAWPTSLSLTCSTDTLLGKVGWWRHGHLTFHLKSSFPQVLRHVNGQDQIVPGLYACGEAACASVHGANRLGANSLLDLVVFGRACALSIEESCRPGDKVPPIKPNAGEESVMNLDKLRFADGSIRTSELRLSMQKSMQNHAAVFRVGSVLQEGCGKISKLYGDLKHLKTFDRGMVWNTDLVETLELQNLMLCALQTIYGAEARKESRGAHAREDYKVRIDEYDYSKPIQGQQKKPFEEHWRKHTLSYVDVGTGKVTLEYRPVIDKTLNEADCATVPPAIRSY

SEQ ID NO: 767717 - protein, 621 aa, Homo sapiens
PAWCAGAVSPLPRQLDPGVVRRRSLRRDWRDCAAATADMSGVRGLSRLLSARRLALAKAWPTVLQTGTRGFHFTVDGNKRASAKVSDSISAQYPVVDHEFDAVVVGAGGAGLRAAFGLSEAGFNTACVTKLFPTRSHTVAAQGGINAALGNMEEDNWRWHFYDTVKGSDWLGDQDAIHYMTEQAPAAVVELENYGMPFSRTEDGKIYQRAFGGQSLKFGKGGQAHRCCCVADRTGHSLLHTLYGRSLRYDTSYFVEYFALDLLMENGECRGVIALCIEDGSIHRIRAKNTVVATGGYGRTYFSCTSAHTSTGDGTAMITRAGLPCQDLEFVQFHPTGIYGAGCLITEGCRGEGGILINSQGERFMERYAPVAKDLASRDVVSRSMTLEIREGRGCGPEKDHVYLQLHHLPPEQLATRLPGISETAMIFAGVDVTKEPIPVLPTVHYNMGGIPTNYKGQVLRHVNGQDQIVPGLYACGEAACASVHGANRLGANSLLDLVVFGRACALSIEESCRPGDKVPPIKPNAGEESVMNLDKLRFADGSIRTSELRLSMQKVRIDEYDYSKPIQGQQKKPFEEHWRKHTLSYVDVGTGKVTLEYRPVIDKTLNEADCATVPPAIRSY

SEQ ID NO: 767718 - protein, 617 aa, Homo sapiens
PAWCAGAVSPLPRQLDPGVVRRRSLRRDWRDCAAATADMSGVRGLSRLLSARRLALAKAWPTVLQTGTRGFHFTVDGNKRASAKVSDSISAQYPVVDHEFDAVVVGAGGAGLRAAFGLSEAGFNTACVTKLFPTRSHTVAAQGGINAALGNMEEDNWRWHFYDTVKGSDWLGDQDAIHYMTEQAPAAVVELENYGMPFSRTEDGKIYQRAFGGQSLKFGKGGQAHRCCCVADRTGHSLLHTLYGRSLRYDTSYFVEYFALDLLMENGECRGVIALCIEDGSIHRIRAKNTVVATGGYGRTYFSCTSAHTSTGDGTAMITRAGLPCQDLEFVQFHPTGIYGAGCLITEGCRGEGGILINSQGERFMERYAPVAKDLASRDVVSRSMTLEIREGRGCGPEKDHVYLQLHHLPPEQLATRLPGISETAMIFAGVDVTKEPIPVLPTVHYNMGGIPTNYKGQVLRHVNGQDQIVPGLYACGEAACASVHGANRLGANSLLDLVVFGRACALSIEESCRPGDKVPPIKPNAGEESVMNLDKLRFADGSIRTSELRLSMQKVRAWTRSGVSRRAAYLALHWFCFLKTRSRGMQVQFCVDVLGGGGVWAFHVPVTQVVCVVPSR

SEQ ID NO: 767719 - protein, 339 aa, Homo sapiens
PAWCAGAVSPLPRQLDPGVVRRRSLRRDWRDCAAATADMSGVRGLSRLLSARRLALAKAWPTVLQTGTRGFHFTVDGNKRASAKVSDSISAQYPVVDHEFDAVVVGAGGAGLRAAFGLSEAGFNTACVTKLFPTRSHTVAAQGGINAALGNMEEDNWRWHFYDTVKGSDWLGDQDAIHYMTEQAPAAVVELENYGMPFSRTEDGKIYQRAFGGQSLKFGKGGQAHRCCCVADRTGHSLLHTLYGRSLRYDTSYFVEYFALDLLMENGECRGVIALCIEDGSIHRIRAKNTVVATGGYGRTYFSCTSAHTSTGDGTAMITRAGLPCQDLEFVQFHPTERH

SEQ ID NO: 767720 - protein, 654 aa, Homo sapiens
PAWCAGAVSPLPRQLDPGVVRRRSLRRDWRDCAAATADMSGVRGLSRLLSARRLALAKAWPTVLQTGTRGFHFTVDGNKRASAKVSDSISAQYPVVDHEFDAVVVGAGGAGLRAAFGLSEAGFNTACVTKLFPTRSHTVAAQLENYGMPFSRTEDGKIYQRAFGGQSLKFGKGGQAHRCCCVADRTGHSLLHTLYGRSLRYDTSYFVEYFALDLLMENGECRGVIALCIEDGSIHRIRAKNTVVATGGYGRTYFSCTSAHTSTGDGTAMITRAGLPCQDLEFVQFHPTGIYGAGCLITEGCRGEGGILINSQGERFMERYAPVAKDLASRDVVSRSMTLEIREGRGCGPEKDHVYLQLHHLPPEQLATRLPGISETAMIFAGVDVTKEPIPVLPTVHYNMGGIPTNYKGQVLRHVNGQDQIVPGLYACGEAACASVHGANRLGANSLLDLVVFGRACALSIEESCRPGDKVPPIKPNAGEESVMNLDKLRFADGSIRTSELRLSMQKSMQNHAAVFRVGSVLQEGCGKISKLYGDLKHLKTFDRGMVWNTDLVETLELQNLMLCALQTIYGAEARKESRGAHAREDYKVRIDEYDYSKPIQGQQKKPFEEHWRKHTLSYVDVGTGKVTLEYRPVIDKTLNEADCATVPPAIRSY

SEQ ID NO: 767721 - protein, 523 aa, Homo sapiens
THAVGPPPPWSLENYGMPFSRTEDGKIYQRAFGGQSLKFGKGGQAHRCCCVADRTGHSLLHTLYGRSLRYDTSYFVEYFALDLLMENGECRGVIALCIEDGSIHRIRAKNTVVATGGYGRTYFSCTSAHTSTGDGTAMITRAGLPCQDLEFVQFHPTGIYGAGCLITEGCRGEGGILINSQGERFMERYAPVAKDLASRDVVSRSMTLEIREGRGCGPEKDHVYLQLHHLPPEQLATRLPGISETAMIFAGVDVTKEPIPVLPTVHYNMGGIPTNYKGQVLRHVNGQDQIVPGLYACGEAACASVHGANRLGANSLLDLVVFGRACALSIEESCRPGDKVPPIKPNAGEESVMNLDKLRFADGSIRTSELRLSMQKSMQNHAAVFRVGSVLQEGCGKISKLYGDLKHLKTFDRGMVWNTDLVETLELQNLMLCALQTIYGAEARKESRGAHAREDYKVRIDEYDYSKPIQGQQKKPFEEHWRKHTLSYVDVGTGKVTLEYRPVIDKTLNEADCATVPPAIRSY

SEQ ID NO: 767722 - protein, 479 aa, Homo sapiens
LGECRGLIGTGPLAYCITLYGRSLRYDTSYFVEYFALDLLMENGECRGVIALCIEDGSIHRIRAKNTVVATGGYGRTYFSCTSAHTSTGDGTAMITRAGLPCQDLEFVQFHPTGIYGAGCLITEGCRGEGGILINSQGERFMERYAPVAKDLASRDVVSRSMTLEIREGRGCGPEKDHVYLQLHHLPPEQLATRLPGISETAMIFAGVDVTKEPIPVLPTVHYNMGGIPTNYKGQVLRHVNGQDQIVPGLYACGEAACASVHGANRLGANSLLDLVVFGRACALSIEESCRPGDKVPPIKPNAGEESVMNLDKLRFADGSIRTSELRLSMQKSMQNHAAVFRVGSVLQEGCGKISKLYGDLKHLKTFDRGMVWNTDLVETLELQNLMLCALQTIYGAEARKESRGAHAREDYKVRIDEYDYSKPIQGQQKKPFEEHWRKHTLSYVDVGTGKVTLEYRPVIDKTLNEADCATVPPAIRSY

SEQ ID NO: 767723 - protein, 146 aa, Homo sapiens
MQNHAAVFRVGSVLQEGCGKISKLYGDLKHLKTFDRGMVWNTDLVETLELQNLMLCALQTIYGAEARKESRGAHAREDYKVRIDEYDYSKPIQGQQKKPFEEHWRKHTLSYVDVGTGKVTLEYRPVIDKTLNEADCATVPPAIRSY

SEQ ID NO: 767724 - protein, 188 aa, Homo sapiens
MDCRKMVRFSYSVIWIMAISKAFELGLVAGLGHQEFARPSRGDLAFRDDSIWPQEEPAIRPRSSQRVLPMGIQHSKELNRTCCLNGGTCMLESFCACPPSFYGRNCEHDVRKENCGSVPHDTWLPKKCSLCKCWHGQLRCFPQAFLPGCDGLVMDEHLVASRTPELPPSARTTTFMLAGICLSIQSYY

SEQ ID NO: 767725 - protein, 69 aa, Homo sapiens
LLISGRALSLACRSGLGEKAGPARVSTPASWRPASDAQHCDCCTATRLSRCGCMRDLGMCAGVFATATG

SEQ ID NO: 767726 - protein, 184 aa, Homo sapiens
MVRYSLDPENPTKSCKSRGSNLRVHFKNTRETAQAIKGMHIQKATKYLKDVTLQKQCVPFRRYNGGVGRCAQAKQWGWTQGRWPKKSAEFLLHMLKNAESNAELKGLDVDSLVIEHIQVNKAPKMRRRTYRAHGRINPYMSSPCHIEMILTEKEQIVPKPEEEVAQKKKISQKKLKKQKLMARE

SEQ ID NO: 767727 - protein, 107 aa, Homo sapiens
EDPPSFRSFNSTMTELETAMGMIIDVFSRYSGSEGSTQTLTKGELKVLMEKELPGFLQSGKDKDAVDKLLKDLDANGDAQVDFSEFIVFVAAITSACHKYFEKAGLK

SEQ ID NO: 767728 - protein, 130 aa, Homo sapiens
CVNMRLPYKAAKRLPVGHFLGPASPQEEGGSESSTMTELETAMGMIIDVFSRYSGSEGSTQTLTKGELKVLMEKELPGFLQSGKDKDAVDKLLKDLDANGDAQVDFSEFIVFVAAITSACHKYFEKAGLK

SEQ ID NO: 767729 - protein, 122 aa, Homo sapiens
MPLVLEVSIDFLGPASPQEEGGSESSTMTELETAMGMIIDVFSRYSGSEGSTQTLTKGELKVLMEKELPGFLQSGKDKDAVDKLLKDLDANGDAQVDFSEFIVFVAAITSACHKYFEKAGLK

SEQ ID NO: 767730 - protein, 113 aa, Homo sapiens
RARYHLFDQEEGGSESSTMTELETAMGMIIDVFSRYSGSEGSTQTLTKGELKVLMEKELPGFLQSGKDKDAVDKLLKDLDANGDAQVDFSEFIVFVAAITSACHKYFEKAGLK

SEQ ID NO: 767731 - protein, 113 aa, Homo sapiens
QLVPNEHGQEEGGSESSTMTELETAMGMIIDVFSRYSGSEGSTQTLTKGELKVLMEKELPGFLQSGKDKDAVDKLLKDLDANGDAQVDFSEFIVFVAAITSACHKYFEKAGLK

SEQ ID NO: 767732 - protein, 130 aa, Homo sapiens; identical to SEQ ID NO: 767728

SEQ ID NO: 767733 - protein, 130 aa, Homo sapiens; identical to SEQ ID NO: 767728

SEQ ID NO: 767734 - protein, 114 aa, Homo sapiens
HSRVSPKHSQEEGGSESSTMTELETAMGMIIDVFSRYSGSEGSTQTLTKGELKVLMEKELPGFLQSGKDKDAVDKLLKDLDANGDAQVDFSEFIVFVAAITSACHKYFEKAGLK

SEQ ID NO: 767735 - protein, 153 aa, Homo sapiens
TPLPTSSPNDISYSPTQFSDPSLTNKEASLALLLSILILAIIAGHEISRDRRLYLNMTMTELETAMGMIIDVFSRYSGSEGSTQTLTKGELKVLMEKELPGFLQSGKDKDAVDKLLKDLDANGDAQVDFSEFIVFVAAITSACHKYFEKAGLK

SEQ ID NO: 767736 - protein, 331 aa, Homo sapiens
MTERPPSEAARSDPQLEGRDAAEASMAPPHLVLLNGVAKETSRAAAAEPPVIELGARGGPGGGPAGGGGAARDLKGRDAATAEARHRVPTTELCRPPGPAPAPAPASVTAELPGDGRMVQLSPPALAAPAAPGRALLYSLSQPLASLGSGFFGEPDAFPMFTTNNRVKRRPSPYEMEITDGPHTKVVRRIFTNSRERWRQQNVNGAFAELRKLIPTHPPDKKLSKNEILRLAMKYINFLAKLLNDQEEEGTQRAKTGKDPVVGAGGGGGGGGGGAPPDDLLQDVLSPNSSCGSSLDGAASPDSYTEEPAPKHTARSLHPAMLPAADGAGPR

SEQ ID NO: 767737 - protein, 170 aa, Homo sapiens
MDSTLPPGFPEKGLGTAPLSPHTKVVRRIFTNSRERWRQQNVNGAFAELRKLIPTHPPDKKLSKNEILRLAMKYINFLAKLLNDQEEEGTQRAKTGKDPVVGAGGGGGGGGGGAPPDDLLQDVLSPNSSCGSSLDGAASPDSYTEEPAPKHTARSLHPAMLPAADGAGPR

SEQ ID NO: 767738 - protein, 331 aa, Homo sapiens; identical to SEQ ID NO: 767736

SEQ ID NO: 767739 - protein, 214 aa, Homo sapiens
MVQLSPPALAAPAAPGRALLYSLSQPLASLGSGFFGEPDAFPMFTTNNRVKRRPSPYEMEITDGPHTKVVRRIFTNSRERWRQQNVNGAFAELRKLIPTHPPDKKLSKNEILRLAMKYINFLAKLLNDQEEEGTQRAKTGKDPVVGAGGGGGGGGGGAPPDDLLQDVLSPNSSCGSSLDGAASPDSYTEEPAPKHTARSLHPAMLPAADGAGPR

SEQ ID NO: 767740 - protein, 164 aa, Homo sapiens
MPDTMLPACFLGLLAFSSACYFQNCPRGGKRAMSDLELRQCLPCGPGGKGRCFGPSICCADELGCFVGTAEALRCQEENYLPSPCQSGQKACGSGGRCAAFGVCCNDESCVTEPECREGFHRRARASDRSNATQLDGPAGALLLRLVQLAGAPEPFEPAQPDAY

SEQ ID NO: 767741 - protein, 514 aa, Homo sapiens
MAEPVSPLKHFVLAKKAITAIFDQLLEFVTEGSHFVEATYKNPELDRIATEDDLVEMQGYKDKLSIIGEVLSRRHMKVAFFGRTSSGKSSVINAMLWDKVLPSGIGHITNCFLSVEGTDGDKAYLMTEGSDEKKSVKTVNQLAHALHMDKDLKAGCLVRVFWPKAKCALLRDDLVLVDSPGTDVTTELDSWIDKFCLDADVFVLVANSESTLMNTEKHFFHKVNERLSKPNIFILNNRWDASASEPEYMEDVRRQHMERCLHFLVEELKVVNALEAQNRIFFVSAKEVLSARKQKAQGMPESGVALAEGFHARLQEFQNFEQIFEECISQSAVKTKFEQHTIRAKQILATVKNIMDSVNLAAEDKRHYSVEEREDQIDRLDFIRNQMNLLTLDVKKKIKEVTEEVANKVSCAMTDEICRLSVLVDEFCSEFHPNPDVLKIYKSELNKHIEDGMGRNLADRCTDEVNALVLQTQQEIIENLKPLLPAGIQDKLHTLIPCKKFDLSYNLNYHKLCS

SEQ ID NO: 767742 - protein, 253 aa, Homo sapiens
  misc_feature (198)..(199): Xaa can be any naturally occurring amino acid
  misc_feature (202)..(204): Xaa can be any naturally occurring amino acid
  misc_feature (206)..(206): Xaa can be any naturally occurring amino acid
  misc_feature (208)..(208): Xaa can be any naturally occurring amino acid
  misc_feature (210)..(210): Xaa can be any naturally occurring amino acid
  misc_feature (212)..(212): Xaa can be any naturally occurring amino acid
  misc_feature (215)..(215): Xaa can be any naturally occurring amino acid
  misc_feature (218)..(218): Xaa can be any naturally occurring amino acid
  misc_feature (221)..(221): Xaa can be any naturally occurring amino acid
  misc_feature (223)..(223): Xaa can be any naturally occurring amino acid
  misc_feature (229)..(229): Xaa can be any naturally occurring amino acid
  misc_feature (247)..(247): Xaa can be any naturally occurring amino acid
RERLPFLGAGRGGGDWAERRVLLRACARAAGGPVKPAALARDLGPAHRVAWWLRLSVRPPAGAIMADAASQVLLGSGLTILSQPLMYVKVLIQVGYEPLPPTIGRNIFGRQVCQLPGLFSYAQHIASIDGRRGLFTGLTPRLCSGVLGTVVHGKVLQHYQESDKGEELGPGNVQKEVSSSFDHVIKETTREMIARCGXXVMXXXLXVXTXRXMVXLIXREXKXCGVCDXIIRMYGEEGIVGFLGGVXGAVVRE

SEQ ID NO: 767743 - protein, 367 aa, Homo sapiens
RERLPFLGAGRGGGDWAERRVLLRACARAAGGPVKPAALARDLGPAHRVAWWLRLSVRPPAGAIMADAASQVLLGSGLTILSQPLMYVKVLIQVGYEPLPPTIGRNIFGRQVCQLPGLFSYAQHIASIDGRRGLFTGLTPRLCSGVLGTVVHGKVLQHYQESDKGEELGPGNVQKEVSSSFDHVIKETTREMIARSAATLITHPFHVITLRSMVQFIGRESKYCGLCDSIITIYREEGILGFFAGLVPRLLGDILSLWLCNSLAYLVNTYALDSGVSTMNEMKSYSQAVTGFFASMLTYPFVLVSNLMAVNNCGLAGGCPPYSPIYTSWIDCWCMLQKEGNMSRGNSLFFRKVPFGKTYCCDLKMLI

SEQ ID NO: 767744 - protein, 367 aa, Homo sapiens; identical to SEQ ID NO: 767743

SEQ ID NO: 767745 - protein, 176 aa, Homo sapiens
MIARSAATLITHPFHVITLRSMVQFIGRESKYCGLCDSIITIYREEGILGFFAGLVPRLLGDILSLWLCNSLAYLVNTYALDSGVSTMNEMKSYSQAVTGFFASMLTYPFVLVSNLMAVNNCGLAGGCPPYSPIYTSWIDCWCMLQKEGNMSRGNSLFFRKVPFGKTYCCDLKMLI

SEQ ID NO: 767746 - protein, 367 aa, Homo sapiens; identical to SEQ ID NO: 767743

SEQ ID NO: 767747 - protein, 155 aa, Homo sapiens
MVQFIGRESKYCGLCDSIITIYREEGILGFFAGLVPRLLGDILSLWLCNSLAYLVNTYALDSGVSTMNEMKSYSQAVTGFFASMLTYPFVLVSNLMAVNNCGLAGGCPPYSPIYTSWIDCWCMLQKEGNMSRGNSLFFRKVPFGKTYCCDLKMLI

SEQ ID NO: 767748 - protein, 282 aa, Homo sapiens
RERLPFLGAGRGGGDWAERRVLLRACARAAGGPVKPAALARDLGPAHRVAWWLRLSVRPPAGAIMADAASQVLLGSGLTILSQPLMYVKVLIQVGYEPLPPTIGRNIFGRQVCQLPGLFSYVITLRSMVQFIGRESKYCGLCDSIITIYREEGILGFFAGLVPRLLGDILSLWLCNSLAYLVNTYALDSGVSTMNEMKSYSQAVTGFFASMLTYPFVLVSNLMAVNNCGLAGGCPPYSPIYTSWIDCWCMLQKEGNMSRGNSLFFRKVPFGKTYCCDLKMLI

SEQ ID NO: 767749 - protein, 323 aa, Homo sapiens
RERLPFLGAGRGGGDWAERRVLLRACARAAGGPVKPAALARDLGPAHRVAWWLRLSVRPPAGAIMADAASQVLLGSGLTILSQPLMYVKVLIQVGYEPLPPTIGRNIFGRQVCQLPGLFSYAQHIASIDGRRGLFTGLTPRLCSGVLGTVVHGKVLQHYQESDKGEELGPGNVQKEVSSSFDHVIKETTREMIARSAATLITHPFHVITLRSMVQFIGRESKYCGLCDSIITIYREEGILGFFAGLVPRLLGDILSLWLCNSLAYLVNTYALDSGVSTMNEMKSYSQAVTGSCWWMPSLLPNIYVLDRLLVHATKRGEYEPRK

SEQ ID NO: 767750 - protein, 283 aa, Homo sapiens
RERLPFLGAGRGGGDWAERRVLLRACARAAGGPVKPAALARDLGPAHRVAWWLRLSVRPPAGAIMADAASQVLLGSGLTILSQPLMYVKVLIQVGYEPLPPTIGRNIFGRQVCQLPGLFSYAQHIASIDGRRGLFTGLTPRLCSGVLGTVVHGKVLQHYQESDKGEELGPGNVQKEVSSSFDHVIKETTREMIARSAATLITHPFHVITLRSMVQFIGRESKYCGLCDSIITIYREEGILGFFAGLVPRLLGDILSLWLCNSLAYLVNTYALDSGGFLSNELK

SEQ ID NO: 767751 - protein, 367 aa, Homo sapiens; identical to SEQ ID NO: 767743

SEQ ID NO: 767752 - protein, 367 aa, Homo sapiens; identical to SEQ ID NO: 767743

SEQ ID NO: 767753 - protein, 321 aa, Homo sapiens
VWIGLVRDWVNRQRAGAIMADAASQVLLGSGLTILSQPLMYVKVLIQVGYEPLPPTIGRNIFGRQVCQLPGLFSYAQHIASIDGRRGLFTGLTPRLCSGVLGTVVHGKVLQHYQESDKGEELGPGNVQKEVSSSFDHVIKETTREMIARSAATLITHPFHVITLRSMVQFIGRESKYCGLCDSIITIYREEGILGFFAGLVPRLLGDILSLWLCNSLAYLVNTYALDSGVSTMNEMKSYSQAVTGFFASMLTYPFVLVSNLMAVNNCGLAGGCPPYSPIYTSWIDCWCMLQKEGNMSRGNSLFFRKVPFGKTYCCDLKMLI

SEQ ID NO: 767754 - protein, 358 aa, Homo sapiens
RERLPFLGAGRGGGDWAERRVLLRACARAAGGPVKPAALARDLGPAHRVAWWLRLSVRPPAGAIMADAASQVLLGSGLTILSQPLMYVKVLIQVGYEPLPPTIGRNIFGRQVCQLPGLFSYAQHIASIDGRRGLFTGLTPRLCSGVLGTVVHGKVLQELGPGNVQKEVSSSFDHVIKETTREMIARSAATLITHPFHVITLRSMVQFIGRESKYCGLCDSIITIYREEGILGFFAGLVPRLLGDILSLWLCNSLAYLVNTYALDSGVSTMNEMKSYSQAVTGFFASMLTYPFVLVSNLMAVNNCGLAGGCPPYSPIYTSWIDCWCMLQKEGNMSRGNSLFFRKVPFGKTYCCDLKMLI

SEQ ID NO: 767755 - protein, 166 aa, Homo sapiens
RERLPFLGAGRGGGDWAERRVLLRACARAAGGPVKPAALARDLGPAHRVAWWLRLSVRPPAGAIMADAASQVLLGSGLTILSQPLMYVKVLIQVGYEPLPPTIGRNIFGRQVCQLPGLFSYAQHIASIDGRRGLFTGLTPRLCSGVLGTVVHGKVLQHYQESDKGE

SEQ ID NO: 767756 - protein, 323 aa, Homo sapiens; identical to SEQ ID NO: 767749

SEQ ID NO: 767757 - protein, 170 aa, Homo sapiens
RERLPFLGAGRGGGDWAERRVLLRACARAAGGPVKPAALARDLGPAHRVAWWLRLSVRPPAGAIMADAASQVLLGSGLTILSQPLMYVKVLIQVGYEPLPPTIGRNIFGRQVCQLPGLFSYASKHISLTLSLILQEKDSTKEGNMSRGNSLFFRKVPFGKTYCCDLKMLI

SEQ ID NO: 767758 - protein, 209 aa, Homo sapiens
RERLPFLGAGRGGGDWAERRVLLRACARAAGGPVKPAALARDLGPAHRVAWWLRLSVRPPAGAIMADAASQVLLGSGLTILSQPLMYVKVLIQVGYEPLPPTIGRNIFGRQVCQLPGLFSYAQHIASIDGRRGLFTGLTPRLCSGVLGTVVHGKVLQHYQESDKGEELGPGNVQKEVSSSFDHVIKETERECRGLFPPLGFRKLMRSSA

SEQ ID NO: 767759 - protein, 258 aa, Homo sapiens
APEREPVNALGIMAAVDIRDNLLGISWVDSSWIPILNSGSVLDYFSERSNPFYDRTCNNEVVKMQRLTLEHLNQMVGIEYILLHAQEPILFIIRKQQRQSPAQVIPLADYYIIAGVIYQAPDLGSVINSRVLTAVHGIQSAFDEAMSYCRYHPSKGYWWHFKDHEEQDKVRPKAKRKEEPSSIFQRQRVDALLLDLRQKFPPKFVQLKPGEKPVPVDQTKKEAEPIPETVKPEEKETTKNVQQTVSAKGPPEKRMRLQ

SEQ ID NO: 767760 - protein, 110 aa, Homo sapiens
LLDWILSIFLILYHFVFFPIDNLLGISWVDSSWIPILNSGSVLDYFSERSNPFYDRTCNNEVVKMQRLTLEHLNQMVGIEYILLHAQEPILFIIRKQQRQSPAQGKMCKL

SEQ ID NO: 767761 - protein, 195 aa, Homo sapiens
MQRLTLEHLNQMVGIEYILLHAQEPILFIIRKQQRQSPAQVIPLADYYIIAGVIYQAPDLGSVINSRVLTAVHGIQSAFDEAMSYCRYHPSKGYWWHFKDHEEQDKVRPKAKRKEEPSSIFQRQRVDALLLDLRQKFPPKFVQLKPGEKPVPVDQTKKEAEPIPETVKPEEKETTKNVQQTVSAKGPPEKRMRLQ

SEQ ID NO: 767762 - protein, 140 aa, Homo sapiens
APEREPVNALGIMAAVDIRDNLLGISWVDSSWIPILNSGSVLDYFSERSNPFYDRTCNNEVVKMQRLTLEHLNQMVGIEYILLHAQEPILFIIRKQQRQSPAQVIPLADYYIIAGVIYQAPDLGSVINSRVVSVFTFFKH

SEQ ID NO: 767763 - protein, 169 aa, Homo sapiens
APEREPVNALGIMAAVDIRDNLLGISWVDSSWIPILNSGSVLDYFSERSNPFYDRTCNNEVVKMQRLTLEHLNQMVGIEYILLHAQEPILFIIRKQQRQSPAQVIPLADYYIIAGVIYQAPDLGSVINSRVLTAVHGIQSAFDEAMSYCRYHPSKGYWWHFKDHEEQGK

SEQ ID NO: 767764 - protein, 258 aa, Homo sapiens; identical to SEQ ID NO: 767759

SEQ ID NO: 767765 - protein, 140 aa, Homo sapiens; identical to SEQ ID NO: 767762

SEQ ID NO: 767766 - protein, 88 aa, Homo sapiens
QDGRIGTAPVYSSQREQCRRQGLGNCCLWAEFGLLSAFRDQDESEGYGGYFLIQKPEAVLFNEGSGNKACDVISNQSELLNCTSHIQC

SEQ ID NO: 767767 - protein, 116 aa, Homo sapiens
RGRVGHERVAGRRAGVSAGAPEPAAPDGRPQGEVHPDRSRAALPPAGAPGLHPRQKVPAAGPRLPGLRLCRVRAAHRAQHQEPAPVVLQTHPAAHQQVPRTRAEAHPGPAVPASSV

SEQ ID NO: 767768 - protein, 261 aa, Homo sapiens
AGASAMSELPGDVRAFLREHPSLRLQTDARKVRCILTGHELPCRLPELQVYTRGKKYQRLVRASPAFDYAEFEPHIVPSTKNPHQLFCKLTLRHINKCPEHVLRHTQGRRYQRALCKYEECQKQGVEYVPACLVHRRRRREDQMDGDGPRPREAFWEPTSSDEGGAASDDSMTDLYPPELFTRKDLGSTEDGDGTDDFLTDKEDEKAKPPREKATDEGRRETTVYRGLVQKRGKKQLGSLKKKFKSHHRKPKSFSSCKQPG

SEQ ID NO: 767769 - protein, 203 aa, Homo sapiens
MKKLNQITNIQRSIGRGKKTITIMRRSLIWNQKLSQIRLPAKKKEKKEKRKPTVAQQVMITKRPKENHQRKRRNVNIKKKAKNPKSPEVQAVKDWANQRCSSPKGSARNSLVKAKRKRSVSVCSKESPSSSSESESCDEAISDGPSTVTLEARNSSEKLPTELSKEGPSTKNTTADKLGIKSGFSLTPSKGKTSGTTSSYFRL

SEQ ID NO: 767770 - protein, 103 aa, Homo sapiens
DSVAGAEGATGRELGDEVQEVVESRSDRAFAFPHGSHRRVLNRGVISSNYSFKAPSGYHERIAHRGARREEGELSRPLLLHIKDERIILIAQPCSICHNMFPF

SEQ ID NO: 767771 - protein, 497 aa, Homo sapiens
PLGGCGWTFTTSYKLKRHLQSHDKLRPFGCPAEGCGKSFTTVYNLKAHMKGHEQENSFKCEVCEESFPTQAKLGAHQRSHFEPERPYQCAFSGCKKTFITVSALFSHNRAHFREQELFSCSFPGCSKQYDKACRLKIHLRSHTGERPFLCDFDGCGWNFTSMSKLLRHKRKHDDDRRFMCPVEGCGKSFTRAEHLKGHSITHLGTKPFVCPVAGCCARFSARSSLYIHSKKHLQDVDTWKSRCPISSCNKLFTSKHSMKTHMVKRHKVGQDLLAQLEAANSLTPSSELTSQRQNDLSDAEIVSLFSDVPDSTSAALLDTALVNSGILTIDVASVSSTLAGHLPANNNNSVGQAVDPPSLMATSDPPQSLDTSLFFGTAATGFQQSSLNMDEVSSVSVGPLGSLDSLAMKNSSPEPQALTPSSKLTVDTDTLTPSSTLCENSVSELLTPAKAEWSVHPNSDFFGQEGETQFGFPNAAGNHGSQKERNLITVTGSSFLV

SEQ ID NO: 767772 - protein, 391 aa, Homo sapiens
MQESQETHISNHLDEVVAAVSITHRKKFQNKLLQTALFQPPREKLHLCEEKAKSYSNSHEYKQAVHELVRCVALTRICYGDSHWKLAEAHVNLAQGYLQLKGLSLQAKQHAEKARQILANSIVPPYSENTDVFKFSIELFHTMGRALLSLQKFKEAAENLTKAERLSKELLQCGRIIKEEWIEIEARIRLSFAQVYQGQKKSKEALSHYQAALEYVEISKGETSRECVPILRELAGVEQALGLHDVSINHFLQAHLIILSRSPSQVEAADSAHIVAHAAVASGRHEHHDVAEQYFQESMAHLKDSEGMGRTKFLSIQDEFCHFLQMTGQKERATSILRESLEAKVEAFGDFSPEVAETYRLLGGADLAQGNHSGARKKLKKVKLEPVLTRD

SEQ ID NO: 767773 - protein, 161 aa, Homo sapiens
MQESQETHISNHLDEVVAAVSITHRKKFQNKLLQTALFQPPREKLHLCEEKAKSYSNSHEYKQAVHELVRCVALTRICYGDSHWKLAEAHVNLAQGYLQLKGLSLQAKQHAEKARQILANSIVPPYSENTDVFKFSIELFHTMGRALLSLQKYPFASNFYK

SEQ ID NO: 767774 - protein, 120 aa, Homo sapiens
GRVGPDAWCRPTRAVRYPLALWEKAAPELPYFRLFHGYQSVQRITKLIKQEPEGKSRCQDNCVIRSKKKRWSLALSPRLEYSGVILAHCNLCLPGSSDSPASASRVAGITGLAEGTVSTD

SEQ ID NO: 767775 - protein, 161 aa, Homo sapiens; identical to SEQ ID NO: 767773

SEQ ID NO: 767776 - protein, 393 aa, Homo sapiens
MQESQETHISNHLDEVVAAVSITHRKKFQNKLLQTALFQPPREKLHLCEEKAKSYSNSHEYKQAVHELVRCVALTRICYGDSHWKLAEAHVNLAQGYLQLKGLSLQAKQHAEKARQILANSIVPPYSENTDVFKFSIELFHTMGRALLSLQKFKEAAENLTKAERLSKELLQCGRIIKEEWIEIEARIRLSFAQVYQGQKKSKEALSHYQAALEYVEISKGETSRECVPILRELAGVEQALGLHDVSINHFLQAHLIILSRSPSQVEAADSAHIVAHAAVASGRHEHHDVAEQYFQESMAHLKDSEGMGRTKFLSIQDEFCHFLQMTGQKERATSILRESLEAKVEAFGDFSPEVAETYRLLGGADLAQGNHSGARKKLKKGDLSFLLSATLP

SEQ ID NO: 767777 - protein, 161 aa, Homo sapiens; identical to SEQ ID NO: 767773

SEQ ID NO: 767778 - protein, 161 aa, Homo sapiens; identical to SEQ ID NO: 767773

SEQ ID NO: 767779 - protein, 74 aa, Homo sapiens
GRVGPDAWCRPTRAVRYPLALWEKAAPELPYFRLFHGYQSVQRITKLIKQEPEGKSRCQDNCVIRSKKKRRQCI

SEQ ID NO: 767780 - protein, 953 aa, Homo sapiens
  misc_feature (77)..(77): Xaa can be any naturally occurring amino acid
  misc_feature (80)..(80): Xaa can be any naturally occurring amino acid
  misc_feature (91)..(91): Xaa can be any naturally occurring amino acid
  misc_feature (97)..(97): Xaa can be any naturally occurring amino acid
  misc_feature (101)..(101): Xaa can be any naturally occurring amino acid
MAPRARSASQDRLEEVAAPRPWPCSTSQDALSQLGQEGWHRARSDDYLSRATRSAEALGPGALVSPRFERCGWASQXFVXPATPRLPNSGXLPGPQXPNPXSGLQGLDDLGYIGYRSYSPSFQRRTGLLHALSFRDSPFGGLPTFNLAQSPASFPPEASEPPRVVRPEPSTRALEPPAEDRGDEVVLRQKPPTGRKVQLTPARQMNLGFGDESPEPEASGRGERLGRKVAPLATTEDSLASIPFIDEPTSPSIDLQAKHVPASAVVSSAMNSAPVLGTSPSSPTFTFTLGRHYSQDCSSIKAGRRSSYLLAITTERSKSCDDGLNTFRDEGRVLRRLPNRIPSLRMLRSFFTDGSLDSWGTSEDADAPSKRHSTSDLSDATFSDIRREGWLYYKQILTKKGKKAGSGLRQWKRVYAALRARSLSLSKERREPGPAAAGAAAAGAGEDEAAPVCIGSCLVDISYSETKRRHVFRLTTADFCEYLFQAEDRDDMLGWIRAIRENSRAEGEDPGCANQALISKKLNDYRKVSHSSGPKADSSPKGSRGLGGLKSEFLKQSAARGLRTQDLPAGSKDDSAAAPKTPWGINIIKKNKKAAPRAFGVRLEECQPATENQRVPLIVAACCRIVEARGLESTGIYRVPGNNAVVSSLQEQLNRGPGDINLQDERWQDLNVISSLLKSFFRKLPEPLFTDDKYNDFIEANRIEDARERMRTLRKLIRDLPGHYYETLKFLVGHLKTIADHSEKNKMEPRNLALVFGPTLVRTSEDNMTDMVTHMPDRYKIVETLIQHSDWFFSDEEDKGERTPVGDKEPQAVPNIEYLLPNIGRTVPPGDPGSADLLEIVKDSTTCSSAKSKGSWAPKKEPYAREMLAISFISAVNRKRKKRREARGLGSSTDDDSEQEAHKPGAGATAPGTQERPQGPLPGAVAPEAPGRLSPPAAPEERPAADTRSIVSG

SEQ ID NO: 767781 - protein, 87 aa, Homo sapiens
MLAISFISAVNRKRKKRREARGLGSSTDDDSEQEAHKPGAGATAPGTQERPQGPLPGAVAPEAPGRLSPPAAPEERPAADTRSIVSG

SEQ ID NO: 767782 - protein, 904 aa, Homo sapiens
  misc_feature (77)..(77): Xaa can be any naturally occurring amino acid
  misc_feature (80)..(80): Xaa can be any naturally occurring amino acid
  misc_feature (91)..(91): Xaa can be any naturally occurring amino acid
  misc_feature (97)..(97): Xaa can be any naturally occurring amino acid
  misc_feature (101)..(101): Xaa can be any naturally occurring amino acid
MAPRARSASQDRLEEVAAPRPWPCSTSQDALSQLGQEGWHRARSDDYLSRATRSAEALGPGALVSPRFERCGWASQXFVXPATPRLPNSGXLPGPQXPNPXSGLQGLDDLGYIGYRSYSPSFQRRTGLLHALSFRDSPFGGLPTFNLAQSPASFPPEASEPPRVVRPEPSTRALEPPAEDRGDEVVLRQKPPTGRKVQLTPARQMNLGFGDESPEPEASGRGERLGRKVAPLATTEDSLASIPFIDEPTSPSIDLQAKHVPASAVVSSAMNSAPVLGTSPSSPTFTFTLGRHYSQDCSSIKAGRRSSYLLAITTERSKSCDDGLNTFRDEGRVLRRLPNRIPSLRMLRSFFTDGSLDSWGTSEDADAPSKRHSTSDLSDATFSDIRREGWLYYKQILTKKGKKAGSGLRQWKRVYAALRARSLSLSKERREPGPAGRGLRRPAQAEDRDDMLGWIRAIRENSRAEGEDPGCANQALISKKLNDYRKVSHSSGPKADSSPKGSRGLGGLKSEFLKQSAARGLRTQDLPAGSKDDSAAAPKTPWGINIIKKNKKAAPRAFGVRLEECQPATENQRVPLIVAACCRIVEARGLESTGIYRVPGNNAVVSSLQEQLNRGPGDINLQDERWQDLNVISSLLKSFFRKLPEPLFTDDKYNDFIEANRIEDARERMRTLRKLIRDLPGHYYETLKFLVGHLKTIADHSEKNKMEPRNLALVFGPTLVRTSEDNMTDMVTHMPDRYKIVETLIQHSDWFFSDEEDKGERTPVGDKEPQAVPNIEYLLPNIGRTVPPGDPGSDSTTCSSAKSKGSWAPKKEPYAREMLAISFISAVNRKRKKRREARGLGSSTDDDSEQEAHKPGAGATAPGTQERPQGPLPGAVAPEAPGRLSPPAAPEERPAADTRSIVSG

SEQ ID NO: 767783 - protein, 854 aa, Homo sapiens
  misc_feature (77)..(77): Xaa can be any naturally occurring amino acid
  misc_feature (80)..(80): Xaa can be any naturally occurring amino acid
  misc_feature (91)..(91): Xaa can be any naturally occurring amino acid
  misc_feature (97)..(97): Xaa can be any naturally occurring amino acid
  misc_feature (101)..(101): Xaa can be any naturally occurring amino acid
MAPRARSASQDRLEEVAAPRPWPCSTSQDALSQLGQEGWHRARSDDYLSRATRSAEALGPGALVSPRFERCGWASQXFVXPATPRLPNSGXLPGPQXPNPXSGLQGLDDLGYIGYRSYSPSFQRRTGLLHALSFRDSPFGGLPTFNLAQSPASFPPEASEPPRVVRPEPSTRALEPPAEDRGDEVVLRQKPPTGRKVQLTPARQMNLGFGDESPEPEASGRGERLGRKVAPLATTEDSLASIPFIDEPTSPSIDLQAKHVPASAVVSSAMNSAPVLGTSPSSPTFTFTLGRHYSQDCSSIKAGRRSSYLLAITTERSKSCDDGLNTFRDEGRVLRRLPNRIPSLRMLRSFFTDGSLDSWGTSEDADAPSKRHSTSDLSDATFSDIRREGWLYYKQILTKKGKKAGSGLRQWKRVYAALRARSLSLSKERREPGPAAAGAAAAGAGEDEAAPVCIGSCLVDISYSETKRRHVFRLTTADFCEYLFQAEDRDDMLGWIRAIRENSRAEGEDPGCANQALISKKLNDYRKVSHSSGPKADSSPKGSRGLGGLKSEFLKQSAARGLRTQDLPAGSKDDSAAAPKTPWGINIIKKNKKAAPRAFGVRLEECQPATENQRVPLIVAACCRIVEARGLESTGIYRVPGNNAVVSSLQEQLNRGPGDINLQDERWQDLNVISSLLKSFFRKLPEPLFTDDKYNDFIEANRIEDARERMRTLRKLIRDLPGHYYETLKFLVGHLKTIADHSEKNKMEPRNLALVFGPTLVRTSEDNMTDMVTHMPDRYKIVETLIQHSDWFFSDEEDKGERTPVGDKEPQAVPNIEYLLPNIGRTVPPGDPGSDSTTCSSAKSKVRMKAILKA

SEQ ID NO: 767784 - protein, 323 aa, Homo sapiens
EAHDGALNAVGLFSLMVPFSSDLLNLGVHVLETGAGTPFLGSACSSDGIASQMNTAGLPQVRCTPECSCDKYNDFIEANRIEDARERMRTLRKLIRDLPGHYYETLKFLVGHLKTIADHSEKNKMEPRNLALVFGPTLVRTSEDNMTDMVTHMPDRYKIVETLIQHSDWFFSDEEDKGERTPVGDKEPQAVPNIEYLLPNIGRTVPPGDPGSDSTTCSSAKSKGSWAPKKEPYAREMLAISFISAVNRKRKKRREARGLGSSTDDDSEQEAHKPGAGATAPGTQERPQGPLPGAVAPEAPGRLSPPAAPEERPAADTRSIVSG

SEQ ID NO: 767785 - protein, 696 aa, Homo sapiens
  misc_feature (77)..(77): Xaa can be any naturally occurring amino acid
  misc_feature (80)..(80): Xaa can be any naturally occurring amino acid
  misc_feature (91)..(91): Xaa can be any naturally occurring amino acid
  misc_feature (97)..(97): Xaa can be any naturally occurring amino acid
  misc_feature (101)..(101): Xaa can be any naturally occurring amino acid
MAPRARSASQDRLEEVAAPRPWPCSTSQDALSQLGQEGWHRARSDDYLSRATRSAEALGPGALVSPRFERCGWASQXFVXPATPRLPNSGXLPGPQXPNPXSGLQGLDDLGYIGYRSYSPSFQRRTGLLHALSFRDSPFGGLPTFNLAQSPASFPPEASEPPRVVRPEPSTRALEPPAEDRGDEVVLRQKPPTGRKVQLTPARQMNLGFGDESPEPEASGRGERLGRKVAPLATTEDSLASIPFIDEPTSPSIDLQAKHVPASAVVSSAMNSAPVLGTSPSSPTFTFTLGRHYSQDCSSIKAGRRSSYLLAITTERSKSCDDGLNTFRDEGRVLRRLPNRIPSLRMLRSFFTDGSLDSWGTSEDADAPSKRHSTSDLSDATFSDIRREGWLYYKQILTKKGKKAGSGLRQWKRVYAALRARSLSLSKERREPGPAAAGAAAAGAGEDEAAPVCIGSCLVDISYSETKRRHVFRLTTADFCEYLFQAEDRDDMLGWIRAIRENSRAEGEDPGCANQALISKKLNDYRKVSHSSGPKADSSPKGSRGLGGLKSEFLKQSAARGLRTQDLPAGSKDDSAAAPKTPWGINIIKKNKKAAPRAFGVRLEECQPATENQRVPLIVAACCRIVEARGLESTGIYRVPGNNAVVSSLQEQLNRGPGDINLQDERWQDLNVISSLLKSFFRKLPEPLFTDGALLF

SEQ ID NO: 767786 - protein, 696 aa, Homo sapiens; identical to SEQ ID NO: 767785
  misc_feature (77)..(77): Xaa can be any naturally occurring amino acid
  misc_feature (80)..(80): Xaa can be any naturally occurring amino acid
  misc_feature (91)..(91): Xaa can be any naturally occurring amino acid
  misc_feature (97)..(97): Xaa can be any naturally occurring amino acid
  misc_feature (101)..(101): Xaa can be any naturally occurring amino acid

SEQ ID NO: 767787 - protein, 945 aa, Homo sapiens
  misc_feature (77)..(77): Xaa can be any naturally occurring amino acid
  misc_feature (80)..(80): Xaa can be any naturally occurring amino acid
  misc_feature (91)..(91): Xaa can be any naturally occurring amino acid
  misc_feature (97)..(97): Xaa can be any naturally occurring amino acid
  misc_feature (101)..(101): Xaa can be any naturally occurring amino acid
MAPRARSASQDRLEEVAAPRPWPCSTSQDALSQLGQEGWHRARSDDYLSRATRSAEALGPGALVSPRFERCGWASQXFVXPATPRLPNSGXLPGPQXPNPXSGLQGLDDLGYIGYRSYSPSFQRRTGLLHALSFRDSPFGGLPTFNLAQSPASFPPEASEPPRVVRPEPSTRALEPPAEDRGDEVVLRQKPPTGRKVQLTPARQMNLGFGDESPEPEASGRGERLGRKVAPLATTEDSLASIPFIDEPTSPSIDLQAKHVPASAVVSSAMNSAPVLGTSPSSPTFTFTLGRHYSQDCSSIKAGRRSSYLLAITTERSKSCDDGLNTFRDEGRVLRRLPNRIPSLRMLRSFFTDGSLDSWGTSEDADAPSKRHSTSDLSDATFSDIRREGWLYYKQILTKKGKKAGSGLRQWKRVYAALRARSLSLSKERREPGPAAAGAAAAGAGEDEAAPVCIGSCLVDISYSETKRRHVFRLTTADFCEYLFQAEDRDDMLGWIRAIRENSRAEGEDPGCANQALISKKLNDYRKVSHSSGPKADSSPKGSRGLGGLKSEFLKQSAARGLRTQDLPAGSKDDSAAAPKTPWGINIIKKNKKAAPRAFGVRLEECQPATENQRVPLIVAACCRIVEARGLESTGIYRVPGNNAVVSSLQEQLNRGPGDINLQDERWQDLNVISSLLKSFFRKLPEPLFTDDKYNDFIEANRIEDARERMRTLRKLIRDLPGHYYETLKFLVGHLKTIADHSEKNKMEPRNLALVFGPTLVRTSEDNMTDMVTHMPDRYKIVETLIQHSDWFFSDEEDKGERTPVGDKEPQAVPNIEYLLPNIGRTVPPGDPGSDSTTCSSAKSKGSWAPKKEPYAREMLAISFISAVNRKRKKRREARGLGSSTDDDSEQEAHKPGAGATAPGTQERPQGPLPGAVAPEAPGRLSPPAAPEERPAADTRSIVSG

SEQ ID NO: 767788 - protein, 343 aa, Homo sapiens
ADLEDPEAHERRVPLIVAACCRIVEARGLESTGIYRVPGNNAVVSSLQEQLNRGPGDINLQDERWQDLNVISSLLKSFFRKLPEPLFTDDKYNDFIEANRIEDARERMRTLRKLIRDLPGHYYETLKFLVGHLKTIADHSEKNKMEPRNLALVFGPTLVRTSEDNMTDMVTHMPDRYKIVETLIQHSDWFFSDEEDKGERTPVGDKEPQAVPNIEYLLPNIGRTVPPGDPGSDSTTCSSAKSKGSWAPKKEPYAREMLAISFISAVNRKRKKRREARGLGSSTDDDSEQEAHKPGAGATAPGTQERPQGPLPGAVAPEAPGRLSPPAAPEERPAADTRSIVSG

SEQ ID NO: 767789 - protein, 999 aa, Homo sapiens
  misc_feature (77)..(77): Xaa can be any naturally occurring amino acid
  misc_feature (80)..(80): Xaa can be any naturally occurring amino acid
  misc_feature (91)..(91): Xaa can be any naturally occurring amino acid
  misc_feature (97)..(97): Xaa can be any naturally occurring amino acid
  misc_feature (101)..(101): Xaa can be any naturally occurring amino acid
MAPRARSASQDRLEEVAAPRPWPCSTSQDALSQLGQEGWHRARSDDYLSRATRSAEALGPGALVSPRFERCGWASQXFVXPATPRLPNSGXLPGPQXPNPXSGLQGLDDLGYIGYRSYSPSFQRRTGLLHALSFRDSPFGGLPTFNLAQSPASFPPEASEPPRVVRPEPSTRALEPPAEDRGDEVVLRQKPPTGRKVQLTPARQMNLGFGDESPEPEASGRGERLGRKVAPLATTEDSLASIPFIDEPTSPSIDLQAKHVPASAVVSSAMNSAPVLGTSPSSPTFTFTLGRHYSQDCSSIKAGRRSSYLLAITTERSKSCDDGLNTFRDEGRVLRRLPNRIPSLRMLRSFFTDGSLDSWGTSEDADAPSKRHSTSDLSDATFSDIRREGWLYYKQILTKKGKKAGSGLRQWKRVYAALRARSLSLSKERREPGPAAAGAAAAGAGEDEAAPVCIGSCLVDISYSETKRRHVFRLTTADFCEYLFQAEDRDDMLGWIRAIRENSRAEGEDPGCANQALISKKLNDYRKVSHSSGPKADSSPKGSRGLGGLKSEFLKQSAARGLRTQDLPAGSKDDSAAAPKTPWGINIIKKNKKAAPRAFGVRLEECQPATENQRVPLIVAACCRIVEARGLESTGIYRVPGNNAVVSSLQEQLNRGPGDINLQDERWQDLNVISSLLKSFFRKLPEPLFTDGALLFLTCCNLGVHVLETGAGTPFLGSACSSDGIASQMNTAGLPQVRCTPECSCDKYNDFIEANRIEDARERMRTLRKLIRDLPGHYYETLKFLVGHLKTIADHSEKNKMEPRNLALVFGPTLVRTSEDNMTDMVTHMPDRYKIVETLIQHSDWFFSDEEDKGERTPVGDKEPQAVPNIEYLLPNIGRTVPPGDPGSDSTTCSSAKSKGSWAPKKEPYAREMLAISFISAVNRKRKKRREARGLGSSTDDDSEQEAHKPGAGATAPGTQERPQGPLPGAVAPEAPGRLSPPAAPEERPAADTRSIVSG

SEQ ID NO: 767790 - protein, 700 aa, Homo sapiens
  misc_feature (77)..(77): Xaa can be any naturally occurring amino acid
  misc_feature (80)..(80): Xaa can be any naturally occurring amino acid
  misc_feature (91)..(91): Xaa can be any naturally occurring amino acid
  misc_feature (97)..(97): Xaa can be any naturally occurring amino acid
  misc_feature (101)..(101): Xaa can be any naturally occurring amino acid
MAPRARSASQDRLEEVAAPRPWPCSTSQDALSQLGQEGWHRARSDDYLSRATRSAEALGPGALVSPRFERCGWASQXFVXPATPRLPNSGXLPGPQXPNPXSGLQGLDDLGYIGYRSYSPSFQRRTGLLHALSFRDSPFGGLPTFNLAQSPASFPPEASEPPRVVRPEPSTRALEPPAEDRGDEVVLRQKPPTGRKVQLTPARQMNLGFGDESPEPEASGRGERLGRKVAPLATTEDSLASIPFIDEPTSPSIDLQAKHVPASAVVSSAMNSAPVLGTSPSSPTFTFTLGRHYSQDCSSIKAGRRSSYLLAITTERSKSCDDGLNTFRDEGRVLRRLPNRIPSLRMLRSFFTDGSLDSWGTSEDADAPSKRHSTSDLSDATFSDIRREGWLYYKQILTKKGKKAGSGLRQWKRVYAALRARSLSLSKERREPGPAAAGAAAAGAGEDEAAPVCIGSCLVDISYSETKRRHVFRLTTADFCEYLFQAEDRDDMLGWIRAIRENSRAEGEDPGCANQALISKKLNDYRKVSHSSGPKADSSPKGSRGLGGLKSEFLKQSAARGLRTQDLPAGSKDDSAAAPKTPWGINIIKKNKKAAPRAFGVRLEECQPATENQRVPLIVAACCRIVEARGLESTGIYRVPGNNAVVSSLQEQLNRGPGDINLQDEVGEAGGSVEGGLRWCVGGAPLGEFCGLLCCMHCAL

SEQ ID NO: 767791 - protein, 104 aa, Homo sapiens
NIGRTVPPGDPGSGERRGLGVGRREVGHCIPEGPRCLARCPASLCHPSGALPCRPPWRWGWGGPSPSLGKSSLPRAHLLSAQLPRPGQGRSFVRPLSLVSFLSL

SEQ ID NO: 767792 - protein, 118 aa, Homo sapiens
MKYTFWGWVAVVKLKNADKVFAMKILNKWEMLKRAETACFREERDVLVNGDNKWITTLHYAFQDDNNLYLVMDYYVGGDLLTLLSKFEDRLPEDMARFYLAEMVIAIDSVHQLHYVHR

SEQ ID NO: 767793 - protein, 710 aa, Homo sapiens
MSGEVRLRQLEQFILDGPAQTNGQCFSVETLLDILICLYDECNNSPLRREKNILEYLEWAKPFTSKVKQMRLHREDFEILKVIGRGAFGEVAVVKLKNADKVFAMKILNKWEMLKRAETACFREERDVLVNGDNKWITTLHYAFQDDNNLYLVMDYYVGGDLLTLLSKFEDRLPEDMARFYLAEMVIAIDSVHQLHYVHRDIKPDNILMDMNGHIRLADFGSCLKLMEDGTVQSSVAVGTPDYISPEILQAMEDGKGRYGPECDWWSLGVCMYEMLYGETPFYAESLVETYGKIMNHKERFQFPAQVTDVSENAKDLIRRLICSREHRLGQNGIEDFKKHPFFSGIDWDNIRNCEAPYIPEVSSPTDTSNFDVDDDCLKNSETMPPPTHTAFSGHHLPFVGFTYTSSCVLSDRSCLRVTAGPTSLDLDVNVQRTLDNNLATEAYERRIKRLEQEKLELSRKLQESTQTVQALQYSTVDGPLTASKDLEIKNLKEEIEKLRKQVTESSHLEQQLEEANAVRQELDDAFRQIKAYEKQIKTLQQEREDLNKELVQASERLKNQSKELKDAHCQRKLAMQEFMEINERLTELHTQKQKLARHVRDKEEEVDLVMQKVESLRQELRRTERAKKELEVHTEALAAEASKDRKLREQSEHYSKQLENELEGLKQKQISYSPGVCSIEHQQEITKLKTDLEKKSIFYEEELSKKRKD

SEQ ID NO: 767794 - protein, 861 aa, Homo sapiens
MSGEVRLRQLEQFILDGPAQTNGQYFSVETLLDILICLYDECNNSPLRREKNILEYLEWAKPFTSKVKQMRLHREDFEILKVIGRGAFGEVAVVKLKNADKVFAMKILNKWEMLKRAETACFREERDVLVNGDNKWITTLHYAFQDDNNLYLVMDYYVGGDLLTLLSKFEDRLPEDMARFYLAEMVIAIDSVHQLHYVHRDIKPDNILMDMNGHIRLADFGSCLKLMEDGTVQSSVAVGTPDYISPEILQAMEDGKGRYGPECDWWSLGVCMYEMLYGETPFYAESLVETYGKIMNHKERFQFPAQVTDVSENAKDLIRRLICSREHRLGQNGIEDFKKHPFFSGIDWDNIRNCEAPYIPEVSSPTDTSNFDVDDDCLKNSETMPPPTHTAFSGHHLPFVGFTYTSSCVLSDRSCLRVTAGPTSLDLDVNVQRTLDNNLATEAYERRIKRLEQEKLELSRKLQESTQTVQALQYSTVDGPLTASKDLEIKNLKEEIEKLRKQVTESSHLEQQLEEANAVRQELDDAFRQIKAYEKQIKTLQQEREDLNKELVQASERLKNQSKELKDAHCQRKLAMQEFMEINERLTELHTQKQKLARHVRDKEEEVDLVMQKVESLRQELRRTERAKKELEVHTEALAAEASKDRKLREQSEHYSKQLENELEGLKQKQISYSPGVCSIEHQQEITKLKTDLEKKSIFYEEELSKREGIHANEIKNLKKELHDSEGQQLALNKEIMILKDKLEKTRRESQSEREEFESEFKQQYEREKVLLTEENKKLTSELDKLTTLYENLSIHNQQLEEEVKDLADKKESVAHWEAQITEIIQWVSDEKDARGYLQALASKMTEELEALRNSSLGTRA

SEQ ID NO: 767795 - protein, 627 aa, Homo sapiens
MKYTFWGWVAVVKLKNADKVFAMKILNKWEMLKRAETACFREERDVLVNGDNKWITTLHYAFQDDNNLYLVMDYYVGGDLLTLLSKFEDRLPEDMARFYLAEMVIAIDSVHQLHYVHRDIKPDNILMDMNGHIRLADFGSCLKLMEDGTVQSSVAVGTPDYISPEILQAMEDGKGRYGPECDWWSLGVCMYEMLYGETPFYAESLVETYGKIMNHKERFQFPAQVTDVSENAKDLIRRLICSREHRLGQNGIEDFKKHPFFSGIDWDNIRNCEAPYIPEVSSPTDTSNFDVDDDCLKNSETMPPPTHTAFSGHHLPFVGFTYTSSCVLSDRSCLRVTAGPTSLDLDVNVQRTLDNNLATEAYERRIKRLEQEKLELSRKLQESTQTVQALQYSTVDGPLTASKDLEIKNLKEEIEKLRKQVTESSHLEQQLEEANAVRQELDDAFRQIKAYEKQIKTLQQEREDLNKELVQASERLKNQSKELKDAHCQRKLAMQEFMEINERLTELHTQKQKLARHVRDKEEEVDLVMQKVESLRQELRRTERAKKELEVHTEALAAEASKDRKLREQSEHYSKQLENELEGLKQKQISYSPGVCSIEHQQEITKLKTDLEKKSIFYEEELSKREG

SEQ ID NO: 767796 - protein, 508 aa, Homo sapiens
SSFRRGWCRRVEKDRGPRRSVSFPRALSGNMAGVEEVAASGSHLNGDLDPDDREEGAASTAEEAAKKKRRKKKKSKGPSAAGEQEPDKESGASVDEVARQLERSALEDKERDEDDEDGDGDGDGATGKKKKKKKKKRGPKVQTDPPSVPICDLYPNGVFPKGQECEYPPTQDGRTAAWRTTSEEKKALDQASEEIWNDFREAAEAHRQVRKYVMSWIKPGMTMIEICEKLEDCSRKLIKENGLNAGLAFPTGCSLNNCAAHYTPNAGDTTVLQYDDICKIDFGTHISGRIIDCAFTVTFNPKYDTLLKAVKDATNTGIKCAGIDVRLCDVGEAIQEVMESYEVEIDGKTYQVKPIRNLNGHSIGQYRIHAGKTVPIVKGGEATRMEEGEVYAIETFGSTGKGVVHDDMECSHYMKNFDVGHVPIRLPRTKHLLNVINENFGTLAFCRRWLDRLGESKYLMALKNLCDLGIVDPYPPLCDIKGSYTAQFEHTILLRPTCKEVVSRGDDY

SEQ ID NO: 767797 - protein, 510 aa, Homo sapiens
VPRGSPLFSFYIGEKDRGPRRSVSFPRALSGNMAGVEEVAASGSHLNGDLDPDDREEGAASTAEEAAKKKRRKKKKSKGPSAAGEQEPDKESGASVDEVARQLERSALEDKERDEDDEDGDGDGDGATGKKKKKKKKKRGPKVQTDPPSVPICDLYPNGVFPKGQECEYPPTQDGRTAAWRTTSEEKKALDQASEEIWNDFREAAEAHRQVRKYVMSWIKPGMTMIEICEKLEDCSRKLIKENGLNAGLAFPTGCSLNNCAAHYTPNAGDTTVLQYDDICKIDFGTHISGRIIDCAFTVTFNPKYDTLLKAVKDATNTGIKCAGIDVRLCDVGEAIQEVMESYEVEIDGKTYQVKPIRNLNGHSIGQYRIHAGKTVPIVKGGEATRMEEGEVYAIETFGSTGKGVVHDDMECSHYMKNFDVGHVPIRLPRTKHLLNVINENFGTLAFCRRWLDRLGESKYLMALKNLCDLGIVDPYPPLCDIKGSYTAQFEHTILLRPTCKEVVSRGDDY

SEQ ID NO: 767798 - protein, 310 aa, Homo sapiens
SSFRRGWCRRVEKDRGPRRSVSFPRALSGNMAGVEEVAASGSHLNGDLDPDDREEGAASTAEEAAKKKRRKKKKSKGPSAAGEQEPDKESGASVDEVARQLERSALEDKERDEDDEDGDGDGDGATGKKKKKKKKKRGPKVQTDPPSVPICDLYPNGVFPKGQECEYPPTQDGRTAAWRTTSEEKKALDQASEEIWNDFREAAEAHRQVRKYVMSWIKPGMTMIEICEKLEDCSRKLIKENGLNAGLAFPTGCSLNNCAAHYTPNAGDTTVLQYDDICKIDFGTHISGRIIDCAFTVTFNPKYDTLLKAV

SEQ ID NO: 767799 - protein, 508 aa, Homo sapiens; identical to SEQ ID NO: 767796

SEQ ID NO: 767800 - protein, 508 aa, Homo sapiens; identical to SEQ ID NO: 767796

SEQ ID NO: 767801 - protein, 508 aa, Homo sapiens; identical to SEQ ID NO: 767796

SEQ ID NO: 767802 - protein, 508 aa, Homo sapiens; identical to SEQ ID NO: 767796

SEQ ID NO: 767803 - protein, 508 aa, Homo sapiens; identical to SEQ ID NO: 767796

SEQ ID NO: 767804 - protein, 508 aa, Homo sapiens; identical to SEQ ID NO: 767796

SEQ ID NO: 767805 - protein, 513 aa, Homo sapiens
  misc_feature (512)..(512): Xaa can be any naturally occurring amino acid
SSFRRGWCRRVEKDRGPRRSVSFPRALSGNMAGVEEVAASGSHLNGDLDPDDREEGAASTAEEAAKKKRRKKKKSKGPSAAGEQEPDKESGASVDEVARQLERSALEDKERDEDDEDGDGDGDGATGKKKKKKKKKRGPKVQTDPPSVPICDLYPNGVFPKGQECEYPPTQDGRTAAWRTTSEEKKALDQASEEIWNDFREAAEAHRQVRKYVMSWIKPGMTMIEICEKLEDCSRKLIKENGLNAGLAFPTGCSLNNCAAHYTPNAGDTTVLQYDDICKIDFGTHISGRIIDCAFTVTFNPKYDTLLKAVKDATNTGIKCAGIDVRLCDVGEAIQEVMESYEVEIDGKTYQVKPIRNLNGHSIGQYRIHAGKTVPIVKGGEATRMEEGEVYAIETFGSTGKGVVHDDMECSHYMKNFDVGHVPIRLPRTKHLLNVINENFGTLAFCRRWLDRLGESKYLMALKNLCDLGIVDPYPPLCDIKGSYTAQFEHTILLRPTCKEVVSPPRHCPPPXT

SEQ ID NO: 767806 - protein, 360 aa, Homo sapiens
SSFRRGWCRRVEKDRGPRRSVSFPRALSGNMAGVEEVAASGSHLNGDLDPDDREEGAASTAEEAAKKKRRKKKKSKGPSAAGEQEPDKESGASVDEVARQLERSALEDKERDEDDEDGDGDGDGATGKKKKKKKKKRGPKVQTDPPSVPICDLYPNGVFPKGQECEYPPTQDGRTAAWRTTSEEKKALDQASEEIWNDFREAAEAHRQVRKYVMSWIKPGMTMIEICEKLEDCSRKLIKENGLNAGLAFPTGCSLNNCAAHYTPNAGDTTVLQYDDICKIDFGTHISGRIIDCAFTVTFNPKYDTLLKAVKDATNTGIKCAGIDVRLCDVGEAIQEVMESYEVEIDGKTYQVKPMTYMGP

SEQ ID NO: 767807 - protein, 139 aa, Homo sapiens
SSFRRGWCRRVEKDRGPRRSVSFPRALSGNMAGVEEVAASGSHLNGDLDPDDREEGAASTAEEAAKKKRRKKKKSKGPSAAGEQEPDKESGASVDEVARQLERSALEDKERDEDDEDGDGDGDGATGKKKKKKKKKRGR

SEQ ID NO: 767808 - protein, 84 aa, Homo sapiens [sequence omitted]

SEQ ID NO: 767809 - protein, 745 aa, Homo sapiens
MERPPGLRPGAGGPWEMRERLGTGGFGNVCLYQHRELDLKIAIKSCRLELSTKNRERWCHEIQIMKKLNHANVVKACDVPEELNILIHDVPLLAMEYCSGGDLRKLLNKPENCCGLKESQILSLLSDIGSGIRYLHENKIIHRDLKPENIVLQDVGGKIIHKIIDLGYAKDVDQGSLCTSFVGTLQYLAPELFENKPYTATVDYWSFGTMVFECIAGYRPFLHHLQPFTWHEKIKKKDPKCIFACEEMSGEVRFSSHLPQPNSLCSLIVEPMENWLQLMLNWDPQQRGGPVDLTLKQPRCFVLMDHILNLKIVHILNMTSAKIISFLLPPDESLHSLQSRIERETGINTGSQELLSETGISLDPRKPASQCVLDGVRGCDSYMVYLFDKSKTVYEGPFASRSLSDCVNYIVQDSKIQLPIIQLRKVWAEAVHYVSGLKEDYSRLFQGQRAAMLSLLRYNANLTKMKNTLISASQQLKAKLEFFHKSIQLDLERYSEQMTYGISSEKMLKAWKEMEEKAIHYAEVGVIGYLEDQIMSLHAEIMELQKSPYGRRQGDLMESLEQRAIDLYKQLKHRPSDHSYSDSTEMVKIIVHTVQSQDRVLKELFGHLSKLLGCKQKIIDLLPKVEVALSNIKEADNTVMFMQGKRQKEIWHLLKIACTQSSARSLVGSSLEGAVTPQTSAWLPPTSAEHDHSLSCVVTPQDGETSAQMIEENLNCLGHLSTIIHEANEEQGNSMMNLDWSWLTE

SEQ ID NO: 767810 - protein, 741 aa, Homo sapiens
MERPPGLRPGAGGPWEMRERLGTGGFGNVCLYQHRELDLKIAIKSCRLELSTKNRERWCHEIQIMKKLNHANVVKACDVPEELNILIHDVPLLAMEYCSGGDLRKLLNKPENCCGLKESQILSLLSDIGSGIRYLHENKIIHRDLKPENIVLQDVGGKIIHKIIDLGYAKDVDQGSLCTSFVGTLQYLAPELFENKPYTATVDYWSFGTMVFECIAGYRPFLHHLQPFTWHEKIKKKDPKCIFACEEMSGEVRFSSHLPQPNSLCSLIVEPMENWLQLMLNWDPQQRGGPVDLTLKQPRCFVLMDHILNLKIVHILNMTSAKIISFLLPPDESLHSLQSRIERETGINTGSQELLSETGISLDPRKPASQCVLDGVRGCDSYMVYLFDKSKTVYEGPFASRSLSDCVNYIVQDSKIQLPIIQLRKVWAEAVHYVSGLKEDYSRLFQGQRAAMLSLLRYNANLTKMKNTLISASQQLKAKLEFFHKSIQLDLERYSEQMTYGISSEKMLKAWKEMEEKAIHYAEVGVIGYLEDQIMSLHAEIMELQKSPYGRRQGDLMESLEQRAIDLYKQLKHRPSDHSYSDSTEMVKIIVHTVQSQDRVLKELFGHLSKLLGCKQKIIDLLPKVEVALSNIKEADNTVMFMQGKRQKEIWHLLKIACTQSSARSLVGSSLEGAVTPQTSAWLPPTSAEHDHSLSCVVTPQDGLECSGTVLAHCNLRLPDSSSSPASASRVAGISGRLQHK

SEQ ID NO: 767811 - protein, 678 aa, Homo sapiens
MERPPGLRPGAGGPWEMRERLGTGGFGNVCLYQHRELDLKIAIKSCRLELSTKNRERWCHEIQIMKKLNHANVVKACDVPEELNILIHDVPLLAMEYCSGGDLRKLLNKPENCCGLKESQILSLLSDIGSGIRYLHENKIIHRDLKPENIVLQDVGGKIIHKIIDLGYAKDVDQGSLCTSFVGTLQYLAPELFENKPYTATVDYWSFGTMVFECIAGYRPFLHHLQPFTWHEKIKKKDPKCIFACEEMSGEVRFSSHLPQPNSLCSLIVEPMENWLQLMLNWDPQQRGGPVDLTLKQPRCFVLMDHILNLKIVHILNMTSAKIISFLLPPDESLHSLQSRIERETGINTGSQELLSETGISLDPRKPASQCVLDGVRGCDSYMVYLFDKSKTVYEGPFASRSLSDCVNYIVQDSKIQLPIIQLRKVWAEAVHYVSGLKEDYSRLFQGQRAAMLSLLRYNANLTKMKNTLISASQQLKAKLEFFHKSIQLDLERYSEQMTYGISSEKMLKAWKEMEEKAIHYAEVGVIGYLEDQIMSLHAEIMELQKSPYGRRQGDLMESLEQRAIDLYKQLKHRPSDHSYSDSTEMVKIIVHTVQSQDRVLKELFGHLSKLLGCKQKIIDLLPKVEVALSNIKEADNTVMFMQGKRQKEIWHLLKIACTQSSARSLVGSSLEGRLQHK

SEQ ID NO: 767812 - protein, 662 aa, Homo sapiens
MERPPGLRPGAGGPWEMRERLGTGGFGNVCLYQHRELDLKIAIKSCRLELSTKNRERWCHEIQIMKKLNHANVVKACDVPEELNILIHDVPLLAMEYCSGGDLRKLLNKPENCCGLKESQILSLLSDIGSGIRYLHENKIIHRDLKPENIVLQDVGGKIIHKIIDLGYAKDVDQGSLCTSFVGTLQYLAPELFENKPYTATVDYWSFGTMVFECIAGYRPFLHHLQPFTWHEKIKKKDPKCIFACEEMSGEVRFSSHLPQPNSLCSLIVEPMENWLQLMLNWDPQQRGGPVDLTLKQPRCFVLMDHILNLKIVHILNMTSAKIISFLLPPDESLHSLQSRIERETGINTGSQELLSETGISLDPRKPASQCVLDGVRGCDSYMVYLFDKSKTVYEGPFASRSLSDCVNYIVQDSKIQLPIIQLRKVWAEAVHYVSGLKEDYSRLFQGQRAAMLSLLRYNANLTKMKNTLISASQQLKAKLEFFHKSIQLDLERYSEQMTYGISSEKMLKAWKEMEEKAIHYAEVGVIGYLEDQIMSLHAEIMELQKSPYGRRQGDLMESLEQRAIDLYKQLKHRPSDHSYSDSTEMVKIIVHTVQSQDRVLKELFGHLSKLLGCKQKIIDLLPKVEVALSNIKEADNTVMFMQGKRQKEIWHLLKIACVSNY

SEQ ID NO: 767813 - protein, 814 aa, Homo sapiens
MERPPGLRPGAGGPWEMRERLGTGGFGNVCLYQHRELDLKIAIKSCRLELSTKNRERWCHEIQIMKKLNHANVVKACDVPEELNILIHDVPLLAMEYCSGGDLRKLLNKPENCCGLKESQILSLLSDIGSGIRYLHENKIIHRDLKPENIVLQDVGGKIIHKIIDLGYAKDVDQGSLCTSFVGTLQYLAPELFENKPYTATVDYWSFGTMVFECIAGYRPFLHHLQPFTWHEKIKKKDPKCIFACEEMSGEVRFSSHLPQPNSLCSLIVEPMENWLQLMLNWDPQQRGGPVDLTLKQPRCFVLMDHILNLKIVHILNMTSAKIISFLLPPDESLHSLQSRIERETGINTGSQELLSETGISLDPRKPASQCVLDGVRGCDSYMVYLFDKSKTVYEGPFASRSLSDCVNYIVQDSKIQLPIIQLRKVWAEAVHYVSGLKEDYSRLFQGQRAAMLSLLRYNANLTKMKNTLISASQQLKAKLEFFHKSIQLDLERYSEQMTYGISSEKMLKAWKEMEEKAIHYAEVGVIGYLEDQIMSLHAEIMELQKSPYGRRQGDLMESLEQRAIDLYKQLKHRPSDHSYSDSTEMVKIIVHTVQSQDRVLKELFGHLSKLLGCKQKIIDLLPKVEVALSNIKEADNTVMFMQGKRQKEIWHLLKIACTQSSARSLVGSSLEGAVTPQTSAWLPPTSAEHDHSLSCVVTPQDGETSAQMIEENLNCLGHLSTIIHEANEEQGNSMMVSFVWIWVPALAMLGAKGLTFHASLIWHLGCIWEIEELKRKEHLGNILNLKSLSAVTQGYTRIMSSIIFNNSIFGQIK

SEQ ID NO: 767814 - protein, 745 aa, Homo sapiens; identical to SEQ ID NO: 767809

SEQ ID NO: 767815 - protein, 564 aa, Homo sapiens
MCKVLFPEISETKLLHMHLIIIVSYEYHGMRMYCWISVFLASSELENPVHEKIKKKDPKCIFACEEMSGEVRFSSHLPQPNSLCSLIVEPMENWLQLMLNWDPQQRGGPVDLTLKQPRCFVLMDHILNLKIVHILNMTSAKIISFLLPPDESLHSLQSRIERETGINTGSQELLSETGISLDPRKPASQCVLDGVRGCDSYMVYLFDKSKTVYEGPFASRSLSDCVNYIVQDSKIQLPIIQLRKVWAEAVHYVSGLKEDYSRLFQGQRAAMLSLLRYNANLTKMKNTLISASQQLKAKLEFFHKSIQLDLERYSEQMTYGISSEKMLKAWKEMEEKAIHYAEVGVIGYLEDQIMSLHAEIMELQKSPYGRRQGDLMESLEQRAIDLYKQLKHRPSDHSYSDSTEMVKIIVHTVQSQDRVLKELFGHLSKLLGCKQKIIDLLPKVEVALSNIKEADNTVMFMQGKRQKEIWHLLKIACTQSSARSLVGSSLEGAVTPQTSAWLPPTSAEHDHSLSCVVTPQDGETSAQMIEENLNCLGHLSTIIHEANEEQGNSMMNLDWSWLTE

SEQ ID NO: 767816 - protein, 662 aa, Homo sapiens; identical to SEQ ID NO: 767812

SEQ ID NO: 767817 - protein, 321 aa, Homo sapiens
MERPPGLRPGAGGPWEMRERLGTGGFGNVCLYQHRELDLKIAIKSCRLELSTKNRERWCHEIQIMKKLNHANVVKACDVPEELNILIHDVPLLAMEYCSGGDLRKLLNKPENCCGLKESQILSLLSDIGSGIRYLHENKIIHRDLKPENIVLQDVGGKIIHKIIDLGYAKDVDQGSLCTSFVGTLQYLAPELFENKPYTATVDYWSFGTMVFECIAGYRPFLHHLQPFTWHEKIKKKDPKCIFACEEMSGEVRFSSHLPQPNSLCSLIVEPMENWLQLMLNWDPQQRGGPVDLTLKQPRCFVLMDHILNLKNRHTLNTTSC

SEQ ID NO: 767818 - protein, 66 aa, Homo sapiens
DTEATARPRSAWQRASSQTMALPLDQGALWWPCLGITEASHSCLLVTLLTMSPQLLSLYGLFFPRL

SEQ ID NO: 767819 - protein, 122 aa, Homo sapiens
PFSVTRHSATYKNHSLPKLVIISFLSVVKMSTVQIQCGILKARGHTQGDYGTQVQENRKTVLCYGILIINISSLFTRFKGSSVVTLNQGQVWWLTPVILALSEAKVGGSLELRSFKPSWARE

SEQ ID NO: 767820 - protein, 130 aa, Homo sapiens
ALGNVISALGDQSKKVVHVPYRDSKLTRLLQDSLGGNSQTIMIACVSPSDRDFMETLNTLKYANRARNIKNKVVVNQDKTSQQISALRAEIARLQMELMEYKAGKRVIGEDGAEGYSDLFRENAMLQKEN

SEQ ID NO: 767821 - protein, 93 aa, Homo sapiens
PFKPPKITFKTKIYHPNIDEKGQVCLPVISAENWKPATKTDQVIQSLIALVNDPQPEHPLRADLAEEYSKDRKKFCKNAEEFTKKYGEKRPVD

SEQ ID NO: 767822 - protein, 183 aa, Homo sapiens
MSKGITFSLKDSSHAYGLSGYFSFVLESRGSLLFSRKMSDNPPDPAYARHSGCKTQKACAFSQGVPSHDSGHNPLCPLLSHCPSTPNLPFYALLCDAGTGLCKCHFSFAHWLPLEYSRGCLQTWGIKKEQLLPVCFWLLSGSPQQCSHCLYMPSTSSFSGIVRASFIMPLPSRALADLRGLSI

SEQ ID NO: 767823 - protein, 1295 aa, Homo sapiens
PGGRGGGRVFPGAFPASPSDSLGQGNSQGPPRTPKPPRTQPRMAAQVTLEDALSNVDLLEELPLPDQQPCIEPPPSSLLYQPNFNTNFEDRNAFVTGIARYIEQATVHSSMNEMLEEGQEYAVMLYTWRSCSRAIPQVKCNEQPNRVEIYEKTVEVLEPEVTKLMNFMYFQRNAIERFCGEVRRLCHAERRKDFVSEAYLITLGKFINMFAVLDELKNMKCSVKNDHSAYKRAAQFLRKMADPQSIQESQNLSMFLANHNKITQSLQQQLEVISGYEELLADIVNLCVDYYENRMYLTPSEKHMLLKVMGFGLYLMDGSVSNIYKLDAKKRINLSKIDKYFKQLQVVPLFGDMQIELARYIKTSAHYEENKSRWTCTSSGSSPQYNICEQMIQIREDHMRFISELARYSNSEVVTGSGRQEAQKTDAEYRKLFDLALQGLQLLSQWSAHVMEVYSWKLVHPTDKYSNKDCPDSAEEYERATRYNYTSEEKFALVEVIAMIKGLQVLMGRMESVFNHAIRHTVYAALQDFSQVTLREPLRQAIKKKKNVIQSVLQAIRKTVCDWETGHEPFNDPALRGEKDPKSGFDIKVPRRAVGPSSTQLYMVRTMLESLIADKSGSKKTLRSSLEGPTILDIEKFHRESFFYTHLINFSETLQQCCDLSQLWFREFFLELTMGRRIQFPIEMSMPWILTDHILETKEASMMEYVLYSLDLYNDSAHYALTRFNKQFLYDEIEAEVNLCFDQFVYKLADQIFAYYKVMAGSLLLDKRLRSECKNQGATIHLPPSNRYETLLKQRHVQLLGRSIDLNRLITQRVSAAMYKSLELAIGRFESEDLTSIVELDGLLEINRMTHKLLSRYLTLDGFDAMFREANHNVSAPYGRITLHVFWELNYDFLPNYCYNGSTNRFVRTVLPFSQEFQRDKQPNAQPQYLHGSKALNLAYSSIYGSYRNFVGPPHFQVICRLLGYQGIAVVMEELLKVVKSLLQGTILQYVKTLMEVMPKICRLPRHEYGSPGILEFFHHQLKDIVEYAELKTVCFQNLREVGNAILFCLLIEQSLSLEEVCDLLHAAPFQNILPRVHVKEGERLDAKMKRLESKYAPLHLVPLIERLGTPQQIAIAREGDLLTKERLCCGLSMFEVILTRIRSFLDDPIWRGPLPSNGVMHVDECVEFHRLWSAMQFVYCIPVGTHEFTVEQCFGDGLHWAGCMIIVLLGQQRRFAVLDFCYHLLKVQKHDGKDEIIKNVPLKKMVERIRKFQILNDEIITILDKYLKSGDGEGTPVEHVRCFQPPIHQSLASS

SEQ ID NO: 767824 - protein, 263 aa, Homo sapiens
MVARLGGLYQPFVRTVLPFSQEFQRDKQPNAQPQYLHGSKALNLAYSSIYGSYRNFVGPPHFQVICRLLGYQGIAVVMEELLKVVKSLLQGTILQYVKTLMEVMPKICRLPRHEYGSPGILEFFHHQLKDIVEYAELKTVCFQNLREVGNAILFCLLIEQSLSLEEVCDLLHAAPFQNILPRVHVKEGERLDAKMKRLESKYAPLHLVPLIERLGTPQQIAIAREGDLLTKERLCCGLSMFEVSDRSGFWWPSGGLPRGGVPG

SEQ ID NO: 767825 - protein, 156 aa, Homo sapiens [sequence omitted]

SEQ ID NO: 767826 - protein, 95 aa, Homo sapiens
LKPVARADSLERLCHAERRKDFVSEAYLITLGKFINMFAVLDELKNMKCSVKNDHSAYKRAAQFLRKMADPQSIQESQNLSMFLANHNKITQSLP

SEQ ID NO: 767827 - protein, 1253 aa, Homo sapiens
MAAQVTLEDALSNVDLLEELPLPDQQPCIEPPPSSLLYQPNFNTNFEDRNAFVTGIARYIEQATVHSSMNEMLEEGQEYAVMLYTWRSCSRAIPQVKCNEQPNRVEIYEKTVEVLEPEVTKLMNFMYFQRNAIERFCGEVRRLCHAERRKDFVSEAYLITLGKFINMFAVLDELKNMKCSVKNDHSAYKRAAQFLRKMADPQSIQESQNLSMFLANHNKITQSLQQQLEVISGYEELLADIVNLCVDYYENRMYLTPSEKHMLLKVMGFGLYLMDGSVSNIYKLDAKKRINLSKIDKYFKQLQVVPLFGDMQIELARYIKTSAHYEENKSRWTCTSSGSSPQYNICEQMIQIREDHMRFISELARYSNSEVVTGSGRQEAQKTDAEYRKLFDLALQGLQLLSQWSAHVMEVYSWKLVHPTDKYSNKDCPDSAEEYERATRYNYTSEEKFALVEVIAMIKGLQVLMGRMESVFNHAIRHTVYAALQDFSQVTLREPLRQAIKKKKNVIQSVLQAIRKTVCDWETGHEPFNDPALRGEKDPKSGFDIKVPRRAVGPSSTQLYMVRTMLESLIADKSGSKKTLRSSLEGPTILDIEKFHRESFFYTHLINFSETLQQCCDLSQLWFREFFLELTMGRRIQFPIEMSMPWILTDHILETKEASMMEYVLYSLDLYNDSAHYALTRFNKQFLYDEIEAEVNLCFDQFVYKLADQIFAYYKVMAGSLLLDKRLRSECKNQGATIHLPPSNRYETLLKQRHVQLLGRSIDLNRLITQRVSAAMYKSLELAIGRFESEDLTSIVELDGLLEINRMTHKLLSRYLTLDGFDAMFREANHNVSAPYGRITLHVFWELNYDFLPNYCYNGSTNRFVRTVLPFSQEFQRDKQPNAQPQYLHGSKALNLAYSSIYGSYRNFVGPPHFQVICRLLGYQGIAVVMEELLKVVKSLLQGTILQYVKTLMEVMPKICRLPRHEYGSPGILEFFHHQLKDIVEYAELKTVCFQNLREVGNAILFCLLIEQSLSLEEVCDLLHAAPFQNILPRVHVKEGERLDAKMKRLESKYAPLHLVPLIERLGTPQQIAIAREGDLLTKERLCCGLSMFEVILTRIRSFLDDPIWRGPLPSNGVMHVDECVEFHRLWSAMQFVYCIPVGTHEFTVEQCFGDGLHWAGCMIIVLLGQQRRFAVLDFCYHLLKVQKHDGKDEIIKNVPLKKMVERIRKFQILNDEIITILDKYLKSGDGEGTPVEHVRCFQPPIHQSLASS

SEQ ID NO: 767828 - protein, 1253 aa, Homo sapiens; identical to SEQ ID NO: 767827

SEQ ID NO: 767829 - protein, 1008 aa, Homo sapiens
MGSEILSSELCRIIHFVAFQVMGFGLYLMDGSVSNIYKLDAKKRINLSKIDKYFKQLQVVPLFGDMQIELARYIKTSAHYEENKSRWTCTSSGSSPQYNICEQMIQIREDHMRFISELARYSNSEVVTGSGRQEAQKTDAEYRKLFDLALQGLQLLSQWSAHVMEVYSWKLVHPTDKYSNKDCPDSAEEYERATRYNYTSEEKFALVEVIAMIKGLQVLMGRMESVFNHAIRHTVYAALQDFSQVTLREPLRQAIKKKKNVIQSVLQAIRKTVCDWETGHEPFNDPALRGEKDPKSGFDIKVPRRAVGPSSTQLYMVRTMLESLIADKSGSKKTLRSSLEGPTILDIEKFHRESFFYTHLINFSETLQQCCDLSQLWFREFFLELTMGRRIQFPIEMSMPWILTDHILETKEASMMEYVLYSLDLYNDSAHYALTRFNKQFLYDEIEAEVNLCFDQFVYKLADQIFAYYKVMAGSLLLDKRLRSECKNQGATIHLPPSNRYETLLKQRHVQLLGRSIDLNRLITQRVSAAMYKSLELAIGRFESEDLTSIVELDGLLEINRMTHKLLSRYLTLDGFDAMFREANHNVSAPYGRITLHVFWELNYDFLPNYCYNGSTNRFVRTVLPFSQEFQRDKQPNAQPQYLHGSKALNLAYSSIYGSYRNFVGPPHFQVICRLLGYQGIAVVMEELLKVVKSLLQGTILQYVKTLMEVMPKICRLPRHEYGSPGILEFFHHQLKDIVEYAELKTVCFQNLREVGNAILFCLLIEQSLSLEEVCDLLHAAPFQNILPRVHVKEGERLDAKMKRLESKYAPLHLVPLIERLGTPQQIAIAREGDLLTKERLCCGLSMFEVILTRIRSFLDDPIWRGPLPSNGVMHVDECVEFHRLWSAMQFVYCIPVGTHEFTVEQCFGDGLHWAGCMIIVLLGQQRRFAVLDFCYHLLKVQKHDGKDEIIKNVPLKKMVERIRKFQILNDEIITILDKYLKSGDGEGTPVEHVRCFQPPIHQSLASS

SEQ ID NO: 767830 - protein, 943 aa, Homo sapiens
MSHCAWPRILFKMMMKCQSLRYSALTIQAILPGRFFKREVTGPGSFAHLWRWTVCAPSCVTFRMQQRFEGWPGFGHHRVSQTRSQAFCMQYGTPLLFRPPQYSWKLVHPTDKYSNKDCPDSAEEYERATRYNYTSEEKFALVEVIAMIKGLQVLMGRMESVFNHAIRHTVYAALQDFSQVTLREPLRQAIKKKKNVIQSVLQAIRKTVCDWETGHEPFNDPALRGEKDPKSGFDIKVPRRAVGPSSTQLYMVRTMLESLIADKSGSKKTLRSSLEGPTILDIEKFHRESFFYTHLINFSETLQQCCDLSQLWFREFFLELTMGRRIQFPIEMSMPWILTDHILETKEASMMEYVLYSLDLYNDSAHYALTRFNKQFLYDEIEAEVNLCFDQFVYKLADQIFAYYKVMAGSLLLDKRLRSECKNQGATIHLPPSNRYETLLKQRHVQLLGRSIDLNRLITQRVSAAMYKSLELAIGRFESEDLTSIVELDGLLEINRMTHKLLSRYLTLDGFDAMFREANHNVSAPYGRITLHVFWELNYDFLPNYCYNGSTNRFVRTVLPFSQEFQRDKQPNAQPQYLHGSKALNLAYSSIYGSYRNFVGPPHFQVICRLLGYQGIAVVMEELLKVVKSLLQGTILQYVKTLMEVMPKICRLPRHEYGSPGILEFFHHQLKDIVEYAELKTVCFQNLREVGNAILFCLLIEQSLSLEEVCDLLHAAPFQNILPRVHVKEGERLDAKMKRLESKYAPLHLVPLIERLGTPQQIAIAREGDLLTKERLCCGLSMFEVILTRIRSFLDDPIWRGPLPSNGVMHVDECVEFHRLWSAMQFVYCIPVGTHEFTVEQCFGDGLHWAGCMIIVLLGQQRRFAVLDFCYHLLKVQKHDGKDEIIKNVPLKKMVERIRKFQILNDEIITILDKYLKSGDGEGTPVEHVRCFQPPIHQSLASS

SEQ ID NO: 767831 - protein, 1295 aa, Homo sapiens; identical to SEQ ID NO: 767823

SEQ ID NO: 767832 - protein, 605 aa, Homo sapiens
MAEAAGHTAAVLCRYVLYSLDLYNDSAHYALTRFNKQFLYDEIEAEVNLCFDQFVYKLADQIFAYYKVMAGSLLLDKRLRSECKNQGATIHLPPSNRYETLLKQRHVQLLGRSIDLNRLITQRVSAAMYKSLELAIGRFESEDLTSIVELDGLLEINRMTHKLLSRYLTLDGFDAMFREANHNVSAPYGRITLHVFWELNYDFLPNYCYNGSTNRFVRTVLPFSQEFQRDKQPNAQPQYLHGSKALNLAYSSIYGSYRNFVGPPHFQVICRLLGYQGIAVVMEELLKVVKSLLQGTILQYVKTLMEVMPKICRLPRHEYGSPGILEFFHHQLKDIVEYAELKTVCFQNLREVGNAILFCLLIEQSLSLEEVCDLLHAAPFQNILPRVHVKEGERLDAKMKRLESKYAPLHLVPLIERLGTPQQIAIAREGDLLTKERLCCGLSMFEVILTRIRSFLDDPIWRGPLPSNGVMHVDECVEFHRLWSAMQFVYCIPVGTHEFTVEQCFGDGLHWAGCMIIVLLGQQRRFAVLDFCYHLLKVQKHDGKDEIIKNVPLKKMVERIRKFQILNDEIITILDKYLKSGDGEGTPVEHVRCFQPPIHQSLASS

SEQ ID NO: 767833 - protein, 599 aa, Homo sapiens
KRSCVGKLSVLWLLFEATLAALKQTVGFGKNTPQTGREAEVNLCFDQFVYKLADQIFAYYKVMAGSLLLDKRLRSECKNQGATIHLPPSNRYETLLKQRHVQLLGRSIDLNRLITQRVSAAMYKSLELAIGRFESEDLTSIVELDGLLEINRMTHKLLSRYLTLDGFDAMFREANHNVSAPYGRITLHVFWELNYDFLPNYCYNGSTNRFVRTVLPFSQEFQRDKQPNAQPQYLHGSKALNLAYSSIYGSYRNFVGPPHFQVICRLLGYQGIAVVMEELLKVVKSLLQGTILQYVKTLMEVMPKICRLPRHEYGSPGILEFFHHQLKDIVEYAELKTVCFQNLREVGNAILFCLLIEQSLSLEEVCDLLHAAPFQNILPRVHVKEGERLDAKMKRLESKYAPLHLVPLIERLGTPQQIAIAREGDLLTKERLCCGLSMFEVILTRIRSFLDDPIWRGPLPSNGVMHVDECVEFHRLWSAMQFVYCIPVGTHEFTVEQCFGDGLHWAGCMIIVLLGQQRRFAVLDFCYHLLKVQKHDGKDEIIKNVPLKKMVERIRKFQILNDEIITILDKYLKSGDGEGTPVEHVRCFQPPIHQSLASS

SEQ ID NO: 767834 - protein, 902 aa, Homo sapiens
PGGRGGGRVFPGAFPASPSDSLGQGNSQGPPRTPKPPRTQPRMAAQVTLEDALSNVDLLEELPLPDQQPCIEPPPSSLLYQPNFNTNFEDRNAFVTGIARYIEQATVHSSMNEMLEEGQEYAVMLYTWRSCSRAIPQVKCNEQPNRVEIYEKTVEVLEPEVTKLMNFMYFQRNAIERFCGEVRRLCHAERRKDFVSEAYLITLGKFINMFAVLDELKNMKCSVKNDHSAYKRAAQFLRKMADPQSIQESQNLSMFLANHNKITQSLQQQLEVISGYEELLADIVNLCVDYYENRMYLTPSEKHMLLKVMGFGLYLMDGSVSNIYKLDAKKRINLSKIDKYFKQLQVVPLFGDMQIELARYIKTSAHYEENKSRWTCTSSGSSPQYNICEQMIQIREDHMRFISELARYSNSEVVTGSGRQEAQKTDAEYRKLFDLALQGLQLLSQWSAHVMEVYSWKLVHPTDKYSNKDCPDSAEEYERATRYNYTSEEKFALVEVIAMIKGLQVLMGRMESVFNHAIRHTVYAALQDFSQVTLREPLRQAIKKKKNVIQSVLQAIRKTVCDWETGHEPFNDPALRGEKDPKSGFDIKVPRRAVGPSSTQLYMVRTMLESLIADKSGSKKTLRSSLEGPTILDIEKFHRESFFYTHLINFSETLQQCCDLSQLWFREFFLELTMGRRIQFPIEMSMPWILTDHILETKEASMMEYVLYSLDLYNDSAHYALTRFNKQFLYDEIEAEVNLCFDQFVYKLADQIFAYYKVMAGSLLLDKRLRSECKNQGATIHLPPSNRYETLLKQRHVQLLGRSIDLNRLITQRVSAAMYKSLELAIGRFESEDLTSIVELDGLLEINRMTHKLLSRYLTSCPTTATTALPTGLFGQCYHFLRNFKEISSLMHSLSICMDPRL

SEQ ID NO: 767835 - protein, 1295 aa, Homo sapiens; identical to SEQ ID NO: 767823

SEQ ID NO: 767836 - protein, 1277 aa, Homo sapiens
PGGRGGGRVFPGAFPASPSDSLGQGNSQGPPRTPKPPRTQPRMAAQVTLEDALSNVDLLEELPLPDQQPCIEPPPSSLLYQPNFNTNFEDRNAFVTGIARYIEQATVHSSMNEMLEEGQEYAVMLYTWRSCSRAIPQVKCNEQPNRVEIYEKTVEVLEPEVTKLMNFMYFQRNAIERFCGEVRRLCHAERRKDFVSEAYLITLGKFINMFAVLDELKNMKCSVKNDHSAYKRAAQFLRKMADPQSIQESQNLSMFLANHNKITQSLQQQLEVISGYEELLADIVNLCVDYYENRMYLTPSEKHMLLKVMGFGLYLMDGSVSNIYKLDAKKRINLSKIDKYFKQLQVVPLFGDMQIELARYIKTSAHYEENKSRWTCTSSGSSPQYNICEQMIQIREDHMRFISELARYSNSEVVTGSGRQEAQKTDAEYRKLFDLALQGLQLLSQWSAHVMEVYSWKLVHPTDKYSNKDCPDSAEEYERATRYNYTSEEKFALVEVIAMIKGLQVLMGRMESVFNHAIRHTVYAALQDFSQVTLREPLRQAIKKKKNVIQSVLQAIRKTVCDWETGHEPFNDPALRGEKDPKSGFDIKVPRRAVGPSSTQLYMVRTMLESLIADKSGSKKTLRSSLEGPTILDIEKFHRESFFYTHLINFSETLQQCCDLSQLWFREFFLELTMGRRIQFPIEMSMPWILTDHILETKEASMMEYVLYSLDLYNDSAHYALTRFNKQFLYDEIEAEVNLCFDQFVYKLADQIFAYYKVMAGSLLLDKRLRSECKNQGATIHLPPSNRYETLLKQRHVQLLGRSIDLNRLITQRVSAAMYKSLELAIGRFESEDLTSIVELDGLLEINRMTHKLLSRYLTLDGFDAMFREANHNVSAPYGRITLHVFWELNYDFLPNYCYNGSTNRFVRTVLPFSQEFQRDKQPNAQPQYLHGSKALNLAYSSIYGSYRNFVGPPHFQVICRLLGYQGIAVVMEELLKVVKSLLQGTILQYVKTLMEVMPKICRLPRHEYGSPGILEFFHHQLKDIVEYAELKTVCFQNLREVGNAILFCLLIEQSLSLEEVCDLLHAAPFQNILPRVHVKEGERLDAKMKRLESKYAPLHLVPLIERLGTPQQIAIAREGDLLTKERLCCGLSMFEVILTRIRSFLDDPIWRGPLPSNGVMHVDECVEFHRLWSAMQFVYCIPVGTHEFTVEQCFGDGLHWAGCMIIVLLGQQRRFAVLDFCYHLLKVQKHDGKDEIIKNVIITILDKYLKSGDGEGTPVEHVRCFQPPIHQSLASS

SEQ ID NO: 767837 - protein, 464 aa, Homo sapiens
MCIERMLWNNTDTRLTATKTGHRDRYLTLDGFDAMFREANHNVSAPYGRITLHVFWELNYDFLPNYCYNGSTNRFVRTVLPFSQEFQRDKQPNAQPQYLHGSKALNLAYSSIYGSYRNFVGPPHFQVICRLLGYQGIAVVMEELLKVVKSLLQGTILQYVKTLMEVMPKICRLPRHEYGSPGILEFFHHQLKDIVEYAELKTVCFQNLREVGNAILFCLLIEQSLSLEEVCDLLHAAPFQNILPRVHVKEGERLDAKMKRLESKYAPLHLVPLIERLGTPQQIAIAREGDLLTKERLCCGLSMFEVILTRIRSFLDDPIWRGPLPSNGVMHVDECVEFHRLWSAMQFVYCIPVGTHEFTVEQCFGDGLHWAGCMIIVLLGQQRRFAVLDFCYHLLKVQKHDGKDEIIKNVPLKKMVERIRKFQILNDEIITILDKYLKSGDGEGTPVEHVRCFQPPIHQSLASS

SEQ ID NO: 767838 - protein, 207 aa, Homo sapiens [sequence omitted]

SEQ ID NO: 767839 - protein, 1244 aa, Homo sapiens
PGGRGGGRVFPGAFPASPSDSLGQGNSQGPPRTPKPPRTQPRMAAQVTLEDALSNVDLLEELPLPDQQPCIEPPPSSLLYQPNFNTNFEDRNAFVTGIARYIEQATVHSSMNEMLEEGQEYAVMLYTWRSCSRAIPQVKCNEQPNRVEIYEKTVEVLEPEVTKLMNFMYFQRNAIERFCGEVRRLCHAERRKDFVSEAYLITLGKFINMFAVLDELKNMKCSVKNDHSAYKRAAQFLRKMADPQSIQESQNLSMFLANHNKITQSLQQQLEVISGYEELLADIVNLCVDYYENRMYLTPSEKHMLLKVMGFGLYLMDGSVSNIYKLDAKKRINLSKIDKYFKQLQVVPLFGDMQIELARYIKTSAHYEENKSRWTCTSSGSSPQYNICEQMIQIREDHMRFISELARYSNSEVVTGSGRQEAQKTDAEYRKLFDLALQGLQLLSQWSAHVMEVYSWKLVHPTDKYSNKDCPDSAEEYERATRYNYTSEEKFALVEVIAMIKGLQVLMGRMESVFNHAIRHTVYAALQDFSQVTLREPLRQAIKKKKNVIQSVLQAIRKTVCDWETGHEPFNDPALRGEKDPKSGFDIKVPRRAVGPSSTQLYMVRTMLESLIADKSGSKKTLRSSLEGPTILDIEKFHRESFFYTHLINFSETLQQCCDLSQLWFREFFLELTMGRRIQFPIEMSMPWILTDHILETKEASMMEYVLYSLDLYNDSAHYALTRFNKQFLYDEIEAEVNLCFDQFVYKLADQIFAYYKVMAGSLLLDKRLRSECKNQGATIHLPPSNRYETLLKQRHVQLLGRSIDLNRLITQRVSAAMYKSLELAIGRFESEDLTSIVELDGLLEINRMTHKLLSRYLTLDGFDAMFREANHNVSAPYGRITLHVFWELNYDFLPNYCYNGSTNRFVRTVLPFSQEFQRDKQPNAQPQYLHGSKALNLAYSSIYGSYRNFVGPPHFQVICRLLGYQGIAVVMEELLKVVKSLLQGTILQYVKTLMEVMPKICRLPRHEYGSPGILEFFHHQLKDIVEYAELKTVCFQNLREVGNAILFCLLIEQSLSLEEVCDLLHAAPFQNILPRVHVKEGERLDAKMKRLESKYAPLHLVPLIERLGTPQQIAIAREGDLLTKERLCCGLSMFEVILTRIRSFLDDPIWRGPLPSNGVMHVDECVEFHRLWSAMQFVYCIPVGTHEFTVEQCFGDGLHWAGCMIIVLLGQQRRFAVLDFCYHLLKVQKHDGKDEIIKNVVCG

SEQ ID NO: 767840 - protein, 717 aa, Homo sapiens
PGGRGGGRVFPGAFPASPSDSLGQGNSQGPPRTPKPPRTQPRMAAQVTLEDALSNVDLLEELPLPDQQPCIEPPPSSLLYQPNFNTNFEDRNAFVTGIARYIEQATVHSSMNEMLEEGQEYAVMLYTWRSCSRAIPQVKCNEQPNRVEIYEKTVEVLEPEVTKLMNFMYFQRNAIERFCGEVRRLCHAERRKDFVSEAYLITLGKFINMFAVLDELKNMKCSVKNDHSAYKRAAQFLRKMADPQSIQESQNLSMFLANHNKITQSLQQQLEVISGYEELLADIVNLCVDYYENRMYLTPSEKHMLLKVMGFGLYLMDGSVSNIYKLDAKKRINLSKIDKYFKQLQVVPLFGDMQIELARYIKTSAHYEENKSRWTCTSSGSSPQYNICEQMIQIREDHMRFISELARYSNSEVVTGSGRQEAQKTDAEYRKLFDLALQGLQLLSQWSAHVMEVYSWKLVHPTDKYSNKDCPDSAEEYERATRYNYTSEEKFALVEVIAMIKGLQVLMGRMESVFNHAIRHTVYAALQDFSQVTLREPLRQAIKKKKNVIQSVLQAIRKTVCDWETGHEPFNDPALRGEKDPKSGFDIKVPRRAVGPSSTQLYMVRTMLESLIADKSGSKKTLRSSLEGPTILDIEKFHRESFFYTHLINFSETLQQCCDLSQLWFREFFLELTMGRRIQFPIEMSMPWILTDHILETKEASMMECVSCGPVSSLCVW

SEQ ID NO: 767841 - protein, 1295 aa, Homo sapiens; identical to SEQ ID NO: 767823

SEQ ID NO: 767842 - protein, 221 aa, Homo sapiens
MSRACEEGERLDAKMKRLESKYAPLHLVPLIERLGTPQQIAIAREGDLLTKERLCCGLSMFEVILTRIRSFLDDPIWRGPLPSNGVMHVDECVEFHRLWSAMQFVYCIPVGTHEFTVEQCFGDGLHWAGCMIIVLLGQQRRFAVLDFCYHLLKVQKHDGKDEIIKNVPLKKMVERIRKFQILNDEIITILDKYLKSGDGEGTPVEHVRCFQPPIHQSLASS

SEQ ID NO: 767843 - protein, 508 aa, Homo sapiens
PGGRGGGRVFPGAFPASPSDSLGQGNSQGPPRTPKPPRTQPRMAAQVTLEDALSNVDLLEELPLPDQQPCIEPPPSSLLYQPNFNTNFEDRNAFVTGIARYIEQATVHSSMNEMLEEGQEYAVMLYTWRSCSRAIPQVKCNEQPNRVEIYEKTVEVLEPEVTKLMNFMYFQRNAIERFCGEVRRLCHAERRKDFVSEAYLITLGKFINMFAVLDELKNMKCSVKNDHSAYKRAAQFLRKMADPQSIQESQNLSMFLANHNKITQSLQQQLEVISGYEELLADIVNLCVDYYENRMYLTPSEKHMLLKVMGFGLYLMDGSVSNIYKLDAKKRINLSKIDKYFKQLQVVPLFGDMQIELARYIKTSAHYEENKSRWTCTSSGSSPQYNICEQMIQIREDHMRFISELARYSNSEVVTGSGRQEAQKTDAEYRKLFDLALQGLQLLSQWSAHVMEVYSWKLVHPTDKYSNKDCPDSAEEYERATRYNYTSEEKFALVEVRMLGRSLFLMSL

SEQ ID NO: 767844 - protein, 154 aa, Homo sapiens
VNSTDAGRGLASDRDHHAHVTKDVTTVNSSDHSGFSPASLNLTHTGSEDNLIHSVSQQKPEHLRRSRLPNSPGGTDVSHSAQRKLPSLYVRGRHNCAISFLKKFTNICKLSKIISLKLFHKPWNETGRALLRSKGFCYLLVNSNEILLKVKSWN

SEQ ID NO: 767845 - protein, 338 aa, Homo sapiens
MQRRRRSGFSRRPRILLQWRSTFVALSTNTTKVKEFGIDPQNMFEFWDWVGGRYSLWSAIGLSIALHVGFDNFEQLLSGAHWMDQHFRTTPLEKNAPVLLALLGIWYINCFGCETHAMLPYDQYLHRFAAYFQQGDMESNGKYITKSGTRVDHQTGPIVWGEPGTNGQHAFYQLIHQGTKMIPCDFLIPVQTQHPIRKGLHHKILLANFLAQTEALMRGKSTEEARKELQAAGKSPEDLERLLPHKVFEGNRPTNSIVFTKLTPFMLGALVAMYEHKIFVQGIIWDINSFDQWGVELGKQLAKKIEPELDGSAQVTSHDASTNGLINFIKQQREARVQ

SEQ ID NO: 767846 - protein, 338 aa, Homo sapiens; identical to SEQ ID NO: 767845

SEQ ID NO: 767847 - protein, 248 aa, Homo sapiens
MAALTRDPQFQKLQQWYREHRSELNLRRLFDANKDRFNHFSLTLNTNHGHILVDYSKNLVTEDVMRMLVDLAKSRGVEAARERMFNGEKINYTEGRAVLHVALRNRSNTPILVDGKDVMPEVNKVLDKMKSFCQRVRSGDWKGYTGKTITDVINIGIGGSDLGPLMVTEALKPYSSGGPRVWYVSNIDGTHIAKTLAQLNPESSLFIIASKTFTTQETITNAETAKEWFLQAAKDPSAVAKHFCCPVY

SEQ ID NO: 767848 - protein, 338 aa, Homo sapiens; identical to SEQ ID NO: 767845

SEQ ID NO: 767849 - protein, 248 aa, Homo sapiens; identical to SEQ ID NO: 767847

SEQ ID NO: 767850 - protein, 338 aa, Homo sapiens; identical to SEQ ID NO: 767845

SEQ ID NO: 767851 - protein, 307 aa, Homo sapiens
MAALTRDPQFQKLQQWYREHRSELNLRRLFDANKDRFNHFSLTLNTNHGHILVDYSKNLVTEDVMRMLVDLAKSRGVEAARERMFNGEKINYTEGRAVLHVALRNRSNTPILVDGKDVMPEVNKVLDKMKSFCQRVRSGDWKGYTGKTITDVINIGIGGSDLGPLMVTEALKPYSSGGPRVWYVSNIDGTHIAKTLAQLNPESSLFIIASKTFTTQETITNAETAKEWFLQAAKDPSAGGSTCACYNTPKYRVWELTSKMFQSGWGGPTGAHDSLRLVELQHGRAMGPSHLKTWGRSHRGTPAKPDR

SEQ ID NO: 767852 - protein, 223 aa, Homo sapiens
KGKVGGLGVGRFHHFSLTLNTNHGHILVDYSKNLVTEDVMRMLVDLAKSRGVEAARERMFNGEKINYTEGRAVLHVALRNRSNTPILVDGKDVMPEVNKVLDKMKSFCQRVRSGDWKGYTGKTITDVINIGIGGSDLGPLMVTEALKPYSSGGPRVWYVSNIDGTHIAKTLAQLNPESSLFIIASKTFTTQETITNAETAKEWFLQAAKDPSAVAKHFCCPVY

SEQ ID NO: 767853 - protein, 236 aa, Homo sapiens
MQRRRRSGFSRRPRILLQWRSTFVALSTNTTKVKEFGIDPQNMFEFWDWVGGRYSLWSAIGLSIALHVGFDNFEQLLSGAHWMDQHFRTTPLEKNAPVLLALLGIWYINCFGCETHAMLPYDQYLHRFAAYFQQGDMESNGKYITKSGTRVDHQTGPIVWGEPGTNGQHAFYQLIHQGTKMIPCDFLIPVQTQHPYGRSAHKILLAILGQKEPDEGKSTEGPKSSRWGQSQTWRCA

SEQ ID NO: 767854 - protein, 244 aa, Homo sapiens
  misc_feature (226)..(226): Xaa can be any naturally occurring amino acid
  misc_feature (239)..(239): Xaa can be any naturally occurring amino acid
  misc_feature (243)..(243): Xaa can be any naturally occurring amino acid
MAALTRDPQFQKLQQWYREHRSELNLRRLFDANKDRFNHFSLTLNTNHGHILVDYSKNLVTEDVMRMLVDLAKSRGVEAARERMFNGEKINYTEGRAVLHVALRNRSNTPILVDGKDVMPEVNKVLDKMKSFCQRVRSGDWKGYTGKTITDVINIGIGGSDLGPLMVTEALKPYSSGGPRVWYVSNIDGTHIAKTLAQLNPESSLFIIASKNLYYPRKTSPNCKKXGKGIVFSKPGKGXLPAXG

SEQ ID NO: 767855 - protein, 236 aa, Homo sapiens; identical to SEQ ID NO: 767853

SEQ ID NO: 767856 - protein, 207 aa, Homo sapiens
MAALTRDPQFQKLQQWYREHRSELNLRRLFDANKDRFNHFSLTLNTNHGHILVDYSKNLVTEDVMRMLVDLAKSRGVEAARERMFNGEKINYTEGRAVLHVALRNRSNTPILVDGKDVMPEVNKVLDKMKSFCQRVRSGDWKGYTGKTITDVINIGIGGSDLGPLMVTEALKPYSSGGPRVWYVSNIDGTHIVHIPCRKIKMPRRRL

SEQ ID NO: 767857 - protein, 216 aa, Homo sapiens
MAALTRDPQFQKLQQWYREHRSELNLRRLFDANKDRFNHFSLTLNTNHGHILVDYSKNLVTEDVMRMLVDLAKSRGVEAARERMFNGEKINYTEGRAVLHVALRNRSNTPILVDGKDVMPEVNKVLDKMKSFCQRVRSGDWKGYTGKTITDVINIGIGGSDLGPLMVTEALKPYSSGGPRVWYVSNHGHILVDYSKNLVTEDVMRMLVDLAKSRGV

SEQ ID NO: 767858 - protein, 142 aa, Homo sapiens
MAALTRDPQFQKLQQWYREHRSELNLRRLFDANKDRFNHFSLTLNTNHGHILVDYSKNLVTEDVMRMLVDLAKSRGVEAARERMFNGEKINYTEGRAVLHVALRNRSNTPILVDGKDVMPEVNKVLDTTQSTLWLWAWTTSP

SEQ ID NO: 767859 - protein, 307 aa, Homo sapiens
MAALTRDPQFQKLQQWYREHRSELNLRRLFDANKDRFNHFSLTLNTNHGHILVDYSKNLVTEDVMRMLVDLAKSRGVEAARERMFNGEKINYTEGRAVLHVALRNRSNTPILVDGKDVMPEVNKVLDKMKSFCQRVRSGDWKGYTGKTITDVINIGIGGSDLGPLMVTEALKPYSSGGPRVWYVSNIDGTHIAKTLAQLNPESSLFIIASKTFTTQETITNAETAKEWFLQAAKDPSAGGSTCACYNTPKYRVWELTSKMSSPGWGGPTGAHDSLRLVELQHGRAMGPSHLKTWGRSHRGTPAKPDR

SEQ ID NO: 767860 - protein, 338 aa, Homo sapiens; identical to SEQ ID NO: 767845

SEQ ID NO: 767861 - protein, 338 aa, Homo sapiens; identical to SEQ ID NO: 767845

SEQ ID NO: 767862 - protein, 338 aa, Homo sapiens; identical to SEQ ID NO: 767845

SEQ ID NO: 767863 - protein, 248 aa, Homo sapiens; identical to SEQ ID NO: 767847

SEQ ID NO: 767864 - protein, 235 aa, Homo sapiens
CAPLPVTAPDTLAERLHLVQNLVDLWHHLTLNTNHGHILVDYSKNLVTEDVMRMLVDLAKSRGVEAARERMFNGEKINYTEGRAVLHVALRNRSNTPILVDGKDVMPEVNKVLDKMKSFCQRVRSGDWKGYTGKTITDVINIGIGGSDLGPLMVTEALKPYSSGGPRVWYVSNIDGTHIAKTLAQLNPESSLFIIASKTFTTQETITNAETAKEWFLQAAKDPSAVAKHFCCPVY

SEQ ID NO: 767865 - protein, 236 aa, Homo sapiens; identical to SEQ ID NO: 767853

SEQ ID NO: 767866 - protein, 233 aa, Homo sapiens
  misc_feature (226)..(226): Xaa can be any naturally occurring amino acid
  misc_feature (233)..(233): Xaa can be any naturally occurring amino acid
MAALTRDPQFQKLQQWYREHRSELNLRRLFDANKDRFNHFSLTLNTNHGHILVDYSKNLVTEDVMRMLVDLAKSRGVEAARERMFNGEKINYTEGRAVLHVALRNRSNTPILVDGKDVMPEVNKVLDKMKSFCQRVRSGDWKGYTGKTITDVINIGIGGSDLGPLMVTEALKPYSSGGPRVWYVSNIDGTHIAKTLAQLNPESSLFIIASKLTTRRHHNAKRKDGXQRQDLLX

SEQ ID NO: 767867 - protein, 236 aa, Homo sapiens; identical to SEQ ID NO: 767853

SEQ ID NO: 767868 - protein, 338 aa, Homo sapiens; identical to SEQ ID NO: 767845

SEQ ID NO: 767869 - protein, 158 aa, Homo sapiens [sequence omitted]

SEQ ID NO: 767870 - protein, 177 aa, Homo sapiens
MPAWGALFLLWATAEATKDCPSPCTCRALETMGLWVDCRGHGLTALPALPARTRHLLLANNSLQSVPPGAFDHLPQLQTLDVTQNPWHCDCSLTYLRLWLEDRTPEALLQVRCASPSLAAHGPLGRLTGYQLGSCGWQLQASWVRPGVLWDVALVAVAALGLALLAGLLCATTEALD

SEQ ID NO: 767871 - protein, 621 aa, Homo sapiens
AAEQPGNGGGARSPRVSRMASASTSKYNSHSLENESIKRTSRDGVNRDLTEAVPRLPGETLITDKEVIYICPFNGPIKGRVYITNYRLYLRSLETDSSLILDVPLGVISRIEKMGGATSRGENSYGLDITCKDMRNLRFALKQEGHSRRDMFEILTRYAFPLAHSLPLFAFLNEEKFNVDGWTVYNPVEEYRRQGLPNHHWRITFINKCYELCDTYPALLVVPYRASDDDLRRVATFRSRNRIPVLSWIHPENKTVIVRCSQPLVGMSGKRNKDDEKYLDVIRETNKQISKLTIYDARPSVNAVANKATGGGYESDDAYHNAELFFLDIHNIHVMRESLKKVKDIVYPNVEESHWLSSLESTHWLEHIKLVLTGAIQVADKVSSGKSSVLVHCSDGWDRTAQLTSLAMLMLDSFYRSIEGFEILVQKEWISFGHKFASRIGHGDKNHTDADRSPIFLQFIDCVWQMSKQFPTAFEFNEQFLIIILDHLYSCRFGTFLFNCESARERQKVTERTVSLWSLINSNKEKFKNPFYTKEINRVLYPVASMRHLELWVNYYIRWNPRIKQQQPNPVEQRYMELLALRDEYIKRLEELQLANSAKLSDPPTSPSSPSQMMPHVQTHF

SEQ ID NO: 767872 - protein, 201 aa, Homo sapiens
MGGATSRGENSYGLDITCKDMRNLRFALKQEGHSRRDMFEILTRYAFPLAHSLPLFAFLNEEKFNVDGWTVYNPVEEYRRQGLPNHHWRITFINKCYELCDTYPALLVVPYRASDDDLRRVATFRSRNRIPVLSWIHPENKTVIVRCSQPLVGMSGKRNKDDEKYLDVIRETNKQISKLTIYDARPSVNAVANKVSGLNDV

SEQ ID NO: 767873 - protein, 621 aa, Homo sapiens; identical to SEQ ID NO: 767871

SEQ ID NO: 767874 - protein, 621 aa, Homo sapiens; identical to SEQ ID NO: 767871

SEQ ID NO: 767875 - protein, 509 aa, Homo sapiens
AAEQPGNGGGARSPRVSRMASASTSKYNSHSLENESIKRTSRDGVNRDLTEAVPRLPGETLITDKEVIYICPFNGPIKGRVYITNYRLYLRSLETDSSLILDVPLGVISRIEKMGGATSRGENSYGLDITCKDMRNLRFALKQEGHSRRDMFEILTRYAFPLAHSLPLFAFLNEEKFNVDGWTVYNPVEEYRRQGLPNHHWRITFINKCYELCDTYPALLVVPYRASDDDLRRVATFRSRNRIPVLSWIHPENKTVIVRCSQPLVGMSGKRNKDDEKYLDVIRETNKQISKLTIYDARPSVNAVANKATGGGYESDDAYHNAELFFLDIHNIHVMRESLKKVKDIVYPNVEESHWLSSLESTHWLEHIKLVLTGAIQVADKVSSGKSSVLVHCSDGWDRTAQLTSLAMLMLDSFYRSIEGFEILVQKEWISFGHKFASRIGHGDKNHTDADRSPIFLQFIDCVWQMSKQFTFQSFANDAPCANSLLRGDPGTALELEIKAIADFHLGHL

SEQ ID NO: 767876 - protein, 621 aa, Homo sapiens; identical to SEQ ID NO: 767871

SEQ ID NO: 767877 - protein, 967 aa, Homo sapiens
LGYVAERARWGGRFGVKEQTLHKMAAVAAVAARRRRSWASLVLAFLGVCLGITLAVDRSNFKTCEESSFCKRQRSIRPGLSPYRALLDSLQLGPDSLTVHLIHEVTKVLLVLELQGLQKNMTRFRIDELEPRRPRYRVPDVLVADPPIARLSVSGRDENSVELTMAEGPYKIILTARPFRLDLLEDRSLLLSVNARGLLEFEHQRAPRVSQGSKDPAEGDGAQPEETPRDGDKPEETQGKAEKDEPGAWEETFKTHSDSKPYGPMSVGLDFSLPGMEHVYGIPEHADNLRLKVTEGGEPYRLYNLDVFQYELYNPMALYGSVPVLLAHNPHRDLGIFWLNAAETWVDISSNTAGKTLFGKMMDYLQGSGETPQTDVRWMSETGIIDVFLLLGPSISDVFRQYASLTGTQALPPLFSLGYHQSRWNYRDEADVLEVDQGFDDHNLPCDVIWLDIEHADGKRYFTWDPSRFPQPRTMLERLASKRRKLVAIVDPHIKVDSGYRVHEELRNLGLYVKTRDGSDYEGWCWPGSAGYPDFTNPTMRAWWANMFSYDNYEGSAPNLFVWNDMNEPSVFNGPEVTMLKDAQHYGGWEHRDVHNIYGLYVHMATADGLRQRSGGMERPFVLARAFFAGSQRFGAVWTGDNTAEWDHLKISIPMCLSLGLVGLSFCGADVGGFFKNPEPELLVRWYQMGAYQPFFRAHAHLDTGRREPWLLPSQHNDIIRDALGQRYSLLPFWYTLLYQAHREGIPVMRPLWVQYPQDVTTFNIDDQYLLGDALLVHPVSDSGAHGVQVYLPGQGEVWYDIQSYQKHHGPQTLYLPVTLSSIPVFQRGGTIVPRWMRVRRSSECMKDDPITLFVALSPQGTAQGELFLDDGHTFNYQTRQEFLLRRFSFSGNTLVSSSADPEGHFETPIWIERVVIIGAGKPAAVVLQTKGSPESRLSFQHDPETSVLVLRKPGINVASDWSIHLR

SEQ ID NO: 767878 - protein, 953 aa, Homo sapiens
RLYRPGMLGCGGSGSGGAYEGWSWASLVLAFLGVCLGITLAVDRSNFKTCEESSFCKRQRSIRPGLSPYRALLDSLQLGPDSLTVHLIHEVTKVLLVLELQGLQKNMTRFRIDELEPRRPRYRVPDVLVADPPIARLSVSGRDENSVELTMAEGPYKIILTARPFRLDLLEDRSLLLSVNARGLLEFEHQRAPRVSQGSKDPAEGDGAQPEETPRDGDKPEETQGKAEKDEPGAWEETFKTHSDSKPYGPMSVGLDFSLPGMEHVYGIPEHADNLRLKVTEGGEPYRLYNLDVFQYELYNPMALYGSVPVLLAHNPHRDLGIFWLNAAETWVDISSNTAGKTLFGKMMDYLQGSGETPQTDVRWMSETGIIDVFLLLGPSISDVFRQYASLTGTQALPPLFSLGYHQSRWNYRDEADVLEVDQGFDDHNLPCDVIWLDIEHADGKRYFTWDPSRFPQPRTMLERLASKRRKLVAIVDPHIKVDSGYRVHEELRNLGLYVKTRDGSDYEGWCWPGSAGYPDFTNPTMRAWWANMFSYDNYEGSAPNLFVWNDMNEPSVFNGPEVTMLKDAQHYGGWEHRDVHNIYGLYVHMATADGLRQRSGGMERPFVLARAFFAGSQRFGAVWTGDNTAEWDHLKISIPMCLSLGLVGLSFCGADVGGFFKNPEPELLVRWYQMGAYQPFFRAHAHLDTGRREPWLLPSQHNDIIRDALGQRYSLLPFWYTLLYQAHREGIPVMRPLWVQYPQDVTTFNIDDQYLLGDALLVHPVSDSGAHGVQVYLPGQGEVWYDIQSYQKHHGPQTLYLPVTLSSIPVFQRGGTIVPRWMRVRRSSECMKDDPITLFVALSPQGTAQGELFLDDGHTFNYQTRQEFLLRRFSFSGNTLVSSSADPEGHFETPIWIERVVIIGAGKPAAVVLQTKGSPESRLSFQHDPETSVLVLRKPGINVASDWSIHLR

SEQ ID NO: 767879 - protein, 940 aa, Homo sapiens
MWTLRTDSWSWASLVLAFLGVCLGITLAVDRSNFKTCEESSFCKRQRSIRPGLSPYRALLDSLQLGPDSLTVHLIHEVTKVLLVLELQGLQKNMTRFRIDELEPRRPRYRVPDVLVADPPIARLSVSGRDENSVELTMAEGPYKIILTARPFRLDLLEDRSLLLSVNARGLLEFEHQRAPRVSQGSKDPAEGDGAQPEETPRDGDKPEETQGKAEKDEPGAWEETFKTHSDSKPYGPMSVGLDFSLPGMEHVYGIPEHADNLRLKVTEGGEPYRLYNLDVFQYELYNPMALYGSVPVLLAHNPHRDLGIFWLNAAETWVDISSNTAGKTLFGKMMDYLQGSGETPQTDVRWMSETGIIDVFLLLGPSISDVFRQYASLTGTQALPPLFSLGYHQSRWNYRDEADVLEVDQGFDDHNLPCDVIWLDIEHADGKRYFTWDPSRFPQPRTMLERLASKRRKLVAIVDPHIKVDSGYRVHEELRNLGLYVKTRDGSDYEGWCWPGSAGYPDFTNPTMRAWWANMFSYDNYEGSAPNLFVWNDMNEPSVFNGPEVTMLKDAQHYGGWEHRDVHNIYGLYVHMATADGLRQRSGGMERPFVLARAFFAGSQRFGAVWTGDNTAEWDHLKISIPMCLSLGLVGLSFCGADVGGFFKNPEPELLVRWYQMGAYQPFFRAHAHLDTGRREPWLLPSQHNDIIRDALGQRYSLLPFWYTLLYQAHREGIPVMRPLWVQYPQDVTTFNIDDQYLLGDALLVHPVSDSGAHGVQVYLPGQGEVWYDIQSYQKHHGPQTLYLPVTLSSIPVFQRGGTIVPRWMRVRRSSECMKDDPITLFVALSPQGTAQGELFLDDGHTFNYQTRQEFLLRRFSFSGNTLVSSSADPEGHFETPIWIERVVIIGAGKPAAVVLQTKGSPESRLSFQHDPETSVLVLRKPGINVASDWSIHLR

SEQ ID NO: 767880 - protein, 958 aa, Homo sapiens
MWTLRTDSWSWASLVLAFLGVCLGITLAVDRSNFKTCEESSFCKRQRSIRPGLSPYRALLDSLQLGPDSLTVHLIHEVTKVLLVLELQGLQKNMTRFRIDELEPRRPRYRVPDVLVADPPIARLSVSGRDENSVELTMAEGPYKIILTARPFRLDLLEDRSLLLSVNARGLLEFEHQRAPRVSPSSLPPLDWSRQLSYLSRQGSKDPAEGDGAQPEETPRDGDKPEETQGKAEKDEPGAWEETFKTHSDSKPYGPMSVGLDFSLPGMEHVYGIPEHADNLRLKVTEGGEPYRLYNLDVFQYELYNPMALYGSVPVLLAHNPHRDLGIFWLNAAETWVDISSNTAGKTLFGKMMDYLQGSGETPQTDVRWMSETGIIDVFLLLGPSISDVFRQYASLTGTQALPPLFSLGYHQSRWNYRDEADVLEVDQGFDDHNLPCDVIWLDIEHADGKRYFTWDPSRFPQPRTMLERLASKRRKLVAIVDPHIKVDSGYRVHEELRNLGLYVKTRDGSDYEGWCWPGSAGYPDFTNPTMRAWWANMFSYDNYEGSAPNLFVWNDMNEPSVFNGPEVTMLKDAQHYGGWEHRDVHNIYGLYVHMATADGLRQRSGGMERPFVLARAFFAGSQRFGAVWTGDNTAEWDHLKISIPMCLSLGLVGLSFCGADVGGFFKNPEPELLVRWYQMGAYQPFFRAHAHLDTGRREPWLLPSQHNDIIRDALGQRYSLLPFWYTLLYQAHREGIPVMRPLWVQYPQDVTTFNIDDQYLLGDALLVHPVSDSGAHGVQVYLPGQGEVWYDIQSYQKHHGPQTLYLPVTLSSIPVFQRGGTIVPRWMRVRRSSECMKDDPITLFVALSPQGTAQGELFLDDGHTFNYQTRQEFLLRRFSFSGNTLVSSSADPEGHFETPIWIERVVIIGAGKPAAVVLQTKGSPESRLSFQHDPETSVLVLRKPGINVASDWSIHLR

SEQ ID NO: 767881 - protein, 684 aa, Homo sapiens
RLYRPGMLGCGGSGSGGAYEGWSWASLVLAFLGVCLGITLAVDRSNFKTCEESSFCKRQRSIRPGLSPYRALLDSLQLGPDSLTVHLIHEVTKVLLVLELQGLQKNMTRFRIDELEPRRPRYRVPDVLVADPPIARLSVSGRDENSVELTMAEGPYKIILTARPFRLDLLEDRSLLLSVNARGLLEFEHQRAPRVSQGSKDPAEGDGAQPEETPRDGDKPEETQGKAEKDEPGAWEETFKTHSDSKPYGPMSVGLDFSLPGMEHVYGIPEHADNLRLKVTEGGEPYRLYNLDVFQYELYNPMALYGSVPVLLAHNPHRDLGIFWLNAAETWVDISSNTAGKTLFGKMMDYLQGSGETPQTDVRWMSETGIIDVFLLLGPSISDVFRQYASLTGTQALPPLFSLGYHQSRWNYRDEADVLEVDQGFDDHNLPCDVIWLDIEHADGKRYFTWDPSRFPQPRTMLERLASKRRKLVAIVDPHIKVDSGYRVHEELRNLGLYVKTRDGSDYEGWCWPGSAGYPDFTNPTMRAWWANMFSYDNYEGSAPNLFVWNDMNEPSVFNGPEVTMLKDAQHYGGWEHRDVHNIYGLYVHMATADGLRQRSGGMERPFVLARAFFAGSQRFGAVWTGDNTAEWDHLKISIPMCLSLGLVGLSFCGADGCLPAILPGTCPLGHWATRAMAVTISAQ

SEQ ID NO: 767882 - protein, 953 aa, Homo sapiens; identical to SEQ ID NO: 767878

SEQ ID NO: 767883 - protein, 428 aa, Homo sapiens
HFLVSELGHSYDNYEGSAPNLFVWNDMNEPSVFNGPEVTMLKDAQHYGGWEHRDVHNIYGLYVHMATADGLRQRSGGMERPFVLARAFFAGSQRFGAVWTGDNTAEWDHLKISIPMCLSLGLVGLSFCGADVGGFFKNPEPELLVRWYQMGAYQPFFRAHAHLDTGRREPWLLPSQHNDIIRDALGQRYSLLPFWYTLLYQAHREGIPVMRPLWVQYPQDVTTFNIDDQYLLGDALLVHPVSDSGAHGVQVYLPGQGEVWYDIQSYQKHHGPQTLYLPVTLSSIPVFQRGGTIVPRWMRVRRSSECMKDDPITLFVALSPQGTAQGELFLDDGHTFNYQTRQEFLLRRFSFSGNTLVSSSADPEGHFETPIWIERVVIIGAGKPAAVVLQTKGSPESRLSFQHDPETSVLVLRKPGINVASDWSIHLR

SEQ ID NO: 767884 - protein, 364 aa, Homo sapiens
MATADGLRQRSGGMERPFVLARAFFAGSQRFGAVWTGDNTAEWDHLKISIPMCLSLGLVGLSFCGADVGGFFKNPEPELLVRWYQMGAYQPFFRAHAHLDTGRREPWLLPSQHNDIIRDALGQRYSLLPFWYTLLYQAHREGIPVMRPLWVQYPQDVTTFNIDDQYLLGDALLVHPVSDSGAHGVQVYLPGQGEVWYDIQSYQKHHGPQTLYLPVTLSSIPVFQRGGTIVPRWMRVRRSSECMKDDPITLFVALSPQGTAQGELFLDDGHTFNYQTRQEFLLRRFSFSGNTLVSSSADPEGHFETPIWIERVVIIGAGKPAAVVLQTKGSPESRLSFQHDPETSVLVLRKPGINVASDWSIHLR

SEQ ID NO: 767885 - protein, 308 aa, Homo sapiens
GSPAWRFRVADVGGFFKNPEPELLVRWYQMGAYQPFFRAHAHLDTGRREPWLLPSQHNDIIRDALGQRYSLLPFWYTLLYQAHREGIPVMRPLWVQYPQDVTTFNIDDQYLLGDALLVHPVSDSGAHGVQVYLPGQGEVWYDIQSYQKHHGPQTLYLPVTLSSIPVFQRGGTIVPRWMRVRRSSECMKDDPITLFVALSPQGTAQGELFLDDGHTFNYQTRQEFLLRRFSFSGNTLVSSSADPEGHFETPIWIERVVIIGAGKPAAVVLQTKGSPESRLSFQHDPETSVLVLRKPGINVASDWSIHLR

SEQ ID NO: 767886 - protein, 953 aa, Homo sapiens; identical to SEQ ID NO: 767878

SEQ ID NO: 767887 - protein, 292 aa, Homo sapiens
HSFCGADVVSRAACALVPDGCLPVTCLDTGRREPWLLPSQHNDIIRDALGQRYSLLPFWYTLLYQAHREGIPVMRPLWVQYPQDVTTFNIDDQYLLGDALLVHPVSDSGAHGVQVYLPGQGEVWYDIQSYQKHHGPQTLYLPVTLSSIPVFQRGGTIVPRWMRVRRSSECMKDDPITLFVALSPQGTAQGELFLDDGHTFNYQTRQEFLLRRFSFSGNTLVSSSADPEGHFETPIWIERVVIIGAGKPAAVVLQTKGSPESRLSFQHDPETSVLVLRKPGINVASDWSIHLR

SEQ ID NO: 767888 - protein, 953 aa, Homo sapiens; identical to SEQ ID NO: 767878

SEQ ID NO: 767889 - protein, 202 aa, Homo sapiens
MIEHLLGDALLVHPVSDSGAHGVQVYLPGQGEVWYDIQSYQKHHGPQTLYLPVTLSSIPVFQRGGTIVPRWMRVRRSSECMKDDPITLFVALSPQGTAQGELFLDDGHTFNYQTRQEFLLRRFSFSGNTLVSSSADPEGHFETPIWIERVVIIGAGKPAAVVLQTKGSPESRLSFQHDPETSVLVLRKPGINVASDWSIHLR

SEQ ID NO: 767890 - protein, 953 aa, Homo sapiens; identical to SEQ ID NO: 767878

SEQ ID NO: 767891 - protein, 953 aa, Homo sapiens; identical to SEQ ID NO: 767878

SEQ ID NO: 767892 - protein, 953 aa, Homo sapiens; identical to SEQ ID NO: 767878

SEQ ID NO: 767893 - protein, 783 aa, Homo sapiens
RLYRPGMLGCGGSGSGGAYEGWSWASLVLAFLGVCLGITLAVDRSNFKTCEESSFCKRQRSIRPGLSPYRALLDSLQLGPDSLTVHLIHEVTKVLLVLELQGLQKNMTRFRIDELEPRRPRYRVPDVLVADPPIARLSVSGRDENSVELTMAEGPYKIILTARPFRLDLLEDRSLLLSVNARGLLEFEHQRAPRVSQGSKDPAEGDGAQPEETPRDGDKPEETQGKAEKDEPGAWEETFKTHSDSKPYGPMSVGLDFSLPGMEHVYGIPEHADNLRLKVTEGGEPYRLYNLDVFQYELYNPMALYGSVPVLLAHNPHRDLGIFWLNAAETWVDISSNTAGKTLFGKMMDYLQGSGETPQTDVRWMSETGIIDVFLLLGPSISDVFRQYASLTGTQALPPLFSLGYHQSRWNYRDEADVLEVDQGFDDHNLPCDVIWLDIEHADGKRYFTWDPSRFPQPRTMLERLASKRRKLVAIVDPHIKVDSGYRVHEELRNLGLYVKTRDGSDYEGWCWPGSAGYPDFTNPTMRAWWANMFSYDNYEGSAPNLFVWNDMNEPSVFNGPEVTMLKDAQHYGGWEHRDVHNIYGLYVHMATADGLRQRSGGMERPFVLARAFFAGSQRFGAVWTGDNTAEWDHLKISIPMCLSLGLVGLSFCGADVGGFFKNPEPELLVRWYQMGAYQPFFRAHAHLDTGRREPWLLPSQHNDIIRDALGQRYSLLPFWYTLLYQAHREGIPVMRPLWVQYPQDVTTFNIDDQYLLGDALLVHPVSDSGAHGVQVYLPGQGE

SEQ ID NO: 767894 - protein, 953 aa, Homo sapiens; identical to SEQ ID NO: 767878

SEQ ID NO: 767895 - protein, 86 aa, Homo sapiens
SKNRRGRRLSLAHLVSSSADPEGHFETPIWIERVVIIGAGKPAAVVLQTKGSPESRLSFQHDPETSVLVLRKPGINVASDWSIHLR

SEQ ID NO: 767896 - protein, 953 aa, Homo sapiens; identical to SEQ ID NO: 767878

SEQ ID NO: 767897 - protein, 722 aa, Homo sapiens
RLYRPGMLGCGGSGSGGAYEGWSWASLVLAFLGVCLGITLAVDRSNFKTCEESSFCKRQRSIRPGLSPYRALLDSLQLGPDSLTVHLIHEVTKVLLVLELQGLQKNMTRFRIDELEPRRPRYRVPDVLVADPPIARLSVSGRDENSVELTMAEGPYKIILTARPFRLDLLEDRSLLLSVNARGLLEFEHQRAPRVSQGSKDPAEGDGAQPEETPRDGDKPEETQGKAEKDEPGAWEETFKTHSDSKPYGPMSVGLDFSLPGMEHVYGIPEHADNLRLKVTEGGEPYRLYNLDVFQYELYNPMALYGSVPVLLAHNPHRDLGIFWLNAAETWVDISSNTAGKTLFGKMMDYLQGSGETPQTDVRWMSETGIIDVFLLLGPSISDVFRQYASLTGTQALPPLFSLGYHQSRWNYRDEADVLEVDQGFDDHNLPCDVIWLDIEHADGKRYFTWDPSRFPQPRTMLERLASKRRKLVAIVDPHIKVDSGYRVHEELRNLGLYVKTRDGSDYEGWCWPGSAGYPDFTNPTMRAWWANMFSYDNYEGSAPNLFVWNDMNEPSVFNGPEVTMLKDAQHYGGWEHRDVHNIYGLYVHMATADGLRQRSGGMERPFVLARAFFAGSQRFGAVWTGDNTAEWDHLKISIPMCLSLGLVGLSFCGADVGGFFKNPEPELLVRWYQMGAYQPFFRAHAHLDTGRREPWLLPSQHIHLRTPGNHRALVAPSLSLI

SEQ ID NO: 767898 - protein, 953 aa, Homo sapiens; identical to SEQ ID NO: 767878

SEQ ID NO: 767899 - protein, 953 aa, Homo sapiens; identical to SEQ ID NO: 767878

SEQ ID NO: 767900 - protein, 953 aa, Homo sapiens; identical to SEQ ID NO: 767878

SEQ ID NO: 767901 - protein, 953 aa, Homo sapiens; identical to SEQ ID NO: 767878

SEQ ID NO: 767902 - protein, 946 aa, Homo sapiens
  misc_feature (933)..(933): Xaa can be any naturally occurring amino acid
RLYRPGMLGCGGSGSGGAYEGWSWASLVLAFLGVCLGITLAVDRSNFKTCEESSFCKRQRSIRPGLSPYRALLDSLQLGPDSLTVHLIHEVTKVLLVLELQGLQKNMTRFRIDELEPRRPRYRVPDVLVADPPIARLSVSGRDENSVELTMAEGPYKIILTARPFRLDLLEDRSLLLSVNARGLLEFEHQRAPRVSQGSKDPAEGDGAQPEETPRDGDKPEETQGKAEKDEPGAWEETFKTHSDSKPYGPMSVGLDFSLPGMEHVYGIPEHADNLRLKVTEGGEPYRLYNLDVFQYELYNPMALYGSVPVLLAHNPHRDLGIFWLNAAETWVDISSNTAGKTLFGKMMDYLQGSGETPQTDVRWMSETGIIDVFLLLGPSISDVFRQYASLTGTQALPPLFSLGYHQSRWNYRDEADVLEVDQGFDDHNLPCDVIWLDIEHADGKRYFTWDPSRFPQPRTMLERLASKRRKLVAIVDPHIKVDSGYRVHEELRNLGLYVKTRDGSDYEGWCWPGSAGYPDFTNPTMRAWWANMFSYDNYEGSAPNLFVWNDMNEPSVFNGPEVTMLKDAQHYGGWEHRDVHNIYGLYVHMATADGLRQRSGGMERPFVLARAFFAGSQRFGAVWTGDNTAEWDHLKISIPMCLSLGLVGLSFCGADVGGFFKNPEPELLVRWYQMGAYQPFFRAHAHLDTGRREPWLLPSQHNDIIRDALGQRYSLLPFWYTLLYQAHREGIPVMRPLWVQYPQDVTTFNIDDQYLLGDALLVHPVSDSGAHGVQVYLPGQGEVWYDIQSYQKHHGPQTLYLPVTLSSIPVFQRGGTIVPRWMRVRRSSECMKDDPITLFVALSPQGTAQGELFLDDGHTFNYQTRQEFLLRRFSFSGNTLVSSSADPEGHFETPIWIERVVIIGAGKPAAVVLQTKESPQKARLVPFPGIEXLKNLLLFGFPAAK

SEQ ID NO: 767903 - protein, 183 aa, Homo sapiens
MWTLRTDSWSWASLVLAFLGVCLGITLAVDRSNFKTCEESSFCKRQRSIRPGLSPYRALLDSLQLGPDSLTVHLIHEVTKVLLVLELQGLQKNMTRFRIDELEPRRPRYRVPDVLVADPPIARLSVSGRDENSVELTMAEGPYKIILTARPFRLDLLEDRSLLLSVNARGLLEFEHQRAPRVS

SEQ ID NO: 767904 - protein, 124 aa, Homo sapiens
MWTLRTDSWSWASLVLAFLGVCLGITLAVDRSNFKTCEESSFCKRQRSIRPGLSPYRALLDSLQLGPDSLTVHLIHEVTKVLLVLELQGLQKNMTRFRIDELEPRRPRYRVPDVLVADPPIARG

SEQ ID NO: 767905 - protein, 313 aa, Homo sapiens
ACSGAGGGAAMKLKLKNVFLAYFLVSIAGLLYALVQLGQPCDCLPPLRAAAEQLRQKDLRISQLQAELRRPPPAPAQPPEPEALPTIYVVTPTYARPLWVQYPQDVTTFNIDDQYLLGDALLVHPVSDSGAHGVQVYLPGQGEVWYDIQSYQKHHGPQTLYLPVTLSSIPVFQRGGTIVPRWMRVRRSSECMKDDPITLFVALSPQGTAQGELFLDDGHTFNYQTRQEFLLRRFSFSGNTLVSSSADPEGHFETPIWIERVVIIGAGKPAAVVLQTKGSPESRLSFQHDPETSVLVLRKPGINVASDWSIHLR

SEQ ID NO: 767906 - protein, 276 aa, Homo sapiens
MKYDYGVPRCISVPWLVLESVKSAGPGPVCMSMAFLGVCLGITLAVDRSNFKTCEESSFCKRQRSIRPGLSPYRALLDSLQLGPDSLTVHLIHEVTKVLLVLELQGLQKNMTRFRIDELEPRRPRYRVPDVLVADPPIARLSVSGRDENSVELTMAEGPYKIILTARPFRLDLLEDRSLLLSVNARGLLEFEHQRAPRVSFSDKVNLTLGSIWDKIKNLFSRQGSKDPAEGDGAQPEETPRDGDKPKRLRAAEKKPGPEGHPTLRAVARLGGPPPA

SEQ ID NO: 767907 - protein, 962 aa, Homo sapiens
MWTLRTDSWSWASLVLAFLGVCLGITLAVDRSNFKTCEESSFCKRQRSIRPGLSPYRALLDSLQLGPDSLTVHLIHEVTKVLLVLELQGLQKNMTRFRIDELEPRRPRYRVPDVLVADPPIARLSVSGRDENSVELTMAEGPYKIILTARPFRLDLLEDRSLLLSVNARGLLEFEHQRAPRVSFSDKVNLTLGSIWDKIKNLFSRQGSKDPAEGDGAQPEETPRDGDKPEETQGKAEKDEPGAWEETFKTHSDSKPYGPMSVGLDFSLPGMEHVYGIPEHADNLRLKVTEGGEPYRLYNLDVFQYELYNPMALYGSVPVLLAHNPHRDLGIFWLNAAETWVDISSNTAGKTLFGKMMDYLQGSGETPQTDVRWMSETGIIDVFLLLGPSISDVFRQYASLTGTQALPPLFSLGYHQSRWNYRDEADVLEVDQGFDDHNLPCDVIWLDIEHADGKRYFTWDPSRFPQPRTMLERLASKRRKLVAIVDPHIKVDSGYRVHEELRNLGLYVKTRDGSDYEGWCWPGSAGYPDFTNPTMRAWWANMFSYDNYEGSAPNLFVWNDMNEPSVFNGPEVTMLKDAQHYGGWEHRDVHNIYGLYVHMATADGLRQRSGGMERPFVLARAFFAGSQRFGAVWTGDNTAEWDHLKISIPMCLSLGLVGLSFCGADVGGFFKNPEPELLVRWYQMGAYQPFFRAHAHLDTGRREPWLLPSQHNDIIRDALGQRYSLLPFWYTLLYQAHREGIPVMRPLWVQYPQDVTTFNIDDQYLLGDALLVHPVSDSGAHGVQVYLPGQGEVWYDIQSYQKHHGPQTLYLPVTLSSIPVFQRGGTIVPRWMRVRRSSECMKDDPITLFVALSPQGTAQGELFLDDGHTFNYQTRQEFLLRRFSFSGNTLVSSSADPEGHFETPIWIERVVIIGAGKPAAVVLQTKGSPESRLSFQHDPETSVLVLRKPGINVASDWSIHLR

SEQ ID NO: 767908 - protein, 1110 aa, Homo sapiens
MWTLRTDSWSWASLVLAFLGVCLGITLAVDRSNFKTCEESSFCKRQRSIRPGLSPYRALLDSLQLGPDSLTVHLIHEVTKVLLVLELQGLQKNMTRFRIDELEPRRPRYRVPDVLVADPPIARLSVSGRDENSVELTMAEGPYKIILTARPFRLDLLEDRSLLLSVNARGLLEFEHQRAPRVSEYRGWDCREPSVKEHRGVVRSGTGRRRWWDSQVGPGGWEKLSVREGRNQTRVRFFPFPVQTRRQSLLSLSCTLGISGRPAWVCVSFFPFSHHHISQIYFLRFYLFIFFGFFFPPSLEVCRLKLTFMFLFLCWFCASFSPSLPISSCPSFSDKVNLTLGSIWDKIKNLFSRQGSKDPAEGDGAQPEETPRDGDKPEETQGKAEKDEPGAWEETFKTHSDSKPYGPMSVGLDFSLPGMEHVYGIPEHADNLRLKVTEGGEPYRLYNLDVFQYELYNPMALYGSVPVLLAHNPHRDLGIFWLNAAETWVDISSNTAGKTLFGKMMDYLQGSGETPQTDVRWMSETGIIDVFLLLGPSISDVFRQYASLTGTQALPPLFSLGYHQSRWNYRDEADVLEVDQGFDDHNLPCDVIWLDIEHADGKRYFTWDPSRFPQPRTMLERLASKRRKLVAIVDPHIKVDSGYRVHEELRNLGLYVKTRDGSDYEGWCWPGSAGYPDFTNPTMRAWWANMFSYDNYEGSAPNLFVWNDMNEPSVFNGPEVTMLKDAQHYGGWEHRDVHNIYGLYVHMATADGLRQRSGGMERPFVLARAFFAGSQRFGAVWTGDNTAEWDHLKISIPMCLSLGLVGLSFCGADVGGFFKNPEPELLVRWYQMGAYQPFFRAHAHLDTGRREPWLLPSQHNDIIRDALGQRYSLLPFWYTLLYQAHREGIPVMRPLWVQYPQDVTTFNIDDQYLLGDALLVHPVSDSGAHGVQVYLPGQGEVWYDIQSYQKHHGPQTLYLPVTLSSIPVFQRGGTIVPRWMRVRRSSECMKDDPITLFVALSPQGTAQGELFLDDGHTFNYQTRQEFLLRRFSFSGNTLVSSSADPEGHFETPIWIERVVIIGAGKPAAVVLQTKGSPESRLSFQHDPETSVLVLRKPGINVASDWSIHLR

SEQ ID NO: 767909 - protein, 402 aa, Homo sapiens [sequence omitted]

SEQ ID NO: 767910 - protein, 424 aa, Homo sapiens
RIPRKQLTIMTGSAPNLFVWNDMNEPSVFNGPEVTMLKDAQHYGGWEHRDVHNIYGLYVHMATADGLRQRSGGMERPFVLARAFFAGSQRFGAVWTGDNTAEWDHLKISIPMCLSLGLVGLSFCGADVGGFFKNPEPELLVRWYQMGAYQPFFRAHAHLDTGRREPWLLPSQHNDIIRDALGQRYSLLPFWYTLLYQAHREGIPVMRPLWVQYPQDVTTFNIDDQYLLGDALLVHPVSDSGAHGVQVYLPGQGEVWYDIQSYQKHHGPQTLYLPVTLSSIPVFQRGGTIVPRWMRVRRSSECMKDDPITLFVALSPQGTAQGELFLDDGHTFNYQTRQEFLLRRFSFSGNTLVSSSADPEGHFETPIWIERVVIIGAGKPAAVVLQTKGSPESRLSFQHDPETSVLVLRKPGINVASDWSIHLR

SEQ ID NO: 767911 - protein, 936 aa, Homo sapiens
RLYRPGMLGCGGSGSGGAYEGWSWASLVLAFLGVCLGITLAVDRSNFKTCEESSFCKRQRSIRPGLSPYRALLDSLQLGPDSLTVHLIHEVTKVLLVLELQGLQKNMTRFRIDELEPRRPRYRVPDVLVADPPIARLSVSGRDENSVELTMAEGPYKIILTARPFRLDLLEDRSLLLSVNARGLLEFEHQRAPRVSQGSKDPAEGDGAQPEETPRDGDKPEETQGKAEKDEPGAWEETFKTHSDSKPYGPMSVGLDFSLPGMEHVYGIPEHADNLRLKVTEGGEPYRLYNLDVFQYELYNPMALYGSVPVLLAHNPHRDLGIFWLNAAETWVDISSNTAGKTLFGKMMDYLQGSGETPQTDVRWMSETGIIDVFLLLGPSISDVFRQYASLTGTQALPPLFSLGYHQSRWNYRDEADVLEVDQGFDDHNLPCDVIWLDIEHADGKRYFTWDPSRFPQPRTMLERLASKRRKLVAIVDPHIKVDSGYRVHEELRNLGLYVKTRDGSDYEGWCWPGSAGYPDFTNPTMRAWWANMFSYDNYEGSAPNLFVWNDMNEPSVFNGPEVTMLKDAQHYGGWEHRDVHNIYGLYVHMATADGLRQRSGGMERPFVLARAFFAGSQRFGAVWTGDNTAEWDHLKISIPMCLSLGLVGLSFCGADVGGFFKNPEPELLVRWYQMGAYQPFFRAHAHLDTGRREPWLLPSQHNDIIRDALGQRYSLLPFWYTLLYQAHREGIPVMRPLWVQYPQDVTTFNIDDQYLLGDALLVHPVSDSGAHGVQVYLPGQGEVWYDIQSYQKHHGPQTLYLPVTLSSIPVFQRGGTIVPRWMRVRRSSECMKDDPITLFVALSPQGTAQGELFLDDGHTFNYQTRQEFLLRRFSFSGNTLVSSSADPEGHFETPIWIERVVIIGAGKPAAVVLQTKVVLRKPGINVASDWSIHLR

SEQ ID NO: 767912 - protein, 311 aa, Homo sapiens
MGKSWYQRSGRGEEITRGIWSPGSALSSCPKCWQNLGLRLAEVKSGEGRTPRQKKEISQHNDIIRDALGQRYSLLPFWYTLLYQAHREGIPVMRPLWVQYPQDVTTFNIDDQYLLGDALLVHPVSDSGAHGVQVYLPGQGEVWYDIQSYQKHHGPQTLYLPVTLSSIPVFQRGGTIVPRWMRVRRSSECMKDDPITLFVALSPQGTAQGELFLDDGHTFNYQTRQEFLLRRFSFSGNTLVSSSADPEGHFETPIWIERVVIIGAGKPAAVVLQTKGSPESRLSFQHDPETSVLVLRKPGINVASDWSIHLR

SEQ ID NO: 767913 - protein, 226 aa, Homo sapiens
IELGTVTFVPLWVQYPQDVTTFNIDDQYLLGDALLVHPVSDSGAHGVQVYLPGQGEVWYDIQSYQKHHGPQTLYLPVTLSSIPVFQRGGTIVPRWMRVRRSSECMKDDPITLFVALSPQGTAQGELFLDDGHTFNYQTRQEFLLRRFSFSGNTLVSSSADPEGHFETPIWIERVVIIGAGKPAAVVLQTKGSPESRLSFQHDPETSVLVLRKPGINVASDWSIHLR

SEQ ID NO: 767914 - protein, 953 aa, Homo sapiens; identical to SEQ ID NO: 767878

SEQ ID NO: 767915 - protein, 953 aa, Homo sapiens; identical to SEQ ID NO: 767878

SEQ ID NO: 767916 - protein, 116 aa, Homo sapiens
GCESDEEPQGTAQGELFLDDGHTFNYQTRQEFLLRRFSFSGNTLVSSSADPEGHFETPIWIERVVIIGAGKPAAVVLQTKGSPESRLSFQHDPETSVLVLRKPGINVASDWSIHLR

SEQ ID NO: 767917 - protein, 131 aa, Homo sapiens
MGAVPEAASCGSGSVAETREGRCGVRLCKLGRPGMDSSSSSSAAGLGAVDPQLQHFIEVETQKQRFQQLVHQMTELCWEKCMDKPGPKLDSRAEACFVNCVERFIDTSQFILNRLEQTQKSKPVFSESLSD

SEQ ID NO: 767918 - protein, 112 aa, Homo sapiens
MDSSSSSSAAGLGAVDPQLQHFIEVETQKQRFQQLVHQMTELCWRWDLVMLPRLECSGTIMSSISHFQHWTDFPDRKINKEMSDLICTIEKVNLIDIYRTFHPTAAKYTFFS

SEQ ID NO: 767919 - protein, 97 aa, Homo sapiens
RSFWCSLHCSVSSAPRGPASVASLPAGIGRSTAKTPGPTGSLEMVRVPGPTSRERGRGWLELVGSGCGGTLASPQLAPKSAAPSSPWRSSALSPLQP

SEQ ID NO: 767920 - protein, 101 aa, Homo sapiens
  misc_feature (47)..(47): Xaa can be any naturally occurring amino acid
NLEGQFGLVKVPLYRPCQLASEPKCKLNAVTVWKSHYYLLSFQNVCXRKVRERGALEVQSQQRLWQICLRQQYRHQMVRRGLGERLTPWSGTPVGNVWLCL

SEQ ID NO: 767921 - protein, 69 aa, Homo sapiens
QAGTGPGIYGLCPLRYPSAYESSPGTELRECGLCRSGQEFADCRRPANRQDVLSGVVPSSTASGSSHPI

SEQ ID NO: 767922 - protein, 92 aa, Homo sapiens
LGRGRWYSAEVVPCGTRPHTNLAREPSCGSAVCAVPARSLPTADVLRTVDQSSCPTTDKGSPKDPWKAGPWHKNCLHPSPGASVEEMHQHLA

SEQ ID NO: 767923 - protein, 767 aa, Homo sapiens
LPLSSASPFVPCGTRPHTNLAREPSCGSAVCAVPARSLPTADVLRTGKMCSLGLFPPPPPRGQVTLYEHNNELVTGSSYESPPPDFRGQWINLPVLQLTKDPLKTPGRLDHGTRTAFIHHREQVWKRCINIWRDVGLFGVLNEIANSEEEVFEWVKTASGWALALCRWASSLHGSLFPHLSLRSEDLIAEFAQVTNWSSCCLRVFAWHPHTNKFAVALLDDSVRVYNASSTIVPSLKHRLQRNVASLAWKPLSASVLAVACQSCILIWTLDPTSLSTRPSSGCAQVLSHPGHTPVTSLAWAPSGGRLLSASPVDAAIRVWDVSTETCVPLPWFRGGGVTNLLWSPDGSKILATTPSAVFRVWEAQMWTCERWPTLSGRCQTGCWSPDGSRLLFTVLGEPLIYSLSFPERCGEGKGCVGGAKSATIVADLSETTIQTPDGEERLGGEAHSMVWDPSGERLAVLMKGKPRVQDGKPVILLFRTRNSPVFELLPCGIIQGEPGAQPQLITFHPSFNKGALLSVGWSTGRIAHIPLYFVNAQFPRFSPVLGRAQEPPAGGGGSIHDLPLFTETSPTSAPWDPLPGPPPVLPIPISLQIISSFVSKKTNKRHMCAAEPESSNTRLSAGPRVSQGTVQNTATRRLHKTPADRDHKAGTATRQDKIHDATPHTERASASPAPPKGAKNENESEPGRTTERRPKEAEGRAQSTATTTRRRRGQTRRAREKRGHTQERAREAEKEGRKAAKETESKKSGSQHKERERNRASNKQTK

SEQ ID NO: 767924 - protein, 67 aa, Homo sapiens
TSVEFRLAVCPLRYPSAYESSPGTELRECGLCRSGQEFADCRRPANRQDVLSGVVPSSTASGSSHPI

SEQ ID NO: 767925 - protein, 69 aa, Homo sapiens
SRSRPVVIGRGCPLRYPSAYESSPGTELRECGLCRSGQEFADCRRPANRQDVLSGVVPSSTASGSSHPI

SEQ ID NO: 767926 - protein, 110 aa, Homo sapiens
MCSLGLFPPPPPRGQVTLYEHNNELVTGSSYESPPPDFRGQWINLPVLQLTKDPLKTPGRLDHGTRTAFIHHREQVWKRCINIWRDVGLFGVLNEIANSEEEAQERRSDR

SEQ ID NO: 767927 - protein, 67 aa, Homo sapiens; identical to SEQ ID NO: 767924

SEQ ID NO: 767928 - protein, 69 aa, Homo sapiens; identical to SEQ ID NO: 767925

SEQ ID NO: 767929 - protein, 490 aa, Homo sapiens
LPLSSASPFVPCGTRPHTNLAREPSCGSAVCAVPARSLPTADVLRTGKMCSLGLFPPPPPRGQVTLYEHNNELVTGSSYESPPPDFRGQWINLPVLQLTKDPLKTPGRLDHGTRTAFIHHREQVWKRCINIWRDVGLFGVLNEIANSEEEVFEWVKTASGWALALCRWASSLHGSLFPHLSLRSEDLIAEFAQVTNWSSCCLRVFAWHPHTNKFAVALLDDSVRVYNASSTIVPSLKHRLQRNVASLAWKPLSASVLAVACQSCILIWTLDPTSLSTRPSSGCAQVLSHPGHTPVTSLAWAPSGGRLLSASPVDAAIRVWDVSTETCVPLPWFRGGGVTNLLWSPDGSKILATTPSAVFRVWEAQMWTCERWPTLSGRCQTGCWSPDGSRLLFTVLGEPLIYSLSFPERCGEGKGCVGGAKSATIVADLSETTIQTPDGEERLGGKGAYPGLYPFVYPNGCAYSKDMPWVHRWFHQLILLNVLIDTGPVF

SEQ ID NO: 767930 - protein, 414 aa, Homo sapiens
LPLSSASPFVPCGTRPHTNLAREPSCGSAVCAVPARSLPTADVLRTGKMCSLGLFPPPPPRGQVTLYEHNNELVTGSSYESPPPDFRGQWINLPVLQLTKDPLKTPGRLDHGTRTAFIHHREQVWKRCINIWRDVGLFGVLNEIANSEEEVFEWVKTASGWALALCRWASSLHGSLFPHLSLRSEDLIAEFAQVTNWSSCCLRVFAWHPHTNKFAVALLDDSVRVYNASSTIVPSLKHRLQRNVASLAWKPLSASVLAVACQSCILIWTLDPTSLSTRPSSGCAQVLSHPGHTPVTSLAWAPSGGRLLSASPVDAAIRLWDVITETVSPSWFERWVATVLVPEEKSGTSKGLRLEAMDWRGNHKGKVGTKSAGWRKPENRYTGGEGEEQGLNNLGGEQRGGHREEEKSAVLHTV

SEQ ID NO: 767931 - protein, 69 aa, Homo sapiens; identical to SEQ ID NO: 767925

SEQ ID NO: 767932 - protein, 69 aa, Homo sapiens; identical to SEQ ID NO: 767925

SEQ ID NO: 767933 - protein, 115 aa, Homo sapiens
WGFQELDGEAEGLGCCMALPGGPSLGPDSDPFLSLLCRAGPQAELPTSRCTLSMPSFHVLAQCLGGPRNPLLGVEALFMTCPSLLRHPQPLPLGTLSQGHHLFCPTPHIPTSKNK

SEQ ID NO: 767934 - protein, 67 aa, Homo sapiens; identical to SEQ ID NO: 767924

SEQ ID NO: 767935 - protein, 69 aa, Homo sapiens; identical to SEQ ID NO: 767925

SEQ ID NO: 767936 - protein, 69 aa, Homo sapiens; identical to SEQ ID NO: 767925

SEQ ID NO: 767937 - protein, 69 aa, Homo sapiens; identical to SEQ ID NO: 767925

SEQ ID NO: 767938 - protein, 67 aa, Homo sapiens; identical to SEQ ID NO: 767924

SEQ ID NO: 767939 - protein, 258 aa, Homo sapiens
LPLSSASPFVPCGTRPHTNLAREPSCGSAVCAVPARSLPTADVLRTGKMCSLGLFPPPPPRGQVTLYEHNNELVTGSSYESPPPDFRGQWINLPVLQLTKDPLKTPGRLDHGTRTAFIHHREQVWKRCINIWRDVGLFGVLNEIANSEEEVFEWVKTASGWALALCRWASSLHGSLFPHLSLRSEDLIAEFAQVTNWSSCCLRVFAWHPHTNKFAVALLDDSVRVYNASRCVWGHQVGSDLSISPSLASLGSGESCSS

SEQ ID NO: 767940 - protein, 104 aa, Homo sapiens
LFLLSEAFPSAFQPAACDIACIFLWVIHRPGRINLWINLPVLQLTKDPLKTPGRLDHGTRTAFIHHREQVWKRCINIWRDVGLFGVLNEIANSEEEAQERRSDR

SEQ ID NO: 767941 - protein, 92 aa, Homo sapiens; identical to SEQ ID NO: 767922

SEQ ID NO: 767942 - protein, 142 aa, Homo sapiens
MGQQCFGIYMAAMVPFLCCLPGCLQAKQGIADNRVSDCERNLQKCAWVRTQTLFWLCPSAVSPWAYTCYQLGLGPQWGAAALSFTRGCCYPGMGCLNRDLCPPSLVSRRWGDQPALVPRRQQNPGYHSFSCLSSLGGPDVDL

SEQ ID NO: 767943 - protein, 69 aa, Homo sapiens; identical to SEQ ID NO: 767925

SEQ ID NO: 767944 - protein, 801 aa, Homo sapiens
MDEDEFELQPQEPNSFFDGIGADATHMDGDQIVVEIQEAVFVSNIVDSDITVHNFVPDDPDSVVIQDVVEDVVIEEDVQCSDILEEADVSENVIIPEQVLDSDVTEEVSLPHCTVPDDVLASDITSTSMSMPEHVLTSESMHVCDIGHVEHMVHDSVVEAEIITDPLTSDIVSEEVLVADCAPEAVIDASGISVDQQDNDKASCEDYLMISLDDAGKIEHDGSTGVTIDAESEMDPCKVDSTCPEVIKVYIFKADPGEDDLGGTVDIVESEPENDHGVELLDQNSSIRVPREKMVYMTVNDSQQEDEDLNVAEIADEVYMEVIVGEEDAAVAAAAAAVHEQQIDEDEMKTFVPIAWAAAYGNNSDGIENRNGTASALLHIDESAGLGRLAKQKPKKKRRPDSRQYQTAIIIGPDGHPLTVYPCMICGKKFKSRGFLKRHMKNHPEHLAKKKYHCTDCDYTTNKKISLHNHLESHKLTSKAEKAIECDECGKHFSHAGALFTHKMVHKEKGANKMHKCKFCEYETAEQGLLNRHLLAVHSKNFPHICVECGKGFRHPSELRKHMRIHTGEKPYQCQYCEYRSADSSNLKTHIKTKHSKEMPFKCDICLLTFSDTKEVQQHTLVHQESKTHQCLHCDHKSSNSSDLKRHVISVHTKDYPHKCEMCEKGFHRPSELKKHVAVHKGKKMHQCRHCDFKIADPFVLSRHILSVHTKDLPFRCKRCRKGFRQQNELKKHMKTHSGRKVYQCEYCEYSTTDASGFKRHVISIHTKDYPHRCEYCKKGFRRPSEKNQHIMRHHKEVGLP

SEQ ID NO: 767945 - protein, 517 aa, Homo sapiens
MDPCKVDSTCPEVIKVYIFKADPGEDDLGGTVDIVESEPENDHGVELLDQNSSIRVPREKMVYMTVNDSQQEDEDLSNNSDGIENRNGTASALLHIDESAGLGRLAKQKPKKKRRPDSRQYQTAIIIGPDGHPLTVYPCMICGKKFKSRGFLKRHMKNHPEHLAKKKYHCTDCDYTTNKKISLHNHLESHKLTSKAEKAIECDECGKHFSHAGALFTHKMVHKEKGANKMHKCKFCEYETAEQGLLNRHLLAVHSKNFPHICVECGKGFRHPSELRKHMRIHTGEKPYQCQYCEYRSADSSNLKTHIKTKHSKEMPFKCDICLLTFSDTKEVQQHTLVHQESKTHQCLHCDHKSSNSSDLKRHVISVHTKDYPHKCEMCEKGFHRPSELKKHVAVHKGKKMHQCRHCDFKIADPFVLSRHILSVHTKDLPFRCKRCRKGFRQQNELKKHMKTHSGRKVYQCEYCEYSTTDASGFKRHVISIHTKDYPHRCEYCKKGFRRPSEKNQHIMRHHKEVGLP

SEQ ID NO: 767946 - protein, 113 aa, Homo sapiens
EEANGCPRIPSRICSSWISEKENGNIKIITGPQERTWRWGWHLLPGSGWLGEWQAISSMKPALTTPALSYMPQPQNRRGPGLGKCPSSSQVRGTRHPPRWAAAFTCIATFFSW

SEQ ID NO: 767947 - protein, 287 aa, Homo sapiens
ADLLGINGTGEERLPQDLKVSTDKEGGVQDLLLPEDMLSGEEYECVSPDDISLPPLPGSPESPLAPSDMEVEEPVSSSLSLHISSYGVQAGTSSPGDAQESVLPPPVAFADACNDKRETFSSHFERPYLQFKAEPPLTSRGFVEKSTALHRISAEHPESMMSEVHERALQQHPQAQGGLLETREKMHADNNFTKTQDRLHASSDAFSGLRFQSGTSRGYQRQMVPREEIKSTSAKSSVVSLADQAPNFSRLLSNVTVMEGSPVTLEVEVTGFPEPTLTWWVAYNDKP

SEQ ID NO: 767948 - protein, 137 aa, Homo sapiens
MGAHLVRRYLGDASVEPDPLQMPTFPPDYGFPERKEREMVATQQEMMDAQLRLQLRDYCAHHLIRLLKCKRDSFPNFLACKQERHDWDYCEHRDYVMRMKEFERERRLLQRKKRREKKAAELAKGQGPGEVDPKVAL

SEQ ID NO: 767949 - protein, 137 aa, Homo sapiens; identical to SEQ ID NO: 767948

SEQ ID NO: 767950 - protein, 137 aa, Homo sapiens; identical to SEQ ID NO: 767948

SEQ ID NO: 767951 - protein, 137 aa, Homo sapiens; identical to SEQ ID NO: 767948

SEQ ID NO: 767952 - protein, 137 aa, Homo sapiens; identical to SEQ ID NO: 767948

SEQ ID NO: 767953 - protein, 137 aa, Homo sapiens; identical to SEQ ID NO: 767948

SEQ ID NO: 767954 - protein, 137 aa, Homo sapiens; identical to SEQ ID NO: 767948

SEQ ID NO: 767955 - protein, 137 aa, Homo sapiens; identical to SEQ ID NO: 767948

SEQ ID NO: 767956 - protein, 140 aa, Homo sapiens
MGAHLVRRYLGDASVEPDPLQMPTFPPDYGFPERKEREMVATQQEMMDAQLRLQLRDYCAHHLIRLLKCKRDSFPNFLACKQERHDWDYCEHRDYVMLMKEFERERVLLQKRSGRRRRLLNCQRHGPGDPNPRLAWGGPP

SEQ ID NO: 767957 - protein, 618 aa, Homo sapiens
HWVIDFYAPWCGPCQNFAPEFELLARMIKGKVKAGKVDCQAYAQTCQKAGIRAYPTVKFYFYERAKRNFQEEGGGGAPPKNPSCRRVAVSLPSGDTTRWASQRQQQPLPMDPPRASHLSPRKKRPRQTGALMASSPQDIKFQDLVVFILEKKMGTTRRAFLMELARRKGFRVENELSDSVTHIVAENNSGSDVLEWLQAQKVQVSSQPELLDVSWLIECIGAGKPVEMTGKHQLVVRRDYSDSTNPGPPKTPPIAVQKISQYACQRRTTLNNCNQIFTDAFDILAENCEFRENEDSCVTFMRAASVLKSLPFTIISMKDTEGIPCLGSKVKGIIEEIIEDGESSEVKAVLNDERYQSFKLFTSVFGVGLKTSEKWFRMGFRTLSKVRSDKSLKFTRMQKAGFLYYEDLVSCVTRAEAEAVSVLVKEAVWAFLPDAFVTMTGGFRRGKKMGHDVDFLITSPGSTEDEEQLLQKVMNLWEKKGLLLYYDLVESTFEKLRLPSRKVDALDHFQKCFLIFKLPRQRVDSDQSSWQEGKTWKAIRVDLVLCPYERRAFALLGWTGSRQFERDLRRYATHERKMILDNHALYDKTKRIFLKAESEEEIFAHLGLDYIEPWERNA

SEQ ID NO: 767958 - protein, 509 aa, Homo sapiens
MDPPRASHLSPRKKRPRQTGALMASSPQDIKFQDLVVFILEKKMGTTRRAFLMELARRKGFRVENELSDSVTHIVAENNSGSDVLEWLQAQKVQVSSQPELLDVSWLIECIGAGKPVEMTGKHQLVVRRDYSDSTNPGPPKTPPIAVQKISQYACQRRTTLNNCNQIFTDAFDILAENCEFRENEDSCVTFMRAASVLKSLPFTIISMKDTEGIPCLGSKVKGIIEEIIEDGESSEVKAVLNDERYQSFKLFTSVFGVGLKTSEKWFRMGFRTLSKVRSDKSLKFTRMQKAGFLYYEDLVSCVTRAEAEAVSVLVKEAVWAFLPDAFVTMTGGFRRGKKMGHDVDFLITSPGSTEDEEQLLQKVMNLWEKKGLLLYYDLVESTFEKLRLPSRKVDALDHFQKCFLIFKLPRQRVDSDQSSWQEGKTWKAIRVDLVLCPYERRAFALLGWTGSRQFERDLRRYATHERKMILDNHALYDKTKRIFLKAESEEEIFAHLGLDYIEPWERNA

SEQ ID NO: 767959 - protein, 130 aa, Homo sapiens
GRWLVDTGGHRGYVPAGKLQLYHVVPSAEELRRQAGLNKDPRCLTPEPSPALVPSIPTMNQVIAAYPFVARSSHEVSLQAGQPVTILEAQDKKGNPEWSLVEVNGQRGYVPSGFLARARSPVLWGWSLPS

SEQ ID NO: 767960 - protein, 2418 aa, Homo sapiens
MEQFPKETVVESSGPKVLETAEEIQERRQEVLTRYQSFKERVAERGQKLEDSYHLQVFKRDADDLGKWIMEKVNILTDKSYEDPTNIQGKYQKHQSLEAEVQTKSRLMSELEKTREERFTMGHSAHEETKAHIEELRHLWDLLLELTLEKGDQLLRALKFQQYVQECADILEWIGDKEAIATSVELGEDWERTEVLHKKFEDFQVELVAKEGRVVEVNQYANECAEENHPDLPLIQSKQNEVNAAWERLRGLALQRQKALSNAANLQRFKRDVTEAIQWIKEKEPVLTSEDYGKDLVASEGLFHSHKGLERNLAVMSDKVKELCAKAEKLTLSHPSDAPQIQEMKEDLVSSWEHIRALATSRYEKLQATYWYHRFSSDFDELSGWMNEKTAAINADELPTDVAGGEVLLDRHQQHKHEIDSYDDRFQSADETGQDLVNANHEASDEVREKMEILDNNWTALLELWDERHRQYEQCLDFHLFYRDSEQVDSWMSRQEAFLENEDLGNSLGSAEALLQKHEDFEEAFTAQEEKIITVDKTATKLIGDDHYDSENIKAIRDGLLARRDALREKAATRRRLLKESLLLQKLYEDSDDLKNWINKKKKLADDEDYKDIQNLKSRVQKQQVFEKELAVNKTQLENIQKTGQEMIEGGHYASDNVTTRLSEVASLWEELLEATKQKGTQLHEANQQLQFENNAEDLQRWLEDVEWQVTSEDYGKGLAEVQNRLRKHGLLESAVAARQDQVDILTDLAAYFEEIGHPDSKDIRARQESLVCRFEALKEPLATRKKKLLELLHLQLICRDTEDEEAWIQETEPSATSTYLGKDLIASKKLLNRHRVILDNIASHEPRIQEITERGNKMVEEGHFAAEDVASRVKSLNQNMESLRARAARRQNDLEANVQFQQYLADLHEAETWIREKEPIVDNTNYGADEEAAGALLKKHEAFLLDLNSFGDSMKALRNQANACQQQQAAPVEGVAGEQRVMALYDFQARSPREVTMKKGDVLTLLSSINKDWWKVEAADHQGIVPAVYVRRLAHDEFPMLPQRRREEPGNITQRQEQIENQYRSLLDRAEERRRRLLQRYNEFLLAYEAGDMLEWIQEKKAENTGVELDDVWELQKKFDEFQKDLNTNEPRLRDINKVADDLLFEGLLTPEGAQIRQELNARWGSLQRLADEQRQLLGSAHAVEVFHREADDTKEQIEKKCQALSAADPGSDLFSVQALQRRHEGFERDLVPLGDKVTILGETAERLSESHPDATEDLQRQKMELNEAWEDLQGRTKDRKESLNEAQKFYLFLSKARDLQNWISSIGGMVSSQELAEDLTGIEILLERHQEHRADMEAEAPTFQALEDFSAELIDSGHHASPEIEKKLQAVKLERDDLEKAWEKRKKILDQCLELQMFQGNCDQVESRMVARENSLRSDDKSSLDSLEALMKKRDDLDKAITAQEGKITDLEHFAESLIADEHYAKEEIATRLQRVLDRWKALKAQLIDERTKLGDYANLKQFYRDLEELEEWISEMLPTACDESYKDATNIQRKYLKHQTFAHEVDGRSEQVHGVINLGNSLIERSCDGNEEAMKEQLEQLKEHWDHLLERTNDKGKKLNEASRQQRFNTSIRDFEFWLSEAETLLAMKDQARDLASAGNLLKKHQLLEREMLAREDALKDLNTLAEDLLSSGTFNVDQIVKKKDNVNKRFLNVQELAAAHHEKLKEAYALFQFFQDLDDEESWIEEKLIRVSSQDYGRDLQGVQNLLKKHKRLEGELVAHEPAIQNVLDMAEKLKDKAAVGQEEIQLRLAQFVEHWEKLKELAKARGLKLEESLEYLQFMQNAEEEEAWINEKNALAVRGDCGDTLAATQSLLMKHEALENDFAVHETRVQNVCAQGEDILNKVLQEESQNKEISSKIEALNEKTPSLAKAIAAWKLQLEDDYAFQEFNWKADVVEAWIADKETSLKTNGNGADLGDFLTLLAKQDTLDASLQSFQQERLPEITDLKDKLISAQHNQSKAIEERYAALLKRWEQLLEASAVHRQKLLEKQLPLQKAEDLFVEFAHKASALNNWCEKMEENLSEPVHCVSLNEIRQLQKDHEDFLASLARAQADFKCLLELDQQIKALGVPSSPYTWLTVEVLERTWKHLSDIIEEREQELQKEEARQVKNFEMCQEFEQNASTFLQWILETRAYFLDGSLLKETGTLESQLEANKRKQKEIQAMKRQLTKIVDLGDNLEDALILDIKYSTIGLAQQWDQLYQLGLRMQHNLEQQIQAKDIKGVSEETLKEFSTIYKHFDENLTGRLTHKEFRSCLRGLNYYLPMVEEDEHEPKFEKFLDAVDPGRKGYVSLEDYTAFLIDKESENIKSSDEIENAFQALAEGKSYITKEDMKQALTPEQVSFCATHMQQYMDPRGRSHLSGYDYVGFTNSYFGN

SEQ ID NO: 767961 - protein, 108 aa, Homo sapiens
LPFLSCDSCSGPPCPGLTFWMAYFLDGSLLKETGTLESQLEANKRKQKEIQAMKRQLTKIVDLGDNLEDALILDIKYSTIGLAQQWDQLYQLGLRMQHNLEQQIQAKY

SEQ ID NO: 767962 - protein, 2040 aa, Homo sapiens
MEQFPKETVVESSGPKVLETAEEIQERRQEVLTRYQSFKERVAERGQKLEDSYHLQVFKRDADDLGKWIMEKVNILTDKSYEDPTNIQGKYQKHQSLEAEVQTKSRLMSELEKTREERFTMGHSAHEETKAHIEELRHLWDLLLELTLEKGDQLLRALKFQQYVQECADILEWIGDKEAIATSVELGEDWERTEVLHKKFEDFQVELVAKEGRVVEVNQYANECAEENHPDLPLIQSKQNEVNAAWERLRGLALQRQKALSNAANLQRFKRDVTEAIQWIKEKEPVLTSEDYGKDLVASEGLFHSHKGLERNLAVMSDKVKELCAKAEKLTLSHPSDAPQIQEMKEDLVSSWEHIRALATSRYEKLQATYWYHRFSSDFDELSGWMNEKTAAINADELPTDVAGGEVLLDRHQQHKHEIDSYDDRFQSADETGQDLVNANHEASDEVREKMEILDNNWTALLELWDERHRQYEQCLDFHLFYRDSEQVDSWMSRQEAFLENEDLGNSLGSAEALLQKHEDFEEAFTAQEEKIITVDKTATKLIGDDHYDSENIKAIRDGLLARRDALREKAATRRRLLKESLLLQKLYEDSDDLKNWINKKKKLADDEDYKDIQNLKSRVQKQQVFEKELAVNKTQLENIQKTGQEMIEGGHYASDNVTTRLSEVASLWEELLEATKQKGTQLHEANQQLQFENNAEDLQRWLEDVEWQVTSEDYGKGLAEVQNRLRKHGLLESAVAARQDQVDILTDLAAYFEEIGHPDSKDIRARQESLVCRFEALKEPLATRKKKLLELLHLQLICRDTEDEEAWIQETEPSATSTYLGKDLIASKKLLNRHRVILDNIASHEPRIQEITERGNKMVEEGHFAAEDVASRVKSLNQNMESLRARAARRQNDLEANVQFQQYLADLHEAETWIREKEPIVDNTNYGADEEAAGALLKKHEAFLLDLNSFGDSMKALRNQANACQQQQAAPVEGVAGEQRVMALYDFQARSPREVTMKKGDVLTLLSSINKDWWKVEAADHQGIVPAVYVRRLAHDEFPMLPQRRREEPGNITQRQEQIENQYRSLLDRAEERRRRLLQRYNEFLLAYEAGDMLEWIQEKKAENTGVELDDVWELQKKFDEFQKDLNTNEPRLRDINKVADDLLFEGLLTPEGAQIRQELNARWGSLQRLADEQRQLLGSAHAVEVFHREADDTKEQIEKKCQALSAADPGSDLFSVQALQRRHEGFERDLVPLGDKVTILGETAERLSESHPDATEDLQRQKMELNEAWEDLQGRTKDRKESLNEAQKFYLFLSKARDLQNWISSIGGMVSSQELAEDLTGIEILLERHQEHRADMEAEAPTFQALEDFSAELIDSGHHASPEIEKKLQAVKLERDDLEKAWEKRKKILDQCLELQMFQGNCDQVESRMVARENSLRSDDKSSLDSLEALMKKRDDLDKAITAQEGKITDLEHFAESLIADEHYAKEEIATRLQRVLDRWKALKAQLIDERTKLGDYANLKQFYRDLEELEEWISEMLPTACDESYKDATNIQRKYLKHQTFAHEVDGRSEQVHGVINLGNSLIERSCDGNEEAMKEQLEQLKEHWDHLLERTNDKGKKLNEASRQQRFNTSIRDFEFWLSEAETLLAMKDQARDLASAGNLLKKHQLLEREMLAREDALKDLNTLAEDLLSSGTFNVDQIVKKKDNVNKRFLNVQELAAAHHEKLKEAYALFQFFQDLDDEESWIEEKLIRVSSQDYGRDLQGVQNLLKKHKRLEGELVAHEPAIQNVLDMAEKLKDKAAVGQEEIQLRLAQFVEHWEKLKELAKARGLKLEESLEYLQFMQNAEEEEAWINEKNALAVRGDCGDTLAATQSLLMKHEALENDFAVHETRVQNVCAQGEDILNKVLQEESQNKEISSKIEALNEKTPSLAKAIAAWKLQLEDDYAFQEFNWKADVVEAWIADKETSLKTNGNGADLGDFLTLLAKQDTLDASLQSFQQERLPEITDLKDKLISAQHNQSKAIEERYAALLKRWEQLLEASAVHRQKLLEKQLPLQKV

SEQ ID NO: 767963 - protein, 2263 aa, Homo sapiens
MEQFPKETVVESSGPKVLETAEEIQERRQEVLTRYQSFKERVAERGQKLEDSYHLQVFKRDADDLGKWIMEKVNILTDKSYEDPTNIQGKYQKHQSLEAEVQTKSRLMSELEKTREERFTMGHSAHEETKAHIEELRHLWDLLLELTLEKGDQLLRALKFQQYVQECADILEWIGDKEAIATSVELGEDWERTEVLHKKFEDFQVELVAKEGRVVEVNQYANECAEENHPDLPLIQSKQNEVNAAWERLRGLALQRQKALSNAANLQRFKRDVTEAIQWIKEKEPVLTSEDYGKDLVASEGLFHSHKGLERNLAVMSDKVKELCAKAEKLTLSHPSDAPQIQEMKEDLVSSWEHIRALATSRYEKLQATYWYHRFSSDFDELSGWMNEKTAAINADELPTDVAGGEVLLDRHQQHKHEIDSYDDRFQSADETGQDLVNANHEASDEVREKMEILDNNWTALLELWDERHRQYEQCLDFHLFYRDSEQVDSWMSRQEAFLENEDLGNSLGSAEALLQKHEDFEEAFTAQEEKIITVDKTATKLIGDDHYDSENIKAIRDGLLARRDALREKAATRRRLLKESLLLQKLYEDSDDLKNWINKKKKLADDEDYKDIQNLKSRVQKQQVFEKELAVNKTQLENIQKTGQEMIEGGHYASDNVTTRLSEVASLWEELLEATKQKGTQLHEANQQLQFENNAEDLQRWLEDVEWQVTSEDYGKGLAEVQNRLRKHGLLESAVAARQDQVDILTDLAAYFEEIGHPDSKDIRARQESLVCRFEALKEPLATRKKKLLELLHLQLICRDTEDEEAWIQETEPSATSTYLGKDLIASKKLLNRHRVILDNIASHEPRIQEITERGNKMVEEGHFAAEDVASRVKSLNQNMESLRARAARRQNDLEANVQFQQYLADLHEAETWIREKEPIVDNTNYGADEEAAGALLKKHEAFLLDLNSFGDSMKALRNQANACQQQQAAPVEGVAGEQRVMALYDFQARSPREVTMKKGDVLTLLSSINKDWWKVEAADHQGIVPAVYVRRLAHDEFPMLPQRRREEPGNITQRQEQIENQYRSLLDRAEERRRRLLQRYNEFLLAYEAGDMLEWIQEKKAENTGVELDDVWELQKKFDEFQKDLNTNEPRLRDINKVADDLLFEGLLTPEGAQIRQELNARWGSLQRLADEQRQLLGSAHAVEVFHREADDTKEQIEKKCQALSAADPGSDLFSVQALQRRHEGFERDLVPLGDKVTILGETAERLSESHPDATEDLQRQKMELNEAWEDLQGRTKDRKESLNEAQKFYLFLSKARDLQNWISSIGGMVSSQELAEDLTGIEILLERHQEHRADMEAEAPTFQALEDFSAELIDSGHHASPEIEKKLQAVKLERDDLEKAWEKRKKILDQCLELQMFQGNCDQVESRMVARENSLRSDDKSSLDSLEALMKKRDDLDKAITAQEGKITDLEHFAESLIADEHYAKEEIATRLQRVLDRWKALKAQLIDERTKLGDYANLKQFYRDLEELEEWISEMLPTACDESYKDATNIQRKYLKHQTFAHEVDGRSEQVHGVINLGNSLIERSCDGNEEAMKEQLEQLKEHWDHLLERTNDKGKKLNEASRQQRFNTSIRDFEFWLSEAETLLAMKDQARDLASAGNLLKKHQLLEREMLAREDALKDLNTLAEDLLSSGTFNVDQIVKKKDNVNKRFLNVQELAAAHHEKLKEAYALFQFFQDLDDEESWIEEKLIRVSSQDYGRDLQGVQNLLKKHKRLEGELVAHEPAIQNVLDMAEKLKDKAAVGQEEIQLRLAQFVEHWEKLKELAKARGLKLEESLEYLQFMQNAEEEEAWINEKNALAVRGDCGDTLAATQSLLMKHEALENDFAVHETRVQNVCAQGEDILNKVLQEESQNKEISSKIEALNEKTPSLAKAIAAWKLQLEDDYAFQEFNWKADVVEAWIADKETSLKTNGNGADLGDFLTLLAKQDTLDASLQSFQQERLPEITDLKDKLISAQHNQSKAIEERYAALLKRWEQLLEASAVHRQKLLEKQLPLQKAEDLFVEFAHKASALNNWCEKMEENLSEPVHCVSLNEIRQLQKDHEDFLASLARAQADFKCLLELDQQIKALGVPSSPYTWLTVEVLERTWKHLSDIIEEREQELQKEEARQVKNFEMCQEFEQNASTFLQWILETRAYFLDGSLLKETGTLESQLEANKRKQKEIQAMKRQLTKIVDLGDNLEDALILDIKYSTIGLAQQWDQLYQLGLRMQHNLEQQIQAKY

SEQ ID NO: 767964 - protein, 358 aa, Homo sapiens
MEENLSEPVHCVSLNEIRQLQKDHEDFLASLARAQADFKCLLELDQQIKALGVPSSPYTWLTVEVLERTWKHLSDIIEEREQELQKEEARQVKNFEMCQEFEQNASTFLQWILETRAYFLDGSLLKETGTLESQLEANKRKQKEIQAMKRQLTKIVDLGDNLEDALILDIKYSTIGLAQQWDQLYQLGLRMQHNLEQQIQAKDIKGVSEETLKEFSTIYKHFDENLTGRLTHKEFRSCLRGLNYYLPMVEEDEHEPKFEKFLDAVDPGRKGYVSLEDYTAFLIDKESENIKSSDEIENAFQALAEGKSYITKEDMKQALTPEQVSFCATHMQQYMDPRGRSHLSGYDYVGFTNSYFGN

SEQ ID NO: 767965 - protein, 1671 aa, Homo sapiens
MEQFPKETVVESSGPKVLETAEEIQERRQEVLTRYQSFKERVAERGQKLEDSYHLQVFKRDADDLGKWIMEKVNILTDKSYEDPTNIQGKYQKHQSLEAEVQTKSRLMSELEKTREERFTMGHSAHEETKAHIEELRHLWDLLLELTLEKGDQLLRALKFQQYVQECADILEWIGDKEAIATSVELGEDWERTEVLHKKFEDFQVELVAKEGRVVEVNQYANECAEENHPDLPLIQSKQNEVNAAWERLRGLALQRQKALSNAANLQRFKRDVTEAIQWIKEKEPVLTSEDYGKDLVASEGLFHSHKGLERNLAVMSDKVKELCAKAEKLTLSHPSDAPQIQEMKEDLVSSWEHIRALATSRYEKLQATYWYHRFSSDFDELSGWMNEKTAAINADELPTDVAGGEVLLDRHQQHKHEIDSYDDRFQSADETGQDLVNANHEASDEVREKMEILDNNWTALLELWDERHRQYEQCLDFHLFYRDSEQVDSWMSRQEAFLENEDLGNSLGSAEALLQKHEDFEEAFTAQEEKIITVDKTATKLIGDDHYDSENIKAIRDGLLARRDALREKAATRRRLLKESLLLQKLYEDSDDLKNWINKKKKLADDEDYKDIQNLKSRVQKQQVFEKELAVNKTQLENIQKTGQEMIEGGHYASDNVTTRLSEVASLWEELLEATKQKGTQLHEANQQLQFENNAEDLQRWLEDVEWQVTSEDYGKGLAEVQNRLRKHGLLESAVAARQDQVDILTDLAAYFEEIGHPDSKDIRARQESLVCRFEALKEPLATRKKKLLELLHLQLICRDTEDEEAWIQETEPSATSTYLGKDLIASKKLLNRHRVILDNIASHEPRIQEITERGNKMVEEGHFAAEDVASRVKSLNQNMESLRARAARRQNDLEANVQFQQYLADLHEAETWIREKEPIVDNTNYGADEEAAGALLKKHEAFLLDLNSFGDSMKALRNQANACQQQQAAPVEGVAGEQRVMALYDFQARSPREVTMKKGDVLTLLSSINKDWWKVEAADHQGIVPAVYVRRLAHDEFPMLPQRRREEPGNITQRQEQIENQYRSLLDRAEERRRRLLQRYNEFLLAYEAGDMLEWIQEKKAENTGVELDDVWELQKKFDEFQKDLNTNEPRLRDINKVADDLLFEGLLTPEGAQIRQELNARWGSLQRLADEQRQLLGSAHAVEVFHREADDTKEQIEKKCQALSAADPGSDLFSVQALQRRHEGFERDLVPLGDKVTILGETAERLSESHPDATEDLQRQKMELNEAWEDLQGRTKDRKESLNEAQKFYLFLSKARDLQNWISSIGGMVSSQELAEDLTGIEILLERHQEHRADMEAEAPTFQALEDFSAELIDSGHHASPEIEKKLQAVKLERDDLEKAWEKRKKILDQCLELQMFQGNCDQVESRMVARENSLRSDDKSSLDSLEALMKKRDDLDKAITAQEGKITDLEHFAESLIADEHYAKEEIATRLQRVLDRWKALKAQLIDERTKLGDYANLKQFYRDLEELEEWISEMLPTACDESYKDATNIQRKYLKHQTFAHEVDGRSEQVHGVINLGNSLIERSCDGNEEAMKEQLEQLKEHWDHLLERTNDKGKKLNEASRQQRFNTSIRDFEFWLSEAETLLAMKDQARDLASAGNLLKKHQLLEREMLAREVSSVGIPLLWAE

SEQ ID NO: 767966 - protein, 198 aa, Homo sapiens
RERRERPLASALGKPVYAPKMSKTGTKITFYEDKNFQGRRYDCDCDCADFHTYLSRCNSIKVEGGTWAVYERPNFAGYMYILPQGEYPEYQRWMGLNDRLSSCRAVHLPSGGQYKIQIFEKGDFSGQMYETTEDCPSIMEQFHMREIHSCKVLEGVWIFYELPNYRGRQYLLDKKEYRKPIDWGAASPAVQSFRRIVE

SEQ ID NO: 767967 - protein, 198 aa, Homo sapiens; identical to SEQ ID NO: 767966

SEQ ID NO: 767968 - protein, 120 aa, Homo sapiens
MYILPQGEYPEYQRWMGLNDRLSSCRAVHLPSGGQYKIQIFEKGDFSGQMYETTEDCPSIMEQFHMREIHSCKVLEGVWIFYELPNYRGRQYLLDKKEYRKPIDWGAASPAVQSFRRIVE

SEQ ID NO: 767969 - protein, 129 aa, Homo sapiens
KKKKKKETSFSLICACQKWQRSRKPPQTSVRPGQVCNRHQRLGGSWFCSPVPGRRKNPFTGENTETQSVLALITYLEGGRKGLCMQACLNLKQILSHCSGGVLSEPKTSCTSSPTYLYRSGRQGLPAAG

SEQ ID NO: 767970 - protein, 700 aa, Homo sapiens
MDLWNLSWFLFLDALLVISGLATPENFDVDGGMDQDIFDINEGLGLDLFEGDIRLDRAQIRNSIIGEKYRWPHTIPYVLEDSLEMNAKGVILNAFERYRLKTCIDFKPWAGETNYISVFKGSGCWSSVGNRRVGKQELSIGANCDRIATVQHEFLHALGFWHEQSRSDRDDYVRIMWDRILSGREHNFNTYSDDISDSLNVPYDYTSVMHYSKTAFQNGTEPTIVTRISDFEDVIGQRMDFSDSDLLKLNQLYNCSSSLSFMDSCSFELENVCGMIQSSGDNADWQRVSQVPRGPESDHSNMGQCQGSGFFMHFDSSSVNVGATAVLESRTLYPKRGFQCLQFYLYNSGSESDQLNIYIREYSADNVDGNLTLVEEIKEIPTGSWQLYHVTLKVTKKFRVVFEGRKGSGASLGGLSIDDINLSETRCPHHIWHIRNFTQFIGSPNGTLYSPPFYSSKGYAFQIYLNLAHVTNAGIYFHLISGANDDQLQWPCPWQQATMTLLDQNPDIRQRMSNQRSITTDPFMTTDNGNYFWDRPSKVGTVALFSNGTQFRRGGGYGTSAFITHERLKSRDFIKGDDVYILLTVEDISHLNSTQIQLTPAPSVQDLCSKTTCKNDGVCTVRDGKAECRCQSGEDWWYMGERCEKRGSTRDTIVIAVSSTVAVFALMLIITLVSVYCTRKKYRERMSSNRPNLTLQNHAF

SEQ ID NO: 767971 - protein, 123 aa, Homo sapiens
CEFDYLRKRRKSQTLSPVTSSSVASQSCLRKRMPWYLSVIHEKVLAEGVQIPAPHPSLCVRLGGQPCSLTGSGSSIWLAASSRSPWPKMTSRPPALTKLLTPVHPHPSGWQLRRHGTQTHRHA

SEQ ID NO: 767972 - protein, 212 aa, Homo sapiens [sequence omitted]

SEQ ID NO: 767973 - protein, 252 aa, Homo sapiens
MQPSSLLPLALCLLAAPASALVRIPLHKFTSIRRTMSEVGGSVEDLIAKGPVSKYSQAVPAVTEGPIPEVLKNYMDAQYYGEIGIGTPPQCFTVVFDTGSSNLWVPSIHCKLLDIACWIHHKYNSDKSSTYVKNGTSFDIHYGSGSLSGYLSQDTVSVPCQSASSASALGGVKVERQVFGGGHQAARHHLHRSQVRWHPGHGLPPHLRQQRAARLRQPDAAEAGGPEHLLLLPEQDTNGQPGVSCYTVSGTE

SEQ ID NO: 767974 - protein, 68 aa, Homo sapiens
MKTIPISPSNPPSIHCKLLDIACWIHHKYNSDKSSTYVKNGTSFDIHYGSGSLSGYLSQDTVSVSPSG

SEQ ID NO: 767975 - protein, 212 aa, Homo sapiens [sequence omitted]

SEQ ID NO: 767976 - protein, 212 aa, Homo sapiens [sequence omitted]

SEQ ID NO: 767977 - protein, 212 aa, Homo sapiens [sequence omitted]

SEQ ID NO: 767978 - protein, 212 aa, Homo sapiens [sequence omitted]

SEQ ID NO: 767979 - protein, 212 aa, Homo sapiens [sequence omitted]

SEQ ID NO: 767980 - protein, 212 aa, Homo sapiens [sequence omitted]

SEQ ID NO: 767981 - protein, 212 aa, Homo sapiens [sequence omitted]

SEQ ID NO: 767982 - protein, 212 aa, Homo sapiens [sequence omitted]

SEQ ID NO: 767983 - protein, 212 aa, Homo sapiens [sequence omitted]

SEQ ID NO: 767984 - protein, 428 aa, Homo sapiens
MQPSSLLPLALCLLAAPASALVRIPLHKFTSIRRTMSEVGGSVEDLIAKGPVSKYSQAVPAVTEGPIPEVLKNYMDAQYYGEIGIGTPPQCFTVVFDTGSSNLWVPSIHCKLLDIACWIHHKYNSDKSSTYVKNGTSFDIHYGSGSLSGYLSQDTVSVPCQSASSASALGGVKVERQVFGGGHQAARHHLHRSQVRWHPGHGLPPHLRQQRAARLRQPDAAEAGGPEHLLLLPEQDPDAQPGGELMLGGYRDPDAQPGGELMLGGTDSKYYKGSLSYLNVTRKAYWQVHLDQVEVASGLTLCKEGCEAIVDTGTSLMVGPVDEVRELQKAIGAVPLIQGEYMIPCEKVSTLPAITLKLGGKGYKLSPEDYTLKVSQAGKTLCLSGFMGMDIPPPSGPLWILGDVFIGRYYTVFDRDNNRVGFAEAARL

SEQ ID NO: 767985 - protein, 212 aa, Homo sapiens [sequence omitted]

SEQ ID NO: 767986 - protein, 212 aa, Homo sapiens [sequence omitted]

SEQ ID NO: 767987 - protein, 212 aa, Homo sapiens [sequence omitted]

SEQ ID NO: 767988 - protein, 212 aa, Homo sapiens [sequence omitted]

SEQ ID NO: 767989 - protein, 212 aa, Homo sapiens [sequence omitted]

SEQ ID NO: 767990 - protein, 212 aa, Homo sapiens [sequence omitted]

SEQ ID NO: 767991 - protein, 357 aa, Homo sapiens
MAYPRISVNNVLPVFDNLMQQKLVDQNIFSFYLSRDPDAQPGGELMLGGTDSKYYKGSLSYLNVTRKAYWQVHLDQVEVASGLTLCKEGCEAIVDTGTSLMVGPVDEVRELQKAIGAVPLIQGEYMIPCEKVSTLPAITLKLGGKGYKLSPEDYTLKAQGPGQCPAPLGDPASTTDGAQEARVPLDGAFWIPRPPAGSPKGCFACVSKPPALQAPAAPAPEPSASPPMAPTLFPMESKSSKTDSVRAAGAPPACKHLAEKKTMTNPTTVIEVYPDTTEVNDYYLWSIFNFVYLNFCCLGFIALAYSLKVRDKKLLNDLNGAVEDAKTARLFNITSSALAASCIILVFIFLRYPLTDY

SEQ ID NO: 767992 - protein, 357 aa, Homo sapiens; identical to SEQ ID NO: 767991

SEQ ID NO: 767993 - protein, 184 aa, Homo sapiens
MAQDAIEDPDAQPGGELMLGGTDSKYYKGSLSYLNVTRKAYWQVHLDQVEVASGLTLCKEGCEAIVDTGTSLMVGPVDEVRELQKAIGAVPLIQGEYMIPCEKVSTLPAITLKLGGKGYKLSPEDYTLKVSQAGKTLCLSGFMGMDIPPPSGPLWILGDVFIGRYYTVFDRDNNRVGFAEAARL

SEQ ID NO: 767994 - protein, 243 aa, Homo sapiens
MQPSSLLPLALCLLAAPASALVRIPLHKFTSIRRTMSEVGGSVEDLIAKGPVSKYSQAVPAVTEGPIPEVLKNYMDAQYYGEIGIGTPPQCFTVVFDTGSSNLWVPSIHCKLLDIACWIHHKYNSDKSSTYVKNGTSFDIHYGSGSLSGYLSQDTVSVPCQSASSASALGGVKVERQVFGGGHQAARHHLHRSQVRWHPGHGLPPHLRQQRAARLRQPDAAEAGGPEHLLLLPEQGPRCAAWG

SEQ ID NO: 767995 - protein, 243 aa, Homo sapiens; identical to SEQ ID NO: 767994

SEQ ID NO: 767996 - protein, 198 aa, Homo sapiens
MLGGTDSKYYKGSLSYLNVTRKAYWQVHLDQVEVASGLTLCKEGCEAIVDTGTSLMVGPVDEVRELQKAIGAVPLIQGEVSAGGWGWGWGWQGEPQGHHYHPDTAVTPLQYMIPCEKVSTLPAITLKLGGKGYKLSPEDYTLKVSQAGKTLCLSGFMGMDIPPPSGPLWILGDVFIGRYYTVFDRDNNRVGFAEAARL

SEQ ID NO: 767997 - protein, 70 aa, Homo sapiens
KARYETAVKFGRGLKVSQAGKTLCLSGFMGMDIPPPSGPLWILGDVFIGRYYTVFDRDNNRVGFAEAARL

SEQ ID NO: 767998 - protein, 74 aa, Homo sapiens
  misc_feature (5)..(5): Xaa can be any naturally occurring amino acid
GYRSXLGGKATAVQRLHAQVSQAGKTLCLSGFMGMDIPPPSGPLWILGDVFIGRYYTVFDRDNNRVGFAEAARL

SEQ ID NO: 767999 - protein, 142 aa, Homo sapiens
PHDQWWGTRQGGLRRGCPPLVPKASARQHRNRGESQSRRPLAQRPLPHTPTHSPAHCPGRPGSRRPKPDLLFCSVVFPSLGSEMLPACLSLHLFGGGRADPEHRSVSCIGRPHPSLAAELVYPGAPFISRESPPRPYQRPLG

SEQ ID NO: 768000 - protein, 258 aa, Homo sapiens [sequence omitted]

SEQ ID NO: 768001 - protein, 277 aa, Homo sapiens
GFRVRHRQADRTPSRTGLPDRKEGCGDTGGQLRVAEEKGVSWEDGAWREMREGKRGPPCILSFRGTLERVEAQWELEAQGPGQCPAPLGDPASTTDGAQEARVPLDGAFWIPRPPAGSPKGCFACVSKPPALQAPAAPAPEPSASPPMAPTLFPMESKSSKTDSVRAAGAPPACKHLAEKKTMTNPTTVIEVYPDTTEVNDYYLWSIFNFVYLNFCCLGFIALAYSLKVRDKKLLNDLNGAVEDAKTARLFNITSSALAASCIILVFIFLRYPLTDY

SEQ ID NO: 768002 - protein, 134 aa, Homo sapiens
MQPSSLLPLALCLLAAPASALVRIPLHKFTSIRRTMSEVGGSVEDLIAKGPVSKYSQAVPAVTEGPIPEVLKNYMDAQYYGEIGIGTPPQCFTVVFDTGSSNLWVPSIHCKLLDIACWNPTNKVTNKRTKSKQP

SEQ ID NO: 768003 - protein, 258 aa, Homo sapiens [sequence omitted]

SEQ ID NO: 768004 - protein, 292 aa, Homo sapiens
GFRVRHRQADRTPSRTGLPDRKEGCGDTGGQLRVAEEKGVSWEDGAWREMREGKRGPPCILSFRGTLERVEAQWELEVGPLGGGSVDRQRPAGRRKDARTEAQGVRPRAEESLVGEEAPSGGLRQTRMGLGAAEPRPQTPRRAPHGSWERGVAQSASDLVPRWRSVHFTACYCASMYGPGVRGSGQVCALGVPRLEVGGGAHELETPHLCRFLVLVAEPASPCVGSCLLVNGSERARGCAPGSGEPAVQPAVEPWRCPWRYRVSAGAVGRCFGRSASSAGWRLRQRRCGSGA

SEQ ID NO: 768005 - protein, 310 aa, Homo sapiens
FGRVGRCLGPCAFLLAGVVFTAVFRGVAGLSRYRRRFVVTVGVSVCVLAVFPSWCWTFDVVCRVVPGGTCVRGCSLVSCLGVWCVDGEVLPGPARGLVFGPSRPSRSVRARLEFRTAGFVSELFACNKLKLHRVFSSACVMPASSRGRSISLVKSKAWPSGPSHTHPHTRPPTVLGALEAGGPSPTCCFVLWFSPPWVQKCCLPVCLSICLVGVELIQSTDLFRALEDPTQAWQPSSCILGLPSSPGSPLPGPTSARWAEPLPHTRPSSRALPWKPALPEGPSAQLGPSWALPPYLFSVPGPLRMRPLEA

SEQ ID NO: 768006 - protein, 102 aa, Homo sapiens
SSWSRPQSLACTDLFRALEDPTQAWQPSSCILGLPSSPGSPLPGPTSARWAEPLPHTRPSSRALPWKPALPEGPSAQLGPSWALPPYLFSVPGPLRMRPLEA

SEQ ID NO: 768007 - protein, 212 aa, Homo sapiens [sequence omitted]

SEQ ID NO: 768008 - protein, 212 aa, Homo sapiens [sequence omitted]

SEQ ID NO: 768009 - protein, 212 aa, Homo sapiens [sequence omitted]

SEQ ID NO: 768010 - protein, 212 aa, Homo sapiens [sequence omitted]

SEQ ID NO: 768011 - protein, 212 aa, Homo sapiens [sequence omitted]

SEQ ID NO: 768012 - protein, 212 aa, Homo sapiens [sequence omitted]

SEQ ID NO: 768013 - protein, 212 aa, Homo sapiens [sequence omitted]

SEQ ID NO: 768014 - protein, 212 aa, Homo sapiens [sequence omitted]

SEQ ID NO: 768015 - protein, 212 aa, Homo sapiens [sequence omitted]

SEQ ID NO: 768016 - protein, 212 aa, Homo sapiens [sequence omitted]

SEQ ID NO: 768017 - protein, 212 aa, Homo sapiens [sequence omitted]

SEQ ID NO: 768018 - protein, 280 aa, Homo sapiens
MGGADAHPLVGGADSNPSGGWCLAQCPASQRRQPLPWAVSKWRGRSLGEATKQPGITFIAAKFDGILGMAYPRISVNNVLPVFDNLMQQKLVDQNIFSFYLSRDPDAQPGGELMLGGTDSKYYKGSLSYLNVTRKAYWQVHLDQVEVASGLTLCKEGCEAIVDTGTSLMVGPVDEVRELQKAIGAVPLIQGEYMIPCEKVSTLPAITLKLGGKGYKLSPEDYTLKVSQAGKTLCLSGFMGMDIPPPSGPLWILGDVFIGRYYTVFDRDNNRVGFAEAARL

SEQ ID NO: 768019 - protein, 212 aa, Homo sapiens [sequence omitted]

SEQ ID NO: 768020 - protein, 212 aa, Homo sapiens [sequence omitted]

SEQ ID NO: 768021 - protein, 212 aa, Homo sapiens [sequence omitted]

SEQ ID NO: 768022 - protein, 252 aa, Homo sapiens
LCLCVVLVVDPAMRRPAVCSGWRGPTGLEEPVSKTTVKHWGGVPMPISTSVLPVFDNLMQQKLVDQNIFSFYLSRDPDAQPGGELMLGGTDSKYYKGSLSYLNVTRKAYWQVHLDQVEVASGLTLCKEGCEAIVDTGTSLMVGPVDEVRELQKAIGAVPLIQGEYMIPCEKVSTLPAITLKLGGKGYKLSPEDYTLKVSQAGKTLCLSGFMGMDIPPPSGPLWILGDVFIGRYYTVFDRDNNRVGFAEAARL

SEQ ID NO: 768023 - protein, 190 aa, Homo sapiens
MSSEMLVLIRTRQDPDAQPGGELMLGGTDSKYYKGSLSYLNVTRKAYWQVHLDQVEVASGLTLCKEGCEAIVDTGTSLMVGPVDEVRELQKAIGAVPLIQGEYMIPCEKVSTLPAITLKLGGKGYKLSPEDYTLKVSQAGKTLCLSGFMGMDIPPPSGPLWILGDVFIGRYYTVFDRDNNRVGFAEAARL

SEQ ID NO: 768024 - protein, 186 aa, Homo sapiens
HQLGPWLAEDPDAQPGGELMLGGTDSKYYKGSLSYLNVTRKAYWQVHLDQVEVASGLTLCKEGCEAIVDTGTSLMVGPVDEVRELQKAIGAVPLIQGEYMIPCEKVSTLPAITLKLGGKGYKLSPEDYTLKVSQAGKTLCLSGFMGMDIPPPSGPLWILGDVFIGRYYTVFDRDNNRVGFAEAARL

SEQ ID NO: 768025 - protein, 243 aa, Homo sapiens; identical to SEQ ID NO: 767994

SEQ ID NO: 768026 - protein, 110 aa, Homo sapiens
RRHPGYKRTARQNLSVPLIQGEYMIPCEKVSTLPAITLKLGGKGYKLSPEDYTLKVSQAGKTLCLSGFMGMDIPPPSGPLWILGDVFIGRYYTVFDRDNNRVGFAEAARL

SEQ ID NO: 768027 - protein, 67 aa, Homo sapiens
PRAAGIRHGTLKVSQAGKTLCLSGFMGMDIPPPSGPLWILGDVFIGRYYTVFDRDNNRVGFAEAARL

SEQ ID NO: 768028 - protein, 84 aa, Homo sapiens
FLRIGFPGLRDLERVVLWGQLVAVPPSFSVSQAGKTLCLSGFMGMDIPPPSGPLWILGDVFIGRYYTVFDRDNNRVGFAEAARL

SEQ ID NO: 768029 - protein, 199 aa, Homo sapiens
MQPSSLLPLALCLLAAPASALVRIPLHKFTSIRRTMSEVGGSVEDLIAKGPVSKYSQAVPAVTEGPIPEVLKNYMDLVPKASARQHRNRGESQSRRPLAQRPLPHTPTHSPAHCPGRPGSRRPKPDLLFCSVVFPSLGSEMLPACLSLHLFGGGRADPEHRSVSCIGRPHPSLAAELVYPGAPFISRESPPRPYQRPLG

SEQ ID NO: 768030 - protein, 314 aa, Homo sapiens
GFRVRHRQADRTPSRTGLPDRKEGCGDTGGQLRVAEEKGVSWEDGAWREMREGKRGPPCILSFRGTLERVEAQWELEVGPLGGGSVDRQRPAGRRKDARTEAQGVRPRAEESLVAQGPGQCPAPLGDPASTTDGAQEARVPLDGAFWIPRPPAGSPKGCFACVSKPPALQAPAAPAPEPSASPPMAPTLFPMESKSSKTDSVRAAGAPPACKHLAEKKTMTNPTTVIEVYPDTTEVNDYYLWSIFNFVYLNFCCLGFIALAYSLKVRDKKLLNDLNGAVEDAKTARLFNITSSALAASCIILVFIFLRYPLTDY

SEQ ID NO: 768031 - protein, 216 aa, Homo sapiens
CWPVGRAQLALTFSLQAQGPGQCPAPLGDPASTTDGAQEARVPLDGAFWIPRPPAGSPKGCFACVSKPPALQAPAAPAPEPSASPPMAPTLFPMESKSSKTDSVRAAGAPPACKHLAEKKTMTNPTTVIEVYPDTTEVNDYYLWSIFNFVYLNFCCLGFIALAYSLKVRDKKLLNDLNGAVEDAKTARLFNITSSALAASCIILVFIFLRYPLTDY

SEQ ID NO: 768032 - protein, 143 aa, Homo sapiens
MQPSSLLPLALCLLAAPASALVRIPLHKFTSIRRTMSEVGGSVEDLIAKGPVSKYSQAVPAVTEGPIPEVLKNYMDAQYYGEIGIGTPPQCFTVVRRPSGPVRSEEERQPGERRGRQASRSSLFTSLFPSQQEIEEGTGPSGP

SEQ ID NO: 768033 - protein, 859 aa, Homo sapiens
MQAAVAVSVPFLLLCVLGTCPPARCGQAGDASLMELEKRKENRFVERQSIVPLRLIYRSGGEDESRHDALDTRVRGDLGGPQLTHVDQASFQVDAFGTSFILDVVLNHDLLSSEYIERHIEHGGKTVEVKGGEHCYYQGHIRGNPDSFVALSTCHGLHGMFYDGNHTYLIEPEENDTTQEDFHFHSVYKSRLFEFSLDDLPSEFQQVNITPSKFILKPRPKRSKRQLRRYPRNVEEETKYIELMIVNDHLMFKKHRLSVVHTNTYAKSVVNMADLIYKDQLKTRIVLVAMETWATDNKFAISENPLITLREFMKYRRDFIKEKSDAVHLFSGSQFESSRSGAAYIGGICSLLKGGGVNEFGKTDLMAVTLAQSLAHNIGIISDKRKLASGECKCEDTWSGCIMGDTGYYLPKKFTQCNIEEYHDFLNSGGGACLFNKPSKLLDPPECGNGFIETGEECDCGTPAECVLEGAECCKKCTLTQDSQCSDGLCCKKCKFQPMGTVCREAVNDCDIRETCSGNSSQCAPNIHKMDGYSCDGVQGICFGGRCKTRDRQCKYIWGQKVTASDKYCYEKLNIEGTEKGNCGKDKDTWIQCNKRDVLCGYLLCTNIGNIPRLGELDGEITSTLVVQQGRTLNCSGGHVKLEEDVDLGYVEDGTPCGPQMMCLEHRCLPVASFNFSTCLSSKEGTICSGNGVCSNELKCVCNRHWIGSDCNTYFPHNDDAKTGITLSGNGVAGTNIIIGIIAGTILVLALILGITAWGYKNYREQRQLPQGDYVKKPGDGDSFYSDIPPGVSTNSASSSKKRSNGLSHSWSERIPDTKHISDICENGRPRSNSWQGNLGGNKKKIRGKRFRPRSNSTE

SEQ ID NO: 768034 - protein, 817 aa, Homo sapiens
MQAAVAVSVPFLLLCVLGTCPPARCGQAGDASLMELEKRKENRFVERQSIVPLRLIYRSGGEDESRHDALDTRVRGDLGGPQLTHVDQASFQVDAFGTSFILDVVLNHDLLSSEYIERHIEHGGKTVEVKGGEHCYYQGHIRGNPDSFVALSTCHGLHGMFYDGNHTYLIEPEENDTTQEDFHFHSVYKSRLFEFSLDDLPSEFQQVNITPSKFILKPRPKRSKRQLRRYPRNVEEETKYIELMIVNDHLMFKKHRLSVVHTNTYAKSVVNMADLIYKDQLKTRIVLVAMETWATDNKFAISENPLITLREFMKYRRDFIKEKSDAVHLFSGSQFESSRSGAAYIGGICSLLKGGGVNEFGKTDLMAVTLAQSLAHNIGIISDKRKLASGECKCEDTWSGCIMGDTGYYLPKKFTQCNIEEYHDFLNSGGGACLFNKPSKLLDPPECGNGFIETGEECDCGTPAECVLEGAECCKKCTLTQDSQCSDGLCCKKCKFQPMGTVCREAVNDCDIRETCSGNSSQCAPNIHKMDGYSCDGVQGICFGGRCKTRDRQCKYIWGQKVTASDKYCYEKLNIEGTEKGNCGKDKDTWIQCNKRDVLCGYLLCTNIGNIPRLGELDGEITSTLVVQQGRTLNCSGGHVKLEEDVDLGYVEDGTPCGPQMMCLEHRCLPVASFNFSTCLSSKEGTICSGNGVCSNELKCVCNRHWIGSDCNTYFPHNDDAKTGITLSGNGVAGTNIIIGIIAGTILVLALILGITAWGYKSNGLSHSWSERIPDTKHISDICENGRPRSNSWQGNLGGNKKKIRGKRFRPRSNSTE

SEQ ID NO: 768035 - protein, 906 aa, Homo sapiens
MQAAVAVSVPFLLLCVLGTCPPARCGQAGDASLMELEKRKENRFVERQSIVPLRLIYRSGGEDESRHDALDTRVRGDLGGPQLTHVDQASFQVDAFGTSFILDVVLNHDLLSSEYIERHIEHGGKTVEVKGGEHCYYQGHIRGNPDSFVALSTCHGLHGMFYDGNHTYLIEPEENDTTQEDFHFHSVYKSRLFEFSLDDLPSEFQQVNITPSKFILKPRPKRSKRQLRRYPRNVEEETKYIELMIVNDHLMFKKHRLSVVHTNTYAKSVVNMADLIYKDQLKTRIVLVAMETWATDNKFAISENPLITLREFMKYRRDFIKEKSDAVHLFSGSQFESSRSGAAYIGGICSLLKGGGVNEFGKTDLMAVTLAQSLAHNIGIISDKRKLASGECKCEDTWSGCIMGDTGYYLPKKFTQCNIEEYHDFLNSGGGACLFNKPSKLLDPPECGNGFIETGEECDCGTPAECVLEGAECCKKCTLTQDSQCSDGLCCKKCKFQPMGTVCREAVNDCDIRETCSGNSSQCAPNIHKMDGYSCDGVQGICFGGRCKTRDRQCKYIWGQKVTASDKYCYEKLNIEGTEKGNCGKDKDTWIQCNKRDVLCGYLLCTNIGNIPRLGELDGEITSTLVVQQGRTLNCSGGHVKLEEDVDLGYVEDGTPCGPQMMCLEHRCLPVASFNFSTCLSSKEGTICSGNGVCSNELKCVCNRHWIGSDCNTYFPHNDDAKTGITLSGNGVAGTNIIIGIIAGTILVLALILGITAWGYKNYREQRQLPQGDYVKKPGDGDSFYSDIPPGVSTNSASSSKKRSNGLSHSWSERIPDTKHISDICENGRPRSNSWQGNLGGNKKKIRGKRFRPRSNSTETLSPAKSPSSSTGSIASSRKYPYPMPPLPDEDKKVNRQSARLWETSI

SEQ ID NO: 768036 - protein, 870 aa, Homo sapiens
MQAAVAVSVPFLLLCVLGTCPPARCGQAGDASLMELEKRKENRFVERQSIVPLRLIYRSGGEDESRHDALDTRVRGDLGGPQLTHVDQASFQVDAFGTSFILDVVLNHDLLSSEYIERHIEHGGKTVEVKGGEHCYYQGHIRGNPDSFVALSTCHGLHGMFYDGNHTYLIEPEENDTTQEDFHFHSVYKSRLFEFSLDDLPSEFQQVNITPSKFILKPRPKRSKRQLRRYPRNVEEETKYIELMIVNDHLMFKKHRLSVVHTNTYAKSVVNMADLIYKDQLKTRIVLVAMETWATDNKFAISENPLITLREFMKYRRDFIKEKSDAVHLFSGSQFESSRSGAAYIGGICSLLKGGGVNEFGKTDLMAVTLAQSLAHNIGIISDKRKLASGECKCEDTWSGCIMGDTGYYLPKKFTQCNIEEYHDFLNSGGGACLFNKPSKLLDPPECGNGFIETGEECDCGTPAECVLEGAECCKKCTLTQDSQCSDGLCCKKCKFQPMGTVCREAVNDCDIRETCSGNSSQCAPNIHKMDGYSCDGVQGICFGGRCKTRDRQCKYIWGQKVTASDKYCYEKLNIEGTEKGNCGKDKDTWIQCNKRDVLCGYLLCTNIGNIPRLGELDGEITSTLVVQQGRTLNCSGGHVKLEEDVDLGYVEDGTPCGPQMMCLEHRCLPVASFNFSTCLSSKEGTICSGNGVCSNELKCVCNRHWIGSDCNTYFPHNDDAKTGITLSGNGVAGTNIIIGIIAGTILVLALILGITAWGYKNYREQRSNGLSHSWSERIPDTKHISDICENGRPRSNSWQGNLGGNKKKIRGKRFRPRSNSTETLSPAKSPSSSTGSIASSRKYPYPMPPLPDEDKKVNRQSARLWETSI

SEQ ID NO: 768037 - protein, 899 aa, Homo sapiens [sequence omitted]

SEQ ID NO: 768038 - protein, 887 aa, Homo sapiens
MQAAVAVSVPFLLLCVLGTCPPARCGQAGDASLMELEKRKENRFVERQSIVPLRLIYRSGGEDESRHDALDTRVRGDLGGPQIQMFLKSESQKTIYQIQLTHVDQASFQVDAFGTSFILDVVLNHDLLSSEYIERHIEHGGKTVEVKGGEHCYYQGHIRGNPDSFVALSTCHGLHGMFYDGNHTYLIEPEENDTTQEDFHFHSVYKSRLFEFSLDDLPSEFQQVNITPSKFILKPRPKRSKRQLRRYPRNVEEETKYIELMIVNDHLMFKKHRLSVVHTNTYAKSVVNMADLIYKDQLKTRIVLVAMETWATDNKFAISENPLITLREFMKYRRDFIKEKSDAVHLFSGSQFESSRSGAAYIGGICSLLKGGGVNEFGKTDLMAVTLAQSLAHNIGIISDKRKLASGECKCEDTWSGCIMGDTGYYLPKKFTQCNIEEYHDFLNSGGGACLFNKPSKLLDPPECGNGFIETGEECDCGTPAECVLEGAECCKKCTLTQDSQCSDGLCCKKCKFQPMGTVCREAVNDCDIRETCSGNSSQCAPNIHKMDGYSCDGVQGICFGGRCKTRDRQCKYIWGQKVTASDKYCYEKLNIEGTEKGNCGKDKDTWIQCNKRDVLCGYLLCTNIGNIPRLGELDGEITSTLVVQQGRTLNCSGGHVKLEEDVDLGYVEDGTPCGPQMMCLEHRCLPVASFNFSTCLSSKEGTICSGNGVCSNELKCVCNRHWIGSDCNTYFPHNDDAKTGITLSGNGVAGTNIIIGIIAGTILVLALILGITAWGYKNYREQRSNGLSHSWSERIPDTKHISDICENGRPRSNSWQGNLGGNKKKIRGKRFRPRSNSTETLSPAKSPSSSTGSIASSRKYPYPMPPLPDEDKKVNRQSARLWETSI

SEQ ID NO: 768039 - protein, 278 aa, Homo sapiens
MDTGDVLCGYLLCTNIGNIPRLGELDGEITSTLVVQQGRTLNCSGGHVKLEEDVDLGYVEDGTPCGPQMMCLEHRCLPVASFNFSTCLSSKEGTICSGNGVCSNELKCVCNRHWIGSDCNTYFPHNDDAKTGITLSGNGVAGTNIIIGIIAGTILVLALILGITAWGYKNYREQRSNGLSHSWSERIPDTKHISDICENGRPRSNSWQGNLGGNKKKIRGKRFRPRSNSTETLSPAKSPSSSTGSIASSRKYPYPMPPLPDEDKKVNRQSARLWETSI

SEQ ID NO: 768040 - protein, 438 aa, Homo sapiens
MPCTCTWRNWRQWIRPLVAVIYLVSIVVAVPLCVWELQKLEVGIHTKAWFIAGIFLLLTIPISLWVILQHLVHYTQPELQKPIIRILWMVPIYSLDSWIALKYPGIAIYVDTCRECYEAYVIYNFMGFLTNYLTNRYPNLVLILEAKDQQKHFPPLCCCPPWAMGEVLLFRCKLGVLQYTVVRPFTTIVALICELLGIYDEGNFSFSNAWTYLVIINNMSQLFAMYCLLLFYKVLKEELSPIQPVGKFLCVKLVVFVSFWQAVVIALLVKVGVISEKHTWEWQTVEAVATGLQDFIICIEMFLAAIAHHYTFSYKPYVQEAEEGSCFDSFLAMWDVSDIRDDISEQVRHVGRTVRGHPRKKLFPEDQDQNEHTSLLSSSSQDAISIASSMPPSPMGHYQGFGHTVTPQTTPTTAKISDEILSDTIGEKKEPSDKSVDS

SEQ ID NO: 768041 - protein, 438 aa, Homo sapiens; identical to SEQ ID NO: 768040

SEQ ID NO: 768042 - protein, 438 aa, Homo sapiens; identical to SEQ ID NO: 768040

SEQ ID NO: 768043 - protein, 438 aa, Homo sapiens; identical to SEQ ID NO: 768040

SEQ ID NO: 768044 - protein, 438 aa, Homo sapiens; identical to SEQ ID NO: 768040

SEQ ID NO: 768045 - protein, 138 aa, Homo sapiens [sequence omitted]

SEQ ID NO: 768046 - protein, 438 aa, Homo sapiens; identical to SEQ ID NO: 768040

SEQ ID NO: 768047 - protein, 233 aa, Homo sapiens
MPCTCTWRNWRQWIRPLVAVIYLVSIVVAVPLCVWELQKLEVGIHTKAWFIAGIFLLLTIPISLWVILQHLVHYTQPELQKPIIRILWMVPIYSLDSWIALKYPGIAIYVDTCRECYEAYVIYNFMGFLTNYLTNRYPNLVLILEAKDQQKHFPPLCCCPPWAMGEVLLFRCKLGVLQYTVVRPFTTIVALICELLGIYDEGNFSFSNAWTYLVIINNMSQLVSKMFTFLKLY

SEQ ID NO: 768048 - protein, 376 aa, Homo sapiens
MNRSFHKSQTLRFYDCSAVEVKSKFGAEFRRFSLDRHKPGKFEDFYKLVVHTHHISNSDVTIGYADVHGDLLPINNDDNFCKAVSSANPLLRVFIQKREEAERGSLGAGSLCRRRRALGALRDEGPRRRAHLDIGLPRDFRPVSSIIDVDLVPETHRRVRLHRHGCEKPLGFYIRDGASVRVTPHGLEKVPGIFISRMVPGGLAESTGLLAVNDEVLEVNGIEVAGKTLDQVTDMMIANSHNLIVTVKPANQRNNVVRGGRALGSSGPPSDGTAGFVGPPAPRVLQNFHPDEAESDEDNDVVIEGTLEPARPPQTPGAPAGSLSRVNGAGLAQRLQRDLALDGGLQRLLSSLRADPRHSLALPPGGVEEHGPAVTL

SEQ ID NO: 768049 - protein, 299 aa, Homo sapiens
MTAEGSGGARLCVPSNCPLSPEEAERGSLGAGSLCRRRRALGALRDEGPRRRAHLDIGLPRDFRPVSSIIDVDLVPETHRRVRLHRHGCEKPLGFYIRDGASVRVTPHGLEKVPGIFISRMVPGGLAESTGLLAVNDEVLEVNGIEVAGKTLDQVTDMMIANSHNLIVTVKPANQRNNVVRGGRALGSSGPPSDGTAGFVGPPAPRVLQNFHPDEAESDEDNDVVIEGTLEPARPPQTPGAPAGSLSRVNGAGLAQRLQRDLALDGGLQRLLSSLRADPRHSLALPPGGVEEHGPAVTL

SEQ ID NO: 768050 - protein, 107 aa, Homo sapiens
MNRSFHKSQTLRFYDCSAVEVKSKFGAEFRRFSLDRHKPGKFEDFYKLVVHTHHISNSDVTIGYADVHGDLLPINNDDNFCKAVSSANPLLRVFIQKRDDGALRPGT

SEQ ID NO: 768051 - protein, 102 aa, Homo sapiens
MNRSFHKSQTLRFYDCSAVEVKSKFGAEFRRFSLDRHKPGKFEDFYKLVVHTHHISNSDVTIGYADVHGDLLPINNDDNFCKAVSSANPLLRVFIQKRGGEH

SEQ ID NO: 768052 - protein, 818 aa, Homo sapiens [sequence omitted]

SEQ ID NO: 768053 - protein, 157 aa, Homo sapiens
ICHPLHYTARMNLCLCVQLVAGLWLVTYLHALLHTVLIAQLSFCASNIIHHFFCDLNPLLQLSCSDVSFNVMIIFAVGGLLALTPLVCILVSYGLIFSTVLKITSTQGKQRAVSTCSCHLSVVVLFYGTAIAVYFSPSSPHMPESDTLSTIMYSMVA

SEQ ID NO: 768054 - protein, 180 aa, Homo sapiens
MALTQGQVTFRDVAIEFSQEEWTCLDPAQRTLYRDVMLENYRNLASLGISCFDLSIISMLEQGKEPFTLESQVQIAGNPDGWEWIKAVITALSSEFVMKDLLHKGKSNTGEVFQTVMLERQESQDIEGCSFREVQKNTHGLEYQCRDAEGNYKGVLLTQEGNLTHGRDEPDKKRCKKQAY

SEQ ID NO: 768055 - protein, 177 aa, Homo sapiens
IQEYQFLDQEDWGPQRTSKEIRQLQNDCMRLRESLNTTQVHNLALGEKLQNLPTLLYKSLKEGAQAIQEEAQAIQDEVKALQEESQACRRWLCSGVRAAMAAGREEAAAPCCSLELSLPAVTQTPGRQVSSSSCLTCPTTTETRVRPGRPQARGRTPPREAAPSASSSLDPRNKLGS

SEQ ID NO: 768056 - protein, 310 aa, Homo sapiens
MRRAALWLWLCALALSLQPALPQIVATNLPPEDQDGSGDDSDNFSGSGAGALQDITLSQQTPSTWKDTQLLTAIPTSPEPTGLEATAASTSTLPAGEGPKEGEAVVLPEVEPGLTAREQEATPRPRETTQLPTTHQASTTTATTAQEPATSHPHRDMQPGHHETSTPAGPSQADLHTPHTEDGGPSATERAAEDGASSQLPAAEGSGEQDFTFETSGENTAVVAVEPDRRNQSPVDQGATGASQGLLDRKEVLGGVIAGGLVGLIFAVCLVGFMLYRMKKKDEGSYSLEEPKQANGGAYQKPTKQEEFYA

SEQ ID NO: 768057 - protein, 310 aa, Homo sapiens; identical to SEQ ID NO: 768056

SEQ ID NO: 768058 - protein, 310 aa, Homo sapiens; identical to SEQ ID NO: 768056

SEQ ID NO: 768059 - protein, 310 aa, Homo sapiens; identical to SEQ ID NO: 768056

SEQ ID NO: 768060 - protein, 305 aa, Homo sapiens
AETRPSLYSYHILILFQQIVATNLPPEDQDGSGDDSDNFSGSGAGALQDITLSQQTPSTWKDTQLLTAIPTSPEPTGLEATAASTSTLPAGEGPKEGEAVVLPEVEPGLTAREQEATPRPRETTQLPTTHQASTTTATTAQEPATSHPHRDMQPGHHETSTPAGPSQADLHTPHTEDGGPSATERAAEDGASSQLPAAEGSGEQDFTFETSGENTAVVAVEPDRRNQSPVDQGATGASQGLLDRKEVLGGVIAGGLVGLIFAVCLVGFMLYRMKKKDEGSYSLEEPKQANGGAYQKPTKQEEFYA

SEQ ID NO: 768061 - protein, 310 aa, Homo sapiens; identical to SEQ ID NO: 768056

SEQ ID NO: 768062 - protein, 154 aa, Homo sapiens [sequence omitted]

SEQ ID NO: 768063 - protein, 154 aa, Homo sapiens [sequence omitted]

SEQ ID NO: 768064 - protein, 150 aa, Homo sapiens
EDLGAFPAGPSQADLHTPHTEDGGPSATERAAEDGASSQLPAAEGSGEQDFTFETSGENTAVVAVEPDRRNQSPVDQGATGASQGLLDRKEVLGGVIAGGLVGLIFAVCLVGFMLYRMKKKDEGSYSLEEPKQANGGAYQKPTKQEEFYA

SEQ ID NO: 768065 - protein, 310 aa, Homo sapiens; identical to SEQ ID NO: 768056

SEQ ID NO: 768066 - protein, 310 aa, Homo sapiens; identical to SEQ ID NO: 768056

SEQ ID NO: 768067 - protein, 310 aa, Homo sapiens; identical to SEQ ID NO: 768056

SEQ ID NO: 768068 - protein, 310 aa, Homo sapiens; identical to SEQ ID NO: 768056

SEQ ID NO: 768069 - protein, 310 aa, Homo sapiens; identical to SEQ ID NO: 768056

SEQ ID NO: 768070 - protein, 105 aa, Homo sapiens [sequence omitted]

SEQ ID NO: 768071 - protein, 105 aa, Homo sapiens [sequence omitted]

SEQ ID NO: 768072 - protein, 310 aa, Homo sapiens; identical to SEQ ID NO: 768056

SEQ ID NO: 768073 - protein, 105 aa, Homo sapiens [sequence omitted]

SEQ ID NO: 768074 - protein, 137 aa, Homo sapiens
MRRAALWLWLCALALSLQPALPQIVATNLPPEDQDGSGDDSDNFSGSGAGALQDITLSQQTPSTWKDTQLLTAIPTSPEPTGLEATAASTSTLPAGEGPKEGEAVVLPEVEPGLTAREQEATPRPRERVKKTFFFFF

SEQ ID NO: 768075 - protein, 310 aa, Homo sapiens; identical to SEQ ID NO: 768056

SEQ ID NO: 768076 - protein, 310 aa, Homo sapiens; identical to SEQ ID NO: 768056

SEQ ID NO: 768077 - protein, 235 aa, Homo sapiens
MRRAALWLWLCALALSLQPALPQIVATNLPPEDQDGSGDDSDNFSGSGAGALQDITLSQQTPSTWKDTQLLTAIPTSPEPTGLEATAASTSTLPAGEGPKEGEAVVLPEVEPGLTAREQEATPRPRETTQLPTTHQASTTTATTAQEPATSHPHRDMQPGHHETSTPAGPSQADLHIHPRPGSPLAPVAPPWALGWNQEYFPKSDSLLLLAKLYLIQWVFPCTVDFPNVINFNIK

SEQ ID NO: 768078 - protein, 310 aa, Homo sapiens; identical to SEQ ID NO: 768056

SEQ ID NO: 768079 - protein, 105 aa, Homo sapiens [sequence omitted]

SEQ ID NO: 768080 - protein, 105 aa, Homo sapiens [sequence omitted]

SEQ ID NO: 768081 - protein, 310 aa, Homo sapiens; identical to SEQ ID NO: 768056

SEQ ID NO: 768082 - protein, 231 aa, Homo sapiens
MRRAALWLWLCALALSLQPALPQIVATNLPPEDQDGSGDDSDNFSGSGAGALQDITLSQQTPSTWKDTQLLTAIPTSPEPTGLEATAASTSTLPAGEGPKEGEAVVLPEVEPGLTAREQEATPRPRETTQLPTTHQASTTTATTAQEPATSHPHRDMQPGHHETSTPAGPSQADLHTPPCRLEEGPKEGEAVVLPEVEPGLTAREQEATPPTQGDHTAPDHSSGLNDHSHH

SEQ ID NO: 768083 - protein, 139 aa, Homo sapiens
MRRAALWLWLCALALSLQPALPQIVATNLPPEDQDGSGDDSDNFSGSGAGALQDITLSQQTPSTWKDTQLLTAIPTSPEPTGLEATAASTSTLPAGEGPKEGEAVVLPEVEPGLTAREQEATPRPRETTQLPTTHQACA

SEQ ID NO: 768084 - protein, 162 aa, Homo sapiens
MRRAALWLWLCALALSLQPALPQIVATNLPPEDQDGSGDDSDNFSGSGAGALQDITLSQQTPSTWKDTQLLTAIPTSPEPTGLEATAASTSTLPAGEGPKEGEAVVLPEVEPGLTAREQEATPRPRETTQLPTTHQAYPGPWAGIRNIFQRVIVFCFWQNST

SEQ ID NO: 768085 - protein, 221 aa, Homo sapiens
IFIFNVVYYKPLVYKNTNVYPWWGEAMGWAFVLSSMLCMPLHLLGCLLRAKGTMAECWKHLTQPIWGLHHLEYRAQDADVRGLTTLTPVSESSKVVVVESVMGQLSSHHQLTSGLWGKRLQYSILGVWAANLACSGFPPCALGWAHPREGTPDTAPTSRLKADALPAPPVFCVAALTHVCLSRPVPRRLSDPKKGFPDTRTEAGGLGLGEGGGPAGTFLLC

SEQ ID NO: 768086 - protein, 152 aa, Homo sapiens
IFIFNVVYYKPLVYKNTNVYPWWGEAMGWAFVLSSMLCMPLHLLGCLLRAKGTMAECWKHLTQPIWGLHHLEYRAQDADVRGLTTLTPVSESSKVVVVESVMGQLSSHHQLTSGSHSSPCFIPTPPLQGACLSLTLLGSAWERRGESTMSAH

SEQ ID NO: 768087 - protein, 358 aa, Homo sapiens
RRGAMAEVLRTLAGKPKCHALRPMILFLIMLVLVLFGYGVLSPRSLMPGSLERGFCMAVREPDHLQRVSLPRMVYPQPKVLTPCRKDVLVVTPWLAPIVWEGTFNIDILNEQFRLQNTTIGLTVFAIKKYVAFLKLFLETAEKHFMVGHRVHYYVFTDQPAAVPRVTLGTGRQLSVLEVRAYKRWQDVSMRRMEMISDFCERRFLSEVDYLVCVDVDMEFRDHVGVEILTPLFGTLHPGFYGSSREAFTYERRPQSQAYIPKDEGDFYYLGGFFGGSVQEVQRLTRACHQAMMVDQANGIEAVWHDESHLNKYLLRHKPTKVLSPEYLWDQQLLGWPAVLRKLRFTAVPKNHQAVRNP

SEQ ID NO: 768088 - protein, 96 aa, Homo sapiens
MAEVLRTLAGKPKCHALRPMILFLIMLVLVLFGYGVLSPRSLMPGSLERGFCMAVREPDHLQRVSLPRMVYPQPKVLTPWTGLLQPRGARPAAPPA

SEQ ID NO: 768089 - protein, 77 aa, Homo sapiens
ETLSFGPFPSSRDYELTQPPSNHSDSSLGVWPWREGQCPVMVQRLCTPLLTCIPRFPCKLTWRRFVLAGWSTPSQRC

SEQ ID NO: 768090 - protein, 741 aa, Homo sapiens
MPSATMLDDGDTVVNETDTAPPSWSKNFVDEKDVSEAITKLYVLEQGSIGCYGGTRDGTQEDRGGRKLPRDREGGQPWLRERICRDLEGEGGAKAIDREQAFEPCLVKEPAFYPGPLMTYPWGDLNSFSCLWNPPLCLPHTPSPALVQELHSSGSGVLDERDASGGTVGVQQVWTDEEAPSHEWVLPDRGGWCMNVELRWVVGGMSVFEACPAPHLGSMNTLPTLTALFLESSPQLGIVGEDPLSAYRQALRESLYPPSVGSRALWGHAAGGGLPCCLALSSGPWSASLPCLLPRLLLLPSLPLCPLPAQFLSYLSACDRLLRQGYEEGLVDEAMEMFQFSESQVSRASCQGPRGWKGWGCTQEPGVQGHTSPQSQSVGPACGSVGRLPDFLSSEEEMAQGATAGTKVRGTEGDQEEVGRGQEAESSRGFALLDLINTASVTEWPLFVDTQIGAMGSTKMHDLSTWGACRLPQVHAAVGPIVTSCFLRLSLTLLPRLECNGTILAHCNLCPRGSSNSPASVSQVAGITGACHHTLLIFFVFSVETEFHHVDQAGLECLISSDPPASASQSAGITGVSHRTRPQYVTSKCPMAEQLFTEAEGDGGLGEASRRRERAEVGKFQALGSEGKESAGCAVIPPQCSGHGQGPWAVCAPGAGVRSAPLLPQQKVDSEWEEWEESQDRAHGQAGAFFPWQRKGGRNLHHPTGTEKWQVRPRIRLTWPGGSHSFLGLGAVGTGAGAPHG

SEQ ID NO: 768091 - protein, 198 aa, Homo sapiens
SPFALTSLTYQSLSLASSFSHYPPHLSHLSLSSAHTLLHPPRLSLLLTRAIPLSRSVPRTAHLSTLPLLASLFSPIFFSVTQYSPFPTSSRFSPFLVTPILHERHPLRPLLGSTLPHPIQLHLGIRKMLHGSELVSSLFPATPNSPSLSYFQSPTRTFLQEGKQFSDMGFQQDRIKEVLLVHGNRREQALEELVACAQ

SEQ ID NO: 768092 - protein, 152 aa, Homo sapiens
MMQQPRVETDTIGAGEGPQQAVPWSAWVTRHGWVRWWVSHMPPSWIQWWSTSNWRQPLQRLLWGLEGILYLLLALMLCHALFTTGSHLLSSLWPVVAAVWRHLLPALLLLVLSALPALLFTASFLLLFSTLLSLVGLLTSMTHPGDTQDLDQ

SEQ ID NO: 768093 - protein, 165 aa, Homo sapiens
MTRLCLPRPEAREDPIPVPPRGLGAGEGSGSPVRPPVSTWGPSWAQLLDSVLWLGALGLTIQAVFSTTGPALLLLLVSFLTFDLLHRPAGHTLPQRKLLTRGQSQGAGEGPGQQEALLLQMGTVSGQLSLQDALLLLLMGLGPLLRACGMPLTLLGLAFCLHPWA

SEQ ID NO: 768094 - protein, 277 aa, Homo sapiens
MTRLCLPRPEAREDPIPVPPRGLGAGEGSGSPVRPPVSTWGPSWAQLLDSVLWLGALGLTIQAVFSTTGPALLLLLVSFLTFDLLHRPAGHTLPQRKLLTRGQSQGAGEGPGQQEALLLQMGAPDMMQQPRVETDTIGAGEGPQQAVPWSAWVTRHGWVRWWVSHMPPSWIQWWSTSNWRQPLQRLLWGLEGILYLLLALMLCHALFTTGSHLLSSLWPVVAAVWRHLLPALLLLVLSALPALLFTASFLLLFSTLLSLVGLLTSMTHPGDTQDLDQ

SEQ ID NO: 768095 - protein, 250 aa, Homo sapiens
ALPRGSGEEAVAVSGPGPVGVLLPSWLTPTPGTLAPRSRTTSTMAAAWPPPPCTSEWVLLTTVTSTVFLYFESVRTFVHESPALILLFALGSLGLIFALILNRHKYPLNLYLLFGFTLLEALTVAVVVTFYDVYIILQAFILTTTVFFGLTVYTLQSKKDFSKFGAGLFALLWILCLSGFLKFFFYSEIMELVLAAAGALLFCGFIIYDTHSLMHKLSPEEYVLAAISLYLDIINLFLHLLRFLEAVNKK

SEQ ID NO: 768096 - protein, 238 aa, Homo sapiens
MADPDPRYPRSSIEDDFNYGSSVASATVHIRMAFLRKVYSILSLQVLLTTVTSTVFLYFESVRTFVHESPALILLFALGSLGLIFALILNRHKYPLNLYLLFGFTLLEALTVAVVVTFYDVYIILQAFILTTTVFFGLTVYTLQSKKDFSKFGAGLFALLWILCLSGFLKFFFYSEIMELVLAAAGALLFCGFIIYDTHSLMHKLSPEEYVLAAISLYLDIINLFLHLLRFLEAVNKK

SEQ ID NO: 768097 - protein, 238 aa, Homo sapiens; identical to SEQ ID NO: 768096

SEQ ID NO: 768098 - protein, 238 aa, Homo sapiens; identical to SEQ ID NO: 768096

SEQ ID NO: 768099 - protein, 139 aa, Homo sapiens
DPRWALYSLYVYKFLHFSYSSAKNPDGCFFQKVLNGFTKFFCKEQYCKLLKLYFYRLFALLWILCLSGFLKFFFYSEIMELVLAAAGALLFCGFIIYDTHSLMHKLSPEEYVLAAISLYLDIINLFLHLLRFLEAVNKK

SEQ ID NO: 768100 - protein, 82 aa, Homo sapiens
NYGSSVASATVHIRMGTLSPLQCLPAACLHCSASRSRLPASEGERPSPGTHRECSLSSRPSFSGYQRTGALLRESGRRFLPS

SEQ ID NO: 768101 - protein, 139 aa, Homo sapiens; identical to SEQ ID NO: 768099

SEQ ID NO: 768102 - protein, 285 aa, Homo sapiens
MADPDPRYPRSSIEDDFNYGSSVASATVHIRMVLQRDCTFSKQYMRIPSAPSATLNIIRFFHLRQSGRSGMVNIFYKGPTFLRKVYSILSLQVLLTTVTSTVFLYFESVRTFVHESPALILLFALGSLGLIFALILNRHKYPLNLYLLFGFTLLEALTVAVVVTFYDVYIILQAFILTTTVFFGLTVYTLQSKKDFSKFGAGLFALLWILCLSGFLKFFFYSEIMELVLAAAGALLFCGFIIYDTHSLMHKLSPEEYVLAAISLYLDIINLFLHLLRFLEAVNKK

SEQ ID NO: 768103 - protein, 238 aa, Homo sapiens; identical to SEQ ID NO: 768096

SEQ ID NO: 768104 - protein, 65 aa, Homo sapiens
LPLRTRLSRAGYTSPWRIFTGKPAGEGRSERRLRASSVLLAERGDGSGGRHSGNHLRPSPISIQR

SEQ ID NO: 768105 - protein, 652 aa, Homo sapiens
MQGPLLLPGLCFLLSLFGAVTQKTKTSCAKCPPNASCVNNTHCTCNHGYTSGSGQKLFTFPLETCNDINECTPPYSVYCGFNAVCYNVEGSFYCQCVPGYRLHSGNEQFSNSNENTCQDTTSSKTTEGRKELQKIVDKFESLLTNQTLWRTEGRQEISSTATTILRDVESKVLETALKDPEQKVLKIQNDSVAIETQAITDNCSEERKTFNLNVQMNSMDIRCSDIIQGDTQGPSAIAFISYSSLGNIINATFFEEMDKKDQVYLNSQVVSAAIGPKRNVSLSKSVTLTFQHVKMTPSTKKVFCVYWKSTGQGSQWSRDGCFLIHVNKSHTMCNCSHLSSFAVLMALTSQEEDPVLTVITYVGLSVSLLCLLLAALTFLLCKAIQNTSTSLHLQLSLCLFLAHLLFLVGIDRTEPKVLCSIIAGALHYLYLAAFTWMLLEGVHLFLTARNLTVVNYSSINRLMKWIMFPVGYGVPAVTVAISAASWPHLYGTADRCWLHLDQGFMWSFLGPVCAIFSANLVLFILVFWILKRKLSSLNSEVSTIQNTRMLAFKATAQLFILGCTWCLGLLQVGPAAQVMAYLFTIINSLQGFFIFLVYCLLSQQVQKQYQKWFREIVKSKSESETYTLSSKMGPDSKPSEGDVFPGQVKRKY

SEQ ID NO: 768106 - protein, 133 aa, Homo sapiens
KGRIHPLRVSPPCPTFWGQRSKASLGSPGLQGPVTPEPFEIQCLCPAPRSPTVKSTSAGPTLSCSSLSLMIMWLSPLSLPPPAGCRNDLSPGQRPQLWQGLLWSARPRLKAKQNQAGSLAGGKPDRTFVRLLL

SEQ ID NO: 768107 - protein, 124 aa, Homo sapiens
MLCCQGQLCTRIDQPHENAVSGLQALLPGITTCFCCPSQRKKNSCPNRRGFQLWFSGNVQQRQLPMETQPEALLGHIFSPLPQGERERKGRGPGAAPCKGPWKLAMCLSECPPTSFPYQAPRKH

SEQ ID NO: 768108 - protein, 1024 aa, Homo sapiens
MARHGPPWSRLDAQQERDVRELVRGVAGLQDEADPNFQLALNFAWSNFRFHRFLDVNSHKIEKTIEGIYEKFVIHSDLSKAASWKRLTEEFLNAPLPSIKEIKTDAHYSILSLLLCLSDSPSNSSYVETPRNKEVEKKDDFDWGKYLMEDEEMDIGPYMDTPNWSEESEEENDQQPLSREDSGIQVDRTPLEEQDQNRKLDPCISWKDEPDDRSWLEHHVVHQYWTARPSQFPHSLHLHSNLAAVWDQHLYSSDPLYVPDDRVLVTETQVIRETLWLLSGVKKLFIFQLIDGKVTVRNNIIVTHLTHSCLRSVLEQIAAYGQVVFRLQEFIDEVMGHSSESMLPGSGSVPKKSTEAPFRTYQAFMWALYKYFISFKEELAEIEKCIINNDTTITLAIVVDKLAPRLSQLKVLHKVFSTGVAEVPPDTRNVVRASHLLNTLYKAILEYDNVGEASEQTVSLLFSLWVETVRPYLQTVDEWIVHGHLWDGAREFIIQRNKNVPVNHRDFWYATYTLYSVSEKTENEEKMSDNASASSGSDQGPSSRQHTMVSFLKPVLKQIIMAGKSMQLLKNLQCAESTTCQAGARDAERKSLYTLFLESVQSRLRHGEDSTPQVLTEQQATKENLMKMQSIAESHLELDDVHDPLLAINFARMYLEQSDFHEKFAGGDVCVDRSSESVTCQTFELTLRSCLYPHIDKQYLDCCGNLMQTLKKDYRLVEYLQAMRNFFLMEGGDTMYDFYTSIFDKIREKETWQNVSFLNVQLQEAVGQRYPEDSSRLSISFENVDTAKKKLPVHILDGLTLSYKVPWPVDIVISLECQKIYNQVFLLLLQIKWAKYSLDVLLFGELVSTAEKPRLKEGLIHEQDTVAQFGPQKEPVRQQIHRMFLLRVKLMHFVNSLHNYIMTRILHSTGLEFQHQVEEAKDLDQLIKIHYRYLSTIHDRCLLREKVSFVKEAIMKVLNLALMFADGWQAGLGTWRMESIEKMESDFKNCHMFLVTILNKAVCRGSFPHLESLALSLMAGMEQS

SEQ ID NO: 768109 - protein, 611 aa, Homo sapiens
MSSGPLTCLTPCTRPFLNMTMLEKPLSKPDQGTLRADRAHSLPQVSLLFSLWVETVRPYLQTVDEWIVHGHLWDGAREFIIQRNKNVPVNHRDFWYATYTLYSVSEKTENEEKMSDNASASSGSDQGPSSRQHTMVSFLKPVLKQIIMAGKSMQLLKNLQCAESTTCQAGARDAERKSLYTLFLESVQSRLRHGEDSTPQVLTEQQATKENLMKMQSIAESHLELDDVHDPLLAINFARMYLEQSDFHEKFAGGDVCVDRSSESVTCQTFELTLRSCLYPHIDKQYLDCCGNLMQTLKKDYRLVEYLQAMRNFFLMEGGDTMYDFYTSIFDKIREKETWQNVSFLNVQLQEAVGQRYPEDSSRLSISFENVDTAKKKLPVHILDGLTLSYKVPWPVDIVISLECQKIYNQVFLLLLQIKWAKYSLDVLLFGELVSTAEKPRLKEGLIHEQDTVAQFGPQKEPVRQQIHRMFLLRVKLMHFVNSLHNYIMTRILHSTGLEFQHQVEEAKDLDQLIKIHYRYLSTIHDRCLLREKVSFVKEAIMKVLNLALMFADGWQAGLGTWRMESIEKMESDFKNCHMFLVTILNKAVCRGSFPHLESLALSLMAGMEQS

SEQ ID NO: 768110 - protein, 637 aa, Homo sapiens
MWDTTITLAIVVDKLAPRLSQLKVLHKVFSTGVAEVPPDTRNVVRASHLLNTLYKAILEYDNVGEASEQTVSLLFSLWVETVRPYLQTVDEWIVHGHLWDGAREFIIQRNKNVPVNHRDFWYATYTLYSVSEKTENEEKMSDNASASSGSDQGPSSRQHTMVSFLKPVLKQIIMAGKSMQLLKNLQCAESTTCQAGARDAERKSLYTLFLESVQSRLRHGEDSTPQVLTEQQATKENLMKMQSIAESHLELDDVHDPLLAINFARMYLEQSDFHEKFAGGDVCVDRSSESVTCQTFELTLRSCLYPHIDKQYLDCCGNLMQTLKKDYRLVEYLQAMRNFFLMEGGDTMYDFYTSIFDKIREKETWQNVSFLNVQLQEAVGQRYPEDSSRLSISFENVDTAKKKLPVHILDGLTLSYKVPWPVDIVISLECQKIYNQVFLLLLQIKWAKYSLDVLLFGELVSTAEKPRLKEGLIHEQDTVAQFGPQKEPVRQQIHRMFLLRVKLMHFVNSLHNYIMTRILHSTGLEFQHQVEEAKDLDQLIKIHYRYLSTIHDRCLLREKVSFVKEAIMKVLNLALMFADGWQAGLGTWRMESIEKMESDFKNCHMFLVTILNKAVCRGSFPHLESLALSLMAGMEQS

SEQ ID NO: 768111 - protein, 611 aa, Homo sapiens
MSSGPLTCLTPCTRPFLNMTMLEKPLSKPDQGTLRADRAHSLPQVSLLFSLWVETVRPYLQTVDEWIVHGHLWDGAREFIIQRNKNVPVNHRDFWYATYTLYSVSEKTENEEKMSDNASASSGSDQGPSSRQHTMVSFLKPVLKQIIMAGKSMQLLKNLQCAESTTCQAGARDAERKSLYTLFLESVQSRLRHGEDSTPQVLTEQQATKENLMKMQSIAESHLELDDVHDPLLAINFARMYLEQSDFHEKFAGGDVCVDRSSESVTCQTFELTLRSCLYPHIDKQYLDCCGNLMQTLKKDYRLVEYLQAMRNFFLMEGGDTMYDFYTSIFDKIREKETWQNVSFLNVQLQEAVGQRYPEDSSRLSISFENVDTAKKKLPVHILDGLTLSYKVPWPVDIVISLECQKIYNQVFLLLLQIKWAKYSLDVLLFGELVSTAEKPRLKEGLIHEQDTVAQFGPQKEPVRQQIHRMFLLRVKLMHFVNSLHNYIMTRILHSTGLEFQHQVEEAKDLDQLIKIHYRYLSTIHDRCLLREKVSFVKEAIMKVLNLALMFADGWQAGLGTWRMESIEKMESDFKNCHMFLVTILNKAVCRGSFPHCEYIMLKYFYLCISL

SEQ ID NO: 768112 - protein, 276 aa, Homo sapiens
MARHGPPWSRLDAQQERDVRELVRGVAGLQDEADPNFQLALNFAWSNFRFHRFLDVNSHKIEKTIEGIYEKFVIHSDLSKAASWKRLTEEFLNAPLPSIKEIKTDAHYSILSLLLCLSDSPSNSSYVETPRNKEVEKKDDFDWGKYLMEDEEMDIGPYMDTPNWSEESEEENDQQPLSREDSGIQVDRTPLEEQDQNRKLDPCISWKDEPDDRSWLEHHVVHQYWTARPSQFPHSLHLHSNLAAVWDQHLYSSDPLYVPDDRVLVTETQVIRETLW

SEQ ID NO: 768113 - protein, 66 aa, Homo sapiens
LQALLLAVGLVRGTFWPEDSAIEPLQYRCRCIHVHFHHVQLKSENIFIWFICKTCPQSAWHSRSCL

SEQ ID NO: 768114 - protein, 193 aa, Homo sapiens [sequence omitted]

SEQ ID NO: 768115 - protein, 148 aa, Homo sapiens
MIRVSYLGDDGIQRADSDTGELGVVLPESTESLKGDGGVRATSSSRSGLAAAASGPAAGLSRAASPAACAPAAGCAPPVTSMAGRGWISAKVVMVVGNWISLGIRCPLASGTWQRRNGPVYLRDLIGRMVANYTLSPIRRIRNRCFES

SEQ ID NO: 768116 - protein, 1138 aa, Homo sapiens
MVWRVPPFLLPILFLASHVGAAVDLTLLANLRLTDPQRFFLTCVSGEAGAGRGSDAWGPPLLLEKDDRIVRTPPGPPLRLARNGSHQVTLRGFSKPSDLVGVFSCVGGAGARRTRVIYVHNSPGAHLLPDKVTHTVNKGDTAVLSARVHKEKQTDVIWKSNGSYFYTLDWHEAQDGRFLLQLPNVQPPSSGIYSATYLEASPLGSAFFRLIVRGCGAGRWGPGCTKECPGCLHGGVCHDHDGECVCPPGFTGTRCEQACREGRFGQSCQEQCPGISGCRGLTFCLPDPYGCSCGSGWRGSQCQEACAPGHFGADCRLQCQCQNGGTCDRFSGCVCPSGWHGVHCEKSDRIPQILNMASELEFNLETMPRINCAAAGNPFPVRGSIELRKPDGTVLLSTKAIVEPEKTTAEFEVPRLVLADSGFWECRVSTSGGQDSRRFKVNVKVPPVPLAAPRLLTKQSRQLVVSPLVSFSGDGPISTVRLHYRPQDSTMDWSTIVVDPSENVTLMNLRPKTGYSVRVQLSRPGEGGEGAWGPPTLMTTDCPEPLLQPWLEGWHVEGTDRLRVSWSLPLVPGPLVGDGFLLRLWDGTRGQERRENVSSPQARTALLTGLTPGTHYQLDVQLYHCTLLGPASPPAHVLLPPSGPPAPRHLHAQALSDSEIQLTWKHPEALPGPISKYVVEVQVAGGAGDPLWIDVDRPEETSTIIRGLNASTRYLFRMRASIQGLGDWSNTVEESTLGNGLQAEGPVQESRAAEEGLDQQLILAVVGSVSATCLTILAALLTLVCIRRSCLHRRRTFTYQSGSGEETILQFSSGTLTLTRRPKLQPEPLSYPVLEWEDITFEDLIGEGNFGQVIRAMIKKDGLKMNAAIKMLKEYASENDHRDFAGELEVLCKLGHHPNIINLLGACKNRGYLYIAIEYAPYGNLLDFLRKSRVLETDPAFAREHGTASTLSSRQLLRFASDAANGMQYLSEKQFIHRDLAARNVLVGENLASKIADFGLSRGEEVYVKKTMGRLPVRWMAIESLNYSVYTTKSDVWSFGVLLWEIVSLGGTPYCGMTCAELYEKLPQGYRMEQPRNCDDEVYELMRQCWRDRPYERPPFAQIALQLGRMLEARKAYVNMSLFENFTYAGIDATAEEA

SEQ ID NO: 768117 - protein, 1095 aa, Homo sapiens
MVWRVPPFLLPILFLASHVGAAVDLTLLANLRLTDPQRFFLTCVSGEAGAGRGSDAWGPPLLLEKDDRIVRTPPGPPLRLARNGSHQVTLRGFSKPSDLVGVFSCVGGAGARRTRVIYVHNSPGAHLLPDKVTHTVNKGDTAVLSARVHKEKQTDVIWKSNGSYFYTLDWHEAQDGRFLLQLPNVQPPSSGIYSATYLEASPLGSAFFRLIVRGCGAGRWGPGCTKECPGCLHGGVCHDHDGECVCPPGFTGTRCEQACREGRFGQSCQEQCPGISGCRGLTFCLPDPYGCSCGSGWRGSQCQEDRIPQILNMASELEFNLETMPRINCAAAGNPFPVRGSIELRKPDGTVLLSTKAIVEPEKTTAEFEVPRLVLADSGFWECRVSTSGGQDSRRFKVNVKVPPVPLAAPRLLTKQSRQLVVSPLVSFSGDGPISTVRLHYRPQDSTMDWSTIVVDPSENVTLMNLRPKTGYSVRVQLSRPGEGGEGAWGPPTLMTTDCPEPLLQPWLEGWHVEGTDRLRVSWSLPLVPGPLVGDGFLLRLWDGTRGQERRENVSSPQARTALLTGLTPGTHYQLDVQLYHCTLLGPASPPAHVLLPPSGPPAPRHLHAQALSDSEIQLTWKHPEALPGPISKYVVEVQVAGGAGDPLWIDVDRPEETSTIIRGLNASTRYLFRMRASIQGLGDWSNTVEESTLGNGLQAEGPVQESRAAEEGLDQQLILAVVGSVSATCLTILAALLTLVCIRRSCLHRRRTFTYQSGSGEETILQFSSGTLTLTRRPKLQPEPLSYPVLEWEDITFEDLIGEGNFGQVIRAMIKKDGLKMNAAIKMLKEYASENDHRDFAGELEVLCKLGHHPNIINLLGACKNRGYLYIAIEYAPYGNLLDFLRKSRVLETDPAFAREHGTASTLSSRQLLRFASDAANGMQYLSEKQFIHRDLAARNVLVGENLASKIADFGLSRGEEVYVKKTMGRLPVRWMAIESLNYSVYTTKSDVWSFGVLLWEIVSLGGTPYCGMTCAELYEKLPQGYRMEQPRNCDDEVYELMRQCWRDRPYERPPFAQIALQLGRMLEARKAYVNMSLFENFTYAGIDATAEEA

SEQ ID NO: 768118 - protein, 1095 aa, Homo sapiens; identical to SEQ ID NO: 768117

SEQ ID NO: 768119 - protein, 1132 aa, Homo sapiens
MVWRVPPFLLPILFLASHVGAAVDLTLLANLRLTDPQRFFLTCVSGEAGAGRGSDAWGPPLLLEKDDRIVRTPPGPPLRLARNGSHQVTLRGFSKPSDLVGVFSCVGGAGARRTRVIYVHNSPGAHLLPDKVTHTVNKGDTAVLSARVHKEKQTDVIWKSNGSYFYTLDWHEAQDGRFLLQLPNVQPPSSGIYSATYLEASPLGSAFFRLIVRGCGAGRWGPGCTKECPGCLHGGVCHDHDGECVCPPGFTGTRCEQACREGRFGQSCQEQCPGISGCRGLTFCLPDPYGCSCGSGWRGSQCQEDRIPQILNMASELEFNLETMPRINCAAAGNPFPVRGSIELRKPDGTVLLSTKAIVEPEKTTAEFEVPRLVLADSGFWECRVSTSGGQDSRRFKVNVKVPPVPLAAPRLLTKQSRQLVVSPLVSFSGDGPISTVRLHYRPQDSTMDWSTIVVDPSENVTLMNLRPKTGYSVRVQLSRPGEGGEGAWGPPTLMTTDCPEPLLQPWLEGWHVEGTDRLRVSWSLPLVPGPLVGDGFLLRLWDGTRGQERRENVSSPQARTALLTGLTPGTHYQLDVQLYHCTLLGPASPPAHVLLPPSGPPAPRHLHAQALSDSEIQLTWKHPEALPGPISKYVVEVQVAGGAGDPLWIDVDRPEETSTIIRGLNASTRYLFRMRASIQGLGDWSNTVEESTLGNGLQAEGPVQESRAAEEGLDQQLILAVVGSVSATCLTILAALLTLVCIRRSCLHRRRTFTYQSGSGEETILQFSSGTLTLTRRPKLQPEPLSYPVLEWEDITFEDLIGEGNFGQVIRAMIKKDGLKMNAAIKMLKEYASENDHRDFAGELEVLCKLGHHPNIINLLGACKNRGYLYIAIEYAPYGNLLDFLRKSRVLETDPAFAREHGTASTLSSRQLLRFASDAANGMQYLSEKQFIHRDLAARNVLVGENLASKIADFGLSRGEEVYVKKTMVSLIQPSPLGLVPGPAPQEPQTGPSSTLSPSNPFSPEGRLPVRWMAIESLNYSVYTTKSDVWSFGVLLWEIVSLGGTPYCGMTCAELYEKLPQGYRMEQPRNCDDEVYELMRQCWRDRPYERPPFAQIALQLGRMLEARKAYVNMSLFENFTYAGIDATAEEA

SEQ ID NO: 768120 - protein, 1018 aa, Homo sapiens
MVWRVPPFLLPILFLASHVGAAVDLTLLANLRLTDPQRFFLTCVSGEAGAGRGSDAWGPPLLLEKDDRIVRTPPGPPLRLARNGSHQVTLRGFSKPSDLVGVFSCVGGAGARRTRVIYVHNSPGAHLLPDKVTHTVNKGDTAVLSARVHKEKQTDVIWKSNGSYFYTLDWHEAQDGRFLLQLPNVQPPSSGIYSATYLEASPLGSAFFRLIVRGCGAGRWGPGCTKECPGCLHGGVCHDHDGECVCPPGFTGTRCEQACREGRFGQSCQEQCPGISGCRGLTFCLPDPYGCSCGSGWRGSQCQEDRIPQILNMASELEFNLETMPRINCAAAGNPFPVRGSIELRKPDGTVLLSTKAIVEPEKTTAEFEVPRLVLADSGFWECRVSTSGGQDSRRFKVNVKVPPVPLAAPRLLTKQSRQLVVSPLVSFSGDGPISTVRLHYRPQDSTMDWSTIVVDPSENVTLMNLRPKTGYSVRVQLSRPGEGGEGAWGPPTLMTTDCPEPLLQPWLEGWHVEGTDRLRVSWSLPLVPGPLVGDGFLLRLWDGTRGQERRENVSSPQARTALLTGLTPGTHYQLDVQLYHCTLLGPASPPAHVLLPPSGPPAPRHLHAQALSDSEIQLTWKHPEALPGPISKYVVEVQVAGGAGDPLWIDVDRPEETSTIIRGLNASTRYLFRMRASIQGLGDWSNTVEESTLGNGLQAEGPVQESRAAEEGLDQQLILAVVGSVSATCLTILAALLTLVCIRRSCLHRRRTFTYQSGSGEETILQFSSGTLTLTRRPKLQPEPLSYPVLEWEDITFEDLIGEGNFGQVIRAMIKKDGLKMNAAIKMLKEYASENDHRDFAGELEVLCKLGHHPNIINLLGACKNRGYLYIAIEYAPYGNLLDFLRKSRVLETDPAFAREHGTASTLSSRQLLRFASDAANGMQYLSEKQFIHRDLAARNVLVGENLASKIADFGLSRGEEVYVKKTMVSLIQPSPLGLVPGPAPQEPQTGPSSTLSPSNPFSPRGVSLCAGWPLSP

SEQ ID NO: 768121 - protein, 69 aa, Homo sapiens
TESTLSPPAGGTPYCGMTCAELYEKLPQGYRMEQPRNCDDEVLSHPILELHDPISVMSDLSFDPCDPIT

SEQ ID NO: 768122 - protein, 571 aa, Homo sapiens
TQAEQSGPQHLTPGPARPGWPGSASGVWSGGCPLSCSPSSSWLLMGTHYQLDVQLYHCTLLGPASPPAHVLLPPSGPPAPRHLHAQALSDSEIQLTWKHPEALPGPISKYVVEVQVAGGAGDPLWIDVDRPEETSTIIRGLNASTRYLFRMRASIQGLGDWSNTVEESTLGNGLQAEGPVQESRAAEEGLDQQLILAVVGSVSATCLTILAALLTLVCIRRSCLHRRRTFTYQSGSGEETILQFSSGTLTLTRRPKLQPEPLSYPVLEWEDITFEDLIGEGNFGQVIRAMIKKDGLKMNAAIKMLKEYASENDHRDFAGELEVLCKLGHHPNIINLLGACKNRGYLYIAIEYAPYGNLLDFLRKSRVLETDPAFAREHGTASTLSSRQLLRFASDAANGMQYLSEKQFIHRDLAARNVLVGENLASKIADFGLSRGEEVYVKKTMGRLPVRWMAIESLNYSVYTTKSDVWSFGVLLWEIVSLGGTPYCGMTCAELYEKLPQGYRMEQPRNCDDEVYELMRQCWRDRPYERPPFAQIALQLGRMLEARKAYVNMSLFENFTYAGIDATAEEA

SEQ ID NO: 768123 - protein, 350 aa, Homo sapiens
LTLAWTVSLLSHPVKGEETILQFSSGTLTLTRRPKLQPEPLSYPVLEWEDITFEDLIGEGNFGQVIRAMIKKDGLKMNAAIKMLKEYASENDHRDFAGELEVLCKLGHHPNIINLLGACKNRGYLYIAIEYAPYGNLLDFLRKSRVLETDPAFAREHGTASTLSSRQLLRFASDAANGMQYLSEKQFIHRDLAARNVLVGENLASKIADFGLSRGEEVYVKKTMGRLPVRWMAIESLNYSVYTTKSDVWSFGVLLWEIVSLGGTPYCGMTCAELYEKLPQGYRMEQPRNCDDEVYELMRQCWRDRPYERPPFAQIALQLGRMLEARKAYVNMSLFENFTYAGIDATAEEA

SEQ ID NO: 768124 - protein, 334 aa, Homo sapiens
VTPTGLGSSGTLTLTRRPKLQPEPLSYPVLEWEDITFEDLIGEGNFGQVIRAMIKKDGLKMNAAIKMLKEYASENDHRDFAGELEVLCKLGHHPNIINLLGACKNRGYLYIAIEYAPYGNLLDFLRKSRVLETDPAFAREHGTASTLSSRQLLRFASDAANGMQYLSEKQFIHRDLAARNVLVGENLASKIADFGLSRGEEVYVKKTMGRLPVRWMAIESLNYSVYTTKSDVWSFGVLLWEIVSLGGTPYCGMTCAELYEKLPQGYRMEQPRNCDDEVYELMRQCWRDRPYERPPFAQIALQLGRMLEARKAYVNMSLFENFTYAGIDATAEEA

SEQ ID NO: 768125 - protein, 159 aa, Homo sapiens
MYLISPRIARLSSFLGDTEGLCRNKYYWACLPCGALIATLMFLNYQCPITTQELKLLVLGVLLLWRYLSPGGTPYCGMTCAELYEKLPQGYRMEQPRNCDDEVYELMRQCWRDRPYERPPFAQIALQLGRMLEARKAYVNMSLFENFTYAGIDATAEEA

SEQ ID NO: 768126 - protein, 519 aa, Homo sapiens
MGGFSRRCSKLINSSQLLYQEYSDVVLNKEIQSQQRLESLSETPGPSSPRQPRKALVSSESYLQRLSMASSGSLWQEIPVVRNSTVLLSMTHEDQKLQEVKFELIVSEASYLRSLNIAVDHFQLSTSLRATLSNQEHQWLFSRLQDVRDVSATFLSDLEENFENNIFSFQVCDVVLNHAPDFRRVYLPYVTNQTYQERTFQSLMNSNSNFREVLEKLESDPVCQRLSLKSFLILPFQRITRLKLLLQNILKRTQPGSSEEAEATKAHHALEQLIRDCNNNVQSMRRTEELIYLSQKIEFECKIFPLISQSRWLVKSGELTALEFSASPGLRRKLNTRPVHLHLFNDCLLLSRPREGSRFLVFDHAPFSSIRGEKCEMKLHGPHKNLFRLFLRQNTQGAQAEFLFRTETQSEKLRWISALAMPREELDLLECYNSPQVQCLRAYKPRENDELALEKADVVMVTQQSSDGWLEGVRLSDGERGWFPVQQVEFISNPEVRAQNLKEAHRVKTAKLQLVEQQA

SEQ ID NO: 768127 - protein, 519 aa, Homo sapiens; identical to SEQ ID NO: 768126

SEQ ID NO: 768128 - protein, 212 aa, Homo sapiens
MGGFSRRCSKLINSSQLLYQEYSDVVLNKEIQSQQRLESLSETPGPSSPRQPRKALVSSESYLQRLSMASSGSLWQEIPVVRNSTVLLSMTHEDQKLQEVKFELIVSEASYLRSLNIAVDHFQLSTSLRATLSNQEHQWLFSRLQDVRDVSATFLSDLEENFENNIFSFQVCDVVLNHAPDFRRVYLPYVTNPTVRCHTVLLPNTVRAHTCV

SEQ ID NO: 768129 - protein, 519 aa, Homo sapiens; identical to SEQ ID NO: 768126

SEQ ID NO: 768130 - protein, 409 aa, Homo sapiens
MGGFSRRCSKLINSSQLLYQEYSDVVLNKEIQSQQRLESLSETPGPSSPRQPRKALVSSESYLQRLSMASSGSLWQEIPVVRNSTVLLSMTHEDQKLQEVKFELIVSEASYLRSLNIAVDHFQLSTSLRATLSNQEHQWLFSRLQDVRDVSATFLSDLEENFENNIFSFQVCDVVLNHAPDFRRVYLPYVTNQTYQERTFQSLMNSNSNFREVLEKLESDPVCQRLSLKSFLILPFQRITRLKLLLQNILKRTQPGSSEEAEATKAHHALEQLIRDCNNNVQSMRRTEELIYLSQKIEFECKIFPLISQSRWLVKSGELTALEFSASPGLRRKLNTRPVHLHLFNDCLLLSRPREGSRFLVFDHAPFSSIRGEKCEMKLHGPHKNLFRLFLRQNTQGAQAEFLFRTETQ

SEQ ID NO: 768131 - protein, 84 aa, Homo sapiens
EEMLVQVELAWKWHGEEGGTGSKPHASPICDTAFSLFLCPVDIPAHFSVTLAGEKWGADSLGVQCFPRATKEAEHASSPPAPLQ

SEQ ID NO: 768132 - protein, 183 aa, Homo sapiens
MKLLFPIFASLMLQYQVNTEFIGLRRCLMGLGRCRDHCNVDEKEIQKCKMKKCCVGPKVVKLIKNYLQYGTPNVLNEDVQEMLKPAKNSSAVIQRKHILSVLPQIKSTSFFANTNFVIIPNATPMNSATISTMTPGQITYTATSTKSNTKESRDSATASPPPAPPPPNILPTPSLELEEAEEQ

SEQ ID NO: 768133 - protein, 606 aa, Homo sapiens
KIFSVSPPAESVCGLGENVSDILGRSRGRAGSERPRDSPSLEPCPPRSPPVRRAPDIATLHPRDCPTPGPRGSAASLPPPTPAATAQFPQPDPVCRSQSLQAASGTFGGPVGRPGRAGTEPPRLGQWAWAGAVAEDLARPLQTPGDSHTAAAMATNKERLFAAGALGPGSGYPGAGFPFAFPGALRGSPPFEMLSPSFRGLGQPDLPKEMASLSVETQSTSSEEMVPSSPSPPPPPRVYKPCFVCNDKSSGYHYGVSSCEGCKGFFRRSIQKNMVYTCHRDKNCIINKVTRNRCQYCRLQKCFEVGMSKEAVRNDRNKKKKEVKEEGSPDSYELSPQLEELITKVSKAHQETFPSLCQLGKYTTNSSADHRVQLDLGLWDKFSELATKCIIKIVEFAKRLPGFTGLSIADQITLLKAACLDILMLRICTRYTPEQDTMTFSDGLTLNRTQMHNAGFGPLTDLVFAFAGQLLPLEMDDTETGLLSAICLICGDRMDLEEPEKVDKLQEPLLEALRLYARRRRPSQPYMFPRMLMKITDLRGISTKGAERAITLKMEIPGPMPPLIREMLENPEMFEDDSSQPGPHPNASSEDEVPGGQGKGGLKSPA

SEQ ID NO: 768134 - protein, 497 aa, Homo sapiens
KIFSVSPPAESVCGLGENVSDILGRSRGRAGSERPRDSPSLEPCPPRSPPVRRAPDIATLHPRDCPTPGPRGSAASLPPPTQQLRPSSLNLTQYVEASLCRRPAAVETQSTSSEEMVPSSPSPPPPPRVYKPCFVCNDKSSGYHYGVSSCEGCKGFFRRSIQKNMVYTCHRDKNCIINKVTRNRCQYCRLQKCFEVGMSKEAVRNDRNKKKKEVKEEGSPDSYELSPQLEELITKVSKAHQETFPSLCQLGKYTTNSSADHRVQLDLGLWDKFSELATKCIIKIVEFAKRLPGFTGLSIADQITLLKAACLDILMLRICTRYTPEQDTMTFSDGLTLNRTQMHNAGFGPLTDLVFAFAGQLLPLEMDDTETGLLSAICLICGDRMDLEEPEKVDKLQEPLLEALRLYARRRRPSQPYMFPRMLMKITDLRGISTKGAERAITLKMEIPGPMPPLIREMLENPEMFEDDSSQPGPHPNASSEDEVPGGQGKGGLKSPA

SEQ ID NO: 768135 - protein, 333 aa, Homo sapiens
MVYTCHRDKNCIINKVTRNRCQYCRLQKCFEVGMSKEAVRNDRNKKKKEVKEEGSPDSYELSPQLEELITKVSKAHQETFPSLCQLGKYTTNSSADHRVQLDLGLWDKFSELATKCIIKIVEFAKRLPGFTGLSIADQITLLKAACLDILMLRICTRYTPEQDTMTFSDGLTLNRTQMHNAGFGPLTDLVFAFAGQLLPLEMDDTETGLLSAICLICGDRMDLEEPEKVDKLQEPLLEALRLYARRRRPSQPYMFPRMLMKITDLRGISTKGAERAITLKMEIPGPMPPLIREMLENPEMFEDDSSQPGPHPNASSEDEVPGGQGKGGLKSPA

SEQ ID NO: 768136 - protein, 290 aa, Homo sapiens
MASFMTLTSCSFCGSLSSDCSQRVHSWIPNSMRAEKAVATSSFTSVPVNSSADHRVQLDLGLWDKFSELATKCIIKIVEFAKRLPGFTGLSIADQITLLKAACLDILMLRICTRYTPEQDTMTFSDGLTLNRTQMHNAGFGPLTDLVFAFAGQLLPLEMDDTETGLLSAICLICGDRMDLEEPEKVDKLQEPLLEALRLYARRRRPSQPYMFPRMLMKITDLRGISTKGAERAITLKMEIPGPMPPLIREMLENPEMFEDDSSQPGPHPNASSEDEVPGGQGKGGLKSPA

SEQ ID NO: 768137 - protein, 79 aa, Homo sapiens
RPDYLSVGHDLRGSALSGAERAITLKMEIPGPMPPLIREMLENPEMFEDDSSQPGPHPNASSEDEVPGGQGKGGLKSPA

SEQ ID NO: 768138 - protein, 133 aa, Homo sapiens
LIHAKISLPCTPCHTCGTPQLSFRLSLCPYDLILDFWMPCLLLTSRDYPCQASDPPPLPSPCLLQVALTGDLTSSLSTHSLFSPSPRNSTNPPPPPTFQMLRICTRYTPEQDTMTFSDGLTLNRTQMHNAGFG

SEQ ID NO: 768139 - protein, 606 aa, Homo sapiens; identical to SEQ ID NO: 768133

SEQ ID NO: 768140 - protein, 443 aa, Homo sapiens
MYDCMETFAPGPRRLYGAAGPGAGLLRRATGGSCFAGLESFAWPQPASLQSVETQSTSSEEMVPSSPSPPPPPRVYKPCFVCNDKSSGYHYGVSSCEGCKGFFRRSIQKNMVYTCHRDKNCIINKVTRNRCQYCRLQKCFEVGMSKEAVRNDRNKKKKEVKEEGSPDSYELSPQLEELITKVSKAHQETFPSLCQLGKYTTNSSADHRVQLDLGLWDKFSELATKCIIKIVEFAKRLPGFTGLSIADQITLLKAACLDILMLRICTRYTPEQDTMTFSDGLTLNRTQMHNAGFGPLTDLVFAFAGQLLPLEMDDTETGLLSAICLICGDRMDLEEPEKVDKLQEPLLEALRLYARRRRPSQPYMFPRMLMKITDLRGISTKGAERAITLKMEIPGPMPPLIREMLENPEMFEDDSSQPGPHPNASSEDEVPGGQGKGGLKSPA

SEQ ID NO: 768141 - protein, 606 aa, Homo sapiens; identical to SEQ ID NO: 768133

SEQ ID NO: 768142 - protein, 412 aa, Homo sapiens
  misc_feature (338)..(338): Xaa can be any naturally occurring amino acid
  misc_feature (397)..(397): Xaa can be any naturally occurring amino acid
  misc_feature (403)..(403): Xaa can be any naturally occurring amino acid
  misc_feature (406)..(406): Xaa can be any naturally occurring amino acid
MYDCMETFAPGPRRLYGAAGPGAGLLRRATGGSCFAGLESFAWPQPASLQSVETQSTSSEEMVPSSPSPPPPPRVYKPCFVCNDKSSGYHYGVSSCEGCKGFFRRSIQKNMVYTCHRDKNCIINKVTRNRCQYCRLQKCFEVGMSKEAVRNDRNKKKKEVKEEGSPDSYELSPQLEELITKVSKAHQETFPSLCQLGKYTTNSSADHRVQLDLGLWDKFSELATKCIIKIVEFAKRLPGFTGLSIADQITLLKAACLDILMLRICTRYTPEQDTMTFSDGLTLNRTQMHNAGFGPLTDLVFAFAGQLLPLEMDDTETGLLSAICLICGDRMDLEEQQXATVILHSTVKSKTFGSELAFPHFGNQFVTNLGEFFYFFILLLQRPFQGVHSQLLLPQLXWWAACXCWXLLEPEQ

SEQ ID NO: 768143 - protein, 170 aa, Homo sapiens
MPTVEELYRNYGILADATEQVGQHKDAYQVILDGVKGGTKEKRLAAQFIPKFFKHFPELADSAINAQLDLCEDEDVSIRRQAIKELPQFATGENPSSSGQIILTQLLPEQMTLPEFNPSEQCPLLSIFKMDAKGTFRWVVQPKYFKERTLLENEQLNSFLQNLRLYQMKS

SEQ ID NO: 768144 - protein, 170 aa, Homo sapiens; identical to SEQ ID NO: 768143

SEQ ID NO: 768145 - protein, 170 aa, Homo sapiens; identical to SEQ ID NO: 768143

SEQ ID NO: 768146 - protein, 233 aa, Homo sapiens
MSSFCGDMEKLETNLRKLFDKLLEYMPLPPEEAENGENAGNEEPKLQFSYVECLLYSFHQLGRKLPDFLTAKLNAEKLKDFKIRLQYFARGLQVYIRQLRLALQGKTGEALKTEENKIKVVALKITNNINVLIKDLFHIPPSYKSTVTLSWKPVQKVEIGQKRASEDTTSGSPPKKSSAGPKRDARQIYNPPSGKYSSNLGNFNYEREEPSGEVEVAEVGAHEEIVVGEDSTE

SEQ ID NO: 768147 - protein, 88 aa, Homo sapiens
LTDIMMDPVHVVETGQHTAEGDTTSGSPPKKSSAGPKRDARQIYNPPSGKYSSNLGNFNYEREEPSGEVEVAEVGAHEEIVVGEDSTE

SEQ ID NO: 768148 - protein, 170 aa, Homo sapiens; identical to SEQ ID NO: 768143

SEQ ID NO: 768149 - protein, 170 aa, Homo sapiens; identical to SEQ ID NO: 768143

SEQ ID NO: 768150 - protein, 170 aa, Homo sapiens; identical to SEQ ID NO: 768143

SEQ ID NO: 768151 - protein, 217 aa, Homo sapiens
SPTVPQGEYMPLPPEEAENGENAGNEEPKLQFSYVECLLYSFHQLGRKLPDFLTAKLNAEKLKDFKIRLQYFARGLQVYIRQLRLALQGKTGEALKTEENKIKVVALKITNNINVLIKDLFHIPPSYKSTVTLSWKPVQKVEIGQKRASEDTTSGSPPKKSSAGPKRDARQIYNPPSGKYSSNLGNFNYEREEPSGEVEVAEVGAHEEIVVGEDSTE

SEQ ID NO: 768152 - protein, 170 aa, Homo sapiens; identical to SEQ ID NO: 768143

SEQ ID NO: 768153 - protein, 170 aa, Homo sapiens; identical to SEQ ID NO: 768143

SEQ ID NO: 768154 - protein, 170 aa, Homo sapiens; identical to SEQ ID NO: 768143

SEQ ID NO: 768155 - protein, 277 aa, Homo sapiens
WSASPEHLTMLGITVLAALLACASSCGVPSFPPNLSARVVGGEDARPHSWPWQISLQYLKNDTWRHTCGGTLIASNFVLTAAHCISNTRTYRVAVGKNNLEVEDEEGSLFVGVDTIHVHKRWNALLLRNDIALIKLAEHVELSDTIQVACLPEKDSLLPKDYPCYVTGWGRLWTNGPIADKLQQGLQPVVDHATCSRIDWWGFRVKKTMVCAGGDGVISACNGDSGGPLNCQLENGSWEVFGIVSFGSRRGCNTRKKPVVYTRVSAYIDWINEKMQL

SEQ ID NO: 768156 - protein, 214 aa, Homo sapiens
MVSQSRAPNHVGHHCPRCALGLCNTRTYRVAVGKNNLEVEDEEGSLFVGVDTIHVHKRWNALLLRNDIALIKLAEHVELSDTIQVACLPEKDSLLPKDYPCYVTGWGRLWTNGPIADKLQQGLQPVVDHATCSRIDWWGFRVKKTMVCAGGDGVISACNGDSGGPLNCQLENGSWEVFGIVSFGSRRGCNTRKKPVVYTRVSAYIDWINEKMQL

SEQ ID NO: 768157 - protein, 277 aa, Homo sapiens; identical to SEQ ID NO: 768155

SEQ ID NO: 768158 - protein, 182 aa, Homo sapiens
WSASPEHLTMLGITVLAALLACASSCGVPSFPPNLSARVVGGEDARPHSWPWQISLQYLKNDTWRHTCGGTLIASNFVLTAAHCISNTRTYRVAVGKNNLEVEDEEGSLFVGVDTIHVHKRWNALLLRNDIALIKLAEHVELSDTIQVACLPEKDSLLPKDYPCYVTGWGRLWTPRPHFLKT

SEQ ID NO: 768159 - protein, 103 aa, Homo sapiens
SSLDHHLHSCMVLGHTMERMRNGYKIRRLRCIKIEENQSHLVTTQLRVRLALRGTLIESKSREACRAFALVTYTCPRTGLLETSALSRLLLDCFSGSCQPPNF

SEQ ID NO: 768160 - protein, 1277 aa, Homo sapiens
MASAAVESFVTKQLDLLELERDAEVEERRSWQENISLKELQSRGVCLLKLQVSSQRTGLYGRLLVTFEPRRYGSAAALPSNSFTSGDIVGLYDAANEGSQLATGILTRVTQKSVTVAFDESHDFQLSLDRENSYRLLKLANDVTYRRLKKALIALKKYHSGPASSLIEVLFGRSAPSPASEIHPLTFFNTCLDTSQKEAVSFALSQKELAIIHGPPGTGKTTTVVEIILQAVKQGLKVLCCAPSNIAVDNLVERLALCKQRILRLGHPARLLESIQQHSLDAVLARSDSAQNVADIRKDIDQVFVKNKKTQDKREKSNFRNEIKLLRKELKEREEAAMLESLTSANVVLATNTGASADGPLKLLPESYFDVVVIDECAQALEASCWIPLLKARKCILAGDHKQLPPTTVSHKAALAGLSLSLMERLAEEYGARVVRTLTVQYRMHQAIMRWASDTMYLGQVTAHSSVARHLLRDLPGVAATEETGVPLLLVDTAGCGLFELEEEDEQSKGNPGEVRLVSLHIQALVDAGVPARDIAVVSPYNLQVDLLRQSLVHRHPELEIKSVDGFQGREKEAVILSFVRSNRKGEVGFLAEDRRINVAVTRARRHVAVICDSRTVNNHAFLKTLVEYFTQHGEVRTAFEYLDDIVPENYSHENSQGSSHAATKPQGPATSTRTGSQRQEGGQEAAAPARQGRKKPAGKSLASEAPSQPSLNGGSPEGVESQDGVDHFRAMIVEFMASKKMQLEFPPSLNSHDRLRVHQIAEEHGLRHDSSGEGKRRFITVSKRAPRPRAALGPPAGTGGPAPLQPVPPTPAQTEQPPREQRGPDQPDLRTLHLERLQRVRSAQGQPASKEQQASGQQKLPEKKKKKAKGHPATDLPTEEDFEALVSAAVKADNTCGFAKCTAGVTTLGQFCQLCSRRYCLSHHLPEIHGCGERARAHARQRISREGVLYAGSGTKNGSLDPAKRAQLQRRLDKKLSELSNQRTSRRKERGSDRPHPCTPRGALSMVAQGAGRPCSASTRATEERRGLWGRSGGPCWGRLGFWTPGISFSDVTMWRKAPGGQQCSCRWGLGNARPFPLLPAKTHIPASGSWGRFQSLENTQGLKLEVTPPMSGTCQLSPLVMRVLRGNRKQDCEWRSGREQGVAFGLHVPMWPDAGATFLLSAGDCSVPPPPHHGAPVSLGGTSFWPVHLSLAYKGAWPVPTPPCCASPWGPGEPALPRGCPGKSCPTASASSALTDPEPPGLLRCPVPTLLFKRTSDDVPEPQGFVSEGYKLFKN

SEQ ID NO: 768161 - protein, 142 aa, Homo sapiens
MTPPWATTHSCTRQEQTRMVYSLSLQGWCAGQASYTPQVCARPGTSQSLGGEVLGQCGMEEEGGKLSVGSSYWRGGDGHGTKSHPKRHPKSREGNTGYQKRRAPMDLLSKATHDCRTKTALYSPKTPVSALTPASNTKEADD

SEQ ID NO: 768162 - protein, 106 aa, Homo sapiens
MTPPWATTHSCTRQEQTRMVYSLSLQGWCAGQASYTPQVCARPGTSQSLGGEVLGQCGMEEEGGKLSVGSSYWRGGDGHGTKTQMGKCEKAEISKELRWRPTEEEC

SEQ ID NO: 768163 - protein, 106 aa, Homo sapiens; identical to SEQ ID NO: 768162

SEQ ID NO: 768164 - protein, 67 aa, Homo sapiens
CRYGLHHAPGPPATRVFAASQPGFPQVCPIPKATQLKLWLCFHSRDGQAGIGPPAAPGPRFSGWGAM

SEQ ID NO: 768165 - protein, 290 aa, Homo sapiens
AQTTLTTNDIVISKLTQILSYLRQGTRNKKLKKKDKGKLEEKKPPEADMNIFEDIGDYVPSTTKTPRDKERERYRERERDRERDRDRDRERERERDRERERERDREREEEKKRHSYFEKPKVDDEPMDVDKGPGSTKELIKSINEKFAGSAGWEGTESLKKPEDKKQLGDFFGMSNSYAECYPATMDDMAVDSDEEVDYSKMDQGNKKGPLGRWDFDTQEEYSEYMNNKEALPKAAFQYGIKMSEGRKTRRFKETNDKAELDRQWKKISAIIEKRKKMEADGVEVKRPKY

SEQ ID NO: 768166 - protein, 123 aa, Homo sapiens [sequence omitted]

SEQ ID NO: 768167 - protein, 243 aa, Homo sapiens
RRSHPLLRAELAAAMTPQLLLALVLWASCPPCSGRKGPPAALTLPRVQCRASRYPIAVDCSWTLPPAPNSTSPVSFIATYRLGMAARGHSWPCLQQTPTSTSCTITDVQLFSMAPYVLNVTAVHPWGSSSSFVPFITEHIIKPDPPEGVRLSPLAERQLQVQWEPPGSWPFPEIFSLKYWIRYKRQGAARFHRVGPIEATSFILRAVRPRARYYIQVAAQDLTDYGELSDWSLPATATMSLGK

SEQ ID NO: 768168 - protein, 167 aa, Homo sapiens
MKENGIQDMEQFYELWLKSQKNEKSEDIASQSNKENGKQIHMPTDYAEVTVDFHCWMCGKNCNSEKQWQGHISSEKHKEKVFHTEDDQYCWQHRFPTGYFSICDRYMNGTCPEGNSCKFAHGNAELHEWEERRDALKMKLNKARKDHLIGPNDNDFGKYSFLFKDLN

SEQ ID NO: 768169 - protein, 935 aa, Homo sapiens
VYLRALVRNLFNEGNDVYREHDWNNSISQYTEALNIADYAKSEEILIPKEIIEKLYINRIACYSNMGFHDKVLEDCNIVLSLNASNCKALYRKSKALSDLGRYKKAYDAVAKCSLAVPQDEHVIKLTQELAQKLGFKIRKAYVRAELSLKSVPGDGATKALNHSVEDIEPDLLTPRQEAVPVVSLPAPSFSHEVGSELASVPVMPLTSILPLQVEESALPSAVLANGGKMPFTMPEAFLDDGDMVLGDELDDLLDSAPETNETVMPSALVRGPLQTASVSPSMPFSASLLGTLPIGARYAPPPSFSEFYPPLTSSLEDFCSSLNSFSMSESKRDLSTSTSREGTPLNNSNSSLLLMNGPGSLFASENFLGISSQPRNDFGNFFGSAVTKPSSSVTPRHPLEGTHELRQACQICFVKSGPKLMDFTYHANIDHKCKKDILIGRIKNVEDKSWKKIRPRPTKTNYEGPYYICKDVAAEEECRYSGHCTFAYCQEEIDVWTLERKGAFSREAFFGGNGKINLTVFKLLQEHLGEFIFLCEKCFDHKPRMISKRNKDNSTACSHPVTKHEFEDNKCLVHILRETTVKYSKIRSFHGQCQLDLCRHEVRYGCLREDECFYAHSLVELKVWIMQNETGISHDAIAQESKRYWQNLEANVPGAQVLGNQIMPGFLNMKIKFVCAQCLRNGQVIEPDKNRKYCSAKARHSWTKDRRAMRVMSIERKKWMNIRPLPTKKQMPLQFDLCNHIASGKKCQYVGNCSFAHSPEEREVWTYMKENGIQDMEQFYELWLKSQKNEKSEDIASQSNKENGKQIHMPTDYAEVTVDFHCWMCGKNCNSEKQWQGHISSEKHKEKVFHTEDDQYCWQHRFPTGYFSICDRYMNGTCPEGNSCKFAHGNAELHEWEERRDALKMKLNKARKDHLIGPNDNDFGKYSFLFKDLN

SEQ ID NO: 768170 - protein, 737 aa, Homo sapiens
VYLRALVRNLFNEGNDVYREHDWNNSISQYTEALNIADYAKSEEILIPKEIIEKLYINRIACYSNMGFHDKVLEDCNIVLSLNASNCKALYRKSKALSDLGRYKKAYDAVAKCSLAVPQDEHVIKLTQELAQKLGFKIRKAYVRAELSLKSVPGDGATKALNHSVEDIEPDLLTPRQEAVPVVSLPAPSFSHEVGSELASVPVMPLTSILPLQVEESALPSAVLANGGKMPFTMPEAFLDDGDMVLGDELDDLLDSAPETNETVMPSALVRGPLQTASVSPSMPFSASLLGTLPIGARYAPPPSFSEFYPPLTSSLEDFCSSLNSFSMSESKRDLSTSTSREGTPLNNSNSSLLLMNGPGSLFASENFLGISSQPRNDFGNFFGSAVTKPSSSVTPRHPLEGTHELRQACQICFVKSGPKLMDFTYHANIDHKCKKDILIGRIKNVEDKSWKKIRPRPTKTNYEGPYYICKDVAAEEECRYSGHCTFAYCQEEIDVWTLERKGAFSREAFFGGNGKINLTVFKLLQEHLGEFIFLCEKCFDHKPRMISKRNKDNSTACSHPVTKHEFEDNKCLVHILRETTVKYSKIRSFHGQCQLDLCRHEVRYGCLREDECFYAHSLVELKVWIMQNETGISHDAIAQESKRYWQNLEANVPGAQVLGNQIMPGFLNMKIKFVCAQCLRNGQVIEPDKNRKYCSAKARHSWTKDRRAMRVMSIEPVQPYCFWEKMSICGKLFLCS

SEQ ID NO: 768171 - protein, 396 aa, Homo sapiens
CWLFFFFFFLFFLQMNGPGSLFASENFLGISSQPRNDFGNFFGSAVTKPSSSVTPRHPLEGTHELRQACQICFVKSGPKLMDFTYHANIDHKCKKDILIGRIKNVEDKSWKKIRPRPTKTNYEGPYYICKDVAAEEECRYSGHCTFAYCQEEIDVWTLERKGAFSREAFFGGNGKINLTVFKLLQEHLGEFIFLCEKCFDHKPRMISKRNKDNSTACSHPVTKHEFEDNKCLVHILRETTVKYSKIRSFHGQCQLDLCRHEVRYGCLREDECFYAHSLVELKVWIMQNETGISHDAIAQESKRYWQNLEANVPGAQVLGNQIMPGFLNMKIKFVCAQCLRNGQVIEPDKNRKYCSAKARHSWTKDRRAMRVMSIEPVQPYCFWEKMSICGKLFLCS

SEQ ID NO: 768172 - protein, 361 aa, Homo sapiens
MTLNTYMQEPTEYHIYQSLKINACKVRMNQYLKGLICFVKSGPKLMDFTYHANIDHKCKKDILIGRIKNVEDKSWKKIRPRPTKTNYEGPYYICKDVAAEEECRYSGHCTFAYCQEEIDVWTLERKGAFSREAFFGGNGKINLTVFKLLQEHLGEFIFLCEKCFDHKPRMISKRNKDNSTACSHPVTKHEFEDNKCLVHILRETTVKYSKIRSFHGQCQLDLCRHEVRYGCLREDECFYAHSLVELKVWIMQNETGISHDAIAQESKRYWQNLEANVPGAQVLGNQIMPGFLNMKIKFVCAQCLRNGQVIEPDKNRKYCSAKARHSWTKDRRAMRVMSIEPVQPYCFWEKMSICGKLFLCS

SEQ ID NO: 768173 - protein, 226 aa, Homo sapiens [sequence omitted]

SEQ ID NO: 768174 - protein, 159 aa, Homo sapiens [sequence omitted]

SEQ ID NO: 768175 - protein, 935 aa, Homo sapiens; identical to SEQ ID NO: 768169

SEQ ID NO: 768176 - protein, 576 aa, Homo sapiens
VYLRALVRNLFNEGNDVYREHDWNNSISQYTEALNIADYAKSEEILIPKEIIEKLYINRIACYSNMGFHDKVLEDCNIVLSLNASNCKALYRKSKALSDLGRYKKAYDAVAKCSLAVPQDEHVIKLTQELAQKLGFKIRKAYVRAELSLKSVPGDGATKALNHSVEDIEPDLLTPRQEAVPVVSLPAPSFSHEVGSELASVPVMPLTSILPLQVEESALPSAVLANGGKMPFTMPEAFLDDGDMVLGDELDDLLDSAPETNETVMPSALVRGPLQTASVSPSMPFSASLLGTLPIGARYAPPPSFSEFYPPLTSSLEDFCSSLNSFSMSESKRDLSTSTSREGTPLNNSNSSLLLMNGPGSLFASENFLGISSQPRNDFGNFFGSAVTKPSSSVTPRHPLEGTHELRQACQICFVKSGPKLMDFTYHANIDHKCKKDILIGRIKNVEDKSWKKIRPRPTKTNYEGPYYICKDVAAEEECRYSGHCTFAYCQEEIDVWTLERKGAFSREAFFGGNGKINLTVFKLLQEHLGEFIFLCEKCFDHKPRMISKRNKDNSTACSHPVTKHEFEDNKYVDSF

SEQ ID NO: 768177 - protein, 172 aa, Homo sapiens
VYLRALVRNLFNEGNDVYREHDWNNSISQYTEALNIADYAKSEEILIPKEIIEKLYINRIACYSNMGFHDKVLEDCNIVLSLNASNCKALYRKSKALSDLGRYKKAYDAVAKCSLAVPQDEHVIKLTQELAQKLGFKIRKAYVRAELSLKSVPGDGATKDANGYCELGNDWW

SEQ ID NO: 768178 - protein, 143 aa, Homo sapiens
QGQRSAAAPHPAPDRPPRQHHGQLLEQPQRGPGSRAHTPQSPHKHLGTQGAVTDKEKERPPSCCAAAGALLQHKSPSALGKGVLSRRPENETVLHQFCCPAADACSDLASQSDGSCTQAGGGMEDSVVAAAAVAAGRPSAHAP

SEQ ID NO: 768179 - protein, 145 aa, Homo sapiens
AVALPFGLCWLCGGSAVRRSFAERLCLAAVMSRHSRLQRQVLSLYRDLLRAGRGKPGAEARVRAEFRQHAGLPRSDVLRIEYLYRRGRRQLQLLRSGHATAMGAFVRPRAPTGEPGGVGSQPDDGDSPRNPHDSTGAPETRPDGR

SEQ ID NO: 768180 - protein, 398 aa, Homo sapiens
MEEDDSYVPSDLTAEERQELENIRRRKQELLADIQRLKDEIAEVANEIENLGSTEERKNMQRNKQVAMGRKKFNMDPKKGIQFLIENDLLKNTCEDIAQFLYKGEGLNKTAIGDYLGERDEFNIQVLHAFVELHEFTDLNLVQALRQFLWSFRLPGEAQKIDRMMEAFAQRYCQCNNGVFQSTDTCYVLSFAIIMLNTSLHNPNVKDKPTVERFIAMNRGINDGGDLPEELLRNLYESIKNEPFKIPEDDGNDLTHTFFNPDREGWLLKLGGGRVKTWKRRWFILTDNCLYYFEYTTDKEPRGIIPLENLSIREVEDSKKPNCFELYIPDNKDQVIKACKTEADGRVVEGNHTVYRISAPTPEEKEEWIKCIKAAISRDPFYEMLAARKKKVSSTKRH

SEQ ID NO: 768181 - protein, 255 aa, Homo sapiens
MVLKTEEEDVPSDLTAEERQELENIRRRKQELLADIQRLKDEIAEVANEIENLGSTEERKNMQRNKQVAMGRKKFNMDPKKGIQFLIENDLLKNTCEDIAQFLYKGEGLNKTAIGDYLGERDEFNIQVLHAFVELHEFTDLNLVQALRQFLWSFRLPGEAQKIDRMMEAFAQRYCQCNNGVFQSTDTCYVLSFAIIMLNTSLHNPNVKDKPTVERFIAMNRGINDGGDLPEELLRNLYETLAAEAVKMPERRTGT

SEQ ID NO: 768182 - protein, 511 aa, Homo sapiens
SSTHSERLLGLQLCASISALCASLPHRAQRVSTCRAGALSFCFLWTPSSLPLLCWRTHAVLAPALPAPTAVGAPGSLVLWGRCTEPPWPLTWRAVTCRGFDVAAQGWPGHWGRRRGDLTVVPSDLTAEERQELENIRRRKQELLADIQRLKDEIAEVANEIENLGSTEERKNMQRNKQVAMGRKKFNMDPKKGIQFLIENDLLKNTCEDIAQFLYKGEGLNKTAIGDYLGERDEFNIQVLHAFVELHEFTDLNLVQALRQFLWSFRLPGEAQKIDRMMEAFAQRYCQCNNGVFQSTDTCYVLSFAIIMLNTSLHNPNVKDKPTVERFIAMNRGINDGGDLPEELLRNLYESIKNEPFKIPEDDGNDLTHTFFNPDREGWLLKLGGGRVKTWKRRWFILTDNCLYYFEYTTDKEPRGIIPLENLSIREVEDSKKPNCFELYIPDNKDQVIKACKTEADGRVVEGNHTVYRISAPTPEEKEEWIKCIKAAISRDPFYEMLAARKKKVSSTKRH

SEQ ID NO: 768183 - protein, 412 aa, Homo sapiens
MRAASRSAEPGSRTMEEDDSYVPSDLTAEERQELENIRRRKQELLADIQRLKDEIAEVANEIENLGSTEERKNMQRNKQVAMGRKKFNMDPKKGIQFLIENDLLKNTCEDIAQFLYKGEGLNKTAIGDYLGERDEFNIQVLHAFVELHEFTDLNLVQALRQFLWSFRLPGEAQKIDRMMEAFAQRYCQCNNGVFQSTDTCYVLSFAIIMLNTSLHNPNVKDKPTVERFIAMNRGINDGGDLPEELLRNLYESIKNEPFKIPEDDGNDLTHTFFNPDREGWLLKLGGGRVKTWKRRWFILTDNCLYYFEYTTDKEPRGIIPLENLSIREVEDSKKPNCFELYIPDNKDQVIKACKTEADGRVVEGNHTVYRISAPTPEEKEEWIKCIKAAISRDPFYEMLAARKKKVSSTKRH

SEQ ID NO: 768184 - protein, 400 aa, Homo sapiens
MVLKTEEEDVPSDLTAEERQELENIRRRKQELLADIQRLKDEIAEVANEIENLGSTEERKNMQRNKQVAMGRKKFNMDPKKGIQFLIENDLLKNTCEDIAQFLYKGEGLNKTAIGDYLGERDEFNIQVLHAFVELHEFTDLNLVQALRQFLWSFRLPGEAQKIDRMMEAFAQRYCQCNNGVFQSTDTCYVLSFAIIMLNTSLHNPNVKDKPTVERFIAMNRGINDGGDLPEELLRNLYESIKNEPFKIPEDDGNDLTHTFFNPDREGWLLKLGGGRVKTWKRRWFILTDNCLYYFEYTTDKEPRGIIPLENLSIREVEDSKKPNCFELYIPDNKDQVIKACKTEADGRVVEGNHTVYRISAPTPEEKEEWIKCIKAAISRDPFYEMLAARKKKVSSTKRH

SEQ ID NO: 768185 - protein, 390 aa, Homo sapiens
GGVAQRYCQCNNGVFQSTDDSYVPSDLTAEERQELENIRRRKQELLADIQRLKDEIAEVANEIENLGSTEERKNMQRNKQVAMGRKKFNMDPKKGIQFLIENDLLKNTCEDIAQFLYKGEGLNKTAIGDYLGERDEFNIQVLHAFVELHEFTDLNLVQALRQFLWSFRLPGEAQKIDRMMEAFAIIMLNTSLHNPNVKDKPTVERFIAMNRGINDGGDLPEELLRNLYESIKNEPFKIPEDDGNDLTHTFFNPDREGWLLKLGGGRVKTWKRRWFILTDNCLYYFEYTTDKEPRGIIPLENLSIREVEDSKKPNCFELYIPDNKDQVIKACKTEADGRVVEGNHTVYRISAPTPEEKEEWIKCIKAAISRDPFYEMLAARKKKVSSTKRH

SEQ ID NO: 768186 - protein, 68 aa, Homo sapiens
LRAEGIFMRAASRSAEPGSRTMEEDDSYVPSDLTAEERQELENIRRRKQELLADIQFWQLSMFLEITA

SEQ ID NO: 768187 - protein, 113 aa, Homo sapiens
WDVSEHLSMQRLPFAFLSSLDTCYVLSFAIIMLNTSLHNPNVKDKPTVERFIAMNRGINDGGDLPEELLRVSKEEWSSFKSRKSSLGTGSSFVGRKKKHTIYQGSPLLICLTM

SEQ ID NO: 768188 - protein, 97 aa, Homo sapiens
LALVRWLMPCNPQHFWRPRWADHKVKSSRVEFHHVGQAGLELLTSDNLPTLASQIAGITGVSHCNKPSAILLLKYWRLLCISLLSSVLSVFCQYFHM

SEQ ID NO: 768189 - protein, 312 aa, Homo sapiens
TPRAAREPEEPSQDAPRDPAGCGDIIADQEEEAGPSCDKHVPGPGKPALSKKNPGVVAYQGGGEEMASPDEVDDTYLQEFWDMLSQTEEQGPEPQEGAAKVAAALETKVVPETPKDTRCVEAAKDASSVKRRRLNRIPIEPHPKEEPKHPEKEQQEGVPNSDEGYWDSTTPGPEEDSSSSGKKAGIPRDSYSGDALYDLYADPDGSPATLPGGKDNEETSSLSRLKPVSPGTITCPLRTPGSLLKDSKIPISIKHLTNLPSSHPVVHQQPSRSEMPRTKIPVSKVLVRRVSNRGLAGTTIRATACHDSAKKL

SEQ ID NO: 768190 - protein, 152 aa, Homo sapiens
SDPSADRICLMFSDVTSLKSFDSLTGCGDIIADQEEEAGPSCDKHVPGPGKPALSKKNPGVVAYQGGGEEMASPDEVDDTYLQEFWDMLSQTEEQGPEPQEGAAKVAAALETKVVPETPKDTRCVEAAKDASSVKRRRLNRIPIEPHPKEEP

SEQ ID NO: 768191 - protein, 159 aa, Homo sapiens [sequence omitted]

SEQ ID NO: 768192 - protein, 216 aa, Homo sapiens
KQWYQRRGPITAGIDVMKRSESWTLKKPKSVSKKLKSVFRVPDLSGMLQVLKELTDVQYYWVTIREYYKHLYGNKLENLEEMDKFLDTYTLPRLNQEEVESLNRPITGAEIVAIINSLPTKKSPGPEGFTAEFYQRYKEELVPFLLKLFQSIEKEGNLPNSFYEASIMLIPKPGRDTTKKTTTKQTQKTKPLWDDLGPLKKDFFNTTFVGRPRGPP

SEQ ID NO: 768193 - protein, 498 aa, Homo sapiens [sequence omitted]

SEQ ID NO: 768194 - protein, 498 aa, Homo sapiens [sequence omitted]

SEQ ID NO: 768195 - protein, 498 aa, Homo sapiens [sequence omitted]

SEQ ID NO: 768196 - protein, 498 aa, Homo sapiens [sequence omitted]

SEQ ID NO: 768197 - protein, 498 aa, Homo sapiens [sequence omitted]

SEQ ID NO: 768198 - protein, 179 aa, Homo sapiens [sequence omitted]

SEQ ID NO: 768199 - protein, 478 aa, Homo sapiens
MDFSVKVDIEKEVTCPICLELLTEPLSLDCGHSFCQACITAKIKESVIISRGESSCPVCQTRFQPGNLRPNRHLANIVERVKEVKMSPQEGQKRDVCEHHGKKLQIFCKEDGKVICWVCELSQEHQGHQTFRINEVVKECQEKLQVALQRLIKENQEAEKLEDDIRQERTAWKNYIQIERQKILKGFNEMRVILDNEEQRELQKLEEGCQHAHLRSPAEVDGIVSRDAAGYQFLLSLRSESWTLKKPKSVSKKLKSVFRVPDLSGMLQVLKELTDVQYYWVDVMLNPGSATSNVAISVDQRQVKTVRTCTFKNSNPCDFSAFGVFGCQYFSSGKYYWEVDVSGKIAWILGVHSKISSLNKRKSSGFAFDPSVNYSKVYSRYRPQYGYWVIGLQNTCEYNAFEDSSSSDPKVLTLFMAVPPCRIGVFLDYEAGIVSFFNVTNHGALIYKFSGCRFSRPAYPYFNPWNCLVPMTVCPPSS

SEQ ID NO: 768200 - protein, 195 aa, Homo sapiens [sequence omitted]

SEQ ID NO: 768201 - protein, 498 aa, Homo sapiens [sequence omitted]

SEQ ID NO: 768202 - protein, 359 aa, Homo sapiens
MDFSVKVDIEKEVTCPICLELLTEPLSLDCGHSFCQACITAKIKESVIISRGESSCPVCQTRFQPGNLRPNRHLANIVERVKEVKMSPQEGQKRDVCEHHGKKLQIFCKEDGKVICWVCELSQEHQGHQTFRINEVVKECQEKLQVALQRLIKENQEAEKLEDDIRQERTAWKNYIQIERQKILKGFNEMRVILDNEEQRELQKLEEGEVNVLDNLAAATDQLVQQRQDASTLISDLQRRLTGSSVEMLQDVIDVMKRSEKLDSEKVEEYNLRYSYMKSWAGLLRILGVVELLLGAGVFACVTAYIHKDSEWYNLFGYSQPYGMGGVGGLGSMYGGYYYTAEDPLCTRVAGSRSRIADK

SEQ ID NO: 768203 - protein, 325 aa, Homo sapiens
KKKRLALDSEAAVSADKPDSVLTHHVPSFLQKLCKERAQKLCRNSTRVPAQCTVPSHPQSTPVHSPDRMLDSPKRKRPKSLAQVEEPAIENVKPPGSPVAKLAKFTFKQKSKLIHSFEDHSHVSPGATKIAVHSPKISQRRTRRDAALPVKRPGKLTSTPGNQISSQPQGETKEVSQQPPEKHGPREKVMCAPEKRIIQPELELGNETGCAHLTCEGDKKEEVSGSNKSGKVHACTLARLANFCVTPPSESKSKSPPPERKNRGERGPSSPPTTTAPMRVSKRKSFQLRGSTEKLIVSKESLFTLPELGDEAFDCDWDEEMRKKS

SEQ ID NO: 768204 - protein, 325 aa, Homo sapiens; identical to SEQ ID NO: 768203

SEQ ID NO: 768205 - protein, 104 aa, Homo sapiens
MEEDPSQPSQSPSSKCLSSSICSQIPWHSRQACPWEGPWDGEAGFAALHACPLGFQLTHPRVSGALQDGKCWGGGRQTTLCPTGTDPPCHRLPKGGPQNPLPSP

SEQ ID NO: 768206 - protein, 120 aa, Homo sapiens
MASVGEEGGRPLCAPRALTHPAIGFLREPPETQSTISTSSDTRVEQVEEEQESHEQQNARNRKDTGTEKREKREKEKDSSKRRETAQREGEGEEENEQTQKNDKERKSRGDRQQRQKKGE

SEQ ID NO: 768207 - protein, 607 aa, Homo sapiens
MEEDPSQPSQSPSSKCLSSSICSQIPWHSRQACPWEGPWDGEAGFAALHACPLGFQLTHPRVSGALQDGKCWGGGRQTTLCPTGTDPPCHRLPKGAPGSLPSLYHVDACVSGNDPMRRLTINWRHGKTTGDKSKEWDTKGKNKGHIQKDKKGTQAPKGQARQERTTGSAKKDHWTAHCTEPPRDCRGLNHHIVTTSTRRGKRGGHKEKTHKTQPSREAQHHARARLRPPTRPTDQRGQRTRASDDTGTNKAETGKNNTQAQRRHTQPAPHQKRNKEEQEAHTNTTRWNNRTTGKHHRAGRHKTKETSQRQHDHKTSGDNPNTQGQNKADKEARQKQQHTEVANQAHLEQTQGTPPPRHHHGATTNKRRQREKHRTAARPQQPQHATNKQHKNTQPERTRQTETRHEKRPEQQKTTQTSKQNEIRANRPTTKASKTPLHEGHNTTQQERTQEQQWRHKKRTRATHDNRQPRARESASSRQTHGETHNQHHNYKAGRHNRGRRTHRHTRNTQTHDDDRKSTTERKEKGDPTHTAPTLDNDHREHQQISAPRHKTNQSKNRQPRRTETHQTESTTRHNADDPKQARDASNRRTTEAHHRHNATDTGTAYG

SEQ ID NO: 768208 - protein, 187 aa, Homo sapiens
MEEDPSQPSQSPSSKCLSSSICSQIPWHSRQACPWEGPWDGEAGFAALHACPLGFQLTHPRVSGALQDGKCWGGGRQTTLCPTGTDPPCHRLPKGAPRNTIDNQHSSDTRVEQVEEEQESHEQQNARNRKDTGTEKREKREKEKDSSKRRETAQREGEGEEENEQTQKNDKERKSRGDRQQRQKKGE

SEQ ID NO: 768209 - protein, 498 aa, Homo sapiens
MRRAPSLVLFFLVALCGRGNCRVANAEEKLMDDLLNKTRYNNLIRPATSSSQLISIKLQLSLAQLISVNEREQIMTTNVWLKQEWTDYRLTWNSSRYEGVNILRIPAKRIWLPDIVLYNNADGTYEVSVYTNLIVRSNGSVLWLPPAIYKSACKIEVKYFPFDQQNCTLKFRSWTYDHTEIDMVLMTPTASMDDFTPSGEWDIVALPGRRTVNPQDPSYVDVTYDFIIKRKPLFYTINLIIPCVLTTLLAILVFYLPSDCGEKMTLCISVLLALTFFLLLISKIVPPTSLDVPLIGKYLMFTMVLVTFSIVTSVCVLNVHHRSPSTHTMAPWVKRCFLHKLPTFLFMKRPGPDSSPARAFPPSKSCVTKPEATATSTSPSNFYGNSMYFVNPASAASKSPAGSTPVAIPRDFWLRSSGRFRQDVQEALEGVSFIAQHMKNDDEDQSVVEDWKYVAMVVDRLFLWVFMFVCVLGTVGLFLPPLFQTHAASEGPYAAQRD

SEQ ID NO: 768210 - protein, 139 aa, Homo sapiens
SADEILWLNTLLILGIRHRACLSPNSRLQFPASSRTNYSDKPVTPSRGNQAHSALLLLQSLPPAAPPCYRVPECSLHIALHSVQGPSPLDWSICDQSAAVDCIRPASSVVCSAIPVSLGVGTGAGAGAWGEGIPLSSME

SEQ ID NO: 768211 - protein, 199 aa, Homo sapiens
MHIEYGLRRRNLSKTFRRSIRILPSTSIGGYDYQVEPPLPSHHHPPRPRGGVELRRTSEKIDRITCPRGRDTTPRRGLPTAGVERATTPSTTPPHDSSSGLRLSRSCRVPDRIPRYQLWWAPTLAPRQGYAAHPPRAEDDTQVAHLESPVRISSDDWMVPMPTERGGYRRMRAAFHAAPYQNLDCAEGRRISVDKVTQI

SEQ ID NO: 768212 - protein, 152 aa, Homo sapiens
APDGAGGGETRHPPAQSCLTRPGRTPPPGCLGTIPGIQGKAVRAGTGGYVRHRLFPITIATEDWSRCGSRSVLLQMVGYQESCSGNLTTQWKKHWSSWLSLQTPGGTPLGSSSSHPFGLRLNYTTNFPGSPPCRWQIVELLGLHSCMKQFSY

SEQ ID NO: 768213 - protein, 69 aa, Homo sapiens
THAYDETRGIRTTTSDRVTFIDLHMLNQPCILGTKPTPLLRMNFLMCCWICFASILLRIFAQCLPKTLA

SEQ ID NO: 768214 - protein, 197 aa, Homo sapiens
MSMEYFSICFVSTLISLSSCLWFSLKRSFTFFLSCIPRYFFLFVANVNESSFMICLPACLLFVHGNASYFCTLILYPEILLLLLITLRSFGPETMRFSRCRIRSSANKDNLTSSLSIRILFISSSGLIFLAKASDTILNGSGERGHSFLVPVFRWNVSSFCTFSMILAVGLLYMALIIFRYVSSLPSLLRILNLKEC

SEQ ID NO: 768215 - protein, 475 aa, Homo sapiens
MAAKSQPNIPKAKSLDGVTNDRTASQGQWGRAWEVDWFSLASVIFLLLFAPFIVYYFIMACDQYSCALTGPVVDIVTGHARLSDIWAKTPPITRKAAQLYTLWVTFQVLLYTSLPDFCHKFLPGYVGGIQEGAVTPAGVVNKYQINGLQAWLLTHLLWFANAHLLSWFSPTIIFDNWIPLLWCANILGYAVSTFAMVKGYFFPTSARDCKFTGNFFYNYMMGIEFNPRIGKWFDFKLFFNGRPGIVAWTLINLSFAAKQRELHSHVTNAMVLVNVLQAIYVIDFFWNETWYLKTIDICHDHFGWYLGWGDCVWLPYLYTLQGLYLVYHPVQLSTPHAVGVLLLGLVGYYIFRVANHQKDLFRRTDGRCLIWGRKPKVIECSYTSADGQRHHSKLLVSGFWGVARHFNYVGDLMGSLAYCLACGGGHLLPYFYIIYMAILLTHRCLRDEHRCASKYGRDWERYTAAVPYRLLPGIF

SEQ ID NO: 768216 - protein, 475 aa, Homo sapiens; identical to SEQ ID NO: 768215

SEQ ID NO: 768217 - protein, 475 aa, Homo sapiens; identical to SEQ ID NO: 768215

SEQ ID NO: 768218 - protein, 475 aa, Homo sapiens; identical to SEQ ID NO: 768215

SEQ ID NO: 768219 - protein, 475 aa, Homo sapiens; identical to SEQ ID NO: 768215

SEQ ID NO: 768220 - protein, 475 aa, Homo sapiens; identical to SEQ ID NO: 768215

SEQ ID NO: 768221 - protein, 475 aa, Homo sapiens; identical to SEQ ID NO: 768215

SEQ ID NO: 768222 - protein, 475 aa, Homo sapiens; identical to SEQ ID NO: 768215

SEQ ID NO: 768223 - protein, 520 aa, Homo sapiens
MAAKSQPNIPKAKSLDGVTNDRTASQGQWGRAWEVDWFSLASVIFLLLFAPFIVYYFIMACDQYSCALTGPVVDIVTGHARLSDIWAKTPPITRKAAQLYTLWVTFQVLLYTSLPDFCHKFLPGYVGGIQEGAVTPAGVVNKYQINGLQAWLLTHLLWFANAHLLSWFSPTIIFDNWIPLLWCANILGYAVSTFAMVKGYFFPTSARDCKFTGNFFYNYMMGIEFNPRIGKWFDFKLFFNGRPGIVAWTLINLSFAAKQRELHSHVTNAMVLVNVLQAIYVIDFFWNETWYLKTIDICHDHFGWYLGWGDCVWLPYLYTLQKRTRRQGVCQRQSWGLTPGRWAPEPTLLSSPWAKHRLTPSPSPPKGLYLVYHPVQLSTPHAVGVLLLGLVGYYIFRVANHQKDLFRRTDGRCLIWGRKPKVIECSYTSADGQRHHSKLLVSGFWGVARHFNYVGDLMGSLAYCLACGGGHLLPYFYIIYMAILLTHRCLRDEHRCASKYGRDWERYTAAVPYRLLPGIF

SEQ ID NO: 768224 - protein, 475 aa, Homo sapiens; identical to SEQ ID NO: 768215

SEQ ID NO: 768225 - protein, 471 aa, Homo sapiens
MAAKSQPNIPKAKSLDGVTNDRTASQGQWGRAWEVDWFSLASVIFLLLFAPFIVYYFIMACDQYSCALTGPVVDIVTGHARLSDIWAKTPPITRKAAQLYTLWVTFQVLLYTSLPDFCHKFLPGYVGGIQEGAVTPAGVVNKYQINGLQAWLLTHLLWFANAHLLSWFSPTIIFDNWIPLLWCANILGYAVSTFAMVKGYFFPTSARDCKFTGNFFYNYMMGIEFNPRIGKWFDFKLFFNGRPGIVAWTLINLSFAAKQRELHSHVTNAMVLVNVLQAIYVIDFFWNETWYLKTIDICHDHFGWYLGWGDCVWLPYLYTLQGLYLVYHPVQLSTPHAVGVLLLGLVGYYIFRVANHQKDLFRRTDGRCLIWGRKPKVIECSYTSADGQRHHSKLLVSGFWGVARHFNYVGDLMGSLAYCLACGGGHLLPYFYIIYMAILLTHRCLRDEHRCASKEFRVSSTAVLPAQTDFL

SEQ ID NO: 768226 - protein, 443 aa, Homo sapiens
MAAKSQPNIPKAKSLDGVTNDRTASQGQWGRACCALTGPVVDIVTGHARLSDIWAKTPPITRKAAQLYTLWVTFQVLLYTSLPDFCHKFLPGYVGGIQEGAVTPAGVVNKYQINGLQAWLLTHLLWFANAHLLSWFSPTIIFDNWIPLLWCANILGYAVSTFAMVKGYFFPTSARDCKFTGNFFYNYMMGIEFNPRIGKWFDFKLFFNGRPGIVAWTLINLSFAAKQRELHSHVTNAMVLVNVLQAIYVIDFFWNETWYLKTIDICHDHFGWYLGWGDCVWLPYLYTLQGLYLVYHPVQLSTPHAVGVLLLGLVGYYIFRVANHQKDLFRRTDGRCLIWGRKPKVIECSYTSADGQRHHSKLLVSGFWGVARHFNYVGDLMGSLAYCLACGGGHLLPYFYIIYMAILLTHRCLRDEHRCASKYGRDWERYTAAVPYRLLPGIF

SEQ ID NO: 768227 - protein, 487 aa, Homo sapiens
MAAKSQPNIPKAKSLDGVTNDRTASQGQWGRAWEVDWFSLASVIFLLLFAPFIVYYFIMACDQYSCALTGPVVDIVTGHARLSDIWAKTPPITRKAAQLYTLWVTFQVSSPCPGVGTQQVLLYTSLPDFCHKFLPGYVGGIQEGAVTPAGVVNKYQINGLQAWLLTHLLWFANAHLLSWFSPTIIFDNWIPLLWCANILGYAVSTFAMVKGYFFPTSARDCKFTGNFFYNYMMGIEFNPRIGKWFDFKLFFNGRPGIVAWTLINLSFAAKQRELHSHVTNAMVLVNVLQAIYVIDFFWNETWYLKTIDICHDHFGWYLGWGDCVWLPYLYTLQGLYLVYHPVQLSTPHAVGVLLLGLVGYYIFRVANHQKDLFRRTDGRCLIWGRKPKVIECSYTSADGQRHHSKLLVSGFWGVARHFNYVGDLMGSLAYCLACGGGHLLPYFYIIYMAILLTHRCLRDEHRCASKYGRDWERYTAAVPYRLLPGIF

SEQ ID NO: 768228 - protein, 475 aa, Homo sapiens; identical to SEQ ID NO: 768215

SEQ ID NO: 768229 - protein, 440 aa, Homo sapiens
MAAKSQPNIPKAKSLDGVTNDRTASQGQWGRAWEVDWFSLASVIFLLLFAPFIVYYFIMACDQYSCALTGPVVDIVTGHARLSDIWAKTPPITRKAAQLYTLWVTFQVLLYTSLPDFCHKFLPGYVGGIQEGAVTPAGVVNKYQINGLQAWLLTHLLWFANAHLYFFPTSARDCKFTGNFFYNYMMGIEFNPRIGKWFDFKLFFNGRPGIVAWTLINLSFAAKQRELHSHVTNAMVLVNVLQAIYVIDFFWNETWYLKTIDICHDHFGWYLGWGDCVWLPYLYTLQGLYLVYHPVQLSTPHAVGVLLLGLVGYYIFRVANHQKDLFRRTDGRCLIWGRKPKVIECSYTSADGQRHHSKLLVSGFWGVARHFNYVGDLMGSLAYCLACGGGHLLPYFYIIYMAILLTHRCLRDEHRCASKYGRDWERYTAAVPYRLLPGIF

SEQ ID NO: 768230 - protein, 323 aa, Homo sapiens
LGRRPGVDIGRELSWFSPTIIFDNWIPLLWCANILGYAVSTFAMVKGYFFPTSARDCKFTGNFFYNYMMGIEFNPRIGKWFDFKLFFNGRPGIVAWTLINLSFAAKQRELHSHVTNAMVLVNVLQAIYVIDFFWNETWYLKTIDICHDHFGWYLGWGDCVWLPYLYTLQGLYLVYHPVQLSTPHAVGVLLLGLVGYYIFRVANHQKDLFRRTDGRCLIWGRKPKVIECSYTSADGQRHHSKLLVSGFWGVARHFNYVGDLMGSLAYCLACGGGHLLPYFYIIYMAILLTHRCLRDEHRCASKYGRDWERYTAAVPYRLLPGIF

SEQ ID NO: 768231 - protein, 255 aa, Homo sapiens
MGIEFNPRIGKWFDFKLFFNGRPGIVAWTLINLSFAAKQRELHSHVTNAMVLVNVLQAIYVIDFFWNETWYLKTIDICHDHFGWYLGWGDCVWLPYLYTLQGLYLVYHPVQLSTPHAVGVLLLGLVGYYIFRVANHQKDLFRRTDGRCLIWGRKPKVIECSYTSADGQRHHSKLLVSGFWGVARHFNYVGDLMGSLAYCLACGGGHLLPYFYIIYMAILLTHRCLRDEHRCASKYGRDWERYTAAVPYRLLPGIF

SEQ ID NO: 768232 - protein, 475 aa, Homo sapiens; identical to SEQ ID NO: 768215

SEQ ID NO: 768233 - protein, 310 aa, Homo sapiens
MAAKSQPNIPKAKSLDGVTNDRTASQGQWGRAWEVDWFSLASVIFLLLFAPFIVYYFIMACDQYSCALTGPVVDIVTGHARLSDIWAKTPPITRKAAQLYTLWVTFQVLLYTSLPDFCHKFLPGYVGGIQEGAVTPAGVVNKYQINGLQAWLLTHLLWFANAHLLSWFSPTIIFDNWIPLLWCANILGYAVSTFAMVKGYFFPTSARDCKFTGNFFYNYMMGIEFNPRIGKWFDFKLFFNGRPGIVAWTLINLSFAAKQRELHSHVTNAMVLVNVLQVPVMAGEGETPMPAGSGGTRKPERIPMTLIYCL

SEQ ID NO: 768234 - protein, 55 aa, Homo sapiens
MAAKSQPNIPKAKSLDGVTYADDYVFGTGTVSARWMRVASRGWIDDVRQALSQSL

SEQ ID NO: 768235 - protein, 152 aa, Homo sapiens [sequence omitted]

SEQ ID NO: 768236 - protein, 244 aa, Homo sapiens
ADADADADAKVAAEVAAEVAAAAAAADADADETLGDCEGNPDFQMASLYVGDLHPEVTEAMLYEKFSPAGPILSIRICRDKITRRSLGYAYVNYQQPVDAKRALETLNFDVIKGRPVRIMWSQRDPSLRKSGVGNVFIKNLGKTIDNKALYNIFSAFGNILSCKVACDEKGPKGYGFVHFQKQESAERAIDVMNGMFLNYRKIFVGRFKSHKEREAERGAWARQSTSADVKDFEEDTDEEATLR

SEQ ID NO: 768237 - protein, 35 aa, Homo sapiens
MPHGCPLSLLLGELKLHGRSPRGAPSNKLDEEEKS

SEQ ID NO: 768238 - protein, 110 aa, Homo sapiens
  misc_feature (24)..(24): Xaa can be any naturally occurring amino acid
  misc_feature (43)..(43): Xaa can be any naturally occurring amino acid
  misc_feature (50)..(50): Xaa can be any naturally occurring amino acid
GPASGLHGHLGLARPMHDLTAAQXGYGRALVHGAQVEGAGAQXLGWDSAXHLPWWDRYSVPGSLGHRHSLLLMVSARARSVRSEGMWGLVRKRATAHYENFPFSAGIVTV

SEQ ID NO: 768239 - protein, 132 aa, Homo sapiens
CSQKGESISFPAFQARIQRFTPVGQLKWQLTLESIPIQGQVFSKAAITMTYWDSKLLPKNAHSLVTSSKDQTVEAYHWHHEAYGYFLPIQTRWQDNDQYGHVNNAVYYSYFDTIISLYLIRSLKFCSSSPSL

SEQ ID NO: 768240 - protein, 74 aa, Homo sapiens
ANRWETPLTFLMILVPSTFLVAMVHAVFWACLGNLIHWWIFQSQLMSIPVYPPPSTSLFFPLSSARTTRHFDFA

SEQ ID NO: 768241 - protein, 127 aa, Homo sapiens
  misc_feature (11)..(11): Xaa can be any naturally occurring amino acid
  misc_feature (19)..(19): Xaa can be any naturally occurring amino acid
  misc_feature (26)..(26): Xaa can be any naturally occurring amino acid
  misc_feature (38)..(38): Xaa can be any naturally occurring amino acid
LQWGHWRKNRXLAGRKCHXCNPSTLXVRGRWIVRSGVXDQPGQHSETPSLLKIQKLAGCSGACLQSQLLGKLRQENHLNPGGGGCGELRSCHCTPTWAIEQDCLKRKKKTKECSVCTLLPLPMVWEW

SEQ ID NO: 768242 - protein, 377 aa, Homo sapiens
MSMSPTVIILACLGFFLDQSVWAHVGGQDKPFCSAWPSAVVPQGGHVTLRCHYRRGFNIFTLYKKDGVPVPELYNRIFWNSFLISPVTPAHAGTYRCRGFHPHSPTEWSAPSNPLVIMVTGLYEKPSLTARPGPTVRAGENVTLSCSSQSSFDIYHLSREGEAHELRLPAVPSINGTFQADFPLGPATHGETYRCFGSFHGSPYEWSDPSDPLPVSVTGNPSSSWPSPTEPSFKTGIARHLHAVIRYSVAIILFTILPFFLLHRWCSKKKNAAVMNQEPAGHRTVNREDSDEQDPQEVTYAQLDHCIFTQRKITGPSQRSKRPSTDTSVCIELPNAEPRALSPAHEHHSQALMGSSRETTALSQTQLASSNVPAAGI

SEQ ID NO: 768243 - protein, 360 aa, Homo sapiens
MSMSPTVIILACLGFFLDQSVWAHVGGQDKPFCSAWPSAVVPQGGHVTLRCHYRRGFNIFTLYKKDGVPVPELYNRIFWNSFLISPVTPAHAGTYRCRGFHPHSPTEWSAPSNPLVIMVTGLYEKPSLTARPGPTVRAGENVTLSCSSQSSFDIYHLSREGEAHELRLPAVPSINGTFQADFPLGPATHGETYRCFGSFHGSPYEWSDPSDPLPVSVTGIARHLHAVIRYSVAIILFTILPFFLLHRWCSKKKNAAVMNQEPAGHRTVNREDSDEQDPQEVTYAQLDHCIFTQRKITGPSQRSKRPSTDTSVCIELPNAEPRALSPAHEHHSQALMGSSRETTALSQTQLASSNVPAAGI

SEQ ID NO: 768244 - protein, 342 aa, Homo sapiens
MSMSPTVIILACLGFFLDQSVWAHVGGQDKPFCSAWPSAVVPQGGHVTLRCHYRRGFNIFTLYKKDGVPVPELYNRIFWNSFLISPVTPAHAGTYRCRGFHPHSPTEWSAPSNPLVIMVTGLYEKPSLTARPGPTVRAGENVTLSCSSQSSFDIYHLSREGEAHELRLPAVPSINGTFQADFPLGPATHGETYRCFGSFHGSPYEWSDPSDPLPVSVTGNPSSSWPSPTEPSFKTDAAVMNQEPAGHRTVNREDSDEQDPQEVTYAQLDHCIFTQRKITGPSQRSKRPSTDTSVCIELPNAEPRALSPAHEHHSQALMGSSRETTALSQTQLASSNVPAAGI

SEQ ID NO: 768245 - protein, 312 aa, Homo sapiens
MSGTNQSSVSEFLLLGLSRQPQQQHLLFVFFLSMYLATVLGNLLIILSVSIDSCLHTPMYFFLSNLSFVDICFSFTTVPKMLANHILETQTISFCGCLTQMYFVFMFVDMDNFLLAVMAYDHFVAVCHPLHYTAKMTHQLCALLVAGLWVVANLNVLLHTLLMAPLSFCADNAITHFFCDVTPLLKLSCSDTHLNEVIILSEGALVMITPFLCILASYMHITCTVLKVPSTKGRWKAFSTCGSHLAVVLLFYSTIIAVYFNPLSSHSAEKDTMATVLYTVVTPMLNPFIYSLRNRYLKGALKKVVGRVVFSV

SEQ ID NO: 768246 - protein, 1187 aa, Homo sapiens
MPLRHWGMARGSKPVGDGAQPMAAMGGLKVLLHWAGPGGGEPWVTFSESSLTAEEVCIHIAHKVGITPPCFNLFALFDAQAQVWLPPNHILEIPRDASLMLYFRIRFYFRNWHGMNPREPAVYRCGPPGTEASSDQTAQGMQLLDPASFEYLFEQGKHEFVNDVASLWELSTEEEIHHFKNESLGMAFLHLCHLALRHGIPLEEVAKKTSFKDCIPRSFRRHIRQHSALTRLRLRNVFRRFLRDFQPGRLSQQMVMVKYLATLERLAPRFGTERVPVCHLRLLAQAEGEPCYIRDSGVAPTDPGPESAAGPPTHEVLVTGTGGIQWWPVEEEVNKEEGSSGSSGRNPQASLFGKKAKAHKAVGQPADRPREPLWAYFCDFRDITHVVLKEHCVSIHRQDNKCLELSLPSRAAALSFVSLVDGYFRLTADSSHYLCHEVAPPRLVMSIRDGIHGPLLEPFVQAKLRPEDGLYLIHWSTSHPYRLILTVAQRSQAPDGMQSLRLRKFPIEQQDGAFVLEGWGRSFPSVRELGAALQGCLLRAGDDCFSLRRCCLPQPGETSNLIIMRGARASPRTLNLSQLSFHRVDQKEITQLSHLGQGTRTNVYEGRLRVEGSGDPEEGKMDDEDPLVPGRDRGQELRVVLKVLDPSHHDIALAFYETASLMSQVSHTHLAFVHGVCVRGPENIMVTEYVEHGPLDVWLRRERGHVPMAWKMVVAQQLASALSYLENKNLVHGNVCGRNILLARLGLAEGTSPFIKLSDPGVGLGALSREERVERIPWLAPECLPGGANSLSTAMDKWGFGATLLEICFDGEAPLQSRSPSEKEHFYQRQHRLPEPSCPQLATLTSQCLTYEPTQRPSFRTILRDLTRLQPHNLADVLTVNPDSPASDPTVFHKRYLKKIRDLGEGHFGKVSLYCYDPTNDGTGEMVAVKALKADCGPQHRSGWKQEIDILRTLYHEHIIKYKGCCEDQGEKSLQLVMEYVPLGSLRDYLPRHSIGLAQLLLFAQQICEGMAYLHAQHYIHRDLAARNVLLDNDRLVKIGDFGLAKAVPEGHEYYRVREDGDSPVFWYAPECLKEYKFYYASDVWSFGVTLYELLTHCDSSQSPPTKFLELIGIAQGQMTVLRLTELLERGERLPRPDKCPCEVYHLMKNCWETEASFRPTFENLIPILKTVHEKYQGQAPSVFSVC

SEQ ID NO: 768247 - protein, 74 aa, Homo sapiens
  misc_feature (21)..(21): Xaa can be any naturally occurring amino acid
MAGLFEASKLITRFPKGTGLXAGVCVPALKVYHLMKNCWETEASFRPTFENLIPILKTVHEKYQGQAPSVFSVC

SEQ ID NO: 768248 - protein, 1319 aa, Homo sapiens
MPLRHWGMARGSKPVGDGAQPMAAMGGLKVLLHWAGPGGGEPWVTFSESSLTAEEVCIHIAHKVGITPPCFNLFALFDAQAQVWLPPNHILEIPRDASLMLYFRIRFYFRNWHGMNPREPAVYRCGPPGTEASSDQTAQGMQLLDPASFEYLFEQGKHEFVNDVASLWELSTEEEIHHFKNESLGMAFLHLCHLALRHGIPLEEVAKKTSFKDCIPRSFRRHIRQHSALTRLRLRNVFRRFLRDFQPGRLSQQMVMVKYLATLERLAPRFGTERVPVCHLRLLAQAEGEPCYIRDSGVAPTDPGPESAAGPPTHEVLVTGTGGIQWWPVEEEVNKEEGSSGSSGRNPQASLFGKKAKAHKAVGQPADRPREPLWAYFCDFRDITHVVLKEHCVSIHRQDNKCLELSLPSRAAALSFVSLVDGYFRLTADSSHYLCHEVAPPRLVMSIRDGIHGPLLEPFVQAKLRPEDGLYLIHWSTSHPYRLILTVAQRSQAPDGMQSLRLRKFPIEQQDGAFVLEGWGRSFPSVRELGAALQGCLLRAGDDCFSLRRCCLPQPGETSNLIIMRGARASPRTLNLSQLSFHRVDQKEITQLSHLGQGTRTNVYEGRLRVEGSGDPEEGKMDDEDPLVPGRDRGQELRVVLKVLDPSHHDIALAFYETASLMSQVSHTHLAFVHGVCVRGPENIMVTEYVEHGPLDVWLRRERGHVPMAWKMVVAQQLASALSYLENKNLVHGNVCGRNILLARLGLAEGTSPFIKLSDPGVGLGALSREERVERIPWLAPECLPGGANSLSTAMDKWGFGATLLEICFDGEAPLQSRSPSEKEHFYQRQHRLPEPSCPQLATLTSQCLTYEPTQRPSFRTILRDLTRLQPHNLADVLTVNPDSPASDPTVFHKRYLKKIRDLGEGHFGKVSLYCYDPTNDGTGEMVAVKALKADCGPQHRSGWKQEIDILRTLYHEHIIKYKGCCEDQGGRDPASPRDLRGRGYSVGVALWAGPVWPSQLETLNPRLQYAVLGIWVSVAGLPPSHLGGATCWGQDGREPPAAPSSENGVLDGSIPPEKLGLVCAGLGLPSRPWRGSAGLKVGGPRPALYRPPPGPPLSAAGEKSLQLVMEYVPLGSLRDYLPRHSIGLAQLLLFAQQICEGMAYLHAQHYIHRDLAARNVLLDNDRLVKIGDFGLAKAVPEGHEYYRVREDGDSPVFWYAPECLKEYKFYYASDVWSFGVTLYELLTHCDSSQSPPTKFLELIGIAQGQMTVLRLTELLERGERLPRPDKCPCEVYHLMKNCWETEASFRPTFENLIPILKTVHEKYQGQAPSVFSVC

SEQ ID NO: 768249 - protein, 1224 aa, Homo sapiens
MPLRHWGMARGSKPVGDGAQPMAAMGGLKVLLHWAGPGGGEPWVTFSESSLTAEEVCIHIAHKVGITPPCFNLFALFDAQAQVWLPPNHILEIPRDASLMLYFRIRFYFRNWHGMNPREPAVYRCGPPGTEASSDQTAQGMQLLDPASFEYLFEQGKHEFVNDVASLWELSTEEEIHHFKNESLGMAFLHLCHLALRHGIPLEEVAKKTSFKDCIPRSFRRHIRQHSALTRLRLRNVFRRFLRDFQPGRLSQQMVMVKYLATLERLAPRFGTERVPVCHLRLLAQAEGEPCYIRDSGVAPTDPGPESAAGPPTHEVLVTGTGGIQWWPVEEEVNKEEGSSGSSGRNPQASLFGKKAKAHKAVGQPADRPREPLWAYFCDFRDITHVVLKEHCVSIHRQDNKCLELSLPSRAAALSFVSLVDGYFRLTADSSHYLCHEVAPPRLVMSIRDGIHGPLLEPFVQAKLRPEDGLYLIHWSTSHPYRLILTVAQRSQAPDGMQSLRLRKFPIEQQDGAFVLEGWGRSFPSVRELGAALQGCLLRAGDDCFSLRRCCLPQPGETSNLIIMRGARASPRTLNLSQLSFHRVDQKEITQLSHLGQGTRTNVYEGRLRVEGSGDPEEGKMDDEDPLVPGRDRGQELRVVLKVLDPSHHDIALAFYETASLMSQVSHTHLAFVHGVCVRGPESSSKLLVRLGVVAHTYPSTLGGRGGRIAYTQEFKTSLDIMVTEYVEHGPLDVWLRRERGHVPMAWKMVVAQQLASALSYLENKNLVHGNVCGRNILLARLGLAEGTSPFIKLSDPGVGLGALSREERVERIPWLAPECLPGGANSLSTAMDKWGFGATLLEICFDGEAPLQSRSPSEKEHFYQRQHRLPEPSCPQLATLTSQCLTYEPTQRPSFRTILRDLTRLQPHNLADVLTVNPDSPASDPTVFHKRYLKKIRDLGEGHFGKVSLYCYDPTNDGTGEMVAVKALKADCGPQHRSGWKQEIDILRTLYHEHIIKYKGCCEDQGEKSLQLVMEYVPLGSLRDYLPRHSIGLAQLLLFAQQICEGMAYLHAQHYIHRDLAARNVLLDNDRLVKIGDFGLAKAVPEGHEYYRVREDGDSPVFWYAPECLKEYKFYYASDVWSFGVTLYELLTHCDSSQSPPTKFLELIGIAQGQMTVLRLTELLERGERLPRPDKCPCEVYHLMKNCWETEASFRPTFENLIPILKTVHEKYQGQAPSVFSVC

SEQ ID NO: 768250 - protein, 1088 aa, Homo sapiens
MLYFRIRFYFRNWHGMNPREPAVYRCGPPGTEASSDQTAQGMQLLDPASFEYLFEQGKHEFVNDVASLWELSTEEEIHHFKNESLGMAFLHLCHLALRHGIPLEEVAKKTSFKDCIPRSFRRHIRQHSALTRLRLRNVFRRFLRDFQPGRLSQQMVMVKYLATLERLAPRFGTERVPVCHLRLLAQAEGEPCYIRDSGVAPTDPGPESAAGPPTHEVLVTGTGGIQWWPVEEEVNKEEGSSGSSGRNPQASLFGKKAKAHKAVGQPADRPREPLWAYFCDFRDITHVVLKEHCVSIHRQDNKCLELSLPSRAAALSFVSLVDGYFRLTADSSHYLCHEVAPPRLVMSIRDGIHGPLLEPFVQAKLRPEDGLYLIHWSTSHPYRLILTVAQRSQAPDGMQSLRLRKFPIEQQDGAFVLEGWGRSFPSVRELGAALQGCLLRAGDDCFSLRRCCLPQPGETSNLIIMRGARASPRTLNLSQLSFHRVDQKEITQLSHLGQGTRTNVYEGRLRVEGSGDPEEGKMDDEDPLVPGRDRGQELRVVLKVLDPSHHDIALAFYETASLMSQVSHTHLAFVHGVCVRGPENIMVTEYVEHGPLDVWLRRERGHVPMAWKMVVAQQLASALSYLENKNLVHGNVCGRNILLARLGLAEGTSPFIKLSDPGVGLGALSREERVERIPWLAPECLPGGANSLSTAMDKWGFGATLLEICFDGEAPLQSRSPSEKEHFYQRQHRLPEPSCPQLATLTSQCLTYEPTQRPSFRTILRDLTRLQPHNLADVLTVNPDSPASDPTVFHKRYLKKIRDLGEGHFGKVSLYCYDPTNDGTGEMVAVKALKADCGPQHRSGWKQEIDILRTLYHEHIIKYKGCCEDQGEKSLQLVMEYVPLGSLRDYLPRHSIGLAQLLLFAQQICEGMAYLHAQHYIHRDLAARNVLLDNDRLVKIGDFGLAKAVPEGHEYYRVREDGDSPVFWYAPECLKEYKFYYASDVWSFGVTLYELLTHCDSSQSPPTKFLELIGIAQGQMTVLRLTELLERGERLPRPDKCPCEVYHLMKNCWETEASFRPTFENLIPILKTVHEKYQGQAPSVFSVC

SEQ ID NO: 768251 - protein, 1158 aa, Homo sapiens
MYPALWPETSSAIGSILAAREAGKCSPPVRPQHGQHTHCPLPRGNVRLKLQAQVWLPPNHILEIPRDASLMLYFRIRFYFRNWHGMNPREPAVYRCGPPGTEASSDQTAQGMQLLDPASFEYLFEQGKHEFVNDVASLWELSTEEEIHHFKNESLGMAFLHLCHLALRHGIPLEEVAKKTSFKDCIPRSFRRHIRQHSALTRLRLRNVFRRFLRDFQPGRLSQQMVMVKYLATLERLAPRFGTERVPVCHLRLLAQAEGEPCYIRDSGVAPTDPGPESAAGPPTHEVLVTGTGGIQWWPVEEEVNKEEGSSGSSGRNPQASLFGKKAKAHKAVGQPADRPREPLWAYFCDFRDITHVVLKEHCVSIHRQDNKCLELSLPSRAAALSFVSLVDGYFRLTADSSHYLCHEVAPPRLVMSIRDGIHGPLLEPFVQAKLRPEDGLYLIHWSTSHPYRLILTVAQRSQAPDGMQSLRLRKFPIEQQDGAFVLEGWGRSFPSVRELGAALQGCLLRAGDDCFSLRRCCLPQPGETSNLIIMRGARASPRTLNLSQLSFHRVDQKEITQLSHLGQGTRTNVYEGRLRVEGSGDPEEGKMDDEDPLVPGRDRGQELRVVLKVLDPSHHDIALAFYETASLMSQVSHTHLAFVHGVCVRGPENIMVTEYVEHGPLDVWLRRERGHVPMAWKMVVAQQLASALSYLENKNLVHGNVCGRNILLARLGLAEGTSPFIKLSDPGVGLGALSREERVERIPWLAPECLPGGANSLSTAMDKWGFGATLLEICFDGEAPLQSRSPSEKEHFYQRQHRLPEPSCPQLATLTSQCLTYEPTQRPSFRTILRDLTRLQPHNLADVLTVNPDSPASDPTVFHKRYLKKIRDLGEGHFGKVSLYCYDPTNDGTGEMVAVKALKADCGPQHRSGWKQEIDILRTLYHEHIIKYKGCCEDQGEKSLQLVMEYVPLGSLRDYLPRHSIGLAQLLLFAQQICEGMAYLHAQHYIHRDLAARNVLLDNDRLVKIGDFGLAKAVPEGHEYYRVREDGDSPVFWYAPECLKEYKFYYASDVWSFGVTLYELLTHCDSSQSPPTKFLELIGIAQGQMTVLRLTELLERGERLPRPDKCPCEVYHLMKNCWETEASFRPTFENLIPILKTVHEKYQGQAPSVFSVC

SEQ ID NO: 768252 - protein, 984 aa, Homo sapiens [sequence omitted]

SEQ ID NO: 768253 - protein, 897 aa, Homo sapiens
MPLRHWGMARGSKPVGDGAQPMAAMGGLKVLLHWAGPGGGEPWVTFSESSLTAEEVCIHIAHKVGITPPCFNLFALFDAQAQVWLPPNHILEIPRDASLMLYFRIRFYFRNWHGMNPREPAVYRCGPPGTEASSDQTAQGMQLLDPASFEYLFEQGKHEFVNDVASLWELSTEEEIHHFKNESLGMAFLHLCHLALRHGIPLEEVAKKTSFKDCIPRSFRRHIRQHSALTRLRLRNVFRRFLRDFQPGRLSQQMVMVKYLATLERLAPRFGTERVPVCHLRLLAQAEGEPCYIRDSGVAPTDPGPESAAGPPTHEVLVTGTGGIQWWPVEEEVNKEEGSSGSSGRNPQASLFGKKAKAHKAVGQPADRPREPLWAYFCDFRDITHVVLKEHCVSIHRQDNKCLELSLPSRAAALSFVSLVDGYFRLTADSSHYLCHEVAPPRLVMSIRDGIHGPLLEPFVQAKLRPEDGLYLIHWSTSHPYRLILTVAQRSQAPDGMQSLRLRKFPIEQQDGAFVLEGWGRSFPSVRELGAALQGCLLRAGDDCFSLRRCCLPQPGETSNLIIMRGARASPRTLNLSQLSFHHLADVLTVNPDSPASDPTVFHKRYLKKIRDLGEGHFGKVSLYCYDPTNDGTGEMVAVKALKADCGPQHRSGWKQEIDILRTLYHEHIIKYKGCCEDQGEKSLQLVMEYVPLGSLRDYLPRHSIGLAQLLLFAQQICEGMAYLHAQHYIHRDLAARNVLLDNDRLVKIGDFGLAKAVPEGHEYYRVREDGDSPVFWYAPECLKEYKFYYASDVWSFGVTLYELLTHCDSSQSPPTKFLELIGIAQGQMTVLRLTELLERGERLPRPDKCPCEVYHLMKNCWETEASFRPTFENLIPILKTVHEKYQGQAPSVFSVC

SEQ ID NO: 768254 - protein, 1187 aa, Homo sapiens; identical to SEQ ID NO: 768246

SEQ ID NO: 768255 - protein, 1187 aa, Homo sapiens; identical to SEQ ID NO: 768246

SEQ ID NO: 768256 - protein, 1175 aa, Homo sapiens
MPLRHWGMARGSKPVGDGAQPMAAMGGLKVLLHWAGPGGGEPWVTFSESSLTAEEVCIHIAHKVGITPPCFNLFALFDAQAQVWLPPNHILEIPRDASLMLYFRIRFYFRNWHGMNPREPAVYRCGPPGTEASSDQTAQGMQLLDPASFEYLFEQGKHEFVNDVASLWELSTEEEIHHFKNESLGMAFLHLCHLALRHGIPLEEVAKKTSFKDCIPRSFRRHIRQHSALTRLRLRNVFRRFLRDFQPGRLSQQMVMVKYLATLERLAPRFGTERVPVCHLRLLAQAEGEPCYIRDSGVAPTDPGPESAAGPPTHEVLVTGTGGIQWWPVEEEVNKEEGSSGSSGRNPQASLFGKKAKAHKAVGQPADRPREPLWAYFCDFRDITHVVLKEHCVSIHRQDNKCLELSLPSRAAALSFVSLVDGYFRLTADSSHYLCHEVAPPRLVMSIRDGIHGPLLEPFVQAKLRPEDGLYLIHWSTSHPYRLILTVAQRSQAPDGMQSLRLRKFPIEQQDGAFVLEGWGRSFPSVRELGAALQGCLLRAGDDCFSLRRCCLPQPGETSNLIIMRGARASPRTLNLSQLSFHRVDQKEITQLSHLGQGTRTNVYEGRLRVEGSGDPEEGKMDDEDPLVPGRDRGQELRVVLKVLDPSHHDIALAFYETASLMSQVSHTHLAFVHGVCVRGPENIMVTEYVEHGPLDVWLRRERGHVPMAWKMVVAQQLASALSYLENKNLVHGNVCGRNILLARLGLAEGTSPFIKLSDPGVGLGALSREERVERIPWLAPECLPGGANSLSTAMDKWGFGATLLEICFDGEAPLQSRSPSEKEHFYQRQHRLPEPSCPQLATLTSQCLTYEPTQRPSFRTILRDLTRLQPHNLADVLTVNPDSPASDPTVFHKRYLKKIRDLGEGHFGKVSLYCYDPTNDGTGEMVAVKALKADCGPQHRSGWKQEIDILRTLYHEHIIKYKGCCEDQGEKSLQLVMEYVPLGSLRDYLPRHSIGLAQLLLFAQQICEGMAYLHAQHYIHRDLAARNVLLDNDRLVKIGDFGLAKAVPEGHEYYRVREDGDSPVFWYAPECLKEYKFYYASDVWSFGVTLYELLTHCDSSQSPPTKFLELIGIAQGQMTVLRLTELLERGERLPRPDKCPCEVRLPLSFPDPTILLWRGQPPPALVFPSRSIIS

SEQ ID NO: 768257 - protein, 210 aa, Homo sapiens
MEYVPLGSLRDYLPRHSIGLAQLLLFAQQICEGMAYLHAQHYIHRDLAARNVLLDNDRLVKIGDFGLAKAVPEGHEYYRVREDGDSPVFWYAPECLKEYKFYYASDVWSFGVTLYELLTHCDSSQSPPTKFLELIGIAQGQMTVLRLTELLERGERLPRPDKCPCEVYHLMKNCWETEASFRPTFENLIPILKTVHEKYQGQAPSVFSVC

SEQ ID NO: 768258 - protein, 1118 aa, Homo sapiens
MPLRHWGMARGSKPVGDGAQPMAAMGGLKVLLHWAGPGGGEPWVTFSESSLTAEEVCIHIAHKVGITPPCFNLFALFDAQAQVWLPPNHILEIPRDASLMLYFRIRFYFRNWHGMNPREPAVYRCGPPGTEASSDQTAQGMQLLDPASFEYLFEQGKHEFVNDVASLWELSTEEEIHHFKNESLGMAFLHLCHLALRHGIPLEEVAKKTSFKDCIPRSFRRHIRQHSALTRLRLRNVFRRFLRDFQPGRLSQQMVMVKYLATLERLAPRFGTERVPVCHLRLLAQAEGEPCYIRDSGVAPTDPGPESAAGPPTHEVLVTGTGGIQWWPVEEEVNKEEGSSGSSGRNPQASLFGKKAKAHKAVGQPADRPREPLWAYFCDFRDITHVVLKEHCVSIHRQDNKCLELSLPSRAAALSFVSLVDGYFRLTADSSHYLCHEVAPPRLVMSIRDGIHGPLLEPFVQAKLRPEDGLYLIHWSTSHPYRLILTVAQRSQAPDGMQSLRLRKFPIEQQDGAFVLEGWGRSFPSVRELGAALQGCLLRAGDDCFSLRRCCLPQPGETSNLIIMRGARASPRTLNLSQLSFHRVDQKEITQLSHLGQGTRTNVYEGRLRVEGSGDPEEGKMDDEDPLVPGRDRGQELRVVLKVLDPSHHDIALAFYETASLMSQVSHTHLAFVHGVCVRGPENIMVTEYVEHGPLDVWLRRERGHVPMAWKMVVAQQLASALSYLENKNLVHGNVCGRNILLARLGLAEGTSPFIKLSDPGVGLGALSREERVERIPWLAPECLPGGANSLSTAMDKWGFGATLLEICFDGEAPLQSRSPSEKEHFYQRQHRLPEPSCPQLATLTSQCLTYEPTQRPSFRTILRDLTRLQPHNLADVLTVNPDSPASDPTVFHKRYLKKIRDLGEGHFGKVSLYCYDPTNDGTGEMVAVKALKADCGPQHRSGWKQEIDILRTLYHEHIIKYKGCCEDQGEKSLQLVMEYVPLGSLRDYLPRHSIGLAQLLLFAQQICEGMAYLHAQHYIHRDLAARNVLLDNDRLVKIGDFGLAKAVPEGHEYYRVREDGDSPVFWYAPECLKEYKFYYASDVWSFGVTLYELLTHCDSSQSPPTVRARPAAPPGVC

SEQ ID NO: 768259 - protein, 996 aa, Homo sapiens
MPLRHWGMARGSKPVGDGAQPMAAMGGLKVLLHWAGPGGGEPWVTFSESSLTAEEVCIHIAHKVGITPPCFNLFALFDAQAQVWLPPNHILEIPRDASLMLYFRIRFYFRNWHGMNPREPAVYRCGPPGTEASSDQTAQGMQLLDPASFEYLFEQGKHEFVNDVASLWELSTEEEIHHFKNESLGMAFLHLCHLALRHGIPLEEVAKKTSFKDCIPRSFRRHIRQHSALTRLRLRNVFRRFLRDFQPGRLSQQMVMVKYLATLERLAPRFGTERVPVCHLRLLAQAEGEPCYIRDSGVAPTDPGPESAAGPPTHEVLVTGTGGIQWWPVEEEVNKEEGSSGSSGRNPQASLFGKKAKAHKAVGQPADRPREPLWAYFCDFRDITHVVLKEHCVSIHRQDNKCLELSLPSRAAALSFVSLVDGYFRLTADSSHYLCHEVAPPRLVMSIRDGIHGPLLEPFVQAKLRPEDGLYLIHWSTSHPYRLILTVAQRSQAPDGMQSLRLRKFPIEQQDGAFVLEGWGRSFPSVRELGAALQGCLLRAGDDCFSLRRCCLPQPGETSNLIIMRGARASPRTLNLSQLSFHRVDQKEITQLSHLGQGTRTNVYEGRLRVEGSGDPEEGKMDDEDPLVPGRDRGQELRVVLKVLDPSHHDIALAFYETASLMSQVSHTHLAFVHGVCVRGPENIMVTEYVEHGPLDVWLRRERGHVPMAWKMVVAQQLASALSYLENKNLVHGNVCGRNILLARLGLAEGTSPFIKLSDPGVGLGALSREERVERIPWLAPECLPGGANSLSTAMDKWGFGATLLEICFDGEAPLQSRSPSEKEHFYQRQHRLPEPSCPQLATLTSQCLTYEPTQRPSFRTILRDLTRLQPHNLADVLTVNPDSPASDPTVFHKRYLKKIRDLGEGHFGKVSLYCYDPTNDGTGEMVAVKALKADCGPQHRSGWKQEIDILRTLYHEHIIKYKGCCEDQGEKSLQLVMEYVPLGSLRDYLPRHSWQ

SEQ ID NO: 768260 - protein, 1187 aa, Homo sapiens; identical to SEQ ID NO: 768246

SEQ ID NO: 768261 - protein, 984 aa, Homo sapiens [sequence omitted]

SEQ ID NO: 768262 - protein, 404 aa, Homo sapiens
MELIRAGTWRSTLGLDSASWGTGWGRGEDVDSSGSLSQQKEHFYQRQHRLPEPSCPQLATLTSQCLTYEPTQRPSFRTILRDLTRLQPHNLADVLTVNPDSPASDPTVFHKRYLKKIRDLGEGHFGKVSLYCYDPTNDGTGEMVAVKALKADCGPQHRSGWKQEIDILRTLYHEHIIKYKGCCEDQGEKSLQLVMEYVPLGSLRDYLPRHSIGLAQLLLFAQQICEGMAYLHAQHYIHRDLAARNVLLDNDRLVKIGDFGLAKAVPEGHEYYRVREDGDSPVFWYAPECLKEYKFYYASDVWSFGVTLYELLTHCDSSQSPPTKFLELIGIAQGQMTVLRLTELLERGERLPRPDKCPCEVYHLMKNCWETEASFRPTFENLIPILKTVHEKYQGQAPSVFSVC

SEQ ID NO: 768263 - protein, 1150 aa, Homo sapiens
MPLRHWGMARGSKPVGDGAQPMAAMGGLKVLLHWAGPGGGEPWVTFSESSLTAEEVCIHIAHKVGITPPCFNLFALFDAQAQVWLPPNHILEIPRDASLMLYFRIRFYFRNWHGMNPREPAVYRCGPPGTEASSDQTAQGMQLLDPASFEYLFEQGKHEFVNDVASLWELSTEEEIHHFKNESLGMAFLHLCHLALRHGIPLEEVAKKTSFKDCIPRSFRRHIRQHSALTRLRLRNVFRRFLRDFQPGRLSQQMVMVKYLATLERLAPRFGTERVPVCHLRLLAQAEGEPCYIRDSGVAPTDPGPESAAGPPTHEVLVTGTGGIQWWPVEEEVNKEEGSSGSSGRNPQASLFGKKAKAHKAVGQPADRPREPLWAYFCDFRDITHVVLKEHCVSIHRQDNKCLELSLPSRAAALSFVSLVDGYFRLTADSSHYLCHEVAPPRLVMSIRDGIHGPLLEPFVQAKLRPEDGLYLIHWSTSHPYRLILTVAQRSQAPDGMQSLRLRKFPIEQQDGAFVLEGWGRSFPSVRELGAALQGCLLRAGDDCFSLRRCCLPQPGETSNLIIMRGARASPRTLNLSQLSFHRVDQKEITQLSHLGQGTRTNVYEGRLRVEGSGDPEEGKMDDEDPLVPGRDRGQELRVVLKVLDPSHHDIALAFYETASLMSQVSHTHLAFVHGVCVRGPENIMVTEYVEHGPLDVWLRRERGHVPMAWKMVVAQQLASALSYLENKNLVHGNVCGRNILLARLGLAEGTSPFIKLSDPGVGLGALSREERVERIPWLAPECLPGGANSLSTAMDKWGFGATLLEICFDGEAPLQSRSPSEKEHFYQRQHRLPEPSCPQLATLTSQCLTYEPTQRPSFRTILRDLTRLQPHNLADVLTVNPDSPASDPTVFHKRYLKKIRDLGEGHFGKVSLYCYDPTNDGTGEMVAVKALKADCGPQHRSGWKQEIDILRTLYHEHIIKYKGCCEDQGEKSLQLVMEYVPLGSLRDYLPRHSIGLAQLLLFAQQICEGMAYLHAQHYIHRDLAARNVLLDNDRLVKIGDFGLAKAVPEGHEYYRVREDGDSPVFWYAPECLKEYKFYYASDVWSFGVTLYELLTHCDSSQSPPTVYHLMKNCWETEASFRPTFENLIPILKTVHEKYQGQAPSVFSVC

SEQ ID NO: 768264 - protein, 984 aa, Homo sapiens [sequence omitted]

SEQ ID NO: 768265 - protein, 876 aa, Homo sapiens
MPLRHWGMARGSKPVGDGAQPMAAMGGLKVLLHWAGPGGGEPWVTFSESSLTAEEVCIHIAHKVGITPPCFNLFALFDAQAQVWLPPNHILEIPRDASLMLYFRIRFYFRNWHGMNPREPAVYRCGPPGTEASSDQTAQGMQLLDPASFEYLFEQGKHEFVNDVASLWELSTEEEIHHFKNESLGMAFLHLCHLALRHGIPLEEVAKKTSFKDCIPRSFRRHIRQHSALTRLRLRNVFRRFLRDFQPGRLSQQMVMVKYLATLERLAPRFGTERVPVCHLRLLAQAEGEPCYIRDSGVAPTDPGPESAAGPPTHEVLVTGTGGIQWWPVEEEVNKEEGSSGSSGRNPQASLFGKKAKAHKAVGQPADRPREPLWAYFCDFRDITHVVLKEHCVSIHRQDNKCLELSLPSRAAALSFVSLVDGYFRLTADSSHYLCHEVAPPRLVMSIRDGIHGPLLEPFVQAKLRPEDGLYLIHWSTSHPYRLILTVAQRSQAPDGMQSLRLRKFPIEQQDGAFVLEGWGRSFPSVRELGAALQGCLLRAGDDCFSLRRCCLPQPGETSNLIIMRGARASPRTLNLSQLSFHRVDQKEITQLSHLGQGTRTNVYEGRLRVEGSGDPEEGKMDDEDPLVPGRDRGQELRVVLKVLDPSHHDIALAFYETASLMSQVSHTHLAFVHGVCVRGPENIMVTEYVEHGPLDVWLRRERGHVPMAWKMVVAQQLASALSYLENKNLVHGNVCGRNILLARLGLAEGTSPFIKLSDPGVGLGALSREERVERIPWLAPECLPGGANSLSTAMDKWGFGATLLEIAEGASCSLLQDETKRGMSASPTPCALLLSRDPTSVNLFFFLGREPNHDLEGPNICRGTNPALKSPSFQT

SEQ ID NO: 768266 - protein, 182 aa, Homo sapiens
MGDEEKRNRAITARRQHLKSVMLQIAATELEKEESRREAEKQNYLAEHCPPLHIPGSMSEVQELCKQLHAKIDAAEEEKYDMEVRVQKTSKELEDMNQKLFDLRGKFKRPPLRRVRMSADAMLKALLGSKHKVCMDLRANLKQVKKEDTEKERDLRDVGDWRKNIEEKSGMEGRKKMFESES

SEQ ID NO: 768267 - protein, 193 aa, Homo sapiens
HLAKCHTPHSTMSQCKKRNRAITARRQHLKSVMLQIAATELEKEESRREAEKQNYLAEHCPPLHIPGSMSEVQELCKQLHAKIDAAEEEKYDMEVRVQKTSKELEDMNQKLFDLRGKFKRPPLRRVRMSADAMLKALLGSKHKVCMDLRANLKQVKKEDTEKERDLRDVGDWRKNIEEKSGMEGRKKMFESES

SEQ ID NO: 768268 - protein, 188 aa, Homo sapiens
LRYSKDLPPTRREQAIMALQAAPVMSVMLQIAATELEKEESRREAEKQNYLAEHCPPLHIPGSMSEVQELCKQLHAKIDAAEEEKYDMEVRVQKTSKELEDMNQKLFDLRGKFKRPPLRRVRMSADAMLKALLGSKHKVCMDLRANLKQVKKEDTEKERDLRDVGDWRKNIEEKSGMEGRKKMFESES

SEQ ID NO: 768269 - protein, 158 aa, Homo sapiens
MGDEEKRNRAITARRQHLKSVMLQIAATELEKEESRREAEKQNYLAEHCPPLHIPGSMSEVQELCKQLHAKIDAAEEEKYDMEVRVQKTSKELEDMNQKLFDLRGKFKRPPLRRVRMSADAMLKALLGSKHKVCMDLRANLKQVKKEDTEKERTCERG

SEQ ID NO: 768270 - protein, 205 aa, Homo sapiens
MVNLAAMVWRRLLRKRWVLALVFGLSLVYFLSSTFKQEERAVRDRNLLQVHDHNQPIPWKVQFNLGNSSRPSNQCRNSIQGKHLITDELGYVCERKDLLVNGCCNVNVPSTKQYCCDGCWPNGCCSAYEYCVSCCLQPNKQLLLERFLNRAAVAFQNLFMAVEDHFELCLAKCRTSSQSVQHENTYRDPIAKYCYGESPPELFPA

SEQ ID NO: 768271 - protein, 205 aa, Homo sapiens; identical to SEQ ID NO: 768270

SEQ ID NO: 768272 - protein, 175 aa, Homo sapiens
MPPGTRACRVPRPGRRAPRPRRDGEPGGHGVAPASAEEVGARPGLRAVARLLPQQHLQAGYVCERKDLLVNGCCNVNVPSTKQYCCDGCWPNGCCSAYEYCVSCCLQPNKQLLLERFLNRAAVAFQNLFMAVEDHFELCLAKCRTSSQSVQHENTYRDPIAKYCYGESPPELFPA

SEQ ID NO: 768273 - protein, 94 aa, Homo sapiens
ARAPPLTNMLKFRAAGPAPAWRDGAAGRVGAMPPGTRACRVPRPGRRAPRPRRDGEPGGHGVAPASAEEVGARPGLRAVARLLPQQHLQAERAA

SEQ ID NO: 768274 - protein, 135 aa, Homo sapiens
MVNLAAMVWRRLLRKRWVLALVFGLSLVYFLSSTFKQSENSQLLPKSCTEKPAHFHLDIELPSWKQSPLHPSHSTSKDWNTDLFPPPRFWAFGWPQVFDNPPLGPEVLKDAKRDIEFTHTHTQGAKKPLGYWPNQ

SEQ ID NO: 768275 - protein, 205 aa, Homo sapiens; identical to SEQ ID NO: 768270

SEQ ID NO: 768276 - protein, 205 aa, Homo sapiens; identical to SEQ ID NO: 768270

SEQ ID NO: 768277 - protein, 205 aa, Homo sapiens; identical to SEQ ID NO: 768270

SEQ ID NO: 768278 - protein, 70 aa, Homo sapiens
NLLQVHDHNQPIPWKVQFNLGNSSRPSNQCRNSIQGKHLITDELGEAGFPSSPGGQERRLVGPFIGFLFE

SEQ ID NO: 768279 - protein, 845 aa, Homo sapiens
MEPSPEPPSLESMKGDTRHLNGEEDAGGREDSILVNGACSDQSSDSPPILEAIRTPEIRGRRSSSRLSKREVSSLLSYTQDLTGDGDGEDGDGSDTPVMPKLFRETRTRSESPAVRTRNNNSVSSRERHRPSPRSTRGRQGRNHVDESPVEFPATRSLRRRATASAGTPWPSPPSSYLTIDLTDDTEDTHGTPQSSSTPYARLAQDSQQGGMESPQVEADSGDGDSSEYQDGKEFGIGDLVWGKIKGFSWWPAMVVSWKATSKRQAMSGMRWVQWFGDGKFSEVSADKLVALGLFSQHFNLATFNKLVSYRKAMYHALEKARVRAGKTFPSSPGDSLEDQLKPMLEWAHGGFKPTGIEGLKPNNTQPENKTRRRTADDSATSDYCPAPKRLKTNCYNNGKDRGDEDQSREQMASDVANNKSSLEDGCLSCGRKNPVSFHPLFEGGLCQTCRDRFLELFYMYDDDGYQSYCTVCCEGRELLLCSNTSCCRCFCVECLEVLVGTGTAAEAKLQEPWSCYMCLPQRCHGVLRRRKDWNVRLQAFFTSDTGLEYEAPKLYPAIPAARRRPIRVLSLFDGIATGYLVLKELGIKVGKYVASEVCEESIAVGTVKHEGNIKYVNDVRNITKKNIEEWGPFDLVIGGSPCNDLSNVNPARKGLYEGTGRLFFEFYHLLNYSRPKEGDDRPFFWMFENVVAMKVGDKRDISRFLECNPVMIDAIKVSAAHRARYFWGNLPGMNRPVIASKNDKLELQDCLEYNRIAKLKKVQTITTKSNSIKQGKNQLFPVVMNGKEDVLWCTELERIFGFPVHYTDVSNMGRGARQKLLGRSWSVPVIRHLFAPLKDYFACE

SEQ ID NO: 768280 - protein, 102 aa, Homo sapiens
GRSPRGRSERPPTDGTGSLAVGRAGGNAARPAALGLSGPSKPSSAIGAGDSRAQRPARPPAGLPPASPDPRLRRPAAPQPALRQVSAPGPRGGSAASCFEGC

SEQ ID NO: 768281 - protein, 830 aa, Homo sapiens
GRSPRGRSERPPTDGTGSLAVGRAGGNAARPAALGLSGPSKPSSAIGAGDSRAQRPARPPAGLPPASPDPRLRRPAAPQPALRQESMKGDTRHLNGEEDAGGREDSILVNGACSDQSSDSPPILEAIRTPEIRGRRSSSRLSKREVSSLLSYTQDLTGDGDGEDGDGSDTPVMPKLFRETRTRSESPAVRTRNNNSVSSRERHRPSPRSTRGRQGRNHVDESPVEFPATRSLRRRATASAGTPWPSPPSSYLTIDLTDDTEDTHGTPQSSSTPYARLAQDSQQGGMESPQVEADSGDGDSSEYQDGKEFGIGDLVWGKIKGFSWWPAMVVSWKATSKRQAMSGMRWVQWFGDGKFSEVSADKLVALGLFSQHFNLATFNKLVSYRKAMYHALEKARVRAGKTFPSSPGDSLEDQLKPMLEWAHGGFKPTGIEGLKPNNTQPVVNKSKVRRAGSRKLESRKYENKTRRRTADDSATSDYCPAPKRLKTNCYNNGKDRGDEDQSREQMASDVANNKSSLEDGCLSCGRKNPVSFHPLFEGGLCQTCRDRFLELFYMYDDDGYQSYCTVCCEGRELLLCSNTSCCRCFCVECLEVLVGTGTAAEAKLQEPWSCYMCLPQRCHGVLRRRKDWNVRLQAFFTSDTGLEYEAPKLYPAIPAARRRPIRVLSLFDGIATGYLVLKELGIKVGKYVASEVCEESIAVGTVKHEGNIKYVNDVRNITKKNIEEWGPFDLVIGGSPCNDLSNVNPARKGLYEGTGRLFFEFYHLLNYSRPKEGDDRPFFWMFENVVAMKVGDKRDISRFLECNPVMIDAIKVSAAHRARYFWGNLPGMNS

SEQ ID NO: 768282 - protein, 876 aa, Homo sapiens
GRSPRGRSERPPTDGTGSLAVGRAGGNAARPAALGLSGPSKPSSAIGAGDSRAQRPARPPAGLPPASPDPRLRRPAAPQPALRQESMKGDTRHLNGEEDAGGREDSILVNGACSDQSSDSPPILEAIRTPEIRGRRSSSRLSKREVSSLLSYTQDLTGDGDGEDGDGSDTPVMPKLFRETRTRSESPAVRTRNNNSVSSRERHRPSPRSTRGRQGRNHVDESPVEFPATRSLRRRATASAGTPWPSPPSSYLTIDLTDDTEDTHGTPQSSSTPYARLAQDSQQGGMESPQVEADSGDGDSSEYQDGKEFGIGDLVWGKIKGFSWWPAMVVSWKATSKRQAMSGMRWVQWFGDGKFSEVSADKLVALGLFSQHFNLATFNKLVSYRKAMYHALEKARVRAGKTFPSSPGDSLEDQLKPMLEWAHGGFKPTGIEGLKPNNTQPVVNKSKVRRAGSRKLESRKYENKTRRRTADDSATSDYCPAPKRLKTNCYNNGKDRGDEDQSREQMASDVANNKSSLEDGCLSCGRKNPVSFHPLFEGGLCQTCRDRFLELFYMYDDDGYQSYCTVCCEGRELLLCSNTSCCRCFCVECLEVLVGTGTAAEAKLQEPWSCYMCLPQRCHGVLRRRKDWNVRLQAFFTSDTGLEYEAPKLYPAIPAARRRPIRVLSLFDGIATGYLVLKELGIKVGKYVASEVCEESIAVGTVKHEGNIKYVNDVRNITKKNIEEWGPFDLVIGGSPCNDLSNVNPARKGLYEGTGRLFFEFYHLLNYSRPKEGDDRPFFWMFENVVAMKVGDKRDISRFLECNPVMIDAIKVSAAHRARYFWGNLPGMNRIFGFPVHYTDVSNMGRGARQKLLGRSWSVPVIRHLFAPLKDYFACE

SEQ ID NO: 768283 - protein, 876 aa, Homo sapiens; identical to SEQ ID NO: 768282

SEQ ID NO: 768284 - protein, 939 aa, Homo sapiens
GRSPRGRSERPPTDGTGSLAVGRAGGNAARPAALGLSGPSKPSSAIGAGDSRAQRPARPPAGLPPASPDPRLRRPAAPQPALRQESMKGDTRHLNGEEDAGGREDSILVNGACSDQSSDSPPILEAIRTPEIRGRRSSSRLSKREVSSLLSYTQDLTGDGDGEDGDGSDTPVMPKLFRETRTRSESPAVRTRNNNSVSSRERHRPSPRSTRGRQGRNHVDESPVEFPATRSLRRRATASAGTPWPSPPSSYLTIDLTDDTEDTHGTPQSSSTPYARLAQDSQQGGMESPQVEADSGDGDSSEYQDGKEFGIGDLVWGKIKGFSWWPAMVVSWKATSKRQAMSGMRWVQWFGDGKFSEVSADKLVALGLFSQHFNLATFNKLVSYRKAMYHALEKARVRAGKTFPSSPGDSLEDQLKPMLEWAHGGFKPTGIEGLKPNNTQPVVNKSKVRRAGSRKLESRKYENKTRRRTADDSATSDYCPAPKRLKTNCYNNGKDRGDEDQSREQMASDVANNKSSLEDGCLSCGRKNPVSFHPLFEGGLCQTCRDRFLELFYMYDDDGYQSYCTVCCEGRELLLCSNTSCCRCFCVECLEVLVGTGTAAEAKLQEPWSCYMCLPQRCHGVLRRRKDWNVRLQAFFTSDTGLEYEAPKLYPAIPAARRRPIRVLSLFDGIATGYLVLKELGIKVGKYVASEVCEESIAVGTVKHEGNIKYVNDVRNITKKNIEEWGPFDLVIGGSPCNDLSNVNPARKGLYEGTGRLFFEFYHLLNYSRPKEGDDRPFFWMFENVVAMKVGDKRDISRFLECNPVMIDAIKVSAAHRARYFWGNLPGMNRPVIASKNDKLELQDCLEYNRIAKLKKVQTITTKSNSIKQGKNQLFPVVMNGKEDVLWCTELERIFGFPVHYTDVSNMGRGARQKLLGRSWSVPVIRHLFAPLKDYFACE

SEQ ID NO: 768285 - protein, 856 aa, Homo sapiens
GRSPRGRSERPPTDGTGSLAVGRAGGNAARPAALGLSGPSKPSSAIGAGDSRAQRPARPPAGLPPASPDPRLRRPAAPQPALRQESMKGDTRHLNGEEDAGGREDSILVNGACSDQSSDSPPILEAIRTPEIRGRRSSSRLSKREVSSLLSYTQDLTGDGDGEDGDGSDTPVMPKLFRETRTRSESPAVRTRNNNSVSSRERHRPSPRSTRGRQGRNHVDESPVEFPATRSLRRRATASAGTPWPSPPSSYLTIDLTDDTEDTHGTPQSSSTPYARLAQDSQQGGMESPQVEADSGDGDSSEYQDGKEFGIGDLVWGKIKGFSWWPAMVVSWKATSKRQAMSGMRWVQWFGDGKFSEVSADKLVALGLFSQHFNLATFNKLVSYRKAMYHALEKARVRAGKTFPSSPGDSLEDQLKPMLEWAHGGFKPTGIEGLKPNNTQPENKTRRRTADDSATSDYCPAPKRLKTNCYNNGKDRGDEDQSREQMASDVANNKSSLEDGCLSCGRKNPVSFHPLFEGGLCQTCRDRFLELFYMYDDDGYQSYCTVCCEGRELLLCSNTSCCRCFCVECLEVLVGTGTAAEAKLQEPWSCYMCLPQRCHGVLRRRKDWNVRLQAFFTSDTGLEYEAPKLYPAIPAARRRPIRVLSLFDGIATGYLVLKELGIKVGKYVASEVCEESIAVGTVKHEGNIKYVNDVRNITKKNIEEWGPFDLVIGGSPCNDLSNVNPARKGLYEGTGRLFFEFYHLLNYSRPKEGDDRPFFWMFENVVAMKVGDKRDISRFLECNPVMIDAIKVSAAHRARYFWGNLPGMNRIFGFPVHYTDVSNMGRGARQKLLGRSWSVPVIRHLFAPLKDYFACE

SEQ ID NO: 768286 - protein, 876 aa, Homo sapiens; identical to SEQ ID NO: 768282

SEQ ID NO: 768287 - protein, 898 aa, Homo sapiens
GRSPRGRSERPPTDGTGSLAVGRAGGNAARPAALGLSGPSKPSSAIGAGDSRAQRPARPPAGLPPASPDPRLRRPAAPQPALRQESMKGDTRHLNGEEDAGGREDSILVNGACSDQSSDSPPILEAIRTPEIRGRRSSSRLSKREVSSLLSYTQDLTGDGDGEDGDGSDTPVMPKLFRETRTRSESPAVRTRNNNSVSSRERHRPSPRSTRGRQGRNHVDESPVEFPATRSLRRRATASAGTPWPSPPSSYLTIDLTDDTEDTHGTPQSSSTPYARLAQDSQQGGMESPQVEADSGDGDSSEYQDGKEFGIGDLVWGKIKGFSWWPAMVVSWKATSKRQAMSGMRWVQWFGDGKFSEVSADKLVALGLFSQHFNLATFNKLVSYRKAMYHALEKARVRAGKTFPSSPGDSLEDQLKPMLEWAHGGFKPTGIEGLKPNNTQPVVNKSKVRRAGSRKLESRKYENKTRRRTADDSATSDYCPAPKRLKTNCYNNGKDRGDEDQSREQMASDVANNKSSLEDGCLSCGRKNPVSFHPLFEGGLCQTCRDRFLELFYMYDDDGYQSYCTVCCEGRELLLCSNTSCCRCFCVECLEVLVGTGTAAEAKLQEPWSCYMCLPQRCHGVLRRRKDWNVRLQAFFTSDTGLEYEAPKLYPAIPAARRRPIRVLSLFDGIATGYLVLKELGIKVGKYVASEVCEESIAVGTVKHEGNIKYVNDVRNITKKNIEEWGPFDLVIGGSPCNDLSNVNPARKGLYEGTGRLFFEFYHLLNYSRPKEGDDRPFFWMFENVVAMKVGDKRDISRFLECNPVMIDAIKVSAAHRARYFWGNLPGMNRPVIASKNDKLELQDCLEYNRIAKDLWLSCALHRRVQHGPWCPPEAAGKVLERACHPTPLRPSEGLLCM

SEQ ID NO: 768288 - protein, 366 aa, Homo sapiens
LLRWEIGKWSPCSLTCGVGLQTRDVFCSHLLSREMNETVILADELCRQPKPSTVQACNRFNCPPAWYPAQWQPCSRTCGGGVQKREVLCKQRMADGSFLELPETFCSASKPACQQACKKDDCPSEWLLSDWTECSTSCGEGTQTRSAICRKMLKTGLSTVVNSTLCPPLPFSSSIRPCMLATCARPGRPSTKHSPHIAAARKVYIQTRRQRKLHFVVGGFAYLLPKTAVVLRCPARRVRKPLITWEKDGQHLISSTHVTVAPFGYLKIHRLKPSDAGVYTCSAGPAREHFVIKLIGGNRKLVARPLSPRSEEEVLAGRKGGPKEALQTHKHQNGIFSNGSKAEKRGLAANPGSRYDDLVSRLLEQG

SEQ ID NO: 768289 - protein, 195 aa, Homo sapiens
LLRWEIGKWSPCSLTCGVGLQTRDVFCSHLLSREMNETVILADELCRQPKPSTVQACNRFNCPPAWYPAQWQPCSRTCGGGVQKREVLCKQRMADGSFLELPETFCSASKPACQQACKKDDCPSEWLLSDWTECSTSCGEGTQTRSAICRKMLKTGLSTVVNSTLCPPLPFSSSIRPCMLATCASKYVRALGMGR

SEQ ID NO: 768290 - protein, 112 aa, Homo sapiens
APAATEHGSEPREIPGCGRPTLCPWWLVRAAGLGLLMLLSWGQTPWAGSRRGQTELGQGAFGPRAVGQALEWQPVITVISLNGQCSFPGLVPWRPRGSGEKRGAPGLRFSAY

SEQ ID NO: 768291 - protein, 143 aa, Homo sapiens
LASDVIHAQSRDLPRIFRVTTSQLAVPPTTCTVLLLAESEGERERWLQVLGELQRLLLDARPRPRPVYTLKEAYDNGLPLLPHTLCAAILAQDDGPHPNPSGKACPDWERRVSEAGTAGLLPPPFPQDKQAQQGRWTAQSPCH

SEQ ID NO: 768292 - protein, 271 aa, Homo sapiens
MNSSQISLRMKHGRVNMQKKPSKCSECGKFFTQRSSLTQHQRIHRGEKPYVCSECGSCFRKQSNLTQHLRIHTGEKPYKCNECEKAFQTKAILVQHLRIHTGEKPYKCNECGKAFCQSPSLIKHQRIHTGEKPYKCTECGKAFSQSICLTRHQRSHSGDKPFKCNECGKAFNQSACLMQHQRIHSGEKPYTCTECGKAFTQNSSLVEHERTHTGEKLYKCSECEKTFRKQAHLSEHYRIHTGEKPYECVGCGKSFRHSSALLRHQRLHAGE

SEQ ID NO: 768293 - protein, 271 aa, Homo sapiens; identical to SEQ ID NO: 768292

SEQ ID NO: 768294 - protein, 271 aa, Homo sapiens; identical to SEQ ID NO: 768292

SEQ ID NO: 768295 - protein, 49 aa, Homo sapiens
MQSSSVLTELETGVYQISAVHTSCSYAEKLGVEKQLMGAGDILSWCLER

SEQ ID NO: 768296 - protein, 1950 aa, Homo sapiens
MPALGPALLQALWAGWVLTLQPLPPTAFTPNGTYLQHLARDPTSGTLYLGATNFLFQLSPGLQLEATVSTGPVLDSRDCLPPVMPDECPQAQPTNNPNQLLLVSPGALVVCGSVHQGVCEQRRLGQLEQLLLRPERPGDTQYVAANDPAVSTVGLVAQGLAGEPLLFVGRGYTSRGVGGGIPPITTRALWPPDPQAAFSYEETAKLAVGRLSEYSHHFVSAFARGASAYFLFLRRDLQAQSRAFRAYVSRVCLRDQHYYSYVELPLACEGGRYGLIQAAAVATSREVAHGEVLFAAFSSAAPPTVGRPPSAAAGASGASALCAFPLDEVDRLANRTRDACYTREGRAEDGTEVAYIEYDVNSDCAQLPVDTLDAYPCGSDHTPSPMASRVPLEATPILEWPGIQLTAVAVTMEDGHTIAFLGDSQGQLHRVYLGPGSDGHPYSTQSIQQGSAVSRDLTFDGTFEHLYVMTQSTLLKVPVASCAQHLDCASCLAHRDPYCGWCVLLGRCSRRSECSRGQGPEQWLWSFQPELGCLQVAAMSPANISREETREVFLSVPDLPPLWPGESYSCHFGEHQSPALLTGSGVMCPSPDPSEAPVLPRGADYVSVSVELRFGAVVIAKTSLSFYDCVAVTELRPSAQCQACVSSRWGCNWCVWQHLCTHKASCDAGPMVASHQSPLVSPDPPARGDGDSAELEGPPAPLILPSSLDYQYDTPGLWELEEATLGASSCPCVESVQGSTLMPVHVEREIRLLGRNLHLFQDGPGDNECVMELEGLEVVVEARVECEPPPDTQCHVTCQQHQLSYEALQPELRVGLFLRRAGRLRVDSAEGLHVVLYDCSVGHGDCSRCQTAMPQYGCVWCEGERPRCVTREACGEAEAVATQCPAPLIHSVEPLTGPVDGGTRVTIRGSNLGQHVQDVLGMVTVAGVPCAVDAQEYEVSSSLVCITGASGEEVAGATAVEVPGRGRGVSEHDFAYQDPKVHSIFPARGPRAGGTRLTLNGSKLLTGRLEDIRVVVGDQPCHLLPEQQSEQLRCETSPRPTPATLPVAVWFGATERRLQRGQFKYTLDPNITSAGPTKSFLSGGREICVRGQNLDVVQTPRIRVTVVSRMLQPSQGLGRRRRVVPETACSLGPSCSSQQFEEPCHVNSSQLITCRTPALPGLPEDPWVRVEFILDNLVFDFATLNPTPFSYEADPTLQPLNPEDPTMPFRHKPGSVFSVEGENLDLAMPGVVAMIGDGPCVVKTLTRHHLYCEPPVEQPLPRHHALREAPDSLPEFTVQMGNLRFSLGHVQYDGESPGAFPVAAQVGLGVGTSLLALGVIIIVLMYRRKSKQALRDYKKVQIQLENLESSVRDRCKKEFTDLMTEMTDLTSDLLGSGIPFLDYKVYAERIFFPGHRESPLHRDLGVPESRRPTVEQGLGQLSNLLNSKLFLTKFIHTLESQRTFSARDRAYVASLLTVALHGKLEYFTDILRTLLSDLVAQYVAKNPKLMLRRTETVVEKLLTNWMSICLYTFVRDSVGEPLYMLFRGIKHQVDKGPVDSVTGKAKYTLNDNRLLREDVEYRPLTLNALLAVGPGAGEAQGVPVKVLDCDTISQAKEKMLDQLYKGVPLTQRPDPRTLDVEWRSGVAGHLILSDEDVTSEVQGLWRRLNTLQHYKVPDGATVALVPCLTKHVLRENQDYVPGERTPMLEDVDEGGIRPWHLVKPSDEPEPPRPRRGSLRGGERERAKAIPEIYLTRLLSMKGTLQKFVDDLFQVILSTSRPVPLAVKYFFDLLDEQAQQHGISDQDTIHIWKTNSLPLRFWINIIKNPQFVFDVQTSDNMDAVLLVIAQTFMDACTLADHKLGRDSPINKLLYARDIPRYKRMVERYYADIRQTVPASDQEMNSVLAELSWNYSGDLGARVALHELYKYINKYYDQIITALEEDGTAQKMQLGYRLQQIAAAVENKVTDL

SEQ ID NO: 768297 - protein, 1939 aa, Homo sapiens
MPALGPALLQALWAGWVLTLQPLPPTAFTPNGTYLQHLARDPTSGTLYLGATNFLFQLSPGLQLEATVSTGPVLDSRDCLPPVMPDECPQAQPTNNPNQLLLVSPGALVVCGSVHQGVCEQRRLGQLEQLLLRPERPGDTQYVAANDPAVSTVGLVAQGLAGEPLLFVGRGYTSRGVGGGIPPITTRALWPPDPQAAFSYEETAKLAVGRLSEYSHHFVSAFARGASAYFLFLRRDLQAQSRAFRAYVSRVCLRDQHYYSYVELPLACEGGRYGLIQAAAVATSREVAHGEVLFAAFSSAAPPTVGRPPSAAAGASGASALCAFPLDEVDRLANRTRDACYTREGRAEDGTEVAYIEYDVNSDCAQLPVDTLDAYPCGSDHTPSPMASRVPLEATPILEWPGIQLTAVAVTMEDGHTIAFLGDSQGQLHRVYLGPGSDGHPYSTQSIQQGSAVSRDLTFDGTFEHLYVMTQSTLLKVPVASCAQHLDCASCLAHRDPYCGWCVLLGRCSRRSECSRGQGPEQWLWSFQPELGCLQVAAMSPANISREETREVFLSVPDLPPLWPGESYSCHFGEHQSPALLTGSGVMCPSPDPSEAPVLPRGADYVSVSVELRFGAVVIAKTSLSFYDCVAVTELRPSAQCQACVSSRWGCNWCVWQHLCTHKASCDAGPMVASHQVMETQQSLRALPPPSSSLSSLDYQYDTPGLWELEEATLGASSCPCVESVQGSTLMPVHVEREIRLLGRNLHLFQDGPGDNECVMELEGLEVVVEARVECEPPPDTQCHVTCQQHQLSYEALQPELRVGLFLRRAGRLRVDSAEGLHVVLYDCSVGHGDCSRCQTAMPQYGCVWCEGERPRCVTREACGEAEAVATQCPAPLIHSVEPLTGPVDGGTRVTIRGSNLGQHVQDVLGMVTVAGVPCAVDAQEYEVSSSLVCITGASGEEVAGATAVEVPGRGRGVSEHDFAYQDPKVHSIFPARGPRAGGTRLTLNGSKLLTGRLEDIRVVVGDQPCHLLPEQQSEQLRCETSPRPTPATLPVAVWFGATERRLQRGQFKYTLDPNITSAGPTKSFLSGGREICVRGQNLDVVQTPRIRVTVVSRMLQPSQGLGRRRRVVPETACSLGPSCSSQQFEEPCHVNSSQLITCRTPALPGLPEDPWVRVEFILDNLVFDFATLNPTPFSYEADPTLQPLNPEDPTMPFRHKPGSVFSVEGENLDLAMPGVVAMIGDGPCVVKTLTRHHLYCEPPVEQPLPRHHALREAPDSLPEFTVQMGNLRFSLGHVQYDGESPGAFPVAAQVGLGVGTSLLALGVIIIVLMYRRKSKQALRDYKKVQIQLENLESSVRDRCKKEFTDLMTEMTDLTSDLLGSGIPFLDYKVYAERIFFPGHRESPLHRDLGVPESRRPTVEQGLGQLSNLLNSKLFLTKFIHTLESQRTFSARDRAYVASLLTVALHGKLEYFTDILRTLLSDLVAQYVAKNPKLMLRRTETVVEKLLTNWMSICLYTFVRDSVGEPLYMLFRGIKHQVDKGPVDSVTGKAKYTLNDNRLLREDVEYRPLTLNALLAVGPGAGEAQGVPVKVLDCDTISQAKEKMLDQLYKGVPLTQRPDPRTLDVEWRSGVAGHLILSDEDVTSEVQGLWRRLNTLQHYKVPDGATVALVPCLTKHVLRENQDYVPGERTPMLEDVDEGGIRPWHLVKPSDEPEPPRPRRGSLRGGERERAKAIPEIYLTRLLSMKGTLQKFVDDLFQVILSTSRPVPLAVKYFFDLLDEQAQQHGISDQDTIHIWKTNSLPLRFWINIIKNPQFVFDVQTSDNMDAVLLVIAQTFMDACTLADHKLGRDSPINKLLYARDIPRYKRMVERYYADIRQTVPASDQEMNSVLAELSWNYSGDLGARVALHELYKYINKYYDQIITALEEDGTAQKMQLGYRLQQIAAAVENKVTDL

SEQ ID NO: 768298 - protein, 2118 aa, Homo sapiens
MPALGPALLQALWAGWVLTLQPLPPTAFTPNGTYLQHLARDPTSGTLYLGATNFLFQLSPGLQLEATVSTGPVLDSRDCLPPVMPDECPQAQPTNNPNQLLLVSPGALVVCGSVHQGVCEQRRLGQLEQLLLRPERPGDTQYVAANDPAVSTVGLVAQGLAGEPLLFVGRGYTSRGVGGGIPPITTRALWPPDPQAAFSYEETAKLAVGRLSEYSHHFVSAFARGASAYFLFLRRDLQAQSRAFRAYVSRVCLRDQHYYSYVELPLACEGGRYGLIQAAAVATSREVAHGEVLFAAFSSAAPPTVGRPPSAAAGASGASALCAFPLDEVDRLANRTRDACYTREGRAEDGTEVAYIEYDVNSDCAQLPVDTLDAYPCGSDHTPSPMASRVPLEATPILEWPGIQLTAVAVTMEDGHTIAFLGDSQGQLHRVYLGPGSDGHPYSTQSIQQGSAVSRDLTFDGTFEHLYVMTQSTLLKVPVASCAQHLDCASCLAHRDPYCGWCVLLGRCSRRSECSRGQGPEQWLWSFQPELGCLQVAAMSPANISREETREVFLSVPDLPPLWPGESYSCHFGEHQSPALLTGSGVMCPSPDPSEAPVLPRGADYVSVSVELRFGAVVIAKTSLSFYDCVAVTELRPSAQCQACVSSRWGCNWCVWQHLCTHKASCDAGPMVASHQVMETQQSLRALPPPSSSLSSLDYQYDTPGLWELEEATLGASSCPCVESVQGSTLMPVHVEREIRLLGRNLHLFQDGPGDNECVMELEGLEVVVEARVECEPPPDTQCHVTCQQHQLSYEALQPELRVGLFLRRAGRLRVDSAEGLHVVLYDCSVGHGDCSRCQTAMPQYGCVWCEGERPRCVTREACGEAEAVATQCPAPLIHSVEPLTGPVDGGTRVTIRGSNLGQHVQDVLGMVTVAGVPCAVDAQEYEVSSSLVCITGASGEEVAGATAVEVPGRGRGVSEHDFAYQDPKVHSIFPARGPRAGGTRLTLNGSKLLTGRLEDIRVVVGDQPCHLLPEQQSEQLRCETSPRPTPATLPVAVWFGATERRLQRGQFKYTLDPNITSAGPTKSFLSGGREICVRGQNLDVVQTPRIRVTVVSRMLQPSQGLGRRRRVVPETACSLGPSCSSQQFEEPCHVNSSQLITCRTPALPGLPEDPWVRVEFILDNLVFDFATLNPTPFSYEADPTLQPLNPEDPTMPFRHKPGSVFSVEGENLDLAMPGVVAMIGDGPCVVKTLTRHHLYCEPPVEQPLPRHHALREAPDSLPEFTVQMGNLRFSLGHVQYDGESPGAFPVAAQVGLGVGTSLLALGVIIIVLMYRRKSKQALRDYKKVQIQLENLESSVRDRCKKEFTDLMTEMTDLTSDLLGSGIPFLDYKVYAERIFFPGHRESPLHRDLGVPESRRPTVEQGLGQLSNLLNSKLFLTKFIHTLESQRTFSARDRAYVASLLTVALHGKLEYFTDILRTLLSDLVAQYVAKNPKLMLRRTETVVEKLLTNWMSICLYTFVRVRGQRWTGLLSREGQAPKLLSPQPPCSSDTCARAETPAQPVLSPLKPMSCPLPQCASCPIHLCHLLGGPNCLCSPEDSVGEPLYMLFRGIKHQVDKGPVDSVTGKAKYTLNDNRLLREDVEYRPLTLNALLAVGPGAGEAQGVPVKVLDCDTISQAKEKMLDQLYKGVPLTQRPDPRTLDVGEGVESPWGPEPLLGLGWPRTNSAGTTHHSGWGGCWEAGRSWLWNIFLGQPLIWGGGPCSWSLERLSKAAPGWRGWCPCGGGDGLHYGKGIFQPCTQFCLALAEWRSGVAGHLILSDEDVTSEVQGLWRRLNTLQHYKVPDGATVALVPCLTKHVLRENQDYVPGERTPMLEDVDEGGIRPWHLVKPSDEPEPPRPRRGSLRGGERERAKAIPEIYLTRLLSMKGTLQKFVDDLFQVILSTSRPVPLAVKYFFDLLDEQAQQHGISDQDTIHIWKTNSLPLRFWINIIKNPQFVFDVQTSDNMDAVLLVIAQTFMDACTLADHKLGRDSPINKLLYARDIPRYKRMVERYYADIRQTVPASDQEMNSVLAELSWNYSGDLGARVALHELYKYINKYYDQIITALEEDGTAQKMQLGYRLQQIAAAVENKVTDL

SEQ ID NO: 768299 - protein, 1948 aa, Homo sapiens
MPALGPALLQALWAGWVLTLQPLPPTAFTPNGTYLQHLARDPTSGTLYLGATNFLFQLSPGLQLEATVSTGPVLDSRDCLPPVMPDECPQAQPTNNPNQLLLVSPGALVVCGSVHQGVCEQRRLGQLEQLLLRPERPGDTQYVAANDPAVSTVGLVAQGLAGEPLLFVGRGYTSRGVGGGIPPITTRALWPPDPQAAFSYEETAKLAVGRLSEYSHHFVSAFARGASAYFLFLRRDLQAQSRAFRAYVSRVCLRDQHYYSYVELPLACEGGRYGLIQAAAVATSREVAHGEVLFAAFSSAAPPTVGRPPSAAAGASGASALCAFPLDEVDRLANRTRDACYTREGRAEDGTEVAYIEYDVNSDCAQLPVDTLDAYPCGSDHTPSPMASRVPLEATPILEWPGIQLTAVAVTMEDGHTIAFLGDSQGQLHRVYLGPGSDGHPYSTQSIQQGSAVSRDLTFDGTFEHLYVMTQSTLLKVPVASCAQHLDCASCLAHRDPYCGWCVLLGRCSRRSECSRGQGPEQWLWSFQPELGCLQVAAMSPANISREETREVFLSVPDLPPLWPGESYSCHFGEHQSPALLTGSGVMCPSPDPSEAPVLPRGADYVSVSVELRFGAVVIAKTSLSFYDCVAVTELRPSAQCQACVSSRWGCNWCVWQHLCTHKASCDAGPMVASHQVMETQQSLRALPPPSSSLSSLDYQYDTPGLWELEEATLGASSCPCVESVQGSTLMPVHVEREIRLLGRNLHLFQDGPGDNECVMELEGLEVVVEARVECEPPPDTQCHVTCQQHQLSYEALQPELRVGLFLRRAGRLRVDSAEGLHVVLYDCSVGHGDCSRCQTAMPQYGCVWCEGERPRCVTREACGEAEAVATQCPAPLIHSVEPLTGPVDGGTRVTIRGSNLGQHVQDVLGMVTVAGVPCAVDAQEYEVSSSLVCITGASGEEVAGATAVEVPGRGRGVSEHDFAYQDPKVHSIFPARGPRAGGTRLTLNGSKLLTGRLEDIRVVVGDQPCHLLPEQQSEQLRCETSPRPTPATLPVAVWFGATERRLQRGQFKYTLDPNITSAGPTKSFLSGGREICVRGQNLDVVQTPRIRVTVVSRMLQPSQGLGRRRRVVPETACSLGPSCSSQQFEEPCHVNSSQLITCRTPALPGLPEDPWVRVEFILDNLVFDFATLNPTPFSYEADPTLQPLNPEDPTMPFRHKPGSVFSVEGENLDLAMPGVVAMIGDGPCVVKTLTRHHLYCEPPVEQPLPRHHALREAPDSLPEFTVQMGNLRFSLGHVQYDGESPGAFPVAAQVGLGVGTSLLALGVIIIVLMYRRKSKQALRDYKKVQIQLENLESSVRDRCKKEFTDLMTEMTDLTSDLLGSGIPFLDYKVYAERIFFPGHRESPLHRDLGVPESRRPTVEQGLGQLSNLLNSKLFLTKFIHTLESQRTFSARDRAYVASLLTVALHGKLEYFTDILRTLLSDLVAQYVAKNPKLMLRRTETVVEKLLTNWMSICLYTFVRDSVGEPLYMLFRGIKHQVDKGPVDSVTGKAKYTLNDNRLLREDVEYRPLTLNALLAVGPGAGEAQGVPVKVLDCDTISQAKEKMLDQLYKGVPLTQRPDPRTLDVEWRSGVAGHLILSDEDVTSEVQGLWRRLNTLQHYKVPDGATVALVPCLTKHVLRENQDYVPGERTPMLEDVDEGGIRPWHLVKPSDEPEPPRPRRGSLRGGERERAKAIPEIYLTRLLSMKGTLQKFVDDLFQVILSTSRPVPLAVKYFFDLLDEQAQQHGISDQDTIHIWKTNSLPLRFWINIIKNPQFVFDVQTSDNMDAVLLVIAQTFMDACTLADHKLGRDSPINKLLYARDIPRYKRMVERYYADIRQTVPASDQEMNSVLAELSWNYSGDLGARVALHELYKYINKYYDQIITALEEDGTAQKMQLGYRLQQIAAAVEPGLGSPGSSEERPPS

SEQ ID NO: 768300 - protein, 1054 aa, Homo sapiens
LCQSYGAWEGEDHLTVGQGEGLPGKLEGPLMQLGTPFSLPCAYSLVCITGASGEEVAGATAVEVPGRGRGVSEHDFAYQDPKVHSIFPARGPRAGGTRLTLNGSKLLTGRLEDIRVVVGDQPCHLLPEQQSEQLRCETSPRPTPATLPVAVWFGATERRLQRGQFKYTLDPNITSAGPTKSFLSGGREICVRGQNLDVVQTPRIRVTVVSRMLQPSQGLGRRRRVVPETACSLGPSCSSQQFEEPCHVNSSQLITCRTPALPGLPEDPWVRVEFILDNLVFDFATLNPTPFSYEADPTLQPLNPEDPTMPFRHKPGSVFSVEGENLDLAMSKEEVVAMIGDGPCVVKTLTRHHLYCEPPVEQPLPRHHALREAPDSLPEFTVQMGNLRFSLGHVQYDGESPGAFPVAAQVGLGVGTSLLALGVIIIVLMYRRKSKQALRDYKKVQIQLENLESSVRDRCKKEFTDLMTEMTDLTSDLLGSGIPFLDYKVYAERIFFPGHRESPLHRDLGVPESRRPTVEQGLGQLSNLLNSKLFLTKFIHTLESQRTFSARDRAYVASLLTVALHGKLEYFTDILRTLLSDLVAQYVAKNPKLMLRRTETVVEKLLTNWMSICLYTFVRDSVGEPLYMLFRGIKHQVDKGPVDSVTGKAKYTLNDNRLLREDVEYRPLTLNALLAVGPGAGEAQGVPVKVLDCDTISQAKEKMLDQLYKGVPLTQRPDPRTLDVEWRSGVAGHLILSDEDVTSEVQGLWRRLNTLQHYKVPDGATVALVPCLTKHVLRENQDYVPGERTPMLEDVDEGGIRPWHLVKPSDEPEPPRPRRGSLRGGERERAKAIPEIYLTRLLSMKGTLQKFVDDLFQVILSTSRPVPLAVKYFFDLLDEQAQQHGISDQDTIHIWKTNSLPLRFWINIIKNPQFVFDVQTSDNMDAVLLVIAQTFMDACTLADHKLGRDSPINKLLYARDIPRYKRMVERYYADIRQTVPASDQEMNSVLAELSWNYSGDLGARVALHELYKYINKYYDQIITALEEDGTAQKMQLGYRLQQIAAAVENKVTDL

SEQ ID NO: 768301 - protein, 2180 aa, Homo sapiens
MPALGPALLQALWAGWVLTLQPLPPTAFTPNGTYLQHLARDPTSGTLYLGATNFLFQLSPGLQLEATVSTGPVLDSRDCLPPVMPDECPQAQPTNNPNQLLLVSPGALVVCGSVHQGVCEQRRLGQLEQLLLRPERPGDTQYVAANDPAVSTVGLVAQGLAGEPLLFVGRGYTSRGVGGGIPPITTRALWPPDPQAAFSYEETAKLAVGRLSEYSHHFVSAFARGASAYFLFLRRDLQAQSRAFRAYVSRVCLRDQHYYSYVELPLACEGGRYGLIQAAAVATSREVAHGEVLFAAFSSAAPPTVGRPPSAAAGASGASALCAFPLDEVDRLANRTRDACYTREGRAEDGTEVAYIEYDVNSDCAQLPVDTLDAYPCGSDHTPSPMASRVPLEATPILEWPGIQLTAVAVTMEDGHTIAFLGDSQGQLHRVYLGPGSDGHPYSTQSIQQGSAVSRDLTFDGTFEHLYVMTQSTLLKVPVASCAQHLDCASCLAHRDPYCGWCVLLGRCSRRSECSRGQGPEQWLWSFQPELGCLQVAAMSPANISREETREVFLSVPDLPPLWPGESYSCHFGEHQSPALLTGSGVMCPSPDPSEAPVLPRGADYVSVSVELRFGAVVIAKTSLSFYDCVAVTELRPSAQCQACVSSRWGCNWCVWQHLCTHKASCDAGPMVASHQSPLVSPDPPARGGPSPSPPTAPKALATPAPDTLPVEPGAPSTATASDISPGASPSLLSPWGPWAGSGSISSPGSTGSPLHEEPSPPSPQNGPGTAVPAPTDFRPSATPEDLLASPLSPSEVAAVPPADPGPEALHPTVPLDLPPATVPATTFPGAMGSVKPALDWLTREGGELPEADEWTGGDAPAFSTSTLLSGDGDSAELEGPPAPLILPSSLDYQYDTPGLWELEEATLGASSCPCVESVQGSTLMPVHVEREIRLLGRNLHLFQDGPGDNECVMELEGLEVVVEARVECEPPPDTQCHVTCQQHQLSYEALQPELRVGLFLRRAGRLRVDSAEGLHVVLYDCSVGHGDCSRCQTAMPQYGCVWCEGERPRCVTREACGEAEAVATQCPAPLIHSVEPLTGPVDGGTRVTIRGSNLGQHVQDVLGMVTVAGVPCAVDAQEYEVSSSLVCITGASGEEVAGATAVEVPGRGRGVSEHDFAYQDPKVHSIFPARGPRAGGTRLTLNGSKLLTGRLEDIRVVVGDQPCHLLPEQQSEQLRCETSPRPTPATLPVAVWFGATERRLQRGQFKYTLDPNITSAGPTKSFLSGGREICVRGQNLDVVQTPRIRVTVVSRMLQPSQGLGRRRRVVPETACSLGPSCSSQQVGHPWVPPHSPLAPYHTLGTARAGARGRLFPSLLGPSSTCLSSFQFEEPCHVNSSQLITCRTPALPGLPEDPWVRVEFILDNLVFDFATLNPTPFSYEADPTLQPLNPEDPTMPFRHKPGSVFSVEGENLDLAMSKEEVVAMIGDGPCVVKTLTRHHLYCEPPVEQPLPRHHALREAPDSLPEFTVQMGNLRFSLGHVQYDGESPGAFPVAAQVGLGVGTSLLALGVIIIVLMYRRKSKQALRDYKKVQIQLENLESSVRDRCKKEFTDLMTEMTDLTSDLLGSGIPFLDYKVYAERIFFPGHRESPLHRDLGVPESRRPTVEQGLGQLSNLLNSKLFLTKFIHTLESQRTFSARDRAYVASLLTVALHGKLEYFTDILRTLLSDLVAQYVAKNPKLMLRRTETVVEKLLTNWMSICLYTFVRDSVGEPLYMLFRGIKHQVDKGPVDSVTGKAKYTLNDNRLLREDVEYRPLTLNALLAVGPGAGEAQGVPVKVLDCDTISQAKEKMLDQLYKGVPLTQRPDPRTLDVEWRSGVAGHLILSDEDVTSEVQGLWRRLNTLQHYKVPDGATVALVPCLTKHVLRENQDYVPGERTPMLEDVDEGGIRPWHLVKPSDEPEPPRPRRGSLRGGERERAKAIPEIYLTRLLSMKGTLQKFVDDLFQVILSTSRPVPLAVKYFFDLLDEQAQQHGISDQDTIHIWKTNSLPLRFWINIIKNPQFVFDVQTSDNMDAVLLVIAQTFMDACTLADHKLGRDSPINKLLYARDIPRYKRMVERYYADIRQTVPASDQEMNSVLAELSWNYSGDLGARVALHELYKYINKYYDQIITALEEDGTAQKMQLGYRLQQIAAAVENKVTDL

SEQ ID NO: 768302 - protein, 585 aa, Homo sapiens
MTDLTSDLLGSGIPFLDYKVYAERIFFPGHRESPLHRDLGVPESRRPTVEQGLGQLSNLLNSKLFLTKFIHTLESQRTFSARDRAYVASLLTVALHGKLEYFTDILRTLLSDLVAQYVAKNPKLMLRRTETVVEKLLTNWMSICLYTFVRDSVGEPLYMLFRGIKHQVDKGPVDSVTGKAKYTLNDNRLLREDVEYRPLTLNALLAVGPGAGEAQGVPVKVLDCDTISQAKEKMLDQLYKGVPLTQRPDPRTLDVEWRSGVAGHLILSDEDVTSEVQGLWRRLNTLQHYKVPDGATVALVPCLTKHVLRENQDYVPGERTPMLEDVDEGGIRPWHLVKPSDEPEPPRPRRGSLRGGERERAKAIPEIYLTRLLSMKGTLQKFVDDLFQVILSTSRPVPLAVKYFFDLLDEQAQQHGISDQDTIHIWKTNSLPLRFWINIIKNPQFVFDVQTSDNMDAVLLVIAQTFMDACTLADHKLGRDSPINKLLYARDIPRYKRMVERYYADIRQTVPASDQEMNSVLAELSWNYSGDLGARVALHELYKYINKYYDQIITALEEDGTAQKMQLGYRLQQIAAAVENKVTDL

SEQ ID NO: 768303 - protein, 585 aa, Homo sapiens; identical to SEQ ID NO: 768302

SEQ ID NO: 768304 - protein, 1947 aa, Homo sapiens
MPALGPALLQALWAGWVLTLQPLPPTAFTPNGTYLQHLARDPTSGTLYLGATNFLFQLSPGLQLEATVSTGPVLDSRDCLPPVMPDECPQAQPTNNPNQLLLVSPGALVVCGSVHQGVCEQRRLGQLEQLLLRPERPGDTQYVAANDPAVSTVGLVAQGLAGEPLLFVGRGYTSRGVGGGIPPITTRALWPPDPQAAFSYEETAKLAVGRLSEYSHHFVSAFARGASAYFLFLRRDLQAQSRAFRAYVSRVCLRDQHYYSYVELPLACEGGRYGLIQAAAVATSREVAHGEVLFAAFSSAAPPTVGRPPSAAAGASGASALCAFPLDEVDRLANRTRDACYTREGRAEDGTEVAYIEYDVNSDCAQLPVDTLDAYPCGSDHTPSPMASRVPLEATPILEWPGIQLTAVAVTMEDGHTIAFLGDSQGQLHRVYLGPGSDGHPYSTQSIQQGSAVSRDLTFDGTFEHLYVMTQSTLLKVPVASCAQHLDCASCLAHRDPYCGWCVLLGRCSRRSECSRGQGPEQWLWSFQPELGCLQVAAMSPANISREETREVFLSVPDLPPLWPGESYSCHFGEHQSPALLTGSGVMCPSPDPSEAPVLPRGADYVSVSVELRFGAVVIAKTSLSFYDCVAVTELRPSAQCQACVSSRWGCNWCVWQHLCTHKASCDAGPMVASHQVMETQQSLRALPPPSSSLSSLDYQYDTPGLWELEEATLGASSCPCVESVQGSTLMPVHVEREIRLLGRNLHLFQDGPGDNECVMELEGLEVVVEARVECEPPPDTQCHVTCQQHQLSYEALQPELRVGLFLRRAGRLRVDSAEGLHVVLYDCSVGHGDCSRCQTAMPQYGCVWCEGERPRCVTREACGEAEAVATQCPAPLIHSVEPLTGPVDGGTRVTIRGSNLGQHVQDVLGMVTVAGVPCAVDAQEYEVSSSLVCITGASGEEVAGATAVEVPGRGRGVSEHDFAYQDPKVHSIFPARGPRAGGTRLTLNGSKLLTGRLEDIRVVVGDQPCHLLPEQQSEQLRCETSPRPTPATLPVAVWFGATERRLQRGQFKYTLDPNITSAGPTKSFLSGGREICVRGQNLDVVQTPRIRVTVVSRMLQPSQGLGRRRRVVPETACSLGPSCSSQQFEEPCHVNSSQLITCRTPALPGLPEDPWVRVEFILDNLVFDFATLNPTPFSYEADPTLQPLNPEDPTMPFRHKPGSVFSVEGENLDLAMPGVVAMIGDGPCVVKTLTRHHLYCEPPVEQPLPRHHALREAPDSLPEFTVQMGNLRFSLGHVQYDGESPGAFPVAAQVGLGVGTSLLALGVIIIVLMYRRKSKQALRDYKKVQIQLENLESSVRDRCKKEFTDLMTEMTDLTSDLLGSGIPFLDYKVYAERIFFPGHRESPLHRDLGVPESRRPTVEQGLGQLSNLLNSKLFLTKFIHTLESQRTFSARDRAYVASLLTVALHGKLEYFTDILRTLLSDLVAQYVAKNPKLMLRRTETVVEKLLTNWMSICLYTFVRDSVGEPLYMLFRGIKHQVDKGPVDSVTGKAKYTLNDNRLLREDVEYRPLTLNALLAVGPGAGEAQGVPVKVLDCDTISQAKEKMLDQLYKGVPLTQRPDPRTLDVEWRSGVAGHLILSDEDVTSEVQGLWRRLNTLQHYKVPDGATVALVPCLTKHVLRENQDYVPGERTPMLEDVDEGGIRPWHLVKPSDEPEPPRPRRGSLRGGERERAKAIPEIYLTRLLSMKGTLQKFVDDLFQVILSTSRPVPLAVKYFFDLLDEQAQQHGISDQDTIHIWKTNSLPLRFWINIIKNPQFVFDVQTSDNMDAVLLVIAQTFMDACTLADHKLGRDSPINKLLYARDIPRYKRMVERYYADIRQTVPASDQEMNSVLAELSWNYSGDLGARVALHELYKYINKYYDQIITALEEVTTSHKERRRSLNSFCPSAFPFPFERKDSGVFTVT

SEQ ID NO: 768305 - protein, 507 aa, Homo sapiens
VAAVSQIQRIPLACTGLHGKLEYFTDILRTLLSDLVAQYVAKNPKLMLRRTETVVEKLLTNWMSICLYTFVRDSVGEPLYMLFRGIKHQVDKGPVDSVTGKAKYTLNDNRLLREDVEYRPLTLNALLAVGPGAGEAQGVPVKVLDCDTISQAKEKMLDQLYKGVPLTQRPDPRTLDVEWRSGVAGHLILSDEDVTSEVQGLWRRLNTLQHYKVPDGATVALVPCLTKHVLRENQDYVPGERTPMLEDVDEGGIRPWHLVKPSDEPEPPRPRRGSLRGGERERAKAIPEIYLTRLLSMKGTLQKFVDDLFQVILSTSRPVPLAVKYFFDLLDEQAQQHGISDQDTIHIWKTNSLPLRFWINIIKNPQFVFDVQTSDNMDAVLLVIAQTFMDACTLADHKLGRDSPINKLLYARDIPRYKRMVERYYADIRQTVPASDQEMNSVLAELSWNYSGDLGARVALHELYKYINKYYDQIITALEEDGTAQKMQLGYRLQQIAAAVENKVTDL

SEQ ID NO: 768306 - protein, 1663 aa, Homo sapiens
  misc_feature (1627)..(1627): Xaa can be any naturally occurring amino acid
  misc_feature (1630)..(1630): Xaa can be any naturally occurring amino acid
  misc_feature (1642)..(1642): Xaa can be any naturally occurring amino acid
  misc_feature (1652)..(1652): Xaa can be any naturally occurring amino acid
MPALGPALLQALWAGWVLTLQPLPPTAFTPNGTYLQHLARDPTSGTLYLGATNFLFQLSPGLQLEATVSTGPVLDSRDCLPPVMPDECPQAQPTNNPNQLLLVSPGALVVCGSVHQGVCEQRRLGQLEQLLLRPERPGDTQYVAANDPAVSTVGLVAQGLAGEPLLFVGRGYTSRGVGGGIPPITTRALWPPDPQAAFSYEETAKLAVGRLSEYSHHFVSAFARGASAYFLFLRRDLQAQSRAFRAYVSRVCLRDQHYYSYVELPLACEGGRYGLIQAAAVATSREVAHGEVLFAAFSSAAPPTVGRPPSAAAGASGASALCAFPLDEVDRLANRTRDACYTREGRAEDGTEVAYIEYDVNSDCAQLPVDTLDAYPCGSDHTPSPMASRVPLEATPILEWPGIQLTAVAVTMEDGHTIAFLGDSQGQLHRVYLGPGSDGHPYSTQSIQQGSAVSRDLTFDGTFEHLYVMTQSTLLKVPVASCAQHLDCASCLAHRDPYCGWCVLLGRCSRRSECSRGQGPEQWLWSFQPELGCLQVAAMSPANISREETREVFLSVPDLPPLWPGESYSCHFGEHQSPALLTGSGVMCPSPDPSEAPVLPRGADYVSVSVELRFGAVVIAKTSLSFYDCVAVTELRPSAQCQACVSSRWGCNWCVWQHLCTHKASCDAGPMVASHQVMETQQSLRALPPPSSSLSSLDYQYDTPGLWELEEATLGASSCPCVESVQGSTLMPVHVEREIRLLGRNLHLFQDGPGDNECVMELEGLEVVVEARVECEPPPDTQCHVTCQQHQLSYEALQPELRVGLFLRRAGRLRVDSAEGLHVVLYDCSVGHGDCSRCQTAMPQYGCVWCEGERPRCVTREACGEAEAVATQCPAPLIHSVEPLTGPVDGGTRVTIRGSNLGQHVQDVLGMVTVAGVPCAVDAQEYEVSSSLVCITGASGEEVAGATAVEVPGRGRGVSEHDFAYQDPKVHSIFPARGPRAGGTRLTLNGSKLLTGRLEDIRVVVGDQPCHLLPEQQSEQLRCETSPRPTPATLPVAVWFGATERRLQRGQFKYTLDPNITSAGPTKSFLSGGREICVRGQNLDVVQTPRIRVTVVSRMLQPSQGLGRRRRVVPETACSLGPSCSSQQFEEPCHVNSSQLITCRTPALPGLPEDPWVRVEFILDNLVFDFATLNPTPFSYEADPTLQPLNPEDPTMPFRHKPGSVFSVEGENLDLAMPGVVAMIGDGPCVVKTLTRHHLYCEPPVEQPLPRHHALREAPDSLPEFTVQMGNLRFSLGHVQYDGESPGAFPVAAQVGLGVGTSLLALGVIIIVLMYRRKSKQALRDYKKVQIQLENLESSVRDRCKKEFTDLMTEMTDLTSDLLGSGIPFLDYKVYAERIFFPGHRESPLHRDLGVPESRRPTVEQGLGQLSNLLNSKLFLTKFIHTLESQRTFSARDRAYVASLLTVALHGKLEYFTDILRTLLSDLVAQYVAKNPKLMLRRTETVVEKLLTNWMSICLYTFVRDSVGEPLYMLFRGIKHQVDKGPVDSVTGKAKYTLNDNRLLREDVEYRPLTLNALLAVGPGAGEAQGVPVKVLDCDTISQAKEKMLDQLYKGVPLTQQALPGDHACSGPSSSPGSLGRVGPHPXAPXTNCIHSQWHVSXAPGKGPHLRXPLPGGYQLSVP

SEQ ID NO: 768307 - protein, 1590 aa, Homo sapiens
MPALGPALLQALWAGWVLTLQPLPPTAFTPNGTYLQHLARDPTSGTLYLGATNFLFQLSPGLQLEATVSTGPVLDSRDCLPPVMPDECPQAQPTNNPNQLLLVSPGALVVCGSVHQGVCEQRRLGQLEQLLLRPERPGDTQYVAANDPAVSTVGLVAQGLAGEPLLFVGRGYTSRGVGGGIPPITTRALWPPDPQAAFSYEETAKLAVGRLSEYSHHFVSAFARGASAYFLFLRRDLQAQSRAFRAYVSRVCLRDQHYYSYVELPLACEGGRYGLIQAAAVATSREVAHGEVLFAAFSSAAPPTVGRPPSAAAGASGASALCAFPLDEVDRLANRTRDACYTREGRAEDGTEVAYIEYDVNSDCAQLPVDTLDAYPCGSDHTPSPMASRVPLEATPILEWPGIQLTAVAVTMEDGHTIAFLGDSQGQLHRVYLGPGSDGHPYSTQSIQQGSAVSRDLTFDGTFEHLYVMTQSTLLKVPVASCAQHLDCASCLAHRDPYCGWCVLLGRCSRRSECSRGQGPEQWLWSFQPELGCLQVAAMSPANISREETREVFLSVPDLPPLWPGESYSCHFGEHQSPALLTGSGVMCPSPDPSEAPVLPRGADYVSVSVELRFGAVVIAKTSLSFYDCVAVTELRPSAQCQACVSSRWGCNWCVWQHLCTHKASCDAGPMVASHQVMETQQSLRALPPPSSSLSSLDYQYDTPGLWELEEATLGASSCPCVESVQGSTLMPVHVEREIRLLGRNLHLFQDGPGDNECVMELEGLEVVVEARVECEPPPDTQCHVTCQQHQLSYEALQPELRVGLFLRRAGRLRVDSAEGLHVVLYDCSVGHGDCSRCQTAMPQYGCVWCEGERPRCVTREACGEAEAVATQCPAPLIHSVEPLTGPVDGGTRVTIRGSNLGQHVQDVLGMVTVAGVPCAVDAQEYEVSSSLVCITGASGEEVAGATAVEVPGRGRGVSEHDFAYQDPKVHSIFPARGPRAGGTRLTLNGSKLLTGRLEDIRVVVGDQPCHLLPEQQSEQLRCETSPRPTPATLPVAVWFGATERRLQRGQFKYTLDPNITSAGPTKSFLSGGREICVRGQNLDVVQTPRIRVTVVSRMLQPSQGLGRRRRVVPETACSLGPSCSSQQFEEPCHVNSSQLITCRTPALPGLPEDPWVRVEFILDNLVFDFATLNPTPFSYEADPTLQPLNPEDPTMPFRHKPGSVFSVEGENLDLAMPGVVAMIGDGPCVVKTLTRHHLYCEPPVEQPLPRHHALREAPDSLPEFTVQMGNLRFSLGHVQYDGESPGAFPVAAQVGLGVGTSLLALGVIIIVLMYRRKSKQALRDYKKVQIQLENLESSVRDRCKKEFTDLMTEMTDLTSDLLGSGIPFLDYKVYAERIFFPGHRESPLHRDLGVPESRRPTVEQGLGQLSNLLNSKLFLTKFIHTLESQRTFSARDRAYVASLLTVALHGKLEYFTDILRTLLSDLVAQYVAKNPKLMLRRTETVVEKLLTNWMSICLYTFVRDSVGEPLYMLFRGIKHQVDKGPVDSVTGKAKYTLNDNRLLREDVEYRPLTLNALLAVGPGAGEAQGVPVKVLDCDTILGLRVERLS

SEQ ID NO: 768308 - protein, 1484 aa, Homo sapiens
MPALGPALLQALWAGWVLTLQPLPPTAFTPNGTYLQHLARDPTSGTLYLGATNFLFQLSPGLQLEATVSTGPVLDSRDCLPPVMPDECPQAQPTNNPNQLLLVSPGALVVCGSVHQGVCEQRRLGQLEQLLLRPERPGDTQYVAANDPAVSTVGLVAQGLAGEPLLFVGRGYTSRGVGGGIPPITTRALWPPDPQAAFSYEETAKLAVGRLSEYSHHFVSAFARGASAYFLFLRRDLQAQSRAFRAYVSRVCLRDQHYYSYVELPLACEGGRYGLIQAAAVATSREVAHGEVLFAAFSSAAPPTVGRPPSAAAGASGASALCAFPLDEVDRLANRTRDACYTREGRAEDGTEVAYIEYDVNSDCAQLPVDTLDAYPCGSDHTPSPMASRVPLEATPILEWPGIQLTAVAVTMEDGHTIAFLGDSQGQLHRVYLGPGSDGHPYSTQSIQQGSAVSRDLTFDGTFEHLYVMTQSTLLKVPVASCAQHLDCASCLAHRDPYCGWCVLLGRCSRRSECSRGQGPEQWLWSFQPELGCLQVAAMSPANISREETREVFLSVPDLPPLWPGESYSCHFGEHQSPALLTGSGVMCPSPDPSEAPVLPRGADYVSVSVELRFGAVVIAKTSLSFYDCVAVTELRPSAQCQACVSSRWGCNWCVWQHLCTHKASCDAGPMVASHQVMETQQSLRALPPPSSSLSSLDYQYDTPGLWELEEATLGASSCPCVESVQGSTLMPVHVEREIRLLGRNLHLFQDGPGDNECVMELEGLEVVVEARVECEPPPDTQCHVTCQQHQLSYEALQPELRVGLFLRRAGRLRVDSAEGLHVVLYDCSVGHGDCSRCQTAMPQYGCVWCEGERPRCVTREACGEAEAVATQCPAPLIHSVEPLTGPVDGGTRVTIRGSNLGQHVQDVLGMVTVAGVPCAVDAQEYEVSSSLVCITGASGEEVAGATAVEVPGRGRGVSEHDFAYQDPKVHSIFPARGPRAGGTRLTLNGSKLLTGRLEDIRVVVGDQPCHLLPEQQSEQLRCETSPRPTPATLPVAVWFGATERRLQRGQFKYTLDPNITSAGPTKSFLSGGREICVRGQNLDVVQTPRIRVTVVSRMLQPSQGLGRRRRVVPETACSLGPSCSSQQFEEPCHVNSSQLITCRTPALPGLPEDPWVRVEFILDNLVFDFATLNPTPFSYEADPTLQPLNPEDPTMPFRHKPGSVFSVEGENLDLAMPGVVAMIGDGPCVVKTLTRHHLYCEPPVEQPLPRHHALREAPDSLPEFTVQMGNLRFSLGHVQYDGESPGAFPVAAQVGLGVGTSLLALGVIIIVLMYRRKSKQALRDYKKVQIQLENLESSVRDRCKKEFTDLMTEMTDLTSDLLGSGIPFLDYKVYAERIFFPGHRESPLHRDLGVPESRRPTVEQGLGQLSNLLNSKLFLTKFIHTLESQRTFSARDRAYVASLLTVALHGKLEYFTDILRTLLSDLVAQYVAKNPKLMLRRTP

SEQ ID NO: 768309 - protein, 68 aa, Homo sapiens
LTRGSLPKWNYSGDLGARVALHELYKYINKYYDQIITALEEDGTAQKMQLGYRLQQIAAAVENKVTDL

SEQ ID NO: 768310 - protein, 1365 aa, Homo sapiens
MPALGPALLQALWAGWVLTLQPLPPTAFTPNGTYLQHLARDPTSGTLYLGATNFLFQLSPGLQLEATVSTGPVLDSRDCLPPVMPDECPQAQPTNNPNQLLLVSPGALVVCGSVHQGVCEQRRLGQLEQLLLRPERPGDTQYVAANDPAVSTVGLVAQGLAGEPLLFVGRGYTSRGVGGGIPPITTRALWPPDPQAAFSYEETAKLAVGRLSEYSHHFVSAFARGASAYFLFLRRDLQAQSRAFRAYVSRVCLRDQHYYSYVELPLACEGGRYGLIQAAAVATSREVAHGEVLFAAFSSAAPPTVGRPPSAAAGASGASALCAFPLDEVDRLANRTRDACYTREGRAEDGTEVAYIEYDVNSDCAQLPVDTLDAYPCGSDHTPSPMASRVPLEATPILEWPGIQLTAVAVTMEDGHTIAFLGDSQGQLHRVYLGPGSDGHPYSTQSIQQGSAVSRDLTFDGTFEHLYVMTQSTLLKVPVASCAQHLDCASCLAHRDPYCGWCVLLGRCSRRSECSRGQGPEQWLWSFQPELGCLQVAAMSPANISREETREVFLSVPDLPPLWPGESYSCHFGEHQSPALLTGSGVMCPSPDPSEAPVLPRGADYVSVSVELRFGAVVIAKTSLSFYDCVAVTELRPSAQCQACVSSRWGCNWCVWQHLCTHKASCDAGPMVASHQSPLVSPDPPARGGPSPSPPTAPKALATPAPDTLPVEPGAPSTATASDISPGASPSLLSPWGPWAGSGSISSPGSTGSPLHEEPSPPSPQNGPGTAVPAPTDFRPSATPEDLLASPLSPSEVAAVPPADPGPEALHPTVPLDLPPATVPATTFPGAMGSVKPALDWLTREGGELPEADEWTGGDAPAFSTSTLLSGDGDSAELEGPPAPLILPSSLDYQYDTPGLWELEEATLGASSCPCVESVQGSTLMPVHVEREIRLLGRNLHLFQDGPGDNECVMELEGLEVVVEARVECEPPPDTQCHVTCQQHQLSYEALQPELRVGLFLRRAGRLRVDSAEGLHVVLYDCSVGHGDCSRCQTAMPQYGCVWCEGERPRCVTREACGEAEAVATQCPAPLIHSVEPLTGPVDGGTRVTIRGSNLGQHVQDVLGMVTVAGVPCAVDAQEYEVSSSLVCITGASGEEVAGATAVEVPGRGRGVSEHDFAYQDPKVHSIFPARGPRAGGTRLTLNGSKLLTGRLEDIRVVVGDQPCHLLPEQQSEQLRCETSPRPTPATLPVAVWFGATERRLQRGQFKYTLDPNITSAGPTKSFLSGGREICVRGQNLDVVQTPRIRVTVVSRMLQPSQGLGRRRRVVPETACSLGPSCSSQQFEEPCHVNSSQLITCRTVIPLTGTISMMSLFPYQLPFRACCAF

SEQ ID NO: 768311 - protein, 615 aa, Homo sapiens
MPALGPALLQALWAGWVLTLQPLPPTAFTPNGTYLQHLARDPTSGTLYLGATNFLFQLSPGLQLEATVSTGPVLDSRDCLPPVMPDECPQAQPTNNPNQLLLVSPGALVVCGSVHQGVCEQRRLGQLEQLLLRPERPGDTQYVAANDPAVSTVGLVAQGLAGEPLLFVGRGYTSRGVGGGIPPITTRALWPPDPQAAFSYEETAKLAVGRLSEYSHHFVSAFARGASAYFLFLRRDLQAQSRAFRAYVSRVCLRDQHYYSYVELPLACEGGRYGLIQAAAVATSREVAHGEVLFAAFSSAAPPTVGRPPSAAAGASGASALCAFPLDEVDRLANRTRDACYTREGRAEDGTEVAYIEYDVNSDCAQLPVDTLDAYPCGSDHTPSPMASRVPLEATPILEWPGIQLTAVAVTMEDGHTIAFLGDSQGQLHRVYLGPGSDGHPYSTQSIQQGSAVSRDLTFDGTFEHLYVMTQSTLLKVPVASCAQHLDCASCLAHRDPYCGWCVLLGRCSRRSECSRGQGPEQWLWSFQPELGCLQVAAMSPANISREETREVNDQIGRALVGRALGIKVWVEILDPDVGHARYHMASHKSLLLGAQFPHLFLTQARGCLGRPEGC

SEQ ID NO: 768312 - protein, 614 aa, Homo sapiens
MPALGPALLQALWAGWVLTLQPLPPTAFTPNGTYLQHLARDPTSGTLYLGATNFLFQLSPGLQLEATVSTGPVLDSRDCLPPVMPDECPQAQPTNNPNQLLLVSPGALVVCGSVHQGVCEQRRLGQLEQLLLRPERPGDTQYVAANDPAVSTVGLVAQGLAGEPLLFVGRGYTSRGVGGGIPPITTRALWPPDPQAAFSYEETAKLAVGRLSEYSHHFVSAFARGASAYFLFLRRDLQAQSRAFRAYVSRVCLRDQHYYSYVELPLACEGGRYGLIQAAAVATSREVAHGEVLFAAFSSAAPPTVGRPPSAAAGASGASALCAFPLDEVDRLANRTRDACYTREGRAEDGTEVAYIEYDVNSDCAQLPVDTLDAYPCGSDHTPSPMASRVPLEATPILEWPGIQLTAVAVTMEDGHTIAFLGDSQGQLHRVYLGPGSDGHPYSTQSIQQGSAVSRDLTFDGTFEHLYVMTQSTLLKVPVASCAQHLDCASCLAHRDPYCGWCVLLGRCSRRSECSRGQGPEQWLWSFQPELGCLQVAAMSPANISREETREVFLSVPDLPPLWPGESYSCHFGEHQSPALLTGSGVMCPSPDPSEAPVLPRGAGGLRTSVERYR

SEQ ID NO: 768313 - protein, 112 aa, Homo sapiens
MPSERHLTLCLSSRSVGRSLAGLGIDLGQTLAHRWLLTQVQMGNLRFSLGHVQYDGESPGAFPVAAQVGLGVGTSLLALGVIIIVLMYRWVQPDVAGLGQVVGSGWTGKGQT

SEQ ID NO: 768314 - protein, 92 aa, Homo sapiens
MLFRGIKHQVDKGPVDSVTGKAKYTLNDNRLLREDVEYRPLVRVCKCVACSLSAVRARVESVWVCGVWTPASDVVPGCRAGLTSGWLLERAH

SEQ ID NO: 768315 - protein, 2135 aa, Homo sapiens
MPALGPALLQALWAGWVLTLQPLPPTAFTPNGTYLQHLARDPTSGTLYLGATNFLFQLSPGLQLEATVSTGPVLDSRDCLPPVMPDECPQAQPTNNPNQLLLVSPGALVVCGSVHQGVCEQRRLGQLEQLLLRPERPGDTQYVAANDPAVSTVGLVAQGLAGEPLLFVGRGYTSRGVGGGIPPITTRALWPPDPQAAFSYEETAKLAVGRLSEYSHHFVSAFARGASAYFLFLRRDLQAQSRAFRAYVSRVCLRDQHYYSYVELPLACEGGRYGLIQAAAVATSREVAHGEVLFAAFSSAAPPTVGRPPSAAAGASGASALCAFPLDEVDRLANRTRDACYTREGRAEDGTEVAYIEYDVNSDCAQLPVDTLDAYPCGSDHTPSPMASRVPLEATPILEWPGIQLTAVAVTMEDGHTIAFLGDSQGQLHRVYLGPGSDGHPYSTQSIQQGSAVSRDLTFDGTFEHLYVMTQSTLLKVPVASCAQHLDCASCLAHRDPYCGWCVLLGRCSRRSECSRGQGPEQWLWSFQPELGCLQVAAMSPANISREETREVFLSVPDLPPLWPGESYSCHFGEHQSPALLTGSGVMCPSPDPSEAPVLPRGADYVSVSVELRFGAVVIAKTSLSFYDCVAVTELRPSAQCQACVSSRWGCNWCVWQHLCTHKASCDAGPMVASHQSPLVSPDPPARGGPSPSPPTAPKALATPAPDTLPVEPGAPSTATASDISPGASPSLLSPWGPWAGSGSISSPGSTGSPLHEEPSPPSPQNGPGTAVPAPTDFRPSATPEDLLASPLSPSEVAAVPPADPGPEALHPTVPLDLPPATVPATTFPGAMGSVKPALDWLTREGGELPEADEWTGGDAPAFSTSTLLSGDGDSAELEGPPAPLILPSSLDYQYDTPGLWELEEATLGASSCPCVESVQGSTLMPVHVEREIRLLGRNLHLFQDGPGDNECVMELEGLEVVVEARVECEPPPDTQCHVTCQQHQLSYEALQPELRVGLFLRRAGRLRVDSAEGLHVVLYDCSVGHGDCSRCQTAMPQYGCVWCEGERPRCVTREACGEAEAVATQCPAPLIHSVEPLTGPVDGGTRVTIRGSNLGQHVQDVLGMVTVAGVPCAVDAQEYEVSSSLVCITGASGEEVAGATAVEVPGRGRGVSEHDFAYQDPKVHSIFPARGPRAGGTRLTLNGSKLLTGRLEDIRVVVGDQPCHLLPEQQSEQLRCETSPRPTPATLPVAVWFGATERRLQRGQFKYTLDPNITSAGPTKSFLSGGREICVRGQNLDVVQTPRIRVTVVSRMLQPSQGLGRRRRVVPETACSLGPSCSSQQFEEPCHVNSSQLITCRTPALPGLPEDPWVRVEFILDNLVFDFATLNPTPFSYEADPTLQPLNPEDPTMPFRHKPGSVFSVEGENLDLAMSKEEVVAMIGDGPCVVKTLTRHHLYCEPPVEQPLPRHHALREAPDSLPEFTVQMGNLRFSLGHVQYDGESPGAFPVAAQVGLGVGTSLLALGVIIIVLMYRRKSKQALRDYKKVQIQLENLESSVRDRCKKEFTDLMTEMTDLTSDLLGSGIPFLDYKVYAERIFFPGHRESPLHRDLGVPESRRPTVEQGLGQLSNLLNSKLFLTKFIHTLESQRTFSARDRAYVASLLTVALHGKLEYFTDILRTLLSDLVAQYVAKNPKLMLRRTETVVEKLLTNWMSICLYTFVRDSVGEPLYMLFRGIKHQVDKGPVDSVTGKAKYTLNDNRLLREDVEYRPLTLNALLAVGPGAGEAQGVPVKVLDCDTISQAKEKMLDQLYKGVPLTQRPDPRTLDVEWRSGVAGHLILSDEDVTSEVQGLWRRLNTLQHYKVPDGATVALVPCLTKHVLRENQDYVPGERTPMLEDVDEGGIRPWHLVKPSDEPEPPRPRRGSLRGGERERAKAIPEIYLTRLLSMKGTLQKFVDDLFQVILSTSRPVPLAVKYFFDLLDEQAQQHGISDQDTIHIWKTNSLPLRFWINIIKNPQFVFDVQTSDNMDAVLLVIAQTFMDACTLADHKLGRDSPINKLLYARDIPRYKRMVERYYADIRQTVPASDQEMNSVLAELSWNYSGDLGARVALHELYKYINKYYDQIITALEEDGTAQKMQLGYRLQQIAAAVENKVTDL

SEQ ID NO: 768316 - protein, 2135 aa, Homo sapiens; identical to SEQ ID NO: 768315

SEQ ID NO: 768317 - protein, 2042 aa, Homo sapiens
MPALGPALLQALWAGWVLTLQPLPPTAFTPNGTYLQHLARDPTSGTLYLGATNFLFQLSPGLQLEATVSTGPVLDSRDCLPPVMPDECPQAQPTNNPNQLLLVSPGALVVCGSVHQGVCEQRRLGQLEQLLLRPERPGDTQYVAANDPAVSTVGLVAQGLAGEPLLFVGRGYTSRGVGGGIPPITTRALWPPDPQAAFSYEETAKLAVGRLSEYSHHFVSAFARGASAYFLFLRRDLQAQSRAFRAYVSRVCLRDQHYYSYVELPLACEGGRYGLIQAAAVATSREVAHGEVLFAAFSSAAPPTVGRPPSAAAGASGASALCAFPLDEVDRLANRTRDACYTREGRAEDGTEVAYIEYDVNSDCAQLPVDTLDAYPCGSDHTPSPMASRVPLEATPILEWPGIQLTAVAVTMEDGHTIAFLGDSQGQLHRVYLGPGSDGHPYSTQSIQQGSAVSRDLTFDGTFEHLYVMTQSTLLKVPVASCAQHLDCASCLAHRDPYCGWCVLLGRCSRRSECSRGQGPEQWLWSFQPELGCLQVAAMSPANISREETREVFLSVPDLPPLWPGESYSCHFGEHQSPALLTGSGVMCPSPDPSEAPVLPRGADYVSVSVELRFGAVVIAKTSLSFYDCVAVTELRPSAQCQACVSSRWGCNWCVWQHLCTHKASCDAGPMVASHQVMETQQSLRALPPPSSSLSSLDYQYDTPGLWELEEATLGASSCPCVESVQGSTLMPVHVEREIRLLGRNLHLFQDGPGDNECVMELEGLEVVVEARVECEPPPDTQCHVTCQQHQLSYEALQPELRVGLFLRRAGRLRVDSAEGLHVVLYDCSVGHGDCSRCQTAMPQYGCVWCEGERPRCVTREACGEAEAVATQCPAPLIHSVEPLTGPVDGGTRVTIRGSNLGQHVQDVLGMVTVAGVPCAVDAQEYEVSSSLVCITGASGEEVAGATAVEVPGRGRGVSEHDFAYQDPKVHSIFPARGPRAGGTRLTLNGSKLLTGRLEDIRVVVGDQPCHLLPEQQSEQLRCETSPRPTPATLPVAVWFGATERRLQRGQFKYTLDPNITSAGPTKSFLSGGREICVRGQNLDVVQTPRIRVTVVSRMLQPSQGLGRRRRVVPETACSLGPSCSSQQFEEPCHVNSSQLITCRTPALPGLPEDPWVRVEFILDNLVFDFATLNPTPFSYEADPTLQPLNPEDPTMPFRHKPGSVFSVEGENLDLAMPGVVAMIGDGPCVVKTLTRHHLYCEPPVEQPLPRHHALREAPDSLPEFTVQMGNLRFSLGHVQYDGESPGAFPVAAQVGLGVGTSLLALGVIIIVLMYRRKSKQALRDYKKVQIQLENLESSVRDRCKKEFTDLMTEMTDLTSDLLGSGIPFLDYKVYAERIFFPGHRESPLHRDLGVPESRRPTVEQGLGQLSNLLNSKLFLTKFIHTLESQRTFSARDRAYVASLLTVALHGKLEYFTDILRTLLSDLVAQYVAKNPKLMLRRTETVVEKLLTNWMSICLYTFVRDSVGEPLYMLFRGIKHQVDKGPVDSVTGKAKYTLNDNRLLREDVEYRPLTLNALLAVGPGAGEAQGVPVKVLDCDTISQAKEKMLDQLYKGVPLTQRPDPRTLDVGEGVESPWGPEPLLGLGWPRTNSAGTTHHSGWGGCWEAGRSWLWNIFLGQPLIWGGGPCSWSLERLSKAAPGWRGWCPCGGGDGLHYGKGIFQPCTQFCLALAEWRSGVAGHLILSDEDVTSEVQGLWRRLNTLQHYKVPDGATVALVPCLTKHVLRENQDYVPGERTPMLEDVDEGGIRPWHLVKPSDEPEPPRPRRGSLRGGERERAKAIPEIYLTRLLSMKGTLQKFVDDLFQVILSTSRPVPLAVKYFFDLLDEQAQQHGISDQDTIHIWKTNSLPLRFWINIIKNPQFVFDVQTSDNMDAVLLVIAQTFMDACTLADHKLGRDSPINKLLYARDIPRYKRMVERYYADIRQTVPASDQEMNSVLAELSWNYSGDLGARVALHELYKYINKYYDQIITALEEDGTAQKMQLGYRLQQIAAAVENKVTDL

SEQ ID NO: 768318 - protein, 1688 aa, Homo sapiens
MIDRAAYLHALFDGTFEHLYVMTQSTLLKVPVASCAQHLDCASCLAHRDPYCGWCVLLGRCSRRSECSRGQGPEQWLWSFQPELGCLQVAAMSPANISREETREVFLSVPDLPPLWPGESYSCHFGEHQSPALLTGSGVMCPSPDPSEAPVLPRGADYVSVSVELRFGAVVIAKTSLSFYDCVAVTELRPSAQCQACVSSRWGCNWCVWQHLCTHKASCDAGPMVASHQSPLVSPDPPARGGPSPSPPTAPKALATPAPDTLPVEPGAPSTATASDISPGASPSLLSPWGPWAGSGSISSPGSTGSPLHEEPSPPSPQNGPGTAVPAPTDFRPSATPEDLLASPLSPSEVAAVPPADPGPEALHPTVPLDLPPATVPATTFPGAMGSVKPALDWLTREGGELPEADEWTGGDAPAFSTSTLLSGDGDSAELEGPPAPLILPSSLDYQYDTPGLWELEEATLGASSCPCVESVQGSTLMPVHVEREIRLLGRNLHLFQDGPGDNECVMELEGLEVVVEARVECEPPPDTQCHVTCQQHQLSYEALQPELRVGLFLRRAGRLRVDSAEGLHVVLYDCSVGHGDCSRCQTAMPQYGCVWCEGERPRCVTREACGEAEAVATQCPAPLIHSVEPLTGPVDGGTRVTIRGSNLGQHVQDVLGMVTVAGVPCAVDAQEYEVSSSLVCITGASGEEVAGATAVEVPGRGRGVSEHDFAYQDPKVHSIFPARGPRAGGTRLTLNGSKLLTGRLEDIRVVVGDQPCHLLPEQQSEQLRCETSPRPTPATLPVAVWFGATERRLQRGQFKYTLDPNITSAGPTKSFLSGGREICVRGQNLDVVQTPRIRVTVVSRMLQPSQGLGRRRRVVPETACSLGPSCSSQQFEEPCHVNSSQLITCRTPALPGLPEDPWVRVEFILDNLVFDFATLNPTPFSYEADPTLQPLNPEDPTMPFRHKPGSVFSVEGENLDLAMSKEEVVAMIGDGPCVVKTLTRHHLYCEPPVEQPLPRHHALREAPDSLPEFTVQMGNLRFSLGHVQYDGESPGAFPVAAQVGLGVGTSLLALGVIIIVLMYRRKSKQALRDYKKVQIQLENLESSVRDRCKKEFTDLMTEMTDLTSDLLGSGIPFLDYKVYAERIFFPGHRESPLHRDLGVPESRRPTVEQGLGQLSNLLNSKLFLTKFIHTLESQRTFSARDRAYVASLLTVALHGKLEYFTDILRTLLSDLVAQYVAKNPKLMLRRTETVVEKLLTNWMSICLYTFVRDSVGEPLYMLFRGIKHQVDKGPVDSVTGKAKYTLNDNRLLREDVEYRPLTLNALLAVGPGAGEAQGVPVKVLDCDTISQAKEKMLDQLYKGVPLTQRPDPRTLDVEWRSGVAGHLILSDEDVTSEVQGLWRRLNTLQHYKVPDGATVALVPCLTKHVLRENQDYVPGERTPMLEDVDEGGIRPWHLVKPSDEPEPPRPRRGSLRGGERERAKAIPEIYLTRLLSMKGTLQKFVDDLFQVILSTSRPVPLAVKYFFDLLDEQAQQHGISDQDTIHIWKTNSLPLRFWINIIKNPQFVFDVQTSDNMDAVLLVIAQTFMDACTLADHKLGRDSPINKLLYARDIPRYKRMVERYYADIRQTVPASDQEMNSVLAELSWNYSGDLGARVALHELYKYINKYYDQIITALEEDGTAQKMQLGYRLQQIAAAVENKVTDL

SEQ ID NO: 768319 - protein, 843 aa, Homo sapiens
MLQPSQGLGRRRRVVPETACSLGPSCSSQQFEEPCHVNSSQLITCRTPALPGLPEDPWVRVEFILDNLVFDFATLNPTPFSYEADPTLQPLNPEDPTMPFRHKPGSVFSVEGENLDLAMSKEEVVAMIGDGPCVVKTLTRHHLYCEPPVEQPLPRHHALREAPDSLPEFTVQMGNLRFSLGHVQYDGESPGAFPVAAQVGLGVGTSLLALGVIIIVLMYRRKSKQALRDYKKVQIQLENLESSVRDRCKKEFTDLMTEMTDLTSDLLGSGIPFLDYKVYAERIFFPGHRESPLHRDLGVPESRRPTVEQGLGQLSNLLNSKLFLTKFIHTLESQRTFSARDRAYVASLLTVALHGKLEYFTDILRTLLSDLVAQYVAKNPKLMLRRTETVVEKLLTNWMSICLYTFVRDSVGEPLYMLFRGIKHQVDKGPVDSVTGKAKYTLNDNRLLREDVEYRPLTLNALLAVGPGAGEAQGVPVKVLDCDTISQAKEKMLDQLYKGVPLTQRPDPRTLDVEWRSGVAGHLILSDEDVTSEVQGLWRRLNTLQHYKVPDGATVALVPCLTKHVLRENQDYVPGERTPMLEDVDEGGIRPWHLVKPSDEPEPPRPRRGSLRGGERERAKAIPEIYLTRLLSMKGTLQKFVDDLFQVILSTSRPVPLAVKYFFDLLDEQAQQHGISDQDTIHIWKTNSLPLRFWINIIKNPQFVFDVQTSDNMDAVLLVIAQTFMDACTLADHKLGRDSPINKLLYARDIPRYKRMVERYYADIRQTVPASDQEMNSVLAELSWNYSGDLGARVALHELYKYINKYYDQIITALEEDGTAQKMQLGYRLQQIAAAVENKVTDL

SEQ ID NO: 768320 - protein, 585 aa, Homo sapiens; identical to SEQ ID NO: 768302

SEQ ID NO: 768321 - protein, 631 aa, Homo sapiens
PLLELTLAELPLPELPLELPLEIQLENLESSVRDRCKKEFTDLMTEMTDLTSDLLGSGIPFLDYKVYAERIFFPGHRESPLHRDLGVPESRRPTVEQGLGQLSNLLNSKLFLTKFIHTLESQRTFSARDRAYVASLLTVALHGKLEYFTDILRTLLSDLVAQYVAKNPKLMLRRTETVVEKLLTNWMSICLYTFVRDSVGEPLYMLFRGIKHQVDKGPVDSVTGKAKYTLNDNRLLREDVEYRPLTLNALLAVGPGAGEAQGVPVKVLDCDTISQAKEKMLDQLYKGVPLTQRPDPRTLDVEWRSGVAGHLILSDEDVTSEVQGLWRRLNTLQHYKVPDGATVALVPCLTKHVLRENQDYVPGERTPMLEDVDEGGIRPWHLVKPSDEPEPPRPRRGSLRGGERERAKAIPEIYLTRLLSMKGTLQKFVDDLFQVILSTSRPVPLAVKYFFDLLDEQAQQHGISDQDTIHIWKTNSLPLRFWINIIKNPQFVFDVQTSDNMDAVLLVIAQTFMDACTLADHKLGRDSPINKLLYARDIPRYKRMVERYYADIRQTVPASDQEMNSVLAELSWNYSGDLGARVALHELYKYINKYYDQIITALEEDGTAQKMQLGYRLQQIAAAVENKVTDL

SEQ ID NO: 768322 - protein, 1915 aa, Homo sapiens
MPALGPALLQALWAGWVLTLQPLPPTAFTPNGTYLQHLARDPTSGTLYLGATNFLFQLSPGLQLEATVSTGPVLDSRDCLPPVMPDECPQAQPTNNPNQLLLVSPGALVVCGSVHQGVCEQRRLGQLEQLLLRPERPGDTQYVAANDPAVSTVGLVAQGLAGEPLLFVGRGYTSRGVGGGIPPITTRALWPPDPQAAFSYEETAKLAVGRLSEYSHHFVSAFARGASAYFLFLRRDLQAQSRAFRAYVSRVCLRDQHYYSYVELPLACEGGRYGLIQAAAVATSREVAHGEVLFAAFSSAAPPTVGRPPSAAAGASGASALCAFPLDEVDRLANRTRDACYTREGRAEDGTEVAYIEYDVNSDCAQLPVDTLDAYPCGSDHTPSPMASRVPLEATPILEWPGIQLTAVAVTMEDGHTIAFLGDSQGQLHRVYLGPGSDGHPYSTQSIQQGSAVSRDLTFDGTFEHLYVMTQSTLLKVPVASCAQHLDCASCLAHRDPYCGWCVLLGRCSRRSECSRGQGPEQWLWSFQPELGCLQVAAMSPANISREETREVFLSVPDLPPLWPGESYSCHFGEHQSPALLTGSGVMCPSPDPSEAPVLPRGADYVSVSVELRFGAVVIAKTSLSFYDCVAVTELRPSAQCQACVSSRWGCNWCVWQHLCTHKASCDAGPMVASHQVMETQQSLRALPPPSSSLSSLDYQYDTPGLWELEEATLGASSCPCVESVQGSTLMPVHVEREIRLLGRNLHLFQDGPGDNECVMELEGLEVVVEARVECEPPPDTQCHVTCQQHQLSYEALQPELRVGLFLRRAGRLRVDSAEGLHVVLYDCSVGHGDCSRCQTAMPQYGCVWCEGERPRCVTREACGEAEAVATQCPAPLIHSVEPLTGPVDGGTRVTIRGSNLGQHVQDVLGMVTVAGVPCAVDAQEYEVSSSLVCITGASGEEVAGATAVEVPGRGRGVSEHDFAYQDPKVHSIFPARGPRAGGTRLTLNGSKLLTGRLEDIRVVVGDQPCHLLPEQQSEQLRCETSPRPTPATLPVAVWFGATERRLQRGQFKYTLDPNITSAGPTKSFLSGGREICVRGQNLDVVQTPRIRVTVVSRMLQPSQGLGRRRRVVPETACSLGPSCSSQQFEEPCHVNSSQLITCRTPALPGLPEDPWVRVEFILDNLVFDFATLNPTPFSYEADPTLQPLNPEDPTMPFRHKPGSVFSVEGENLDLAMPGVVAMIGDGPCVVKTLTRHHLYCEPPVEQPLPRHHALREAPDSLPEFTVQMGNLRFSLGHVQYDGESPGAFPVAAQVGLGVGTSLLALGVIIIVLMYRRKSKQALRDYKKVQIQLENLESSVRDRCKKEFTDLMTEMTDLTSDLLGSGIPFLDYKVYAERIFFPGHRESPLHRDLGVPESRRPTVEQGLGQLSNLLNSKLFLTKFIHTLESQRTFSARDRAYVASLLTVALHGKLEYFTDILRTLLSDLVAQYVAKNPKLMLRRTETVVEKLLTNWMSICLYTFVRDSVGEPLYMLFRGIKHQVDKGPVDSVTGKAKYTLNDNRLLREDVEYRPLTLNALLAVGPGAGEAQGVPVKVLDCDTISQAKEKMLDQLYKGVPLTQRPDPRTLDVEWRSGVAGHLILSDEDVTSEVQGLWRRLNTLQHYKVPDGATVALVPCLTKHVLRENQDYVPGERTPMLEDVDEGGIRPWHLVKPSDEPEPPRPRRGSLRGGERERAKAIPEIYLTRLLSMKGTLQKFVDDLFQVILSTSRPVPLAVKYFFDLLDEQAQQHGISDQDTIHIWKTNSLPLRFWINIIKNPQFVFDVQTSDNMDAVLLVIAQTFMDACTLADHKLGRDSPINKLLYARDIPRYKRMVERYYADIRQTVPASDQEMNSVLAELSWVRPPSASWVGHRPPATTVLPPSHCPFAGKPLGTSA

SEQ ID NO: 768323 - protein, 264 aa, Homo sapiens [sequence omitted]

SEQ ID NO: 768324 - protein, 147 aa, Homo sapiens
PQTLLKQVDLGCLPTKEAPLLYPVLSPSGTPGLGSLGHGGDSASHCSAHPILYLSGPLLPQPFPGVLGCLLWLSAPLVSLTFHLASSLNYSGDLGARVALHELYKYINKYYDQIITALEEDGTAQKMQLGYRLQQIAAAVENKVTDL

SEQ ID NO: 768325 - protein, 1344 aa, Homo sapiens
MPALGPALLQALWAGWVLTLQPLPPTAFTPNGTYLQHLARDPTSGTLYLGATNFLFQLSPGLQLEATVSTGPVLDSRDCLPPVMPDECPQAQPTNNPNQLLLVSPGALVVCGSVHQGVCEQRRLGQLEQLLLRPERPGDTQYVAANDPAVSTVGLVAQGLAGEPLLFVGRGYTSRGVGGGIPPITTRALWPPDPQAAFSYEETAKLAVGRLSEYSHHFVSAFARGASAYFLFLRRDLQAQSRAFRAYVSRVCLRDQHYYSYVELPLACEGGRYGLIQAAAVATSREVAHGEVLFAAFSSAAPPTVGRPPSAAAGASGASALCAFPLDEVDRLANRTRDACYTREGRAEDGTEVAYIEYDVNSDCAQLPVDTLDAYPCGSDHTPSPMASRVPLEATPILEWPGIQLTAVAVTMEDGHTIAFLGDSQGQLHRVYLGPGSDGHPYSTQSIQQGSAVSRDLTFDGTFEHLYVMTQSTLLKVPVASCAQHLDCASCLAHRDPYCGWCVLLGRCSRRSECSRGQGPEQWLWSFQPELGCLQVAAMSPANISREETREVFLSVPDLPPLWPGESYSCHFGEHQSPALLTGSGVMCPSPDPSEAPVLPRGADYVSVSVELRFGAVVIAKTSLSFYDCVAVTELRPSAQCQACVSSRWGCNWCVWQHLCTHKASCDAGPMVASHQSPLVSPDPPARGGPSPSPPTAPKALATPAPDTLPVEPGAPSTATASDISPGASPSLLSPWGPWAGSGSISSPGSTGSPLHEEPSPPSPQNGPGTAVPAPTDFRPSATPEDLLASPLSPSEVAAVPPADPGPEALHPTVPLDLPPATVPATTFPGAMGSVKPALDWLTREGGELPEADEWTGGDAPAFSTSTLLSGDGDSAELEGPPAPLILPSSLDYQYDTPGLWELEEATLGASSCPCVESVQGSTLMPVHVEREIRLLGRNLHLFQDGPGDNECVMELEGLEVVVEARVECEPPPDTQCHVTCQQHQLSYEALQPELRVGLFLRRAGRLRVDSAEGLHVVLYDCSVGHGDCSRCQTAMPQYGCVWCEGERPRCVTREACGEAEAVATQCPAPLIHSVEPLTGPVDGGTRVTIRGSNLGQHVQDVLGMVTVAGVPCAVDAQEYEVSSSLVCITGASGEEVAGATAVEVPGRGRGVSEHDFAYQDPKVHSIFPARGPRAGGTRLTLNGSKLLTGRLEDIRVVVGDQPCHLLPEQQSEQLRCETSPRPTPATLPVAVWFGATERRLQRGQFKYTLDPNITSAGPTKSFLSGGREICVRGQNLDVVQTPRIRVTVVSRMLQPSQGLGRRRRVVPETACSLGPSCSSQQFREPCHATPPSSPRHPCWYRAQ

SEQ ID NO: 768326 - protein, 693 aa, Homo sapiens [sequence omitted]

SEQ ID NO: 768327 - protein, 84 aa, Homo sapiens
MPALGPALLQALWAGWVLTLQPLPPTAFTPNGTYLQHLARDPTSGTLYLGATNFLFQLSPGLQLEATVSTGPVLDSRDCLPPVM

SEQ ID NO: 768328 - protein, 360 aa, Homo sapiens [sequence omitted]

SEQ ID NO: 768329 - protein, 119 aa, Homo sapiens
MSSKFFLVALAIFFSFAQVVIEANSWWSLGMNNPVQMSEVYIIGAQPLCSQLAGLSQGQKKLCHLYQDHMQYIGEGAKTGIKECQYQFRHRRWNCSTVDNTSVFGRVMQIGRKTFKIFF

SEQ ID NO: 768330 - protein, 210 aa, Homo sapiens
MSEEQFGGDGAAAAATAAVGGSAGEQEGAMVAATQGAAAAAGSGAGTGGGTASGGTEGGSAESEGAKIDASKNEEDEGHSNSSPRHSEAATAQREEWKMFIGGLSWDTTKKDLKDYFSKFGEVVDCTLKLDPITGRSRGFGFVLFKESESVDKVMDQKEHKLNGKVIDPKRAKAMKTKEPVKKIFVGGLSPDTPEEKIREYFGGLVRWNP

SEQ ID NO: 768331 - protein, 210 aa, Homo sapiens; identical to SEQ ID NO: 768330

SEQ ID NO: 768332 - protein, 191 aa, Homo sapiens
MSEEQFGGDGAAAAATAAVGGSAGEQEGAMVAATQGAAAAAGSGAGTGGGTASGGTEGGSAESEGAKIDASKNEEDEGKMFIGGLSWDTTKKDLKDYFSKFGEVVDCTLKLDPITGRSRGFGFVLFKESESVDKVMDQKEHKLNGKVIDPKRAKAMKTKEPVKKIFVGGLSPDTPEEKIREYFGGLVRWNP

SEQ ID NO: 768333 - protein, 179 aa, Homo sapiens
MSEEQFGGDGAAAAATAAVGGSAGEQEGAMVSEGAKIDASKNEEDEGHSNSSPRHSEAATAQREEWKMFIGGLSWDTTKKDLKDYFSKFGEVVDCTLKLDPITGRSRGFGFVLFKESESVDKVMDQKEHKLNGKVIDPKRAKAMKTKEPVKKIFVGGLSPDTPEEKIREYFGGLVRWNP

SEQ ID NO: 768334 - protein, 112 aa, Homo sapiens
MFIGGLSWDTTKKDLKDYFSKFGEVVDCTLKLDPITGRSRGFGFVLFKESESVDKVMDQKEHKLNGKVIDPKRAKAMKTKEPVKKIFVGGLSPDTPEEKIREYFGGLVRWNP

SEQ ID NO: 768335 - protein, 191 aa, Homo sapiens; identical to SEQ ID NO: 768332

SEQ ID NO: 768336 - protein, 210 aa, Homo sapiens; identical to SEQ ID NO: 768330

SEQ ID NO: 768337 - protein, 210 aa, Homo sapiens; identical to SEQ ID NO: 768330

SEQ ID NO: 768338 - protein, 181 aa, Homo sapiens
MVAATQGAAAAAGSGAGTGGGTASGGTEGGSAESEGAKIDASKNEEDEGHSNSSPRHSEAATAQREEWKMFIGGLSWDTTKKDLKDYFSKFGEVVDCTLKLDPITGRSRGFGFVLFKESESVDKVMDQKEHKLNGKVIDPKRAKAMKTKEPVKKIFVGGLSPDTPEEKIREYFGGLVRWNP

SEQ ID NO: 768339 - protein, 198 aa, Homo sapiens
MTTVYTSQVRQNYHQDSEAAINRQIKPGALRTSYVNLFHGLTTFGPAMHVASNELWPILPSPNLMRSREHAENPDEGCRTNEVAESPFGVLRTRPVTDWESRLNAWRGAYTWDHCEPAPTELHQMALAKVTPHRGVYVEAPYSFLLSVKASKRLGAQLHHVATRSRPRNGLRDIFCENTLLHVIYDTNRILPQSGSNR

SEQ ID NO: 768340 - protein, 77 aa, Homo sapiens
MEYHPDLENLDEDGYTQLHFDSQSNTRIAVVSEKGSCAASPPWRLIAVILGILCLVILVIAVVLGTMAGFKAVEFKG

SEQ ID NO: 768341 - protein, 132 aa, Homo sapiens
MEYHPDLENLDEDGYTQLHFDSQSNTRIAVVSEKGSCAASPPWRLIAVILGILCLVILVIAVVLGTMGVLSSPCPPNWIIYEKSCYLFSMSLNSWDGSKRQCWQLGSNLLKIDSSNELVSVDFCYDYLWCVS

SEQ ID NO: 768342 - protein, 247 aa, Homo sapiens
MEYHPDLENLDEDGYTQLHFDSQSNTRIAVVSEKGSCAASPPWRLIAVILGILCLVILVIAVVLGTMAIWRSNSGSNTLENGYFLSRNKENHSQPTQSSLEDSVTPTKAVKTTGVLSSPCPPNWIIYEKSCYLFSMSLNSWDGSKRQCWQLGSNLLKIDSSNELGFIVKQVSSQPDNSFWIGLSRPQTEVPWLWEDGSTFSSNLFQIRTTATQENPSPNCVWIHVSVIYDQLCSVPSYSICEKKFSM

SEQ ID NO: 768343 - protein, 116 aa, Homo sapiens
MEYHPDLENLDEDGYTQLHFDSQSNTRIAVVSEKGSCAASPPWRLIAVILGILCLVILVIAVVLGTMGTGQFLKDLSFLNNRRKLFGDPIQEATHWRMATFYQEIKRTTVNPHNHL

SEQ ID NO: 768344 - protein, 189 aa, Homo sapiens
MEYHPDLENLDEDGYTQLHFDSQSNTRIAVVSEKGSCAASPPWRLIAVILGILCLVILVIAVVLGTMAIWRSNSGSNTLENGYFLSRNKENHSQPTQSSLEDSVTPTKAVKTTGVLSSPCPPNWIIYEKSCYLFSMSLNSWDGSKRQCWQLGSNLLKIDSSNELISDQNHSYPRKPISKLCMDSRVSHL

SEQ ID NO: 768345 - protein, 168 aa, Homo sapiens
MEYHPDLENLDEDGYTQLHFDSQSNTRIAVVSEKGVLSSPCPPNWIIYEKSCYLFSMSLNSWDGSKRQCWQLGSNLLKIDSSNELGFIVKQVSSQPDNSFWIGLSRPQTEVPWLWEDGSTFSSNLFQIRTTATQENPSPNCVWIHVSVIYDQLCSVPSYSICEKKFSM

SEQ ID NO: 768346 - protein, 146 aa, Homo sapiens
MEYHPDLENLDEDGYTQLHFDSQSNTRIAVVSEKGSCAASPPWRLIAVILGILCLVILVIAVVLGTMGVLSSPCPPNWIIYEKSCYLFSMSLNSWDGSKRQCWQLGSNLLKIDSSNELSLTLLPKLECSEAATSQAQVILPPQLPE

SEQ ID NO: 768347 - protein, 168 aa, Homo sapiens
MEYHPDLENLDEDGYTQLHFDSQSNTRIAVVSEKGSCAASPPWRLIAVILGILCLVILVIAVVLGTMGVLSSPCPPNWIIYEKSCYLFSMSLNSWDGSKRQCWQLGSNLLKIDSSNELGFIVKQVSSQPDNSFWIGLSRPQTEVPWLWEDGSTFSSNFLTSFLLAAQA

SEQ ID NO: 768348 - protein, 201 aa, Homo sapiens
MEYHPDLENLDEDGYTQLHFDSQSNTRIAVVSEKGSCAASPPWRLIAVILGILCLVILVIAVVLGTMGVLSSPCPPNWIIYEKSCYLFSMSLNSWDGSKRQCWQLGSNLLKIDSSNELGFIVKQVSSQPDNSFWIGLSRPQTEVPWLWEDGSTFSSNLFQIRTTATQENPSPNCVWIHVSVIYDQLCSVPSYSICEKKFSM

SEQ ID NO: 768349 - protein, 247 aa, Homo sapiens; identical to SEQ ID NO: 768342

SEQ ID NO: 768350 - protein, 143 aa, Homo sapiens
MEYHPDLENLDEDGYTQLHFDSQSNTRIAVVSEKGSCAASPPWRLIAVILGILCLVILVIAVVLGTMGVLSSPCPPNWIIYEKSCYLFSMSLNSWDGSKRQCWQLGSNLLKIDSSNELISDQNHSYPRKPISKLCMDSRVSHL

SEQ ID NO: 768351 - protein, 192 aa, Homo sapiens
MEYHPDLENLDEDGYTQLHFDSQSNTRIAVVSEKGSCAASPPWRLIAVILGILCLVILVIAVVLGTMAIWRSNSGSNTLENGYFLSRNKENHSQPTQSSLEDSVTPTKAVKTTGVLSSPCPPNWIIYEKSCYLFSMSLNSWDGSKRQCWQLGSNLLKIDSSNELSLTLLPKLECSEAATSQAQVILPPQLPE

SEQ ID NO: 768352 - protein, 123 aa, Homo sapiens
MEYHPDLENLDEDGYTQLHFDSQSNTRIAVVSEKGSCAASPPWRLIAVILGILCLVILVIAVVLGTMGEYLVEEINNRQFSKQLLCARHSFKGLTCIIYFNLYIIWFYLYWVGAVNAHFTYKG

SEQ ID NO: 768353 - protein, 45 aa, Homo sapiens
MEYHPDLENLDEDGYTQLHFDSQSNTRIAVVSEKGIYSKTSVFPT

SEQ ID NO: 768354 - protein, 255 aa, Homo sapiens
MGITALNYGEMFKTPSKGVTDSIVEDWDWAPLEVDGKISSYGKEPITAQLERSQASCETVWNLIAMILLLTSGSDIFCSRNFKQIRDKKKINLLKNIDEKLTEAARELGYSLEQRTVKMKQRDKKVVTKTFHGAGLVVPVDKNDVGYRELPETDADLKRICKTIVEAASDEERLKAFAPIQEMMTFVQFANDECDYGMGLELGMDLFCYGSHYFHKVAGQLLPLAYNLLKRNLFAEIIEEHLANRSQENIDQLAA

SEQ ID NO: 768355 - protein, 314 aa, Homo sapiens
FYYDPPEFQENHYKLSLPEDFYHFWKFCEELDPEKPSDSLSASLGLQLVGPYDILAGKHKTKKKSTGLNFNLHWRFYYDPPEFQTIIIGDNKTQYHMGYFRDSPDEFPVYVGINEAKKNCIIVPNGDNVFAAVKLFLTKKLKEITDKKKINLLKNIDEKLTEAARELGYSLEQRTVKMKQRDKKVVTKTFHGAGLVVPVDKNDVGYRELPETDADLKRICKTIVEAASDEERLKAFAPIQEMMTFVQFANDECDYGMGLELGMDLFCYGSHYFHKVAGQLLPLAYNLLKRNLFAEIIEEHLANRSQENIDQLAA

SEQ ID NO: 768356 - protein, 346 aa, Homo sapiens
MVGGGGKRRPGGEGPQCEKTTDVKKSKFCEADVSSDLRKEVENHYKLSLPEDFYHFWKFCEELDPEKPSDSLSASLGLQLVGPYDILAGKHKTKKKSTGLNFNLHWRFYYDPPEFQTIIIGDNKTQYHMGYFRDSPDEFPVYVGINEAKKNCIIVPNGDNVFAAVKLFLTKKLKEITDKKKINLLKNIDEKLTEAARELGYSLEQRTVKMKQRDKKVVTKTFHGAGLVVPVDKNDVGYRELPETDADLKRICKTIVEAASDEERLKAFAPIQEMMTFVQFANDECDYGMGLELGMDLFCYGSHYFHKVAGQLLPLAYNLLKRNLFAEIIEEHLANRSQENIDQLAA

SEQ ID NO: 768357 - protein, 346 aa, Homo sapiens; identical to SEQ ID NO: 768356

SEQ ID NO: 768358 - protein, 160 aa, Homo sapiens
MNGPAGLAGGCKNMLSPKIRQARRARSKSLVMGEQSRSPGRMPCPHRLGPVLKAGWLKKQRSIMKNWQQRWFVLRGDQLFYYKDKDEIKPQGFISLQGTQVTDFLLGPEDPGKHLFEISPGGAGEREKVPANPEALLLMASSQRDMEDWVQAIRRVIWAP

SEQ ID NO: 768359 - protein, 504 aa, Homo sapiens
MDSNHQSNYKLSKTEKKFLRKQIKAKHTLLRHEGIETVSYATQSLVVANGGLGNGVSRNQLLPVLEKCGLVDALLMPPNKPYSFARYRTTEESKRAYVTLNGKEVVDDLGQKITLYLNFVEKVQWKELRPQALPPGLMVVEEIISSEEEKMLLESVDWTEDTDNQNSQKSLKHRRVKHFGYEFHYENNNVDKDKPLSGGLPDICESFLEKWLRKGYIKHKPDQMTINQMNLGKIVMDFKHPDGIAVPVMLPRRSLLVMTGESRYLWTHGITCRKFDTVQASESLKSGIITSDVGDLTLSKRGLRTSFTFRKVRQTPCNCKRRVAALQEIVRLLRPGGKALIYVWAMEQEYNKQKSKYLRGNRNSQGKKEEMNSDTSVQRSLVEQMRDMGSRDSASSVPRINDSQEGGCNSRQVSNSKLPVHVNRTSFYSQDVLVPWHLKGNPDKGKPVEPFGPIGSQDPSPVFHRYYHVFREGELEGACRTVSDVRILQSYYDQGNWCVILQKA

SEQ ID NO: 768360 - protein, 504 aa, Homo sapiens; identical to SEQ ID NO: 768359

SEQ ID NO: 768361 - protein, 315 aa, Homo sapiens
DSQRKETPPSFPESDKEASRLEQEYVHQVYEEIAGHFSSTRHTPWPHIVEFLKALPSGSIVADIGCGNGKYLGINKELYMIGCDRSQNLVDICRERQFQAFVCDALAVPVRSGSCDACISIAVIHHFATAERRVAALQEIVRLLRPGGKALIYVWAMEQEYNKQKSKYLRGNRNSQGKKEEMNSDTSVQRSLVEQMRDMGSRDSASSVPRINDSQEGGCNSRQVSNSKLPVHVNRTSFYSQDVLVPWHLKGNPDKGKPVEPFGPIGSQDPSPVFHRYYHVFREGELEGACRTVSDVRILQSYYDQGNWCVILQKA

SEQ ID NO: 768362 - protein, 315 aa, Homo sapiens; identical to SEQ ID NO: 768361

SEQ ID NO: 768363 - protein, 203 aa, Homo sapiens
MSHAEDDRYRPARALARIERRVAALQEIVRLLRPGGKALIYVWAMEQEYNKQKSKYLRGNRNSQGKKEEMNSDTSVQRSLVEQMRDMGSRDSASSVPRINDSQEGGCNSRQVSNSKLPVHVNRTSFYSQDVLVPWHLKGNPDKGKPVEPFGPIGSQDPSPVFHRYYHVFREGELEGACRTVSDVRILQSYYDQGNWCVILQKA

SEQ ID NO: 768364 - protein, 150 aa, Homo sapiens
LWKLCSLALCNKSCCCSLFGSTLPLRAVTLTAKVCSFTPEASETTNPPGGTNNSRCAALRAVTLTAKVCSFSPKPARPRTHQKEETLNTSKHQKEQTLDMPPLRTVTLTTRVRGFILEVSETKNPPIPDTFWQPQRDYHLLPSGETIAKW

SEQ ID NO: 768365 - protein, 119 aa, Homo sapiens
PLPPPLPQGSSFPLGAPLFLDGRADATAPLSCPQGVLSLGGGRRPGLWSHSQALLRTTWCPSQSSSECPEYGDKKVKPACLLTQWNILWPNQRKTLRILVTPGNVLLREKSRTTMLCGY

SEQ ID NO: 768366 - protein, 334 aa, Homo sapiens
SHEGELPDGEVPFLSPKEEPLKKRKRKERQVRHGSHPALSSEFVMKDLLHKGKSNTGEVFQTVMLERQESQDIEGCSFREVQKNTHGLEYQCRDAEGNYKGVLLTQEGNLTHGRDEHDKRDARNKLIKNQLGLSLQSHLPELQLFQYEGKIYECNQVEKSFNNNSSVSPPQQMPYNVKTHISKKYLKDFISSLLLTQGQKANNWGSPYKSDGCGMVFPQNSHLASHQRSHTKEKPYKCYECGKAFRTRSNLTTHQVIHTGEKRYKCNECGKVFSRNSQLSQHQKIHTGEKPYKCNECGKVFTQNSHLVRHRGIHTGEKPYKCNECGKPLVSVQA

SEQ ID NO: 768367 - protein, 839 aa, Homo sapiens
MALTQGQVTFRDVAIEFSQEEWTCLDPAQRTLYRDVMLENYRNLASLGISCFDLSIISMLEQGKEPFTLESQVQIAGNPDGWEWIKAVITALSSEFVMKDLLHKGKSNTGEVFQTVMLERQESQDIEGCSFREVQKNTHGLEYQCRDAEGNYKGVLLTQEGNLTHGRDEHDKRDARNKLIKNQLGLSLQSHLPELQLFQYEGKIYECNQVEKSFNNNSSVSPPQQMPYNVKTHISKKYLKDFISSLLLTQGQKANNWGSPYKSDGCGMVFPQNSHLASHQRSHTKEKPYKCYECGKAFRTRSNLTTHQVIHTGEKRYKCNECGKVFSRNSQLSQHQKIHTGEKPYKCNECGKVFTQNSHLVRHRGIHTGEKPYKCNECGKAFRARSSLAIHQATHSGEKPYKCNECGKVFTQNSHLTNHWRIHTGEKPYKCNECGKAFGVRSSLAIHLVIHTGEKPYKCHECGKVFRRNSHLARHQLIHTGEKPYKCNECGKAFRAHSNLTTHQVIHTGEKPYKCNECGKVFTQNSHLANHQRIHTGVKPYMCNECGKAFSVYSSLTTHQVIHTGEKPYKCNECGKVFTQNSHLARHRGIHTGEKPYKCNECGKVFRHNSYLSRHQRIHTGEKPYKYNEYGKAFSEHSNLTTHQVIHTGEKPYKCNECGKVFTQNSHLARHRRVHTGGKPYQCNECGKAFSQTSKLARHQRVHTGEKPYECNQCGKAFSVRSSLTTHQAIHTGKKPYKCNECGKVFTQNSHLARHRGIHTGEKPYKCNECGKAFSQTSKLARHQRIHTGEKPYECGKPFSICSSLTTHQTIHTGGKPYKCNVWKVLKSEFKPCKPSQNS

SEQ ID NO: 768368 - protein, 113 aa, Homo sapiens
AHARTGSRRLLTKCFHCDHCYLCWVQVPKCHPSLSRGAGAQAVPRPPCGLGVHTLPKPLPWCRAGRRRTRAPPRNSGLCPNLKDHQEENFQRPLAQEWPVSLGIGFQAEARPE

SEQ ID NO: 768369 - protein, 161 aa, Homo sapiens
MNPGGRACSEPRLHHCTPAWATEQDSVSKKKKKEGVRVSSPIELLLSEAECIPRSFCRGLATPSQPQWMGKLLSPLEVQFLTPRVSAGLEAKLALNCIDSSGARGGDLESQSAASGRHHKCPQAWAGWPSSFTLGDGHLKQNSGGFASVLCFHLIVGGEVG

SEQ ID NO: 768370 - protein, 190 aa, Homo sapiens
SCVTLCEHYLTTTLMGYLSTGCLPTLGGSPLPFVLSPCMRPETNVPPMWLNPRLFPLASPQGWHTSCGPPRPVRPFLGPHVYSPSGHSVELAGSSESSGVPDPQEHQYSAQTSRDPVGMRRKGASWVWARDTPAARGSGGSAGLAMPAGRRTVGRHSSLGVQALRLEVGRVAYCLLWTSCRKIGRDCRCY

SEQ ID NO: 768371 - protein, 73 aa, Homo sapiens
HASRTRGSTHACANMVFRRFVWRLAGWPIVSFGPHAGKLVAIVDVIDQNRALVDGPCTSSEETGHAFQVHAAH

SEQ ID NO: 768372 - protein, 222 aa, Homo sapiens
MVFRRFVEVGRVAYVSFGPHAGKLVAIVDVIDQNRALVDGPCTQVRRQAMPFKCMQLTDFILKFPHSAHQKYVRQAWQKADINTKWAATRWAKKIEARERKAKMTDFDRFKVMKAKKMRNRIIKNEVKKLQKAALLKSSPKKAPGTKGTAAAAAAAAAAAAAAAAAKVPAKKITAASKKAPAQKVPAQKATGQKAAPAPKAQKGQKAPAQKAPAPKASGKKA

SEQ ID NO: 768373 - protein, 104 aa, Homo sapiens
LLNPRPYDLPKKHLVLRVLLLLLLLAAAAAAAAAAAAAAAAAKVPAKKRSPPRVKRLQAQKVPAQKGQQARKAAPAPKKLQKGQKSSRPRKAPASKRASGQGKA

SEQ ID NO: 768374 - protein, 62 aa, Homo sapiens
MDLALQVRRQAMPFKCMQLTDFILKFPHSAHQKYVRQAWQKADINTHVQPGTETRHSLLLAH

SEQ ID NO: 768375 - protein, 101 aa, Homo sapiens
  misc_feature (31)..(31): Xaa can be any naturally occurring amino acid
LYSLLPPDLPLTLAELGSLCECLSLEVPPSXGGLSSWSRPALGPLCEISMLSGDPKSFLTCSVSSNLPMSDVRLLLLLLLLLLLLLLLLLKFQQQKDHRRE

SEQ ID NO: 768376 - protein, 96 aa, Homo sapiens
TKSTAAPPKKAPGTKGTAAAAAAAAAAAAAAAAAKVPAKKRSPPRVKRLQAQKVPAQKGQQARKAAPAPKKLQKGQKSSRPRKAPASKRASGQGKA

SEQ ID NO: 768377 - protein, 93 aa, Homo sapiens
  misc_feature (2)..(2): Xaa can be any naturally occurring amino acid
  misc_feature (10)..(10): Xaa can be any naturally occurring amino acid
GXSPGMHRPXACCCAAAAAAAAAAAAAAAAAKVPAKKRSPPRVKRLQAQKVPAQKGQQARKAAPAPKKLQKGQKSSRPRKAPASKRASGQGKA

SEQ ID NO: 768378 - protein, 91 aa, Homo sapiens
  misc_feature (59)..(59): Xaa can be any naturally occurring amino acid
LHPITADPPNRQPRHQCGASAAGATTPSQRSQLEAYSTLLANMGSLSQTPGHKGLCHGXAATALLLLLLLLLLLLLLLLLKFQQQKDHRRE

SEQ ID NO: 768379 - protein, 152 aa, Homo sapiens
  misc_feature (19)..(19): Xaa can be any naturally occurring amino acid
QIHLKSVSGPIEVLLVNRXHGAHPLWLCLCHHLKIAPEPICCFYTPPLPKPALAQSQEASRPNSPQLTPTAVPGSAEVQGMAGPAAEITVSGGPGTDSKDSGELQFTPTGPNNTGHPATAVFCPLLLLLLLLLLLLLLLLLKFQQQKDHRRE

SEQ ID NO: 768380 - protein, 82 aa, Homo sapiens
GGAFFYTCAGLGGSSSFSPNAANMVFRRFVWRLAGWPIVSFGPHAGKLVAIVDVIDQNRALVDGPCTSSEETGHAFQVHAAH

SEQ ID NO: 768381 - protein, 82 aa, Homo sapiens; identical to SEQ ID NO: 768380

SEQ ID NO: 768382 - protein, 82 aa, Homo sapiens; identical to SEQ ID NO: 768380

SEQ ID NO: 768383 - protein, 82 aa, Homo sapiens; identical to SEQ ID NO: 768380

SEQ ID NO: 768384 - protein, 139 aa, Homo sapiens
SSSSWFGVYSERWCLAVSERWCLAVSDRWCLAVSDRWCLARATLSCFGCAMPMYQVKPYHGVCAPLRTVPTRSMSDKPGRRQTSIQNGQPHDGPRRLKPRERKAKMTDFDRFKVMKATEHNEEQNNQRMKLRSFKRQLS

SEQ ID NO: 768385 - protein, 71 aa, Homo sapiens
GRENKSTARCEAGWCAAGERVEGPAGLARLGPRVRASAAGAGWLMRLVVREPCPAVWALRTWELVGVGNRA

SEQ ID NO: 768386 - protein, 81 aa, Homo sapiens
YPSTLYTSGLWSMDLALQVRRQAMPFKCMQLTDFILKFPHSAHQKYVRQAWQKADINTKWAATRWAKKIEAQRKESQDDRF

SEQ ID NO: 768387 - protein, 85 aa, Homo sapiens
GPRVYHAVLISPGLWSMDLALQVRRQAMPFKCMQLTDFILKFPHSAHQKYVRQAWQKADINTKWAATRWAKKIEAQRKESQDDRF

SEQ ID NO: 768388 - protein, 71 aa, Homo sapiens; identical to SEQ ID NO: 768385

SEQ ID NO: 768389 - protein, 98 aa, Homo sapiens
LWKHQFAWPFRQPVDAVKLGLPIPTSGWERTTVAKILSFFLSLMQPMDSQPQRFPPRVGRGPRWPKFLASSFPSCSPWIASPRGLSQNYKTAYGHGYY

SEQ ID NO: 768390 - protein, 71 aa, Homo sapiens; identical to SEQ ID NO: 768385

SEQ ID NO: 768391 - protein, 73 aa, Homo sapiens; identical to SEQ ID NO: 768371

SEQ ID NO: 768392 - protein, 190 aa, Homo sapiens; identical to SEQ ID NO: 768370

SEQ ID NO: 768393 - protein, 93 aa, Homo sapiens; identical to SEQ ID NO: 768377
  misc_feature (2)..(2): Xaa can be any naturally occurring amino acid
  misc_feature (10)..(10): Xaa can be any naturally occurring amino acid

SEQ ID NO: 768394 - protein, 61 aa, Homo sapiens
MSDKPGRRQTSIQNGQPHDGPRRLKPRERKAKMTDFDRFKVMKATEHNEEQNNRRSRDGPA

SEQ ID NO: 768395 - protein, 94 aa, Homo sapiens
HASRTRGSTHACANMAAAAAAAAAAAAAAAAAKVPAKKRSPPRVKRLQAQKVPAQKGQQARKAAPAPKKLQKGQKSSRPRKAPASKRASGQGKA

SEQ ID NO: 768396 - protein, 87 aa, Homo sapiens
  misc_feature (8)..(8): Xaa can be any naturally occurring amino acid
  misc_feature (18)..(18): Xaa can be any naturally occurring amino acid
DLFNCPSXLNVKKHCQAXPPLRLESMSPDEQNSQTPISDPNSNDGQSDPLPNSSNSVVPLLLLLLLLLLLLLLLLLKFQQQKDHRRE

SEQ ID NO: 768397 - protein, 82 aa, Homo sapiens; identical to SEQ ID NO: 768380

SEQ ID NO: 768398 - protein, 82 aa, Homo sapiens; identical to SEQ ID NO: 768380

SEQ ID NO: 768399 - protein, 82 aa, Homo sapiens; identical to SEQ ID NO: 768380

SEQ ID NO: 768400 - protein, 82 aa, Homo sapiens; identical to SEQ ID NO: 768380

SEQ ID NO: 768401 - protein, 229 aa, Homo sapiens
MLLIRTGLWSMDLALQVRRQAMPFKCMQLTDFILKFPHSAHQKYVRQAWQKADINTKWAATRWAKKIEAQRKGKAKMTDFDPLQGYAQGKAHMRQQEHHSKELHTLRKPFKQGQALPVKAFSQRKAPWVTKGVNLTAEMPDCLLALLPYTVPDEHTAFTGTPTLQKGLARPRQGFPVPESAPQAQKYDAALGSQTRAHDIGRAKDDVHRRQGKRTQVPKGARSGQKAQA

SEQ ID NO: 768402 - protein, 191 aa, Homo sapiens
MLLIRTGLWSMDLALQVRRQAMPFKCMQLTDFILKFPHSAHQKYVRQAWQKADINTKWAATRWAKKIEAQRKAKAKMTDFDRFDSYEGDMDECVVLLRNFGAGDPLIIFKYYGKVAEGPEVGFKDREGDFFMRSRVAVIIKVGDSHTTRKMSSGEEPRAFRSEHPLGATGGPLTGDPITRVLLRELLSIVP

SEQ ID NO: 768403 - protein, 190 aa, Homo sapiens; identical to SEQ ID NO: 768370

SEQ ID NO: 768404 - protein, 73 aa, Homo sapiens; identical to SEQ ID NO: 768371

SEQ ID NO: 768405 - protein, 70 aa, Homo sapiens
ASGCRRPPANGLRGRSGAAAPTFPGLRGSRDLVALWVSGGEQAPNLAEGTQAEPSGLPQDPVTWIAGGWR

SEQ ID NO: 768406 - protein, 69 aa, Homo sapiens
  misc_feature (13)..(13): Xaa can be any naturally occurring amino acid
RRQEIEQKLEVQXEEERKQVENERRELFEERRAKQTELRLLEQKVELRSCKKNGMNIIAGHEISRDRRL

SEQ ID NO: 768407 - protein, 79 aa, Homo sapiens
SAAARVGLWSMDLALQVRRQAMPFKCMQLTDFILKFPHSAHQKYVRQAWQKADINTKWAATRWAKKIEAQRKESQDDRF

SEQ ID NO: 768408 - protein, 71 aa, Homo sapiens; identical to SEQ ID NO: 768385

SEQ ID NO: 768409 - protein, 71 aa, Homo sapiens; identical to SEQ ID NO: 768385

SEQ ID NO: 768410 - protein, 71 aa, Homo sapiens; identical to SEQ ID NO: 768385

SEQ ID NO: 768411 - protein, 101 aa, Homo sapiens
LSVPASRGVPPPTAMGVLRARGEEGLALSPFLAGGASRLCDGAPKSQGGKTGSLSVAASRGVPPALRWGSQEPGGDEGLALCTRLSMGASPPAIGVLRARG

SEQ ID NO: 768412 - protein, 175 aa, Homo sapiens
RKLGFTGSTPIGKQIMKSCAVSNLKKVSLELGGKSPLIIFNDCELDKAVRMGMGAVFFNKGENCIAAGRLFVEESIHDEFVTRVVEEIKKMKIGDPLDRSTDHGPQNHKAHLEKLLQYCETGVKEGATLVYGGRQVQRPGFFMEPTVFTDVEDYMYLAKEESFGPIMVISKFQNG

SEQ ID NO: 768413 - protein, 324 aa, Homo sapiens
  misc_feature (3)..(3): Xaa can be any naturally occurring amino acid
  misc_feature (6)..(6): Xaa can be any naturally occurring amino acid
GAXPAXLAPRPPHQRRETRSSSRGRRTRRRRRSRRRMKDRTQELRSAKDSDDEEEVVHVDRDHFMDEFFEQVEEIRGCIEKLSEDVEQVKKQHSAILAAPNPDEKTKQELEDLTADIKKTANKVRSKLKAIEQSIEQEEGLNRSSADLRIRKTQHSTLSRKFVEVMTEYNATQSKYRDRCKDRIQRQLEITGRTTTNEELEDMLESGKLAIFTDDIKMDSQMTKQALNEIETRHNEIIKLETSIRELHDMFVDMAMLVESQGEMIDRIEYNVEHSVDYVERAVSDTKKAVKYQSKARRKKIMIIICCVVLGVVLASSIGGTLGL

SEQ ID NO: 768414 - protein, 233 aa, Homo sapiens
  misc_feature (3)..(3): Xaa can be any naturally occurring amino acid
  misc_feature (6)..(6): Xaa can be any naturally occurring amino acid
GAXPAXLAPRPPHQRRETRSSSRGRRTRRRRRSRRRMKDRTQELRSAKDSDDEEEVVHVDRDHFMDEFFEQVEEIRGCIEKLSEDVEQVKKQHSAILAAPNPDEKTKQELEDLTADIKKTANKVRSKLKAIEQSIEQEEGLNRSSADLRIRKTQHSTLSRKFVEVMTEYNATQSKYRDRCKDRIQRQLEITGRTTTNEELEDMLESGKLAIFTDDVSRGWGGLCFWKIFASPP

SEQ ID NO: 768415 - protein, 72 aa, Homo sapiens
RDSERRLTWESKAWLSCAHSGEGADPLRSAVKTSLQEATPASRGLWLRPLLNSGLAHHLRPSHPAVCAPYST

SEQ ID NO: 768416 - protein, 125 aa, Homo sapiens
MKIRRIPIERGSLPLTGTASGGSPGRAKRGSPAPTRESKQWLTCAHPGEQAWLTCAHSGKPAAILCCRQGAGGGRGADPLRSAVKTSLQEATPASRGLWLRPLLNSGLAHHLRPSHPAVCAPYST

SEQ ID NO: 768417 - protein, 172 aa, Homo sapiens
MLVSGRRRLLTALLQAQKWPFQPSRDMRLVQFRAPHLVGPHLGLETGNGGGVINLNAFDPTLPKTMTQFLEQGEATLSVARRALAAQLPVLPWSEVTFLAPVTWPDKVVCVGMNYVDHCKEQNVPVPKEPIIFSKFASSIVGPYDEVVLPPQSQVSASPLPSLVTGPITRAF

SEQ ID NO: 768418 - protein, 314 aa, Homo sapiens
MLVSGRRRLLTALLQAQKWPFQPSRDMRLVQFRAPHLVGPHLGLETGNGGGVINLNAFDPTLPKTMTQFLEQGEATLSVARRALAAQLPVLPWSEVTFLAPVTWPDKVVCVGMNYVDHCKEQNVPVPKEPIIFSKFASSIVGPYDEVVLPPQSQEVDWEVELAVVIGKKGKHIKATDAMAHVAGFTVAHDVSARDWLTRRNGKQWLLGKTFDTFCPLGPALVTKDSVADPHNLKICCRVNGEVVQSSNTNQMVFKTEDLIAWVSQFVTFYPGDVILTGTPPGVGVFRKPPVFLKKGDEVQCEIEELGVIINKVV

SEQ ID NO: 768419 - protein, 406 aa, Homo sapiens
MLVSGRRRLLTALLQAQKWPFQPSRDMRLVQFRAPHLVGPHLGLETGNGGGVINLNAFDPTLPKTMTQFLEQGEATLSVARRALAAQLPVLPWSEVTFLAPVTWPDKVVCVGMNYVDHCKEQNVPVPKEPIIFSKFASSIVGPYDEVVLPPQSQEVDWEVELAVVIGKKGKHIKVRWKGWAPGQSAAEAPAPASPSSDLTHRHMAPAVPDTRKQSASLLPDTAFPFTHLWLALATEHGITALRSLATGVGVTRDLTSCMAKSPAPKATDAMAHVAGFTVAHDVSARDWLTRRNGKQWLLGKTFDTFCPLGPALVTKDSVADPHNLKICCRVNGEVVQSSNTNQMVFKTEDLIAWVSQFVTFYPGDVILTGTPPGVGVFRKPPVFLKKGDEVQCEIEELGVIINKVV

SEQ ID NO: 768420 - protein, 314 aa, Homo sapiens; identical to SEQ ID NO: 768418

SEQ ID NO: 768421 - protein, 195 aa, Homo sapiens
MLVSGRRRLLTALLQAQKWPFQPSRDMRLVQFRAPHLVGPHLGLETGNGGGVINLNAFDPTLPKTMTQFLEQGEATLSVARRALAAQLPVLPWSEVTFLAPVTWPDKVVCVGMNYVDHCKEQNVPVPKEPIIFSKFASSIVGPYDEVVLPPQSQEVDWEVELAVVIGKKGKHIKVRWKGWAPRPECSRGPSSCLS

SEQ ID NO: 768422 - protein, 406 aa, Homo sapiens
MLVSGRRRLLTALLQAQKWPFQPSRDMRLVQFRAPHLVGPHLGLETGNGGGVINLNAFDPTLPKTMTQFLEQGEATLSVARRALAAQLPVLPWSEVTFLAPVTWPDKVVCVGMNYVDHCKEQNVPVPKEPIIFSKFASSIVGPYDEVVLPPQSQEVDWEVELAVVIGKKGKHIKVRWKGWAPRPECTEAPAPASPSSDLTHRHMAPAVPDTRKQSASLLPDTAFPFTHLWLALATEHGITALRSLATGVGVTRDLTSCMAKSPAPKATDAMAHVAGFTVAHDVSARDWLTRRNGKQWLLGKTFDTFCPLGPALVTKDSVADPHNLKICCRVNGEVVQSSNTNQMVFKTEDLIAWVSQFVTFYPGDVILTGTPPGVGVFRKPPVFLKKGDEVQCEIEELGVIINKVV

SEQ ID NO: 768423 - protein, 152 aa, Homo sapiens
MLVSGRRRLLTALLQAQKWPFQPSRDMRLVQFRAPHLVGPHLGLETGNGGGVINLNAFDPTLPKTMTQFLEQGEATLSVARRALAAQLPVLPWSEVTFLAPVTWPDKVVCVGMNYVDHCKEQNVPVPKEPIIFSKFASSIVGPYDEVVSHSA

SEQ ID NO: 768424 - protein, 314 aa, Homo sapiens; identical to SEQ ID NO: 768418

SEQ ID NO: 768425 - protein, 265 aa, Homo sapiens
MLVSGRRRLLTALLQAQKWPFQPSRDMRLVQFRAPHLVGPHLGLETGNGGGVINLNAFDPTLPKTMTQFLEQGEATLSVARRALAAQLPVLPWSEVTFLAPVTWPDKVVCVGMNYVDHCKEQNVPVPKEPIIFSKFASSIVGPYDEVVLPPQSQEVDWEVELAVVIGKKGKHIKATDAMAHVAGFTVAHDVSARDWLTRRNGKQWLLGKTFDTFCPLGPALVTKDSVADPHNLKICCRVNGEVVQSSNTNQMVFKTEDLIAWVSQ

SEQ ID NO: 768426 - protein, 65 aa, Homo sapiens
MQAAEISLEEKDQRIGELDRLIERMEKVGHSVGPIAHLPKLFPVGPSEIREALDMDSSHLQNLQL

SEQ ID NO: 768427 - protein, 408 aa, Homo sapiens
PSRVAPAQGGPRTLILPGRNAGVQPATDRRCGMLRSTSTVTLLSGGAARTPGAPSRRANVCRLRLTVPPESPVPEQCEKKIERKEQLLDLSNGEPTRKLPQGVVYGVVRRSDQNQQKEMVVYGWSTSQLKEEMNYIKDVRATLEKVRKRMYGDYDEMRQKIRQLTQELSVSHAQQEYLENHIQTQSSALDRFNAMNSALASDSIGLQKTLVDVTLENSNIKDQIRNLQQTYEASMDKLREKQRQLEVAQVENQLLKMKVESSQEANAEVMREMTKKLYSQYEEKLQEEQRKHSAEKEALLEETNSFLKAIEEANKKMQAAEISLEEKDQRIGELDRLIERMEKERHQLQLQLLEHETEMSGELTDSDKERYQQLEEASASLRERIRHLDDMVHCQQKKSSRWSRRLNH

SEQ ID NO: 768428 - protein, 464 aa, Homo sapiens
GQFRRVTVRTGQERRGGGKMAAPEERDLTQEQTEKLLQFQDLTGIESMDQCRHTLEQHNWNIEAAVQDRLNEQEGVPSVFNPPPSRPLQVNTADHRIYSYVVSRPQPRGLLGWGYYLIMLPFRFTYYTILDIFRFALRFIRPDPRSRVTDPVGDIVSFMHSFEEKYGRAHPVFYQGTYSQALNDAKRELRFLLVYLHGDDHQDSDEFCRNTLCAPEVISLINTRMLFWACSTNKPEGYRVSQALRENTYPFLAMIMLKDRRMTVVGRLEGLIQPDDLINQLTFIMDANQTYLVSERLEREERNQTQVLRQQQDEAYLASLRADQEKERKKREERERKRRKEEEVQQQKLAEERRRQNLQEEKERKLECLPPEPSPDDPESVKIIFKLPNDSRVERRFHFSQSLTVIHDFLFSLKESPEKFQIEANFPRRVLPCIPSEEWPNPPTLQEAGLSHTEVLFVQDLTDE

SEQ ID NO: 768429 - protein, 464 aa, Homo sapiens; identical to SEQ ID NO: 768428

SEQ ID NO: 768430 - protein, 464 aa, Homo sapiens; identical to SEQ ID NO: 768428

SEQ ID NO: 768431 - protein, 464 aa, Homo sapiens; identical to SEQ ID NO: 768428

SEQ ID NO: 768432 - protein, 464 aa, Homo sapiens; identical to SEQ ID NO: 768428

SEQ ID NO: 768433 - protein, 464 aa, Homo sapiens; identical to SEQ ID NO: 768428

SEQ ID NO: 768434 - protein, 464 aa, Homo sapiens; identical to SEQ ID NO: 768428

SEQ ID NO: 768435 - protein, 464 aa, Homo sapiens; identical to SEQ ID NO: 768428

SEQ ID NO: 768436 - protein, 109 aa, Homo sapiens
YGLQVNSDKGLKVGEVFTVDLGEAILFDCSADSHPPNTYSWIRRTDNTTYIIKHGPRLEVASEKVAQKTMDYVCCAYNNITGRQDETHFTVIITSVGMCDIQGRDPNKT

SEQ ID NO: 768437 - protein, 464 aa, Homo sapiens
LQVVKTLLDFGCHPSLQDSEGDTPLHDAISKKRDDILAVLLEAGADVTITNNNGFNALHHAALRGNPSAMRVLLSKLPRPWIVDEKKDDGYTALHLAALNNHVEVAELLVHQGNANLDIQNVNQQTALHLAVERQHTQIVRLLVRAGAKLDIQDKDGDTPLHEALRHHTLSQLRQLQDMQDVGKVDAAWEPSKNTLIMGLGTQGAEKKSAASIACFLAANGADLSIRNKKGQSPLDLCPDPNLCKALAKCHKEKVSGQVGSRSPSMISNDSETLEECMVCSDMKRDTLFGPCGHIATCSLCSPRVKKCLICKEQVQSRTKIEECVVCSDKKAAVLFQPCGHMCACENCANLMKKCVQCRAVVERRVPFIMCCGGKSSEDATDDISSGNIPVLQKDKDNTNVNADVQKLQQQLQDIKEQTMCPVCLDRLKNMIFLCGHGTCQLCGDRMSECPICRKAIERRILLY

SEQ ID NO: 768438 - protein, 735 aa, Homo sapiens
FFTNPTKNLVSITKDSELPTCSCLDRVIQKDKGPYYTHLGAGPSVAAVREIMENRYGQKGNAIRIEIVVYTGKEGKSSHGCPIAKWVLRRSSDEEKVLCLVRQRTGHHCPTAVMVVLIMVWDGIPLPMADRLYTELTENLKSYNGHPTDRRCTLNENRTCTCQGIDPETCGASFSFGCSWSMYFNGCKFGRSPSPRRFRIDPSSPLHEKNLEDNLQSLATRLAPIYKQYAPVAYQNQVEYENVARECRLGSKEGRPFSGVTACLDFCAHPHRDIHNMNNGSTVVCTLTREDNRSLGVIPQDEQLHVLPLYKLSDTDEFGSKEGMEAKIKSGAIEVLAPRRKKRTCFTQPVPRSGKKRAAMMTEVLAHKIRAVEKKPIPRIKRKNNSTTTNNSKPSSLPTLGSNTETVQPEVKSETEPHFILKSSDNTKTYSLMPSAPHPVKEASPGFSWSPKTASATPAPLKNDATASCGFSERSSTPHCTMPSGRLSGANAAAADGPGISQLGEVAPLPTLSAPVMEPLINSEPSTGVTEPLTPHQPNHQPSFLTSPQDLASSPMEEDEQHSEADEPPSDEPLSDDPLSPAEEKLPHIDEYWSDSEHIFLDANIGGVAIAPAHGSVLIECARRELHATTPVEHPNRNHPTRLSLVFYQHKNLNKPQHGFELNKIKFEAKEAKNKKMKASEQKDQAANEGPEQSSEVNELNQIPSHKALTLTHDNVVTVSPYALTHVAGPYNHWV

SEQ ID NO: 768439 - protein, 735 aa, Homo sapiens; identical to SEQ ID NO: 768438

SEQ ID NO: 768440 - protein, 106 aa, Homo sapiens
QLSPSSSALEGNRLKRQRRDLGEGRERAFRKRELTSEKEHRTGGGALWFSSLPCRRLGHPFLPGSVSPSLHPSLEGMAQRLHRSLGFCRARESPYFGKGELLLHGS

SEQ ID NO: 768441 - protein, 108 aa, Homo sapiens
CWEELPRCAEGPVLRKRNRESSTALEKHPNSPMTAKQILEVIQKEGLKETSSGRQKAQIKVGSVRFCFRPRHGLETALVCMKDLPPMKDLGQLSMMIILEPQLLSCWS

SEQ ID NO: 768442 - protein, 80 aa, Homo sapiens
MLNRMLELAGVAGIALEWFRSFLPVCSKQVTDEASSTRDSSLTNTAVQSKLVSSFQQHTKKALKQALRQQQKRRNGVSMM

SEQ ID NO: 768443 - protein, 132 aa, Homo sapiens
MKDKRKKKDRTWAEAARLALEKHPNSPMTAKQILEVIQKEGLKETSGTSPLACLNAMLHTNTRIGDGTFFKIPGKSGLYALKKEESSCPADGTLDLVCESELDGTDMAEANAHGEENGVMFGTTLQVQKMCI

SEQ ID NO: 768444 - protein, 707 aa, Homo sapiens
MQTSETGSDTGSTVTLQTSVASQAAVPTQVVQQVPVQQQVQQVQTVQQVQHVYPAQVQYVEGSDTVYTNGAIRTTTYPYTETQMYSQNTGGNYFDTQGSSAQVTTVVSSHSMVGTGGIQMGVTGGQLISSSGGTYLIGNSMENSGHSVTHTTRASPATIEMAIETLQKSDGLSTHRSSLLNSHLQWLLDNYETAEGVSLPRSTLYNHYLRHCQEHKLDPVNAASFGKLIRSIFMGLRTRRLGTRGNSKYHYYGIRVKPDSPLNRLQEDMQYMAMRQQPMQQKQRYKPMQKVDGVADGFTGSGQQTGTSVEQTVIAQSQHHQQFLDASRALPEFGEVEISSLPDGTTFEDIKSLQSLYREHCEAILDVVVNLQFSLIEKLWQTFWRYSPSTPTDGTTITESSNLSEIESRLPKAKLITLCKHESILKWMCNCDHGMYQALVEILIPDVLRPIPSALTQAIRNFAKSLEGWLSNAMNNIPQRMIQTKVAAVSAFAQTLRRYTSLNHLAQAARAVLQNTSQINQMLSDLNRVDFANVQEQASWVCQCDDNMVQRLETDFKMTLQQQSTLEQWAAWLDNVMMQALKPYEGRPSFPKAARQFLLKWSFYSSMVIRDLTLRSAASFGSFHLIRLLYDEYMFYLVEHRVAQATGETPIAVMGEVREAERAVTHWVIKNKPELHFSLNTLLIKTMVPNQVSLRARRDCGVIARVP

SEQ ID NO: 768445 - protein, 707 aa, Homo sapiens; identical to SEQ ID NO: 768444

SEQ ID NO: 768446 - protein, 707 aa, Homo sapiens; identical to SEQ ID NO: 768444

SEQ ID NO: 768447 - protein, 724 aa, Homo sapiens
MQTSETGSDTGSTVTLQTSVASQAAVPTQVVQQVPVQQQVQQVQTVQQVQHVYPAQVQYVEGSDTVYTNGAIRTTTYPYTETQMYSQNTGGNYFDTQGSSAQVTTVVSSHSMVGTGGIQMGVTGGQLISSSGGTYLIGNSMENSGHSVTHTTRASPATLQWLLDNYETAEGVSLPRSTLYNHYLRHCQEHKLDPVNAASFGKLIRSIFMGLRTRRLGTRGNSKYHYYGIRVKPDSPLNRLQEDMQYMAMRQQPMQQKQRYKPMQKVDGVADGFTGSGQQTGTSVEQTVIAQSQHHQQFLDASRALPEFGEVEISSLPDGTTFEDIKSLQSLYREHCEAILDVVVNLQFSLIEKLWQTFWRYSPSTPTDGTTITESSNLSEIESRLPKAKLITLCKHESILKWMCNCDHGMYQALVEILIPDVLRPIPSALTQAIRNFAKSLEGWLSNAMNNIPQRMIQTKVAAVSAFAQTLRRYTSLNHLAQAARAVLQNTSQINQMLSDLNRVDFANVQEQASWVCQCDDNMVQRLETDFKMTLQQQSTLEQWAAWLDNVMMQALKPYEGRPSFPKAARQFLLKWSFYSSMVIRDLTLRSAASFGSFHLIRLLYDEYMFYLVEHRVAQATGETPIAVMGEFGDLNAVSPGNLDKDEGSEVESEMDEELDDSSEPQAKREKTELSQAFPVGCMQPVLETGVQPSLLNPIHSEHIVTSTQTIRQCSATGNTYTAV

SEQ ID NO: 768448 - protein, 314 aa, Homo sapiens
GRTLGCELIPDVLMTYSSALTQAIRNFAKSLEGWLSNAMNNIPQRMIQTKVAAVSAFAQTLRRYTSLNHLAQAARAVLQNTSQINQMLSDLNRVDFANVQEQASWVCQCDDNMVQRLETDFKMTLQQQSTLEQWAAWLDNVMMQALKPYEGRPSFPKAARQFLLKWSFYSSMVIRDLTLRSAASFGSFHLIRLLYDEYMFYLVEHRVAQATGETPIAVMGEFGDLNAVSPGNLDKDEGSEVESEMDEELDDSSEPQAKREKTELSQAFPVGCMQPVLETGVQPSLLNPIHSEHIVTSTQTIRQCSATGNTYTAV

SEQ ID NO: 768449 - protein, 724 aa, Homo sapiens; identical to SEQ ID NO: 768447

SEQ ID NO: 768450 - protein, 634 aa, Homo sapiens
MQTSETGSDTGSTVTLQTSVASQAAVPTQVVQQVPVQQQVQQVQTVQQVQHVYPAQVQYVEGSDTVYTNGAIRTTTYPYTETQMYSQNTGGNYFDTQGSSAQVTTVVSSHSMVGTGGIQMGVTGGQLISSSGGTYLIGNSMENSGHSVTHTTRASPATLQWLLDNYETAEGVSLPRSTLYNHYLRHCQEHKLDPVNAASFGKLIRSIFMGLRTRRLGTRGNSKYHYYGIRVKPDSPLNRLQEDMQYMAMRQQPMQQKQRYKPMQKVDGVADGFTGSGQQTGTSVEQTVIAQSQHHQQFLDASRALPEFGEVEISSLPDGTTFEDIKSLQSLYREHCEAILDVVVNLQFSLIEKLWQTFWRYSPSTPTDGTTITESSNLSEIESRLPKAKLITLCKHESILKWMCNCDHGMYQALVEILIPDVLRPIPSALTQAIRNFAKSLEGWLSNAMNNIPQRMIQTKVAAVSAFAQTLRRYTSLNHLAQAARAVLQNTSQINQMLSDLNRVDFANVQEQASWVCQCDDNMVQRLETDFKMTLQQQSTLEQWAAWLDNVMMQALKPYEGRPSFPKAARQFLLKWSFYSSMVIRDLTLRSAASFGSFHLIRLLYDEYMFYLVEHRVAQATGETPIAVMGEVPM

SEQ ID NO: 768451 - protein, 174 aa, Homo sapiens
MQTSETGSDTGSTVTLQTSVASQAAVPTQVVQQVPVQQQVQQVQTVQQVQHVYPAQVQYVEGSDTVYTNGAIRTTTYPYTETQMYSQNTGGNYFDTQGSSAQVTTVVSSHSMVGTGGIQMGVTGGQLISSSGGTYLIGNSMENSGHSVTHTTRASPATLFLFSCVPFSLGQLSP

SEQ ID NO: 768452 - protein, 228 aa, Homo sapiens
MLSDLNRVDFANVQEQASWVCQCDDNMVQRLETDFKMTLQQQSTLEQWAAWLDNVMMQALKPYEGRPSFPKAARQFLLKWSFYSSMVIRDLTLRSAASFGSFHLIRLLYDEYMFYLVEHRVAQATGETPIAVMGEFGDLNAVSPGNLDKDEGSEVESEMDEELDDSSEPQAKREKTELSQAFPVGCMQPVLETGVQPSLLNPIHSEHIVTSTQTIRQCSATGNTYTAV

SEQ ID NO: 768453 - protein, 195 aa, Homo sapiens
MQTSETGSDTGSTVTLQTSVASQAAVPTQVVQQVPVQQQVQQVQTVQQVQHVYPAQVQYVEGSDTVYTNGAIRTTTYPYTETQMYSQNTGGNYFDTQGSSAQVTTVVSSHSMVGTGGIQMGVTGGQLISSSGGTYLIGNSMENSGHSVTHTTRASPATANSVPEMKLLRQITMNRLFPTLNHKLTEGSGPHFQSI

SEQ ID NO: 768454 - protein, 163 aa, Homo sapiens
MPCESSAIVTVVLATVTHQQQLLLSSSSSSSSSSSPPPPSPSPTNNTTIIHSQGHLVILAFYGREYVEFGSGRNMETIMQTSETGSDTGSTVTLQTSVASQAAVPTQVVQQVPVQQQVQQVQTVQQVQHVYPAQVQYVEGSDTVYTNGAMSRAPWSMILESSP

SEQ ID NO: 768455 - protein, 139 aa, Homo sapiens
CGPVAPGRPLLTRVRGLPRACTVGPEPRRGPGHAWGQRWRRRSGGVGRVRVQSPPHGRPAPRLPVTPTSLAPRAGTSAGSAPGRARFLGTRAVVPAPRRAFRHRRAFVLHPSPLFPTPRLTRAAPKWPCPPAWTTPQCP

SEQ ID NO: 768456 - protein, 144 aa, Homo sapiens
MRKIDLCLSSEGSEVILATSSDEKHPPENIIDGNPETFWTTTGMFPQEFIICFHKHVRIERLVIQSYFVQTLKIEKSTSKEPVDFEQWIEKDLVHTEGQLQNEEIVAHDGSATYLRFIIVSAFDHFASVHSVSAEGTVVSNLSS

SEQ ID NO: 768457 - protein, 189 aa, Homo sapiens
QGWAGEARVRGPRHEGGAGPGGGARPRAGDPRAEGLELAEVKHFKMRKIDLCLSSEGSEVILATSSDEKHPPENIIDGNPETFWTTTGMFPQEFIICFHKHVRIERLVIQSYFVQTLKIEKSTSKEPVDFEQWIEKDLVHTEGQLQNEEIVAHDGSATYLRFIIVSAFDHFASVHSVSAEGTVVSNLSS

SEQ ID NO: 768458 - protein, 159 aa, Homo sapiens
LSTPGTKLGRVKHFKMRKIDLCLSSEGSEVILATSSDEKHPPENIIDGNPETFWTTTGMFPQEFIICFHKHVRIERLVIQSYFVQTLKIEKSTSKEPVDFEQWIEKDLVHTEGQLQNEEIVAHDGSATYLRFIIVSAFDHFASVHSVSAEGTVVSNLSS

SEQ ID NO: 768459 - protein, 144 aa, Homo sapiens; identical to SEQ ID NO: 768456

SEQ ID NO: 768460 - protein, 144 aa, Homo sapiens; identical to SEQ ID NO: 768456

SEQ ID NO: 768461 - protein, 144 aa, Homo sapiens; identical to SEQ ID NO: 768456

SEQ ID NO: 768462 - protein, 131 aa, Homo sapiens
RGRSERARELGGASAPGNSVEAAVAGWGGAEGRAGPVGVVAQRARGRSARPETQRWPRRRGGAEGGTGLVGGVARRFQSWSARDPGLHGGRGEQAELRVGTLCVGRGAREVSSPEGPAPRANGSPRLNTLR

SEQ ID NO: 768463 - protein, 144 aa, Homo sapiens; identical to SEQ ID NO: 768456

SEQ ID NO: 768464 - protein, 101 aa, Homo sapiens
RLGRGGARARAPARRRGRTWRRGQAQGRRPEGRGFGTRRGGPCACVLAGGWVPWVLRAPGIELSWGRVGSARPGTGLGKGAQEWFRILAREVMGAGEGGAD

SEQ ID NO: 768465 - protein, 104 aa, Homo sapiens [sequence omitted]

SEQ ID NO: 768466 - protein, 316 aa, Homo sapiens
RQAWHEAMEQLLRAELRTATLRAFGGPGAGCISEGRAYDTDAGPVFVKVNRRTQARQMFEGEVASLEALRSTGLVRVPRPMKVIDLPGGGAAFVMEHLKMKSLSSQASKLGEQMADLHLYNQKLREKLKEEENTVGRRGEGAEPQYVDKFGFHTVTCCGFIPQVNEWQDDWPTFFARHRLQAQLDLIEKDYADREARELWSRLQVKIPDLFCGLEIVPALLHGDLWSGNVAEDDVGPIIYDPASFYGHSEFELAIALMFGGFPRSFFTAYHRKIPKAPGFDQRLLLYQLFNYLNHWNHFGREYRSPSLGTMRRLLK

SEQ ID NO: 768467 - protein, 238 aa, Homo sapiens
MATATERTTREEWTRTGATTDTPDPQPHSASRAPETDRGERQSRPARADTATAPQRTPDRGADAQPHLLRQSMEESDRAPKQTCQTRGPTAQAQPPAYRYKRTHEGRRPTSQKDCSRTGRAQEWGTRASVAGSHVRAQPTQLTRAARLAVTAQISDDETHELRRLRQKYTEATTASRGQRCRRMRRQRQGLDGTGSRERGVGIDEATRLAGRSSWRQQESAKRRERAQRGIPAERVAR

SEQ ID NO: 768468 - protein, 238 aa, Homo sapiens; identical to SEQ ID NO: 768467

SEQ ID NO: 768469 - protein, 316 aa, Homo sapiens; identical to SEQ ID NO: 768466

SEQ ID NO: 768470 - protein, 520 aa, Homo sapiens
MAALPGTVPRMMRPAPGQNYPRTGFPLEVSTPLGQGRVNQLGGVFINGRPLPNHIRHKIVEMAHHGIRPCVISRQLRVSHGCVSKILCRYQETGSIRPGAIGGSKPRQVATPDVEKKIEEYKRENPGMFSWEIRDRLLKDGHCDRSTVPSGLVSSISRVLRIKFGKKEEEDEADKKEDDGEKKAKHSIDGILGDKGNRLDEGSDVESEPDLPLKRKQRRSRTTFTAEQLEELEKAFERTHYPDIYTREELAQRTKLTEARVQVWFSNRRARWRKQAGANQLAAFNHLLPGGFPPTGMPTLPPYQLPDSTYPTTTISQDGGSTVHRPQPLPPSTMHQGGLAAAAAAADTSSAYGARHSFSSYSDSFMNPAAPSNHMNPVSNGLSPQVMSILGNPSAVPPQPQADFSISPLHGGLDSATSISASCSQRADSIKPGDSLPTSQAYCPPTYSTTGYSVDPVAGYQYGQYGQSECLVPWASPVPIPSPTPRASCLFMESYKVVSGWGMSISQMEKLKSSQMEQFT

SEQ ID NO: 768471 - protein, 124 aa, Homo sapiens
KKFRVQRHLVKWTGCGEGPAASAFCSSHATSQPRAGGPRGKTQHLPQGIRAEKRPAFRPSCRIISSCPGHLSDKMMASMSIMLEGTIHRHGDILPRRHEGGLARQLEPLRIKGPSSGSLSPLPK

SEQ ID NO: 768472 - protein, 152 aa, Homo sapiens
  misc_feature (27)..(27): Xaa can be any naturally occurring amino acid
  misc_feature (29)..(29): Xaa can be any naturally occurring amino acid
  misc_feature (54)..(54): Xaa can be any naturally occurring amino acid
SKHQVEQGLLPGLTSWAIVGKQWQQAXAXSSLASPDWAVCEASLWVWGRWGTPXLPLTRRGFLLAVGVGSSAEPSRHGCPLFWEEGSAPRPQESRQRPPKPDCQQKPSPSEGQVGVPQVPTPTGRLHTLPSTGDARRQAPLLLPLLPTLPSL

SEQ ID NO: 768473 - protein, 110 aa, Homo sapiens
  misc_feature (5)..(5): Xaa can be any naturally occurring amino acid
  misc_feature (32)..(32): Xaa can be any naturally occurring amino acid
  misc_feature (43)..(43): Xaa can be any naturally occurring amino acid
PPPPXNLMWMYLFWWKSPNLGRSVNSFCPPFXDGPPPAKCVVXCPLSQVDVYRVLYNFLAPSLNMPSPTFFPSESHPGIQCINPISCLVHNSSKGSYFVNYISSVHYHIM

SEQ ID NO: 768474 - protein, 70 aa, Homo sapiens
DLEDPRSARWRVPMIKGLYGIKDDVFLSVPCILGQNGISDLVKVTLTSEEEARLKKSADTLWGIQKELQF

SEQ ID NO: 768475 - protein, 205 aa, Homo sapiens
MATLKDQLIYNLLKEEQTPQNKITVVGVGAVGMACAISILMKDLADELALVDVIEDKLKGEMMDLQHGSLFLRTPKIVSGKDYNVTANSKLVIITAGARQQEGESRLNLVQRNVNIFKFIIPNVVKYSPNCKLLIVSNPVDILTYVAWNDKWFSQKPCYWKWLQSGFSPIPLPDGGKAGSSPIKLSWGGSLGNMEIPAVPVWDVE

SEQ ID NO: 768476 - protein, 205 aa, Homo sapiens; identical to SEQ ID NO: 768475

SEQ ID NO: 768477 - protein, 205 aa, Homo sapiens; identical to SEQ ID NO: 768475

SEQ ID NO: 768478 - protein, 205 aa, Homo sapiens; identical to SEQ ID NO: 768475

SEQ ID NO: 768479 - protein, 234 aa, Homo sapiens
MGEPSGGYTYTQTSIFLFHAKIPFGSKSNMATLKDQLIYNLLKEEQTPQNKITVVGVGAVGMACAISILMKDLADELALVDVIEDKLKGEMMDLQHGSLFLRTPKIVSGKDYNVTANSKLVIITAGARQQEGESRLNLVQRNVNIFKFIIPNVVKYSPNCKLLIVSNPVDILTYVAWNDKWFSQKPCYWKWLQSGFSPIPLPDGGKAGSSPIKLSWGGSLGNMEIPAVPVWDVE

SEQ ID NO: 768480 - protein, 205 aa, Homo sapiens; identical to SEQ ID NO: 768475

SEQ ID NO: 768481 - protein, 205 aa, Homo sapiens; identical to SEQ ID NO: 768475

SEQ ID NO: 768482 - protein, 205 aa, Homo sapiens; identical to SEQ ID NO: 768475

SEQ ID NO: 768483 - protein, 205 aa, Homo sapiens; identical to SEQ ID NO: 768475

SEQ ID NO: 768484 - protein, 147 aa, Homo sapiens
MATLKDQLIYNLLKEEQTPQNKITVVGVGAVGMACAISILMKDLADELALVDVIEDKLKGEMMDLQHGSLFLRTPKIVSGKVDILTYVAWNDKWFSQKPCYWKWLQSGFSPIPLPDGGKAGSSPIKLSWGGSLGNMEIPAVPVWDVE

SEQ ID NO: 768485 - protein, 205 aa, Homo sapiens; identical to SEQ ID NO: 768475

SEQ ID NO: 768486 - protein, 205 aa, Homo sapiens; identical to SEQ ID NO: 768475

SEQ ID NO: 768487 - protein, 186 aa, Homo sapiens
MATLKDQLIYNLLKEEQTPQNKITVVGVGAVGMACAISILMKDLADELALVDVIEDKLKGEMMDLQHGSLFLRTPKIVSGKDYNVTANSKLVIITAGARQQEGESRLNLVQRNVNIFKFIIPNVVKYSPNCKLLIVSNPVDILTYVAWNDKWFSQKPCYWKWLQSGFSPIPLPDGGKAGMPVWDVE

SEQ ID NO: 768488 - protein, 205 aa, Homo sapiens; identical to SEQ ID NO: 768475

SEQ ID NO: 768489 - protein, 205 aa, Homo sapiens; identical to SEQ ID NO: 768475

SEQ ID NO: 768490 - protein, 205 aa, Homo sapiens; identical to SEQ ID NO: 768475

SEQ ID NO: 768491 - protein, 205 aa, Homo sapiens; identical to SEQ ID NO: 768475

SEQ ID NO: 768492 - protein, 205 aa, Homo sapiens; identical to SEQ ID NO: 768475

SEQ ID NO: 768493 - protein, 205 aa, Homo sapiens; identical to SEQ ID NO: 768475

SEQ ID NO: 768494 - protein, 205 aa, Homo sapiens; identical to SEQ ID NO: 768475

SEQ ID NO: 768495 - protein, 160 aa, Homo sapiens
MATLKDQLIYNLLKEEQTPQNKITVVGVGAVGMACAISILMKDLADELALVDVIEDKLKGEMMDLQHGSLFLRTPKIVSGKDYNVTANSKLVIITAGARQQEGESRLNLVQRNVNIFKFIIPNVVKYSPNCKLLIVSNPVDILTYLPSQAESVYPMAATG

SEQ ID NO: 768496 - protein, 207 aa, Homo sapiens
MATLKDQLIYNLLKEEQTPQNKITVVGVGAVGMACAISILMKDLADELALVDVIEDKLKGEMMDLQHGSLFLRTPKIVSGKDYNVTANSKLVIITAGARQQEGESRLNLVQRNVNIFKFIIPNVVKYSPNCKLLIVSNPVDILTYVAWNDKWFSQKPCYWKWLQSGFSPIPLPDGGKAGSSPIKLSWGGSLGNMEIPAGSVCLLEWH

SEQ ID NO: 768497 - protein, 97 aa, Homo sapiens
  misc_feature (1)..(1): Xaa can be any naturally occurring amino acid
  misc_feature (4)..(5): Xaa can be any naturally occurring amino acid
  misc_feature (10)..(10): Xaa can be any naturally occurring amino acid
XESXXLMAYXGAAAAAADSGSHCHAPPTTARRAFPIPFGSKSNMATLKDQLIYNLLKEEQTPQNKITVVGVGAVGMACAISILMKVSESLPHWKPIP

SEQ ID NO: 768498 - protein, 205 aa, Homo sapiens; identical to SEQ ID NO: 768475

SEQ ID NO: 768499 - protein, 205 aa, Homo sapiens; identical to SEQ ID NO: 768475

SEQ ID NO: 768500 - protein, 205 aa, Homo sapiens; identical to SEQ ID NO: 768475

SEQ ID NO: 768501 - protein, 205 aa, Homo sapiens; identical to SEQ ID NO: 768475

SEQ ID NO: 768502 - protein, 205 aa, Homo sapiens; identical to SEQ ID NO: 768475

SEQ ID NO: 768503 - protein, 205 aa, Homo sapiens; identical to SEQ ID NO: 768475

SEQ ID NO: 768504 - protein, 205 aa, Homo sapiens; identical to SEQ ID NO: 768475

SEQ ID NO: 768505 - protein, 205 aa, Homo sapiens; identical to SEQ ID NO: 768475

SEQ ID NO: 768506 - protein, 205 aa, Homo sapiens; identical to SEQ ID NO: 768475

SEQ ID NO: 768507 - protein, 205 aa, Homo sapiens; identical to SEQ ID NO: 768475

SEQ ID NO: 768508 - protein, 155 aa, Homo sapiens
MATLKDQLIYNLLKEEQTPQNKITVVGVGAVGMACAISILMKDLADELALVDVIEDKLKGEMMDLQHGSLFLRTPKIVSGKDYNVTANSKLVIITAGARQQEGESRLNLVQRNVNIFKFIIPNVVKYSPNCKLLIVSNPVDILTYVAWNDKWFSH

SEQ ID NO: 768509 - protein, 205 aa, Homo sapiens; identical to SEQ ID NO: 768475

SEQ ID NO: 768510 - protein, 205 aa, Homo sapiens; identical to SEQ ID NO: 768475

SEQ ID NO: 768511 - protein, 205 aa, Homo sapiens; identical to SEQ ID NO: 768475

SEQ ID NO: 768512 - protein, 205 aa, Homo sapiens; identical to SEQ ID NO: 768475

SEQ ID NO: 768513 - protein, 205 aa, Homo sapiens; identical to SEQ ID NO: 768475

SEQ ID NO: 768514 - protein, 227 aa, Homo sapiens
MATLKDQLIYNLLKEEQTPQNKITVVGVGAVGMACAISILMKDLADELALVDVIEDKLKGEMMDLQHGSLFLRTPKIVSGKDYNVTANSKLVIITAGARQQEGESRLNLVQRNVNIFKFIIPNVVKYSPNCKLLIVSNPVDILTYVAWNDKWFSQKPCYWKWLQSGFSPIPLPDGGKAGSSPIKLSWGGSLGNMEIPAVPARSGMMVPGLPENRTQNRGCWTRHRFR

SEQ ID NO: 768515 - protein, 161 aa, Homo sapiens
MATLKDQLIYNLLKEEQTPQNKITVVGVGAVGMACAISILMKDLADELALVDVIEDKLKGEMMDLQHGSLFLRTPKIVSGKDYNVTANSKLVIITAGARQQEGESRLNLVQRNVNIFKFIIPNVVKYSPNCKLLIVSNPVDILTYVAWQISGFPMMGERLG

SEQ ID NO: 768516 - protein, 256 aa, Homo sapiens
MGEPSGGYTYTQTSIFLFHAKIPFGSKSNMATLKDQLIYNLLKEEQTPQNKITVVGVGAVGMACAISILMKDLADELALVDVIEDKLKGEMMDLQHGSLFLRTPKIVSGKDYNVTANSKLVIITAGARQQEGESRLNLVQRNVNIFKFIIPNVVKYSPNCKLLIVSNPVDILTYVAWNDKWFSQKPCYWKWLQSGFSPIPLPDGGKAGSSPIKLSWGGSLGNMEIPAVPARSGMMVPGLPENRTQNRGCWTRHRFR

SEQ ID NO: 768517 - protein, 119 aa, Homo sapiens
MPEILLFRNVYVGVSIVCSLFFFQDFVKSFRRDSSRGKRWLGAPKCTSVRKETEPQEDPLGLAKLQTRAAQERNISHWLSLRRSYRGLNHRALFPAGISFPRGEFSTKSLLEQHAGGGG

SEQ ID NO: 768518 - protein, 206 aa, Homo sapiens
HERTHTREKPYECKECGKAFIYLASFQRHMIMHSGDGPYKCEECGKAFSCPSSFQVPERIHTREKPYECKQCGKAFSWLGSFRVHERTHTGEKPCECNECGKAFIYRTTLKGHMNIHTGEKPYKCEQCEKAFLSLASFQMHMIMHTGDAPYKCNECGKAFNCLNSFQIHERTHTGEKPYECKQCGKAFSCSSSFRIHERSHSGEKP

SEQ ID NO: 768519 - protein, 75 aa, Homo sapiens
EISEKDDQSQHNSDEEPESNVSVDQEIDAEEVNSVQTAVKNLATAFMIIHHPESTPHQSKETQPEIGSSQESADA

SEQ ID NO: 768520 - protein, 126 aa, Homo sapiens
RLQVRPQGSAFPSPKVTSVWPCGCHSPLWSQLCAVTCRGWTAATSCPSWHDGRMRLSDLQVYGETRLRDVEEKPGRALFIPFLSFFNLKEGKSFINSNKGMPYNFPTILCSDGISFHLFFHSGGRV

SEQ ID NO: 768521 - protein, 246 aa, Homo sapiens
SLPRRSHPLLRAELAAAMTPQLLLALVLWASCPPCSGRKGPPAALTLPRVQCRASRYPIAVDCSWTLPPAPNSTSPVSFIATYRLGMAARGHSWPCLQQTPTSTSCTITDVQLFSMAPYVLNVTAVHPWGSSSSFVPFITEHIIKPDPPEGVRLSPLAERQLQVQWEPPGSWPFPEIFSLKYWIRYKRQGAARFHRVGPIEATSFILRAVRPRARYYVQVAAQDLTDYGELSDWSLPATATMSLGK

SEQ ID NO: 768522 - protein, 246 aa, Homo sapiens; identical to SEQ ID NO: 768521

SEQ ID NO: 768523 - protein, 246 aa, Homo sapiens; identical to SEQ ID NO: 768521

SEQ ID NO: 768524 - protein, 246 aa, Homo sapiens; identical to SEQ ID NO: 768521

SEQ ID NO: 768525 - protein, 161 aa, Homo sapiens
AVQLACCGRSRGSPHALSTSCTITDVQLFSMAPYVLNVTAVHPWGSSSSFVPFITEHIIKPDPPEGVRLSPLAERQLQVQWEPPGSWPFPEIFSLKYWIRYKRQGAARFHRVGPIEATSFILRAVRPRARYYVQVAAQDLTDYGELSDWSLPATATMSLGK

SEQ ID NO: 768526 - protein, 118 aa, Homo sapiens
MVDVSWWANTIFFFPAGRAVPLVFYITYTRGTVDRSSEQTDEDRNDADRKSTHNEKAKESNRMAEWIKDSRNREDYISSRGGKGDDMPVQQESRVRRIQNTRVATTGRTNVRETSRNY

SEQ ID NO: 768527 - protein, 74 aa, Homo sapiens
DRRRSFESTDKMCLLCLYQKMKGIEIKGEIEVFHARPCEETTKQALCEQHGCLFHLGAGGLSPKRESAKGVGYH

SEQ ID NO: 768528 - protein, 290 aa, Homo sapiens
MGSSKKVTLSVLSREQSEGVGARVRRSIGRPELKNLDPFLLFDEFKGGRPGGFPDHPHRGFETVSYLLEGGSMAHEDFCGHTGKMNPGDLQWMTAGRGILHAEMPCSEEPAHGLQLWVNLRSSEKMVEPQYQELKSEEIPKPSKDGVTVAVISGEALGIKSKVYTRTPTLYLDFKLDPGAKHSQPIPKGWTSFIYTISGDVYIGPDDAQQKIEPHHTAVLGEGDSVQVENKDPKRSHFVLIAGEPLREPVIQHGPFVMNTNEEISQAILDFRNAKNGFERAKTWKSKIGN

SEQ ID NO: 768529 - protein, 290 aa, Homo sapiens; identical to SEQ ID NO: 768528

SEQ ID NO: 768530 - protein, 290 aa, Homo sapiens; identical to SEQ ID NO: 768528

SEQ ID NO: 768531 - protein, 199 aa, Homo sapiens
AHGLQLWVGSSEQGISEEPAHGLQLWVNLRSSEKMVEPQYQELKSEEIPKPSKDGVTVAVISGEALGIKSKVYTRTPTLYLDFKLDPGAKHSQPIPKGWTSFIYTISGDVYIGPDDAQQKIEPHHTAVLGEGDSVQVENKDPKRSHFVLIAGEPLREPVIQHGPFVMNTNEEISQAILDFRNAKNGFERAKTWKSKIGN

SEQ ID NO: 768532 - protein, 263 aa, Homo sapiens
MGSSKKVTLSVLSREQSEGVGARVRRSIGRPELKNLDPFLLFDEFKGGRPGGFPDHPHRGFETVSYLLEGGSMAHEDFCGHTGKMNPGDLQWMTAGRGILHAEMPCSEEPAHGLQLWVNLRSSEKMVEPQYQELKSEEIPKPSKDGVTVAVISGEALGIKSKVYTRTPTLYLDFKLDPGAKHSQPIPKGWTSFIYTISGDVYIGPDDAQQKIEPHHTAVLGEGDSVQVENKDPKRSHFVLIAGEPLREPVIQHAIISVHIGTI

SEQ ID NO: 768533 - protein, 191 aa, Homo sapiens
MGSSKKVTLSVLSREQSEGVGARVRRSIGRPELKNLDPFLLFDEFKGGRPGGFPDHPHRGFETVSYLLEGGSMAHEDFCGHTGKMNPGDLQWMTAGRGILHAEMPCSEEPAHGLQLWVNLRSSEKMVEPQYQELKSEEIPKPSKDGVTVAVISGEALGIKSKVYTRTPTLYLDFKLDPGAKHSQPIPKGAR

SEQ ID NO: 768534 - protein, 290 aa, Homo sapiens; identical to SEQ ID NO: 768528

SEQ ID NO: 768535 - protein, 290 aa, Homo sapiens; identical to SEQ ID NO: 768528

SEQ ID NO: 768536 - protein, 108 aa, Homo sapiens
AGTISPQWTSFIYTISGDVYIGPDDAQQKIEPHHTAVLGEGDSVQVENKDPKRSHFVLIAGEPLREPVIQHGPFVMNTNEEISQAILDFRNAKNGFERAKTWKSKIGN

SEQ ID NO: 768537 - protein, 257 aa, Homo sapiens
MGSSKKVTLSVLSREQSEGVGARVRRSIGRPELKNLDPFLLFDEFKGGRPGGFPDHPHRGFETVSYLLEGGSMAHEDFCGHTGKMNPGDLQWMTAGRGILHAEMPCSEEPAHGLQLWVNLRSSEKMVEPQYQELKSEEIPKPSKDGVTVAVISGEALGIKSKVYTRTPTLYLDFKLDPGAKHSQPIPKGWTSFIYTISGDVYIGPDDAQQKIEPHHTAVLGEGDSVQVENKDPKRSHFVLIAGEPLREPVIQHVRPK

SEQ ID NO: 768538 - protein, 268 aa, Homo sapiens
  misc_feature (259)..(259): Xaa can be any naturally occurring amino acid
  misc_feature (263)..(263): Xaa can be any naturally occurring amino acid
MGSSKKVTLSVLSREQSEGVGARVRRSIGRPELKNLDPFLLFDEFKGGRPGGFPDHPHRGFETVSYLLEGGSMAHEDFCGHTGKMNPGDLQWMTAGRGILHAEMPCSEEPAHGLQLWVNLRSSEKMVEPQYQELKSEEIPKPSKDGVTVAVISGEALGIKSKVYTRTPTLYLDFKLDPGAKHSQPIPKGWTSFIYTISGDVYIGPDDAQQKIEPHHTAVLGEGDSVQVENKDPKRSHFVLIAGEPLREPVIQHALWILXNLKXARRKK

SEQ ID NO: 768539 - protein, 101 aa, Homo sapiens
KLGGLTSRPRPLRGAVLAAHLGFNTSLGGTIYIMDPGPGLLQKGQLKERRTLFLEKNTDGFLFLFSPRFTLAHQPYIWTSNWTQEPNIPNLSLKGMMGSGV

SEQ ID NO: 768540 - protein, 563 aa, Homo sapiens
MANAEVSVPVGDVVVVPTEGNEGENPEDTKTQVILQLQPVQQGIYEAGSENNTAVVAVETHTIHKIEEGIDTGTIEANEDMEIAYPITCGESKAILLWKKFVCPGINVKCVKFNDQLISPKHFVHLAGKSTLKDWKRAIRLGGIMLRKMMDSGQIDFYQHDKVCSNTCRSTKFDLLISSARAPVPGQQTSVVQTPTSADGSITQIAISEESMEEAGLEWNSALTAAVTMATEEGVKKDSEEISEDTLMFWKGIADVGLMEEVVCNIQKEIEELLRGVQQRLIQAPFQVTDAAVLNNVAHTFGLMDTVKKVLDNRRNQVEQGEEQFLYTLTDLERQLEEQKKQGQDHRLKSQTVQNVVLMPVSTPKPPKRPRLQRPASTTVLSPSPPVQQPQFTVISPITITPVGQSFSMGNIPVATLSQGSSPVTVHTLPSGPQLFRYATVVSSAKSSSPDTVTIHPSSSLALLSSTAMQDGSTLGNMTTMVSPVELVAMESGLTSAIQAVESTSEDGQTIIEIDPAPDPEAEDTEGKAVILETELRTEEKVVAEMEEHQHQVHNVEIVVLED

SEQ ID NO: 768541 - protein, 66 aa, Homo sapiens
SIPLRGHGSITQIAISEESMEEAGLEWNSALTAAVTMATEEGVKKDSEEISEDTLMFWNRIADEGV

SEQ ID NO: 768542 - protein, 573 aa, Homo sapiens
MANAEVSVPVGDVVVVPTEGNEGENPEDTKTQVILQLQPVQQGLFIDGHFYNRIYEAGSENNTAVVAVETHTIHKIEEGIDTGTIEANEDMEIAYPITCGESKAILLWKKFVCPGINVKCVKFNDQLISPKHFVHLAGKSTLKDWKRAIRLGGIMLRKMMDSGQIDFYQHDKVCSNTCRSTKFDLLISSARAPVPGQQTSVVQTPTSADGSITQIAISEESMEEAGLEWNSALTAAVTMATEEGVKKDSEEISEDTLMFWKGIADVGLMEEVVCNIQKEIEELLRGVQQRLIQAPFQVTDAAVLNNVAHTFGLMDTVKKVLDNRRNQVEQGEEQFLYTLTDLERQLEEQKKQGQDHRLKSQTVQNVVLMPVSTPKPPKRPRLQRPASTTVLSPSPPVQQPQFTVISPITITPVGQSFSMGNIPVATLSQGSSPVTVHTLPSGPQLFRYATVVSSAKSSSPDTVTIHPSSSLALLSSTAMQDGSTLGNMTTMVSPVELVAMESGLTSAIQAVESTSEDGQTIIEIDPAPDPEAEDTEGKAVILETELRTEEKVVAEMEEHQHQVHNVEIVVLED

SEQ ID NO: 768543 - protein, 609 aa, Homo sapiens
MDVMLENYCHLISVGCHMTKPDVILKLERGEEPWTSFAGHTCLEENWKAEDFLVKFKEHQEKYSRSVVSINHKKLVKEKSKIYEKTFTLGKNPVNSKNLPPEYDTHGRILKNVSELIISNLNPARKRLSEYNGYGKSLLSTKQETTHPEVKSHNQSARAFSHNEVLMQYQKTETPAQSFGYNDCEKSFLQRGGLITHSRPYKGENPSVYNKKRRATNIEKKHTCNECGKSFCRKSVLILHQGIHSEEKPYQCHQCGNAFRRKSYLIDHQRTHTGEKPFVCNECGKSFRLKTALTDHQRTHTGEKSYECLQCRNAFRLKSHLIRHQRTHTGEKPYECNDCGKSFRQKTTLSLHQRIHTGEKPYICKECGKSFHQKANLTVHQRTHTGEKPYICNECGKSFSQKTTLALHEKTHNEEKPYICSECGKSFRQKTTLVAHQRTHTGEKSYECPHCGKAFRMKSYLIDHHRTHTGEKPYECNECGKSFSQKTNLNLHQRIHTGEKPYVCNECGKSFRQKATLTVHQKIHTGQKSYECPQCGKAFSRKSYLIHHQRTHTGEKPYKCSECGKCFRQKTNLIVHQRTHTGWSTMVRSRLTATSASRVQAILLPQPPK

SEQ ID NO: 768544 - protein, 700 aa, Homo sapiens
LQFHPFQGSVSFNDVTVDFTQEEWQHLDHAQKTLYMDVMLENYCHLISVGCHMTKPDVILKLERGEEPWTSFAGHTCLEENWKAEDFLVKFKEHQEKYSRSVVSINHKKLVKEKSKIYEKTFTLGKNPVNSKNLPPEYDTHGRILKNVSELIISNLNPARKRLSEYNGYGKSLLSTKQETTHPEVKSHNQSARAFSHNEVLMQYQKTETPAQSFGYNDCEKSFLQRGGLITHSRPYKGENPSVYNKSARAFSHNEVFMQYQKTETPAQSFGYNDCEKSFLQRGGLITHSRPYKGENPSVYNKKRRATNIEKKHTCNECGKSFCRKSVLILHQGIHSEEKPYQCHQCGNAFRRKSYLIDHQRTHTGEKPFVCNECGKSFRLKTALTDHQRTHTGEKSYECLQCRNAFRLKSHLIRHQRTHTGEKPYECNDCGKSFRQKTTLSLHQRIHTGEKPYICKECGKSFHQKANLTVHQRTHTGEKPYICNECGKSFSQKTTLALHEKTHNEEKPYICSECGKSFRQKTTLVAHQRTHTGEKSYECPHCGKAFRMKSYLIDHHRTHTGEKPYECNECGKSFSQKTNLNLHQRIHTGEKPYVCNECGKSFRQKATLTVHQKIHTGQKSYECPQCGKAFSRKSYLIHHQRTHTGEKPYKCSECGKCFRQKTNLIVHQRTHTGWSTMVRSRLTATSASRVQAILLPQPPK

SEQ ID NO: 768545 - protein, 117 aa, Homo sapiens
  misc_feature (110)..(110): Xaa can be any naturally occurring amino acid
MELEGQWWRGQLAADIHQALRYKELKLPSYKGQSPQLSLRRYFADLIAIVSNRFTLCPSARHLAVYLLDLFMDRYDISIQQLHLVALSCLLLASKYERNTKTAVPKSGAXQQPGFVD

SEQ ID NO: 768546 - protein, 299 aa, Homo sapiens
MDLVLRVADYYFFTPYVYPATWPEDDIFRQAISLLIVTNVGAYILYFFCATLSYYFVFDHALMKHPQFLKNQVRREIKFTVQALPWISILTVALFLLEIRGYSKLHDDLGEFPYGLFELVVSIISFLFFTDMFIYWIHRGLHHRLVYKRLHKPHHIWKIPTPFASHAFHPIDGFLQSLPYHIYPFIFPLHKVVYLSLYILVNIWTISIHDGDFRVPQILQPFINGSAHHTDHHMFFDYNYGQYFTLWDRIGGSFKNPSSFEGKGPLSYVKEMTEGKRSSHSGNGCKNEKLFNGEFTKTE

SEQ ID NO: 768547 - protein, 299 aa, Homo sapiens; identical to SEQ ID NO: 768546

SEQ ID NO: 768548 - protein, 209 aa, Homo sapiens
MDLVLRVADYYFFTPYVYPATWPEDDIFRQAISLLIVTNVGAYILYFFCATLSYYFVFDHALMKHPQFLKNQVRREIKFTVQALPWISILTVALFLLEIRGYSKLHDDLGEFPYGLFELVVSIISFLFFTDMFIYWIHRGLHHRLVYKVKSFVVKREKRLHISAMYDYKFCSLFPRISSTHIKCLSSHNHNRYRVHFVHILLYGSKGLS

SEQ ID NO: 768549 - protein, 116 aa, Homo sapiens [sequence omitted]

SEQ ID NO: 768550 - protein, 209 aa, Homo sapiens; identical to SEQ ID NO: 768548

SEQ ID NO: 768551 - protein, 299 aa, Homo sapiens; identical to SEQ ID NO: 768546

SEQ ID NO: 768552 - protein, 170 aa, Homo sapiens [sequence omitted]

SEQ ID NO: 768553 - protein, 299 aa, Homo sapiens; identical to SEQ ID NO: 768546

SEQ ID NO: 768554 - protein, 299 aa, Homo sapiens; identical to SEQ ID NO: 768546

SEQ ID NO: 768555 - protein, 299 aa, Homo sapiens; identical to SEQ ID NO: 768546

SEQ ID NO: 768556 - protein, 150 aa, Homo sapiens [sequence omitted]

SEQ ID NO: 768557 - protein, 70 aa, Homo sapiens
APSPVGPTLNVTRCRYSPDFKYVALVLQSVSKKMNEKSKKSDQKYKPITTLQDKTSNFQNCWTEMIIIYT

SEQ ID NO: 768558 - protein, 227 aa, Homo sapiens
MLLKCLHNNLCQKYSAHAFQFSPRNVLWLLVVCLRSDNKRPCLEFSQLSVKDSFRDLFIPRIETILMMYTRNNLNCAEPLFEQNNSLNVNFNTQKKTVWLIHGYRPVGSIPLWLQNFVRILLNEEDMNVIVVDWSRGATTFIYNRAVKNTRKVAVSLSVHIKNLLKHGASLDNFHFIGVSLGAHISGFVGKIFHGQLGRITGLDPAGPRFSRKPPYSRLDYTDAKFV

SEQ ID NO: 768559 - protein, 157 aa, Homo sapiens
ICNPLLYMVTMSPQVCFLLLLGVYGMGFAGAMAHTACMMGVTFCANNLVNHYMCDILPLLECACTSTYVNELVVFVVVGIDIGVPTVTIFISYALILSSIFHIDSTEGRSKAFSTCSSHIIAVSLFFGSGAFMYLKPFSLLAMNQGKVSSLFYTTVV

SEQ ID NO: 768560 - protein, 377 aa, Homo sapiens
MSPLNQSAEGLPQEASNRSLNATETSEAWDPRTLQALKISLAVVLSVITLATVLSNAFVLTTILLTRKLHTPANYLIGSLATTDLLVSILVMPISIAYTITHTWNFGQILCDIWLSSDITCCTASILHLCVIALDRYWAITDALEYSKRRTAGHAATMIAIVWAISICISIPPLFWRQAKAQEEMSDCLVNTSQISYTIYSTCGAFYIPSVLLIILYGRIYRAARNRILNPPSLYGKRFTTAHLITGSAGSSLCSLNSSLHEGHSHSAGSPLFFNHVKIKLADSALERKRISAARERKATKILGIILGAFIICWLPFFVVSLVLPICRDSCWIHPALFDFFTWLGYLNSLINPIIYTVFNEEFRQAFQKIVPFRKAS

SEQ ID NO: 768561 - protein, 716 aa, Homo sapiens
MKAILGAFFKCKKSVIIVEKLVRESYFYGFEKEGVFALRLNYSIMLLCCYGGFLVCYRSPKEKASEQVTGQPQLTALNKSRITSSFNKIISKDCLLFKLIPPINTHTRVHTHTTHTHRAVSRTSFPFSVVVSSEIPHVLQDRYYRYDRIRFHLSQKVISCYMCQLKCLSINRYLSDKLLMLTIVPPLRSSNQTKSVTIERGYLTVKDGQHRAVHSLQQREKKCSWHNFITGFIYIIPVQWKLFFDLPLPDYKVVNCATSASHCFVLINRREPAKILRNTGAGRQCFNLTILPILAPTPPIDSQLTFFLPPGNGGLEEVKVRKVKHLITTGTCSTREGTHPGVGGVGIATRFDSSHLQRKKNKPKPESNPSLTVVQYLRASWLEFSFPSAHNHLELAINKQPDNLTSISIDIKCKHSFILSVRNSNFSLISNIISQFNLCTDMDISLGICQIQECIFLRSIEIRHFKSGKITYKLVGITVEASQKIPQNRWHGVHADSHGVILWSFNIEAVFQINKTNWGIKYKQMDVTEAPPQKKPSITNLKKIFSLTNLCSFQLFYLFLPVRESLILKSWIIEEKFYPLNRIHPQFMVYVKKMYDYEISLQLFADIAKSLLGIYIILVFYKNTSVTRPKSNLTIKQLLFSLKTHNLKIYLSENCMVPELYFCVEMLFVSDGNKCTLLLCLLCLAVERMICPSYHWIMGMNALFKINLFINILILF

SEQ ID NO: 768562 - protein, 713 aa, Homo sapiens
MKAILGAFFKCKKSVIIVEKLVRESYFYGFEKEGVFALRLNYSIMLLCCYGGFLVCYRSPKEKASEQVTGQPQLTALNKSRITSSFNKIISKDCLLFKLIPPINTHTRVHTHTTHTHRAVSRTSFPFSVVVSSEIPHVLQDRYYRYDRIRFHLSQKVISCYMCQLKCLSINRYLSDKLLMLTIVPPLRSSNQNQIGEPLKDDIVTVKDGQHRAVHSLQQRDGSCFLTYLYQITKELTVPLQPPTVLFQLNRREPAKILRNTGAGRQCFNLTISPILAPTPPIDSQLTFFLPPGNGGLEEVKVRKVKHLITTGLVVPREGTHPGVGGVGIATRFDSSHLQRKKNKPKPESNPSLTVVQYLRASWLEFSFPSAHNHLELANNKQPDNLTSISIDIKCKHSFILSVRNSNFSLISNIISQFNLCTDMDISLGICQIQECIFLRSIEIRHFKSGKITYKLVGITVEASQKYPMNRWHGVHADSHGVILWSFNIEAVFQINKTNWGIKYKQMDVTEAPPQKKPSITNLKKIFSLTNLCSFQLFYLFLPVRESLILKSWIIEEKFYTLNRIHPQFMVYVKKMYDYEISLQLFADIAKSLLGIYIILVFYKNTSVTRPKSNLTIKQCFFLLKTTQPKDLSVIKLHGSRALFLCRDAICYVMETNYFVAMSFVSSSGENDMTIISLDYGNECPFQNKLIYEYFNIILYYNINNILILLLLL

SEQ ID NO: 768563 - protein, 108 aa, Homo sapiens
ECPDDGSDGPSGAAAVRTLAAAGEAQPGLRTRQSWCGSQEQMRAPPSTKLAVQKAALPGADAEFSSRPWHPWALRGPGSPQPLQASKGLLPLLGLSLLLATILGQSKA

SEQ ID NO: 768564 - protein, 31 aa, Homo sapiens
EKCRCLGNPKPSPSPERGKFGASPGGGAWRR

SEQ ID NO: 768565 - protein, 50 aa, Homo sapiens
MLVVVVRQRVRDTRKKARTRENPASGDQVEAEHGRRAWAPTPTPHIPGLL

SEQ ID NO: 768566 - protein, 293 aa, Homo sapiens
SCSCLPGWLARSLLGTQRSAGSTQRDLRAAVPSPDSRIPGARRPAAGAAMKKLMVVLSLIAAAWAEEQNKLVHGGPCDKTSHPYQAALYTSGHLLCGGVLIHPLWWCSLTSVPTVQKTLNLQVFLGKHNLRQRESSEEQSSVVRAVIHPDYDAASHDQDIMLLRLAAQPNSLNSSSPFPWRGTAQPTPPAATSWAGARQQMVISLTPSSVHTFHLVSREECEHAYPGQITQNMLCAGDEKYGKDSWPGVILGGPLVCGDQLPEACVHGGNIPLWIKGEARSLHPRSADTRTGI

SEQ ID NO: 768567 - protein, 275 aa, Homo sapiens
SCSCLPGWLARSLLGTQRSAGSTQRDLRAAVPSPDSRIPGARRPAAGAAMKKLMVVLSLIAAAWAEEQNKLVHGGPCDKTSHPYQAALYTSGHLLCGGVLIHPLWVLTAAHCKKPSLQRSQSSVVRAVIHPDYDAASHDQDIMLLRLAAQPNSLNSSSPFPWRGTAQPTPPAATSWAGARQQMVISLTPSSVHTFHLVSREECEHAYPGQITQNMLCAGDEKYGKDSWPGVILGGPLVCGDQLPEACVHGGNIPLWIKGEARSLHPRSADTRTGI

SEQ ID NO: 768568 - protein, 70 aa, Homo sapiens
FERRTDIPEAEDVYATRHFQAGGDVFLCLTRYIGDSMVRLGLGAGGWLFSTDPILHTKPLNSDLPSHADL

SEQ ID NO: 768569 - protein, 228 aa, Homo sapiens
GSVLVFWMAAEDREMMEARGAGESCPTFPKMVPGDSKSEGKPRAYLEAESQKPDSSYDYLEEMEACEDGGCQGPLKSLSPKSCRATKGQAGDGPKPAELPPTPGTERNPEMELEKVRMEFELTRLKYLHEKNQRQRQHEVVMEQLQRERQHEVVMEQLQQEAAPRLFSGGLQNFLLPQNQFAMFLYCFIFIHIIYVTKEMVFFLFAKHYLFCIAAILLCLIKTFWSYI

SEQ ID NO: 768570 - protein, 108 aa, Homo sapiens
MGTITLSLGEDDDLRSHTGRVRAGLNLDLPGANNGIIISTVFSPPQFSGGLQNFLLPQNQFAMFLYCFIFIHIIYVTKEMVFFLFAKHYLFCIAAILLCLIKTFWSYI

SEQ ID NO: 768571 - protein, 240 aa, Homo sapiens
GSVLVFWMAAEDREMMEARGAGESCPTFPKMVPGDSKSEGKPRAYLEAESQKPDSSYDYLEEMEACEDGGCQGPLKSLSPKSCRATKGQAGDGPKPAELPPTPGTERNPEMELEKVRMEFELTRLKYLHEKNQRQRQHEVVMEQLQRERQHEVVMEQLQRERQHEVVMEQLQQELAPRLFSGGLQNFLLPQNQFAMFLYCFIFIHIIYVTKEMVFFLFAKHYLFCIAAILLCLIKTFWSY

SEQ ID NO: 768572 - protein, 137 aa, Homo sapiens
SGFSFALQGSAADPPGEDPPAHLALLLGHVSPVHLQETSVDAPCLLTLSPAHTELVLRGNLCLCCCLCLERPCPTPSHSCLSVIFPMSVLREPFLATPSKGVLGQVWWPTPVISELWETEVGRSLEARGSRPTWATY

SEQ ID NO: 768573 - protein, 116 aa, Homo sapiens
LYGGDDAQGMMAAMLSHAYGPGGCGAAAAALNGEQAALLRRKSVNTTECVPVPSSEHVAEIVGRQGECRGGEVQLGMAPGVGGETRERSVGRKRRTRRGPQVHREGVWEEPRVDQM

SEQ ID NO: 768574 - protein, 474 aa, Homo sapiens
LYGGDDAQGMMAAMLSHAYGPGGCGAAAAALNGEQAALLRRKSVNTTECVPVPSSEHVAEIVGRQGCKIKALRAKTNTYIKTPVRGEEPIFVVTGRKEDVAMAKREILSAAEHFSMIRASRNKNGPALGGLSCSPNLPGQTTVQVRVPYRVVGLVVGPKGATIKRIQQQTHTYIVTPSRDKEPVFEVTGMPENVDRAREEIEMHIAMRTGNYIELNEENDFHYNGTDVSFEGGTLGSAWLSSNPVPPSRARMISNYRNDSSSSLGSGSTDSYFGSNRLADFSPTSPFSTGNFWFGDTLPSVGSEDLAVDSPAFDSLPTSAANYLDSILNQLTHSRGFGSDPSGNMKTQRRGSQPSTPRLSPTFPESIEHPLARRVRSDPPSTGNHVGLPIYIPAFSNGTNSYSSSNGGSTSSSPPESRRKHDCVICFENEVIAALVPCGHNLFCMECANKICEKRTPSCPVCQTAVTQAIQIHS

SEQ ID NO: 768575 - protein, 434 aa, Homo sapiens
ARITTLPLPSAGTTQLSPSTACHPKGCKIKALRAKTNTYIKTPVRGEEPIFVVTGRKEDVAMAKREILSAAEHFSMIRASRNKNGPALGGLSCSPNLPGQTTVQVRVPYRVVGLVVGPKGATIKRIQQQTHTYIVTPSRDKEPVFEVTGMPENVDRAREEIEMHIAMRTGNYIELNEENDFHYNGTDVSFEGGTLGSAWLSSNPVPPSRARMISNYRNDSSSSLGSGSTDSYFGSNRLADFSPTSPFSTGNFWFGDTLPSVGSEDLAVDSPAFDSLPTSAANYLDSILNQLTHSRGFGSDPSGNMKTQRRGSQPSTPRLSPTFPESIEHPLARRVRSDPPSTGNHVGLPIYIPAFSNGTNSYSSSNGGSTSSSPPESRRKHDCVICFENEVIAALVPCGHNLFCMECANKICEKRTPSCPVCQTAVTQAIQIHS

SEQ ID NO: 768576 - protein, 373 aa, Homo sapiens
MAKREILSAAEHFSMIRASRNKNGPALGGLSCSPNLPGQTTVQVRVPYRVVGLVVGPKGATIKRIQQQTHTYIVTPSRDKEPVFEVTGMPENVDRAREEIEMHIAMRTGNYIELNEENDFHYNGTDVSFEGGTLGSAWLSSNPVPPSRARMISNYRNDSSSSLGSGSTDSYFGSNRLADFSPTSPFSTGNFWFGDTLPSVGSEDLAVDSPAFDSLPTSAANYLDSILNQLTHSRGFGSDPSGNMKTQRRGSQPSTPRLSPTFPESIEHPLARRVRSDPPSTGNHVGLPIYIPAFSNGTNSYSSSNGGSTSSSPPESRRKHDCVICFENEVIAALVPCGHNLFCMECANKICEKRTPSCPVCQTAVTQAIQIHS

SEQ ID NO: 768577 - protein, 451 aa, Homo sapiens
  misc_feature (51)..(51): Xaa can be any naturally occurring amino acid
  misc_feature (54)..(54): Xaa can be any naturally occurring amino acid
  misc_feature (56)..(56): Xaa can be any naturally occurring amino acid
ARITTLPLPSAGTTQLSPSTACHPKGCKIKALRAKTNTYIKTPVRGEEPIXFWXLXSNPLGAKGKNGKRNLLCPMGPKKEEGSLSGLQEGHFSMIRASRNKNGPALGGLSCSPNLPGQTTVQVRVPYRVVGLVVGPKGATIKRIQQQTHTYIVTPSRDKEPVFEVTGMPENVDRAREEIEMHIAMRTGNYIELNEENDFHYNGTDVSFEGGTLGSAWLSSNPVPPSRARMISNYRNDSSSSLGSGSTDSYFGSNRLADFSPTSPFSTGNFWFGDTLPSVGSEDLAVDSPAFDSLPTSAQTIWTPFEPVNPFSGFGSDPSGNMKTQRRGSQPSTPRLSPTFPESIEHPLARRVRSDPPSTGNHVGLPIYIPAFSNGTNSYSSSNGGSTSSSPPESRRKHDCVICFENEVIAALVPCGHNLFCMECANKICEKRTPSCPVCQTAVTQAIQIHS

SEQ ID NO: 768578 - protein, 474 aa, Homo sapiens; identical to SEQ ID NO: 768574

SEQ ID NO: 768579 - protein, 80 aa, Homo sapiens
WCSRGSRPLFDNGGSTSSSPPESRRKHDCVICFENEVIAALVPCGHNLFCMECANKICEKRTPSCPVCQTAVTQAIQIHS

SEQ ID NO: 768580 - protein, 474 aa, Homo sapiens; identical to SEQ ID NO: 768574

SEQ ID NO: 768581 - protein, 103 aa, Homo sapiens
RPRHMEWFRAAWVPGGQNFRDHAAFLRRRTCPAQPRGAVEDHPGGDIADPWLGAPWGRPASTPTLGNAEPLRMCARGRVCVFLRVSLFRSNLVPGAAGLCMLV

SEQ ID NO: 768582 - protein, 51 aa, Homo sapiens
MQQGHSHQAILGFGHGSHAKHLDKSVRKGGGTCSSAIWKNVEIQGRAESVL

SEQ ID NO: 768583 - protein, 408 aa, Homo sapiens
QEGDVPPSSPWAGAAERAGPAAGAEGRRGTPRPRAGAGPGFQVSSGGCRLSKMRRFLRPGHDPVRERLKRDLFQFNKTVEHGFPHQPSALGYSPSLRILAIGTRSGAIKLYGAPGVEFMGLHQENNAVTQIHLLPGQCQLVTLLDDNSLHLWSLKVKGGASELQEDESFTLRGPPGAAPSATQITVVLPHSSCELLYLGTESGNVFVVQLPAFRALEDRTISSDAVLQRLPEEARHRRVFEMVEALQEHPRDPNQILIGYSRGLVVIWDLQGSRVLYHFLSSQQLENIWWQRDGRLLVSCHSDGSYCQWPVSSEAQQPEPLRSLVPYGPFPCKAITRILWLTTRQGLPFTIFQGGMPRASYGDRHCISVIHDGQQTAFDFTSRVIGFTVLTEADPAASRRASGVGAQG

SEQ ID NO: 768584 - protein, 356 aa, Homo sapiens
MRRFLRPGHDPVRERLKRDLFQFNKTVEHGFPHQPSALGYSPSLRILAIGTRSGAIKLYGAPGVEFMGLHQENNAVTQIHLLPGQCQLVTLLDDNSLHLWSLKVKGGASELQEDESFTLRGPPGAAPSATQITVVLPHSSCELLYLGTESGNVFVVQLPAFRALEDRTISSDAVLQRLPEEARHRRVFEMVEALQEHPRDPNQILIGYSRGLVVIWDLQGSRVLYHFLSSQQLENIWWQRDGRLLVSCHSDGSYCQWPVSSEAQQPEPLRSLVPYGPFPCKAITRILWLTTRQGLPFTIFQGGMPRASYGDRHCISVIHDGQQTAFDFTSRVIGFTVLTEADPAASRRASGVGAQG

SEQ ID NO: 768585 - protein, 132 aa, Homo sapiens
QEGDVPPSSPWAGAAERAGPAAGAEGRRGTPRPRAGAGPGFQVSSGGCRLSKMRRFLRPGHDPVRERLKRDLFQFNKTVEHGFPHQPSALGYSPSLRILAIGTRSGAIKLGPGAVAPACNPSAVGGQGGRIA

SEQ ID NO: 768586 - protein, 71 aa, Homo sapiens
TSFSTSSQGRVSESPSLLSVLLPELFSYNTLRTRETQKAVLGEHLASAPPTHSLQSSKSEVPACGEGTGNR

SEQ ID NO: 768587 - protein, 113 aa, Homo sapiens [sequence omitted]

SEQ ID NO: 768588 - protein, 318 aa, Homo sapiens
HLWRRWRLRSAGAAETRRGARPPAAAAPGPCRHPASPRLGRYPASPQRRATALTGPPDASRYPGPQPGRSPAARRPHTSPEPGLGRAAAAARRSQAGLCSVPMAAAGWRDGSGQEKYRLVVVGGGGVGKSALTIQFIQSYFVTDYDPTIEDSYTKQCVIDDRAARLDILDTAGQEEFGAMREQYMRTGEGFLLVFSVTDRGSFEEIYKFQRQILRVKDRDEFPMILIGNKADLDHQRQVNREKGHRLTRAKGNYMGGSSRLWHDGWIKHSPETGPAYHANLDTRELSLTESTWRTKRQRGKGLLKTSLDPPGERSRYP

SEQ ID NO: 768589 - protein, 306 aa, Homo sapiens
HLWRRWRLRSAGAAETRRGARPPAAAAPGPCRHPASPRLGRYPASPQRRATALTGPPDASRYPGPQPGRSPAARRPHTSPEPGLGRAAAAARRSQAGLCSVPMAAAGWRDGSGQEKYRLVVVGGGGVGKSALTIQFIQSYFVTDYDPTIEDSYTKQCVIDDRAARLDILDTAGQEEFGAMREQYMRTGEGFLLVFSVTDRGSFEEIYKFQRQILRVKDRDEFPMILIGNKADLDHQRQVTQEEGQQLARQLKVTYMEASAKIRMNVDQAFHELVRVIRKFQEQECPPSPEPTRKEKDKKGCHCVIF

SEQ ID NO: 768590 - protein, 312 aa, Homo sapiens
TNMYSSSPGCISVLRGCGYAVIDSRPCVLHSHAPGPCRHPASPRLGRYPASPQRRATALTGPPDASRYPGPQPGRSPAARRPHTSPEPGLGRAAAAARRSQAGLCSVPMAAAGWRDGSGQEKYRLVVVGGGGVGKSALTIQFIQSYFVTDYDPTIEDSYTKQCVIDDRAARLDILDTAGQEEFGAMREQYMRTGEGFLLVFSVTDRGSFEEIYKFQRQILRVKDRDEFPMILIGNKADLDHQRQVTQEEGQQLARQLKVTYMEASAKIRMNVDQAFHELVRVIRKFQEQECPPSPEPTRKEKDKKGCHCVIF

SEQ ID NO: 768591 - protein, 306 aa, Homo sapiens; identical to SEQ ID NO: 768589

SEQ ID NO: 768592 - protein, 189 aa, Homo sapiens
PTRRLLIPMVSDEKSAVFLLESYFVTDYDPTIEDSYTKQCVIDDRAARLDILDTAGQEEFGAMREQYMRTGEGFLLVFSVTDRGSFEEIYKFQRQILRVKDRDEFPMILIGNKADLDHQRQVTQEEGQQLARQLKVTYMEASAKIRMNVDQAFHELVRVIRKFQEQECPPSPEPTRKEKDKKGCHCVIF

SEQ ID NO: 768593 - protein, 258 aa, Homo sapiens
GGRSWKGGKHRSTLLLWPRPETSGRGWATEPGFTAPRVRAWGWSWSPARCFSSRLRPRLHRRGDSGGNLAAAPRGLRASPRRLSRSCPLQSYFVTDYDPTIEDSYTKQCVIDDRAARLDILDTAGQEEFGAMREQYMRTGEGFLLVFSVTDRGSFEEIYKFQRQILRVKDRDEFPMILIGNKADLDHQRQVTQEEGQQLARQLKVTYMEASAKIRMNVDQAFHELVRVIRKFQEQECPPSPEPTRKEKDKKGCHCVIF

SEQ ID NO: 768594 - protein, 177 aa, Homo sapiens
ANSWCCSLQSYFVTDYDPTIEDSYTKQCVIDDRAARLDILDTAGQEEFGAMREQYMRTGEGFLLVFSVTDRGSFEEIYKFQRQILRVKDRDEFPMILIGNKADLDHQRQVTQEEGQQLARQLKVTYMEASAKIRMNVDQAFHELVRVIRKFQEQECPPSPEPTRKEKDKKGCHCVIF

SEQ ID NO: 768595 - protein, 120 aa, Homo sapiens
RIPGVSFVFSVTDRGSFEEIYKFQRQILRVKDRDEFPMILIGNKADLDHQRQVTQEEGQQLARQLKVTYMEASAKIRMNVDQAFHELVRVIRKFQEQECPPSPEPTRKEKDKKGCHCVIF

SEQ ID NO: 768596 - protein, 306 aa, Homo sapiens; identical to SEQ ID NO: 768589

SEQ ID NO: 768597 - protein, 332 aa, Homo sapiens
  misc_feature (159)..(159): Xaa can be any naturally occurring amino acid
RQKKKSRGNGPEMRVRVGGAFLGAAPGPCRHPASPRLGRYPASPQRRATALTGPPDASRYPGPQPGRSPAARRPHTSPEPGLGRAAAAARRSQAGLCSVPMAAAGWRDGSGQEKYRLVVVGGGGVGKSALTIQFIQNHLLKKYLHCEKYEYLDALDDIXEVKKQSYFVTDYDPTIEDSYTKQCVIDDRAARLDILDTAGQEEFGAMREQYMRTGEGFLLVFSVTDRGSFEEIYKFQRQILRVKDRDEFPMILIGNKADLDHQRQVTQEEGQQLARQLKVTYMEASAKIRMNVDQAFHELVRVIRKFQEQECPPSPEPTRKEKDKKGCHCVIF

SEQ ID NO: 768598 - protein, 306 aa, Homo sapiens; identical to SEQ ID NO: 768589

SEQ ID NO: 768599 - protein, 1480 aa, Homo sapiens
RRLGRCCRASAGVRCSDPRAGKGFGFHRNLGRGSAILGLSGPLLKFGPVQTSSRAPSQAHAQVQAQAGRDPLGSQLASMELLPPLPQSFLLLLLLPAKPAAGEDWQCPRTPYAASRDFDVKYVVPSFSAGGLVQAMVTYEGDRNESAVFVAIRNRLHVLGPDLKSVQSLATGPAGDPGCQTCAACGPGPHGPPGDTDTKVLVLDPALPALVSCGSSLQGRCFLHDLEPQGTAVHLAAPACLFSAHHNRPDDCPDCVASPLGTRVTVVEQGQASYFYVASSLDAAVAASFSPRSVSIRRLKADASGFAPGFVALSVLPKHLVSYSIEYVHSFHTGAFVYFLTVQPASVTDDPSALHTRLARLSATEPELGDYRELVLDCRFAPKRRRRGAPEGGQPYPVLRVAHSAPVGAQLATELSIAEGQEVLFGVFVTGKDGGPGVGPNSVVCAFPIDLLDTLIDEGVERCCESPVHPGLRRGLDFFQSPSFCPNPPGLEALSPNTSCRHFPLLVSSSFSRVDLFNGLLGPVQVTALYVTRLDNVTVAHMGTMDGRILQVELVRSLNYLLYVSNFSLGDSGQPVQRDVSRLGDHLLFASGDQVFQVPIRGPGCRHFLTCGRCLRAWHFMGCGWCGNMCGQQKECPGSWQQDHCPPKLTEFHPHSGPLRGSTRLTLCGSNFYLHPSGLVPEGTHQVTVGQSPCRPLPKDSSKLRPVPRKDFVEEFECELEPLGTQAVGPTNVSLTVTNMPPGKHFRVDGTSVLRGFSFMEPVLIAVQPLFGPRAGGTCLTLEGQSLSVGTSRAVLVNGTECLLARVSEGQLLCATPPGATVASVPLSLQVGGAQVPGSWTFQYREDPVVLSISPNCGYINSHITICGQHLTSAWHLVLSFHDGLRAVESRCERQLPEQQLCRLPEYVVRDPQGWVAGNLSARGDGAAGFTLPGFRFLPPPHPPSANLVPLKPEEHAIKFEYIGLGAVADCVGINVTVGGESCQHEFRGDMVVCPLPPSLQLGQDGAPLQVGVCVDGECHILGRVVRPGPDGVPQSTLLGILLPLLLLVAALATALVFSYWWRRKQLVLPPNLNDLASLDQTAGATPLPILYSGSDYRSGLALPAIDGLDSTTCVHGASFSDSEDESCVPLLRKESIQLRDLDSALLAEVKDVLIPHERVVTHSDRVIGKGHFGVVYHGEYIDQAQNRIQCAIKSLSRITEMQQVEAFLREGLLMRGLNHPNVLALIGIMLPPEGLPHVLLPYMCHGDLLQFIRSPQRNPTVKDLISFGLQVARGMEYLAEQKFVHRDLAARNCMLDESFTVKVADFGLARDILDREYYSVQQHRHARLPVKWMALESLQTYRFTTKSDVWSFGVLLWELLTRGAPPYRHIDPFDLTHFLAQGRRLPQPEYCPDSLYQVMQQCWEADPAVRPTFRVLVGEVEQIVSALLGDHYVQLPATYMNLGPSTSHEMNVRPEQPQFSPMPGNVRRPRPLSEPPRPT

SEQ ID NO: 768600 - protein, 1466 aa, Homo sapiens
RRLGRCCRASAGVRCSDPRAGKGFGFHRNLGRGSAILGLSGPLLKFGPVQTSSRAPSQAHAQVQAQAGRDPLGSQLASMELLPPLPQSFLLLLLLPAKPAAGEDWQCPRTPYAASRDFDVKYVVPSFSAGGLVQAMVTYEGDRNESAVFVAIRNRLHVLGPDLKSVQSLATGPAGDPGCQTCAACGPGPHGPPGDTDTKVLVLDPALPALVSCGSSLQGRCFLHDLEPQGTAVHLAAPACLFSAHHNRPDDCPDCVASPLGTRVTVVEQGQASYFYVASSLDAAVAASFSPRSVSIRRLKADASGFAPGFVALSVLPKHLVSYSIEYVHSFHTGAFVYFLTVQPASVTDDPSALHTRLARLSATEPELGDYRELVLDCRFAPKRRRRGAPEGGQPYPVLRVAHSAPVGAQLATELSIAEGQEVLFGVFVTGKDGGPGVGPNSVVCAFPIDLLDTLIDEGVERCCESPVHPGLRRGLDFFQSPSFCPNPPGLEALSPNTSCRHFPLLVSSSFSRVDLFNGLLGPVQVTALYVTRLDNVTVAHMGTMDGRILQVELVRSLNYLLYVSNFSLGDSGQPVQRDVSRLGDHLLFASGDQVFQVPIRGPGCRHFLTCGRCLRAWHFMGCGWCGNMCGQQKECPGSWQQDHCPPKLTEFHPHSGPLRGSTRLTLCGSNFYLHPSGLVPEGTHQVTVGQSPCRPLPKDSSKLRPVPRKDFVEEFECELEPLGTQAVGPTNVSLTVTNMPPGKHFRVDGTSVLRGFSFMEPVLIAVQPLFGPRAGGTCLTLEGQSLSVGTSRAVLVNGTECLLARVSEGQLLCATPPGATVASVPLSLQVGGAQVPGSWTFQYREDPVVLSISPNCGYINSHITICGQHLTSAWHLVLSFHDGLRAVESRCERQLPEQQLCRLPEYVVRDPQGWVAGNLSARGDGAAGFTLPGFRFLPPPHPPSANLVPLKPEEHAIKFEYIGLGAVADCVGINVTVGGESCQHEFRGDMVVCPLPPSLQLGQDGAPLQVGVCVDGECHILGRVVRPGPDGVPQSTLLGILLPLLLLVAALATALVFSYWWRRKQLVLPPNLNDLASLDQTAGATPLPILYSGSDYRSGLALPAIDGLDSTTCVHGASFSDSEDESCVPLLRKESIQLRDLDSALLAEVKDVLIPHERVVTHSDRVIGKGHFGVVYHGEYIDQAQNRIQCAIKSLSRITEMQQVEAFLREGLLMRGLNHPNVLALIGIMLPPEGLPHVLLPYMCHGDLLQFIRSPQRTRGMEYLAEQKFVHRDLAARNCMLDESFTVKVADFGLARDILDREYYSVQQHRHARLPVKWMALESLQTYRFTTKSDVWSFGVLLWELLTRGAPPYRHIDPFDLTHFLAQGRRLPQPEYCPDSLYQVMQQCWEADPAVRPTFRVLVGEVEQIVSALLGDHYVQLPATYMNLGPSTSHEMNVRPEQPQFSPMPGNVRRPRPLSEPPRPT

SEQ ID NO: 768601 - protein, 331 aa, Homo sapiens
MCGVSLGPWIPSHRLIMHLTPGHFGVVYHGEYIDQAQNRIQCAIKSLSRITEMQQVEAFLREGLLMRGLNHPNVLALIGIMLPPEGLPHVLLPYMCHGDLLQFIRSPQRNPTVKDLISFGLQVARGMEYLAEQKFVHRDLAARNCMLDESFTVKVADFGLARDILDREYYSVQQHRHARLPVKWMALESLQTYRFTTKSDVWSFGVLLWELLTRGAPPYRHIDPFDLTHFLAQGRRLPQPEYCPDSLYQVMQQCWEADPAVRPTFRVLVGEVEQIVSALLGDHYVQLPATYMNLGPSTSHEMNVRPEQPQFSPMPGNVRRPRPLSEPPRPT

SEQ ID NO: 768602 - protein, 1334 aa, Homo sapiens
RRLGRCCRASAGVRCSDPRAGKGFGFHRNLGRGSAILGLSGPLLKFGPVQTSSRAPSQAHAQVQAQAGRDPLGSQLASMELLPPLPQSFLLLLLLPAKPAAGEDWQCPRTPYAASRDFDVKYVVPSFSAGGLVQAMVTYEGDRNESAVFVAIRNRLHVLGPDLKSVQSLATGPAGDPGCQTCAACGPGPHGPPGDTDTKVLVLDPALPALVSCGSSLQGRCFLHDLEPQGTAVHLAAPACLFSAHHNRPDDCPDCVASPLGTRVTVVEQGQASYFYVASSLDAAVAASFSPRSVSIRRLKADASGFAPGFVALSVLPKHLVSYSIEYVHSFHTGAFVYFLTVQPASVTDDPSALHTRLARLSATEPELGDYRELVLDCRFAPKRRRRGAPEGGQPYPVLRVAHSAPVGAQLATELSIAEGQEVLFGVFVTGKDGGPGVGPNSVVCAFPIDLLDTLIDEGVERCCESPVHPGLRRGLDFFQSPSFCPNPPGLEALSPNTSCRHFPLLVSSSFSRVDLFNGLLGPVQVTALYVTRLDNVTVAHMGTMDGRILQVELVRSLNYLLYVSNFSLGDSGQPVQRDVSRLGDHLLFASGDQVFQVPIRGPGCRHFLTCGRCLRAWHFMGCGWCGNMCGQQKECPGSWQQDHCPPKLTEFHPHSGPLRGSTRLTLCGSNFYLHPSGLVPEGTHQVTVGQSPCRPLPKDSSKLRPVPRKDFVEEFECELEPLGTQAVGPTNVSLTVTNMPPGKHFRVDGTSVLRGFSFMEPVLIAVQPLFGPRAGGTCLTLEGQSLSVGTSRAVLVNGTECLLARVSEGQLLCATPPGATVASVPLSLQVGGAQVPGSWTFQYREDPVVLSISPNCGYINSHITICGQHLTSAWHLVLSFHDGLRAVESRCERQLPEQQLCRLPEYVVRDPQGWVAGNLSARGDGAAGFTLPGFRFLPPPHPPSANLVPLKPEEHAIKFEYIGLGAVADCVGINVTVGGESCQHEFRGDMVVCPLPPSLQLGQDGAPLQVGVCVDGECHILGRVVRPGPDGVPQSTLLGILLPLLLLVAALATALVFSYWWRRKQLVLPPNLNDLASLDQTAGATPLPILYSGSDYRSGLCHFGVVYHGEYIDQAQNRIQCAIKSLSRITEMQQVEAFLREGLLMRGLNHPNVLALIGIMLPPEGLPHVLLPYMCHGDLLQFIRSPQRNPTVKDLISFGLQVARGMEYLAEQKFVHRDLAARNCMLDESFTVKVADFGLARDILDREYYSVQQHRHARLPVKWMALESLQTYRFTTKSDVVPSDAAMLGGRPSSATHLQSTSGGGGADSVCTAWGPLCAAASNLHELGPQHLA

SEQ ID NO: 768603 - protein, 1321 aa, Homo sapiens
RRLGRCCRASAGVRCSDPRAGKGFGFHRNLGRGSAILGLSGPLLKFGPVQTSSRAPSQAHAQVQAQAGRDPLGSQLASMELLPPLPQSFLLLLLLPAKPAAGEDWQCPRTPYAASRDFDVKYVVPSFSAGGLVQAMVTYEGDRNESAVFVAIRNRLHVLGPDLKSVQSLATGPAGDPGCQTCAACGPGPHGPPGDTDTKVLVLDPALPALVSCGSSLQGRCFLHDLEPQGTAVHLAAPACLFSAHHNRPDDCPDCVASPLGTRVTVVEQGQASYFYVASSLDAAVAASFSPRSVSIRRLKADASGFAPGFVALSVLPKHLVSYSIEYVHSFHTGAFVYFLTVQPASVTDDPSALHTRLARLSATEPELGDYRELVLDCRFAPKRRRRGAPEGGQPYPVLRVAHSAPVGAQLATELSIAEGQEVLFGVFVTGKDGGPGVGPNSVVCAFPIDLLDTLIDEGVERCCESPVHPGLRRGLDFFQSPSFCPNPPGLEALSPNTSCRHFPLLVSSSFSRVDLFNGLLGPVQVTALYVTRLDNVTVAHMGTMDGRILQVELVRSLNYLLYVSNFSLGDSGQPVQRDVSRLGDHLLFASGDQVFQVPIRGPGCRHFLTCGRCLRAWHFMGCGWCGNMCGQQKECPGSWQQDHCPPKLTEFHPHSGPLRGSTRLTLCGSNFYLHPSGLVPEGTHQVTVGQSPCRPLPKDSSKLRPVPRKDFVEEFECELEPLGTQAVGPTNVSLTVTNMPPGKHFRVDGTSVLRGFSFMEPVLIAVQPLFGPRAGGTCLTLEGQSLSVGTSRAVLVNGTECLLARVSEGQLLCATPPGATVASVPLSLQVGGAQVPGSWTFQYREDPVVLSISPNCGYINSHITICGQHLTSAWHLVLSFHDGLRAVESRCERQLPEQQLCRLPEYVVRDPQGWVAGNLSARGDGAAGFTLPGFRFLPPPHPPSANLVPLKPEEHAIKFEYIGLGAVADCVGINVTVGGESCQHEFRGDMVVCPLPPSLQLGQDGAPLQVGVCVDGECHILGRVVRPGPDGVPQSTLLGILLPLLLLVAALATALVFSYWWRRKQLVLPPNLNDLASLDQTAGATPLPILYSGSDYRSGLALPAIDGLDSTTCVHGASFSDSEDESCVPLLRKESIQLRDLDSALLAEVKDVLIPHERVVTHSDRVIGKGHFGVVYHGEYIDQAQNRIQCAIKSLSRITEMQQVEAFLREGLLMRGLNHPNVLALIGIMLPPEGLPHVLLPYMCHGDLLQFIRSPQRNPTVKDLISFGLQVARGMEYLAEQKFVHRDLAARNCITAAVLTHARECTPAPATLRASSAHLT

SEQ ID NO: 768604 - protein, 1264 aa, Homo sapiens
RRLGRCCRASAGVRCSDPRAGKGFGFHRNLGRGSAILGLSGPLLKFGPVQTSSRAPSQAHAQVQAQAGRDPLGSQLASMELLPPLPQSFLLLLLLPAKPAAGEDWQCPRTPYAASRDFDVKYVVPSFSAGGLVQAMVTYEGDRNESAVFVAIRNRLHVLGPDLKSVQSLATGPAGDPGCQTCAACGPGPHGPPGDTDTKVLVLDPALPALVSCGSSLQGRCFLHDLEPQGTAVHLAAPACLFSAHHNRPDDCPDCVASPLGTRVTVVEQGQASYFYVASSLDAAVAASFSPRSVSIRRLKADASGFAPGFVALSVLPKHLVSYSIEYVHSFHTGAFVYFLTVQPASVTDDPSALHTRLARLSATEPELGDYRELVLDCRFAPKRRRRGAPEGGQPYPVLRVAHSAPVGAQLATELSIAEGQEVLFGVFVTGKDGGPGVGPNSVVCAFPIDLLDTLIDEGVERCCESPVHPGLRRGLDFFQSPSFCPNPPGLEALSPNTSCRHFPLLVSSSFSRVDLFNGLLGPVQVTALYVTRLDNVTVAHMGTMDGRILQVELVRSLNYLLYVSNFSLGDSGQPVQRDVSRLGDHLLFASGDQVFQVPIRGPGCRHFLTCGRCLRAWHFMGCGWCGNMCGQQKECPGSWQQDHCPPKLTEFHPHSGPLRGSTRLTLCGSNFYLHPSGLVPEGTHQVTVGQSPCRPLPKDSSKLRPVPRKDFVEEFECELEPLGTQAVGPTNVSLTVTNMPPGKHFRVDGTSVLRGFSFMEPVLIAVQPLFGPRAGGTCLTLEGQSLSVGTSRAVLVNGTECLLARVSEGQLLCATPPGATVASVPLSLQVGGAQVPGSWTFQYREDPVVLSISPNCGYINSHITICGQHLTSAWHLVLSFHDGLRAVESRCERQLPEQQLCRLPEYVVRDPQGWVAGNLSARGDGAAGFTLPGFRFLPPPHPPSANLVPLKPEEHAIKFEYIGLGAVADCVGINVTVGGESCQHEFRGDMVVCPLPPSLQLGQDGAPLQEALPAIDGLDSTTCVHGASFSDSEDESCVPLLRKESIQLRDLDSALLAEVKDVLIPHERVVTHSDRVIGKGHFGVVYHGEYIDQAQNRIQCAIKSLSRITEMQQVEAFLREGLLMRGLNHPNVLALIGIMLPPEGLPHVLLPYMCHGDLLQFIRSPQRNPTVKDLISFGLQVARGMEYLAEQKFVHRDLAARNCMLDESFTVKVADFGLARDILDREYYSVQQHRHARLPVKWMALESLQTYRFTTKSDVWTQQ

SEQ ID NO: 768605 - protein, 83 aa, Homo sapiens
LPAIDGLDSTTCVHGASFSDSEDESCVPLLRKESIQLRDLDSALLAEVKDVLIPHERVVTHSDRVIGKGVGARWGWGRDGVSR

SEQ ID NO: 768606 - protein, 1390 aa, Homo sapiens
RRLGRCCRASAGVRCSDPRAGKGFGFHRNLGRGSAILGLSGPLLKFGPVQTSSRAPSQAHAQVQAQAGRDPLGSQLASMELLPPLPQSFLLLLLLPAKPAAGEDWQCPRTPYAASRDFDVKYVVPSFSAGGLVQAMVTYEGDRNESAVFVAIRNRLHVLGPDLKSVQSLATGPAGDPGCQTCAACGPGPHGPPGDTDTKVLVLDPALPALVSCGSSLQGRCFLHDLEPQGTAVHLAAPACLFSAHHNRPDDCPDCVASPLGTRVTVVEQGQASYFYVASSLDAAVAASFSPRSVSIRRLKADASGFAPGFVALSVLPKHLVSYSIEYVHSFHTGAFVYFLTVQPASVTDDPSALHTRLARLSATEPELGDYRELVLDCRFAPKRRRRGAPEGGQPYPVLRVAHSAPVGAQLATELSIAEGQEVLFGVFVTGKDGGPGVGPNSVVCAFPIDLLDTLIDEGVERCCESPVHPGLRRGLDFFQSPSFCPNPPGLEALSPNTSCRHFPLLVSSSFSRVDLFNGLLGPVQVTALYVTRLDNVTVAHMGTMDGRILQVELVRSLNYLLYVSNFSLGDSGQPVQRDVSRLGDHLLFASGDQVFQVPIRGPGCRHFLTCGRCLRAWHFMGCGWCGNMCGQQKECPGSWQQDHCPPKLTEFHPHSGPLRGSTRLTLCGSNFYLHPSGLVPEGTHQVTVGQSPCRPLPKDSSKLRPVPRKDFVEEFECELEPLGTQAVGPTNVSLTVTNMPPGKHFRVDGTSVLRGFSFMEPVLIAVQPLFGPRAGGTCLTLEGQSLSVGTSRAVLVNGTECLLARVSEGQLLCATPPGATVASVPLSLQVGGAQVPGSWTFQYREDPVVLSISPNCGYINSHITICGQHLTSAWHLVLSFHDGLRAVESRCERQLPEQQLCRLPEYVVRDPQGWVAGNLSARGDGAAGFTLPGFRFLPPPHPPSANLVPLKPEEHAIKFEYIGLGAVADCVGINVTVGGESCQHEFRGDMVVCPLPPSLQLGQDGAPLQEALPAIDGLDSTTCVHGASFSDSEDESCVPLLRKESIQLRDLDSALLAEVKDVLIPHERVVTHSDRVIGKGHFGVVYHGEYIDQAQNRIQCAIKSLSRITEMQQVEAFLREGLLMRGLNHPNVLALIGIMLPPEGLPHVLLPYMCHGDLLQFIRSPQRNPTVKDLISFGLQVARGMEYLAEQKFVHRDLAARNCMLDESFTVKVADFGLARDILDREYYSVQQHRHARLPVKWMALESLQTYRFTTKSDVWSFGVLLWELLTRGAPPYRHIDPFDLTHFLAQGRRLPQPEYCPDSLYQVMQQCWEADPAVRPTFRVLVGEVEQIVSALLGDHYVQLPATYMNLGPSTSHEMNVRPEQPQFSPMPGNVRRPRPLSEPPRPT

SEQ ID NO: 768607 - protein, 401 aa, Homo sapiens
KWRHEKLKPPPVPTSSSFPLPTALPAIDGLDSTTCVHGASFSDSEDESCVPLLRKESIQLRDLDSALLAEVKDVLIPHERVVTHSDRVIGKGHFGVVYHGEYIDQAQNRIQCAIKSLSRITEMQQVEAFLREGLLMRGLNHPNVLALIGIMLPPEGLPHVLLPYMCHGDLLQFIRSPQRNPTVKDLISFGLQVARGMEYLAEQKFVHRDLAARNCMLDESFTVKVADFGLARDILDREYYSVQQHRHARLPVKWMALESLQTYRFTTKSDVWSFGVLLWELLTRGAPPYRHIDPFDLTHFLAQGRRLPQPEYCPDSLYQVMQQCWEADPAVRPTFRVLVGEVEQIVSALLGDHYVQLPATYMNLGPSTSHEMNVRPEQPQFSPMPGNVRRPRPLSEPPRPT

SEQ ID NO: 768608 - protein, 1331 aa, Homo sapiens
RRLGRCCRASAGVRCSDPRAGKGFGFHRNLGRGSAILGLSGPLLKFGPVQTSSRAPSQAHAQVQAQAGRDPLGSQLASMELLPPLPQSFLLLLLLPAKPAAGEDWQCPRTPYAASRDFDVKYVVPSFSAGGLVQAMVTYEGDRNESAVFVAIRNRLHVLGPDLKSVQSLATGPAGDPGCQTCAACGPGPHGPPGDTDTKVLVLDPALPALVSCGSSLQGRCFLHDLEPQGTAVHLAAPACLFSAHHNRPDDCPDCVASPLGTRVTVVEQGQASYFYVASSLDAAVAASFSPRSVSIRRLKADASGFAPGFVALSVLPKHLVSYSIEYVHSFHTGAFVYFLTVQPASVTDDPSALHTRLARLSATEPELGDYRELVLDCRFAPKRRRRGAPEGGQPYPVLRVAHSAPVGAQLATELSIAEGQEVLFGVFVTGKDGGPGVGPNSVVCAFPIDLLDTLIDEGVERCCESPVHPGLRRGLDFFQSPSFCPNPPGLEALSPNTSCRHFPLLVSSSFSRVDLFNGLLGPVQVTALYVTRLDNVTVAHMGTMDGRILQVELVRSLNYLLYVSNFSLGDSGQPVQRDVSRLGDHLLFASGDQVFQVPIRGPGCRHFLTCGRCLRAWHFMGCGWCGNMCGQQKECPGSWQQDHCPPKLTEFHPHSGPLRGSTRLTLCGSNFYLHPSGLVPEGTHQVTVGQSPCRPLPKDSSKLRPVPRKDFVEEFECELEPLGTQAVGPTNVSLTVTNMPPGKHFRVDGTSVLRGFSFMEPVLIAVQPLFGPRAGGTCLTLEGQSLSVGTSRAVLVNGTECLLARVSEGQLLCATPPGATVASVPLSLQVGGAQVPGSWTFQYREDPVVLSISPNCGYINSHITICGQHLTSAWHLVLSFHDGLRAVESRCERQLPEQQLCRLPEYVVRDPQGWVAGNLSARGDGAAGFTLPGFRFLPPPHPPSANLVPLKPEEHAIKFEYIGLGAVADCVGINVTVGGESCQHEFRGDMVVCPLPPSLQLGQDGAPLQEALPAIDGLDSTTCVHGASFSDSEDESCVPLLRKESIQLRDLDSALLAEVKDVLIPHERVVTHSDRVIGKGHFGVVYHGEYIDQAQNRIQCAIKSLSRITEMQQVEAFLREGLLMRGLNHPNVLALIGIMLPPEGLPHVLLPYMCHGDLLQFIRSPQRNPTVKDLISFGLQVARGMEYLAEQKFVHRDLAARNCMLDESFTVKVADFGLARDILDREYYSVQQHRHARLPVKWMALESLQTYRFTTKSDVVPSDAAMLGGRPSSATHLQSTSGGGGADSVCTAWGPLCAAASNLHELELTPSCLWAMPGQRAVALHLVPAL

SEQ ID NO: 768609 - protein, 1363 aa, Homo sapiens
RRLGRCCRASAGVRCSDPRAGKGFGFHRNLGRGSAILGLSGPLLKFGPVQTSSRAPSQAHAQVQAQAGRDPLGSQLASMELLPPLPQSFLLLLLLPAKPAAGEDWQCPRTPYAASRDFDVKYVVPSFSAGGLVQAMVTYEGDRNESAVFVAIRNRLHVLGPDLKSVQSLATGPAGDPGCQTCAACGPGPHGPPGDTDTKVLVLDPALPALVSCGSSLQGRCFLHDLEPQGTAVHLAAPACLFSAHHNRPDDCPDCVASPLGTRVTVVEQGQASYFYVASSLDAAVAASFSPRSVSIRRLKADASGFAPGFVALSVLPKHLVSYSIEYVHSFHTGAFVYFLTVQPASVTDDPSALHTRLARLSATEPELGDYRELVLDCRFAPKRRRRGAPEGGQPYPVLRVAHSAPVGAQLATELSIAEGQEVLFGVFVTGKDGGPGVGPNSVVCAFPIDLLDTLIDEGVERCCESPVHPGLRRGLDFFQSPSFCPNPPGLEALSPNTSCRHFPLLVSSSFSRVDLFNGLLGPVQVTALYVTRLDNVTVAHMGTMDGRILQVELVRSLNYLLYVSNFSLGDSGQPVQRDVSRLGDHLLFASGDQVFQVPIRGPGCRHFLTCGRCLRAWHFMGCGWCGNMCGQQKECPGSWQQDHCPPKLTEFHPHSGPLRGSTRLTLCGSNFYLHPSGLVPEGTHQVTVGQSPCRPLPKDSSKLRPVPRKDFVEEFECELEPLGTQAVGPTNVSLTVTNMPPGKHFRVDGTSVLRGFSFMEPVLIAVQPLFGPRAGGTCLTLEGQSLSVGTSRAVLVNGTECLLARVSEGQLLCATPPGATVASVPLSLQVGGAQVPGSWTFQYREDPVVLSISPNCGYINSHITICGQHLTSAWHLVLSFHDGLRAVESRCERQLPEQQLCRLPEYVVRDPQGWVAGNLSARGDGAAGFTLPGFRFLPPPHPPSANLVPLKPEEHAIKFEYIGLGAVADCVGINVTVGGESCQHEFRGDMVVCPLPPSLQLGQDGAPLQEALPAIDGLDSTTCVHGASFSDSEDESCVPLLRKESIQLRDLDSALLAEVKDVLIPHERVVTHSDRVIGKGHFGVVYHGEYIDQAQNRIQCAIKSLSRITEMQQVEAFLREGLLMRGLNHPNVLALIGIMLPPEGLPHVLLPYMCHGDLLQFIRSPQRNPTVKDLISFGLQVARGMEYLAEQKFVHRDLAARNCMLDESFTVKVADFGLARDILDREYYSVQQHRHARLPVKWMALESLQTYRFTTKSDVWSFGVLLWELLTRGAPPYRHIDPFDLTHFLAQGRRLPQPEYCPDSLYQVMQQCWEADPAVRPTFRVLVGEVEQIVSALLGDHYVQLALSEQLAPEYSTLSTVR

SEQ ID NO: 768610 - protein, 129 aa, Homo sapiens
TPESPVFHPQVFQVPIRGPGCRHFLTCGRCLRAWHFMGCGWCGNMCGQQKECPGSWQQDHCPPKLTEVWLPWQGTGKSGTGWAWGGGQQVLITIFLRSGGCPSYLQGGHSCQRGCHMQRLGGRKVLECK

SEQ ID NO: 768611 - protein, 194 aa, Homo sapiens
PLTTPLPHAGSPGLLPHRAASASRCAPDPLVPAARGFPSRLPPTLLSCQLFRGGARASRGPPSPLRMPPLLPLASALRQCSSLCLCLPSAPPSSLLALQGFSPRSQAARFLFLFFIFSFFSFLFSSFFPFSLSFSETESRSVAQAGVRWRDLGSMHLPPPEFKGFSCLSLPNTWDYRRPPPCPANFCIFSRDGV

SEQ ID NO: 768612 - protein, 84 aa, Homo sapiens
NSCIPHTNIFLIKRHQALKSQSILTLSHPQQSIHAEKQGPFHTPWHPSTEYRWLCVEAVYYQRYEETLKSGKHWFWPSTATSNS

SEQ ID NO: 768613 - protein, 553 aa, Homo sapiens
RRGGRSRAPKREGDPPRSYGKVGPSSQSFPLWCPRLGRPVPRLLSSFRPSPSTRSLSLSPAAMEQPPAPKSKLKKLSEDSLTKQPEEVFDVLEKLGEGSYGSVFKAIHKESGQVVAIKQVPVESDLQEIIKEISIMQQCDSPYVVKYYGSYFKNTDLWIVMEYCGAGSVSDIIRLRNKTLIEDEIATILKSTLKGLEYLHFMRKIHRDIKAGNILLNTEGHAKLADFGVAGQLTDTMAKRNTVIGTPFWMAPEVIQEIGYNCVADIWSLGITSIEMAEGKPPYADIHPMRAIFMIPTNPPPTFRKPELWSDDFTDFVKKCLVKNPEQRATATQLLQHPFIKNAKPVSILRDLITEAMEIKAKRHEEQQRELEEEEENSDEDELDSHTMVKTSVESVGTMRATSTMSEGAQTMIEHNSTMLESDLGTMVINSEDEEEEDGTMKRNATSPQVQRPSFMDYFDKQDFKNKSHENCNQNMHEPFPMSKNVFPDNWKVPQDGDFDFLKNLSLEELQMRLKALDPMMEREIEELRQRYTAKRQPILDAMDAKKRRQQNF

SEQ ID NO: 768614 - protein, 553 aa, Homo sapiens; identical to SEQ ID NO: 768613

SEQ ID NO: 768615 - protein, 197 aa, Homo sapiens [sequence omitted]

SEQ ID NO: 768616 - protein, 505 aa, Homo sapiens
RRGGRSRAPKREGDPPRSYGKVGPSSQSFPLWCPRLGRPVPRLLSSFRPSPSTRSLSLSPAAMEQPPAPKSKLKKLSEDSLTKQPEEVFDVLEKLGEGSYGSVFKAIHKESGQVVAIKQVPVESDLQEIIKEISIMQQCDSPYVVKYYGSYFKNTDLWIVMEYCGAGSVSDIIRLRNKTLIEDEIATILKSTLKGLEYLHFMRKIHRDIKAGNILLNTEGHAKLADFGVAGQLTDTMAKRNTVIGTPFWMAPEVIQEIGYNCVADIWSLGITSIEMAEGKPPYADIHPMRAIFMIPTNPPPTFRKPELWSDDFTDFVKKCLVKNPEQRATATQLLQHPFIKNAKPVSILRDLITEAMEIKAKRHEEQQRELEEEEENSDEDELDSHTMVKTSVESVGTMRATSTMSEGAQTMIEHNSTMLESDLGTMVINSEDEEEEDGTMKRNATSPQVQRPSFMDYFDKQDFKNKSHENCNQNMHEPFPMSKNVFPDNWKVPQDGDFDFVSTF

SEQ ID NO: 768617 - protein, 557 aa, Homo sapiens
RRGGRSRAPKREGDPPRSYGKVGPSSQSFPLWCPRLGRPVPRLLSSFRPSPSTRSLSLSPAAMEQPPAPKSKLKKLSEDSLTKQPEEVFDVLEKLGEGSYGSVFKAIHKESGQVVAIKQVPVESDLQEIIKEISIMQQCDSPYVVKYYGSYFKNTDLWIVMEYCGAGSVSDIIRLRNKTLIEDEIATILKSTLKGLEYLHFMRKIHRDIKAGNILLNTEGHAKLADFGVAGQLTDTMAKRNTVIGTPFWMAPEVIQEIGYNCVADIWSLGITSIEMAEGKPPYADIHPMRAIFMIPTNPPPTFRKPELWSDDFTDFVKKCLVKNPEQRATATQLLQHPFIKNAKPVSILRDLITEAMEIKAKRHEEQQRELEEEEENSDEDELDSHTMVKTSVESVGTMRATSTMSEGAQTMIEHNSTMLESDLGTMVINSEDEEEEDGTMKRNATSPQVQRPSFMDYFDKQDFKNKSHENCNQNMHEPFPMSKNVFPDNWKVPQDGDFDFIEPYWARADFPLPRLWPLASAVIFNRSTNGGQEVTRMVAKGEELSYTPLDGTQRLW

SEQ ID NO: 768618 - protein, 230 aa, Homo sapiens
RRGGRSRAPKREGDPPRSYGKVGPSSQSFPLWCPRLGRPVPRLLSSFRPSPSTRSLSLSPAAMEQPPAPKSKLKKLSEDSLTKQPEEVFDVLEKLGEGSYGSVFKAIHKESGQVVAIKQVPVESDLQEIIKEISIMQQCDSPYVVKYYGSYFKNTDLWIVMEYCGAGSVSDIIRLRNKTGFLTDTTEGSASCDLRMDLTLFHLGAEFLHYLLLYEADPLSCVFSLLVFSV

SEQ ID NO: 768619 - protein, 443 aa, Homo sapiens
RRGGRSRAPKREGDPPRSYGKVGPSSQSFPLWCPRLGRPVPRLLSSFRPSPSTRSLSSVSDIIRLRNKTLIEDEIATILKSTLKGLEYLHFMRKIHRDIKAGNILLNTEGHAKLADFGVAGQLTDTMAKRNTVIGTPFWMAPEVIQEIGYNCVADIWSLGITSIEMAEGKPPYADIHPMRAIFMIPTNPPPTFRKPELWSDDFTDFVKKCLVKNPEQRATATQLLQHPFIKNAKPVSILRDLITEAMEIKAKRHEEQQRELEEEEENSDEDELDSHTMVKTSVESVGTMRATSTMSEGAQTMIEHNSTMLESDLGTMVINSEDEEEEDGTMKRNATSPQVQRPSFMDYFDKQDFKNKSHENCNQNMHEPFPMSKNVFPDNWKVPQDGDFDFLKNLSLEELQMRLKALDPMMEREIEELRQRYTAKRQPILDAMDAKKRRQQNF

SEQ ID NO: 768620 - protein, 217 aa, Homo sapiens
CLLALISIASVIRSLNIDDRFGILAKRHEEQQRELEEEEENSDEDELDSHTMVKTSVESVGTMRATSTMSEGAQTMIEHNSTMLESDLGTMVINSEDEEEEDGTMKRNATSPQVQRPSFMDYFDKQDFKNKSHENCNQNMHEPFPMSKNVFPDNWKVPQDGDFDFLKNLSLEELQMRLKALDPMMEREIEELRQRYTAKRQPILDAMDAKKRRQQNF

SEQ ID NO: 768621 - protein, 215 aa, Homo sapiens
MSCQKAVLELNIGSQLGPKSPERTEGVTAFEDYGTGLLENQLSVGDFVKIQKAFEFTYNASLDAIISSTTSNTNSVVMAWREKSKKRLNMTSFNIAQGIHAFDYHSRLNLIATAGINNKVCLWNPYVVSKPVGVLWGHSASVIAVQFFVERKQLFSFSKDKVLRLWDIQHQLSIQRIACSFPKSQDFRCLFHFDEAHGRLFISFNNQLALVGNEK

SEQ ID NO: 768622 - protein, 215 aa, Homo sapiens
MDNQGVIYSDLNLPPNPKRQQRKPKGNKSSILATEQEITYAELNLQKASQDFQGNDKTYHCKDLPSAPEKLIVGILGIICLILMASVVTIVVIPSRHCGHCPEEWITYSNSCYYIGKERRTWEESLLACTSKNSSLLSIDNEEEMKFLSIISPSSWIGVFRNSSHHPWVTMNGLAFKHEIKDSDNAELNCAVLQVNRLKSAQCGSSIIYHCKHKL

SEQ ID NO: 768623 - protein, 233 aa, Homo sapiens
MDNQGVIYSDLNLPPNPKRQQRKPKGNKSSILATEQEITYAELNLQKASQDFQGNDKTYHCKDLPSAPEKLIVGILGIICLILMASVVTIVVIPSTLIQRHNNSSLNTRTQKARHCGHCPEEWITYSNSCYYIGKERRTWEESLLACTSKNSSLLSIDNEEEMKFLSIISPSSWIGVFRNSSHHPWVTMNGLAFKHEIKDSDNAELNCAVLQVNRLKSAQCGSSIIYHCKHKL

SEQ ID NO: 768624 - protein, 215 aa, Homo sapiens; identical to SEQ ID NO: 768622

SEQ ID NO: 768625 - protein, 1174 aa, Homo sapiens
MPLPFGLKLKRTRRYTVSSKSCLVARIQLLNNEFVEFTLSVESTGQESLEAVAQRLELREVTYFSLWYYNKQNQRRWVDLEKPLKKQLDKYALEPTVYFGVVFYVPSVSQLQQEITRYQYYLQLKKDILEGSIPCTLEQAIQLAGLAVQADFGDFDQYESQDFLQKFALFPVGWLQDEKVLEEATQKVALLHQKYRGLTAPDAEMLYMQEVERMDGYGEESYPAKDSQGSDISIGACLEGIFVKHKNGRHPVVFRWHDIANMSHNKSFFALELANKEETIQFQTEDMETAKYIWRLCVARHKFYRLNQCNLQTQTVTVNPIRRRSSSRMSLPKPQPYVMPPPPQLHYNGHYTEPYASSQDNLFVPNQNGYYCHSQTSLDRAQIDFNGRIRNGSVYSAHSTNSLNNPQPYLQPSPMSSNPSITGSDVMRPDYLPSHRHSAVIPPSYRPTPDYETVMKQLNRGLVHAERQSHSLRNLNIGSSYAYSRPAALVYSQPEIREHAQLPSPAAAHCPFSLSYSFHSPSPYPYPAERRPVVGAVSVPELTNAQLQAQDYPSPNIMRTQVYRPPPPYPPPRPANSTPDLSRHLYISSSNPDLITRRVHHSVQTFQEDSLPVAHSLQEVSEPLTAARHAQLHKRNSIEVAGLSHGLEGLRLKERTLSASAAEVAPRAVSVGSQPSVFTERTQREGPEEAEGLRYGHKKSLSDATMLIHSSEEEEDEDFEEESGARAPPARAREPRPGLAQDPPGCPRVLLAGPLHILEPKAHVPDAEKRMMDSSPVRTTAEAQRPWRDGLLMPSMSESDLTTSGRYRARRDSLKKRPVSDLLSGKKNIVEGLPPLGGMKKTRVDAKKIGPLKLAALNGLSLSRVPLPDEGKEVATRATNDERCKILEQRLEQGMVFTEYERILKKRLVDGECSTARLPENAERNRFQDVLPYDDARVELVPTKENNTGYINASHIKVSVSGIEWDYIATQGPLQNTCQDFWQMVWEQGIAIIAMVTAEEEGGREKSFRYWPRLGSRHNTVTYGRFKITTRFRTDSGCYATTGLKMKHLLTGQERTVWHLQYTDWPEHGCPEDLKGFLSYLEEIQSVRRHTNSTSDPQSPNPPLLVHCSAGVGRTGVVILSEIMIACLEHNEVLDIPRVLDMLRQQRMMLVQTLCQYTFVYRVLIQFLKSSRLI

SEQ ID NO: 768626 - protein, 1174 aa, Homo sapiens; identical to SEQ ID NO: 768625

SEQ ID NO: 768627 - protein, 1215 aa, Homo sapiens
MPLPFGLKLKRTRRYTVSSKSCLVARIQLLNNEFVEFTLSVESTGQESLEAVAQRLELREGGGLTPSPRLEYSGTVIAQCILKHLGSSDPFALACQELGLQVTYFSLWYYNKQNQRRWVDLEKPLKKQLDKYALEPTVYFGVVFYVPSVSQLQQEITRYQYYLQLKKDILEGSIPCTLEQAIQLAGLAVQADFGDFDQYESQDFLQKFALFPVGWLQDEKVLEEATQKVALLHQKYRGLTAPDAEMLYMQEVERMDGYGEESYPAKDSQGSDISIGACLEGIFVKHKNGRHPVVFRWHDIANMSHNKSFFALELANKEETIQFQTEDMETAKYIWRLCVARHKFYRLNQCNLQTQTVTVNPIRRRSSSRMSLPKPQPYVMPPPPQLHYNGHYTEPYASSQDNLFVPNQNGYYCHSQTSLDRAQIDFNGRIRNGSVYSAHSTNSLNNPQPYLQPSPMSSNPSITGSDVMRPDYLPSHRHSAVIPPSYRPTPDYETVMKQLNRGLVHAERQSHSLRNLNIGSSYAYSRPAALVYSQPEIREHAQLPSPAAAHCPFSLSYSFHSPSPYPYPAERRPVVGAVSVPELTNAQLQAQDYPSPNIMRTQVYRPPPPYPPPRPANSTPDLSRHLYISSSNPDLITRRVHHSVQTFQEDSLPVAHSLQEVSEPLTAARHAQLHKRNSIEVAGLSHGLEGLRLKERTLSASAAEVAPRAVSVGSQPSVFTERTQREGPEEAEGLRYGHKKSLSDATMLIHSSEEEEDEDFEEESGARAPPARAREPRPGLAQDPPGCPRVLLAGPLHILEPKAHVPDAEKRMMDSSPVRTTAEAQRPWRDGLLMPSMSESDLTTSGRYRARRDSLKKRPVSDLLSGKKNIVEGLPPLGGMKKTRVDAKKIGPLKLAALNGLSLSRVPLPDEGKEVATRATNDERCKILEQRLEQGMVFTEYERILKKRLVDGECSTARLPENAERNRFQDVLPYDDARVELVPTKENNTGYINASHIKVSVSGIEWDYIATQGPLQNTCQDFWQMVWEQGIAIIAMVTAEEEGGREKSFRYWPRLGSRHNTVTYGRFKITTRFRTDSGCYATTGLKMKHLLTGQERTVWHLQYTDWPEHGCPEDLKGFLSYLEEIQSVRRHTNSTSDPQSPNPPLLVHCSAGVGRTGVVILSEIMIACLEHNEVLDIPRVLDMLRQQRMMLVQTLCQYTFVYRVLIQFLKSSRLI

SEQ ID NO: 768628 - protein, 1006 aa, Homo sapiens
MPLPFGLKLKRTRRYTVSSKSCLVARIQLLNNEFVEFTLSVESTGQESLEAVAQRLELREVTYFSLWYYNKQNQRRWVDLEKPLKKQLDKYALEPTVYFGVVFYVPSVSQLQQEITRYQYYLQLKKDILEGSIPCTLEQAIQLAGLAVQADFGDFDQYESQDFLQKFALFPVGWLQDEKVLEEATQKVALLHQKYRGLTAPDAEMLYMQEVERMDGYGEESYPAKDSQGSDISIGACLEGIFVKHKNGRHPVVFRWHDIANMSHNKSFFALELANKEETIQFQTEDMETAKYIWRLCVARHKFYRLNQCNLQTQTVTVNPIRRRSSSRMSLPKPQPYVMPPPPQLHYNGHYTEPYASSQDNLFVPNQNGYYCHSQTSLDRAQIDFNGRIRNGSVYSAHSTNSLNNPQPYLQPSPMSSNPSITGSDVMRPDYLPSHRHSAVIPPSYRPTPDYETVMKQLNRGLVHAERQSHSLRNLNIGSSYAYSRPAALVYSQPEIREHAQLPSPAAAHCPFSLSYSFHSPSPYPYPAERRPVVGAVSVPELTNAQLQAQDYPSPNIMRTQVYRPPPPYPPPRPANSTPDLSRHLYISSSNPDLITRRVHHSVQTFQEDSLPVAHSLQEVSEPLTAARHAQLHKRNSIEVAGLSHGLEGLRLKERTLSASAAEVAPRAVSVGSQPSVFTERTQREGPEEAEGLRYGHKKSLSDATMLIHSSEEEEDEDFEEESGARAPPARAREPRPGLAQDPPGCPRVLLAGPLHILEPKAHVPDAEKRMMDSSPVRTTAEAQRPWRDGLLMPSMSESDLTTSGRYRARRDSLKKRPVSDLLSGKKNIVEGLPPLGGMKKTRVDAKKIGPLKLAALNGLSLSRVPLPDEGKEVATRATNDERCKILEQRLEQGMVFTEYERILKKRLVDGECSTARLPENAERNRFQDVLPYDDARVELVPTKENNTGYINASHIKVSVSGIEWDYIATQGPLQNTCQDFWQMVWEQGIAIIAMVTAEEVGTYFS

SEQ ID NO: 768629 - protein, 250 aa, Homo sapiens
LKPEAKLKAKPAGGHRARQDTVGSPTLQRKGVLSLGPTALVPQASGPLRAGRCCTERVSPPQAMVRARFTVPPRASIQLRWSGLGCATRLSGTSAERPIAQDAGNPHDRPQAGGLGGGMAGPLAHQSPVLEKSSKPMPWGLHPAGLSHPLSQRPGCRLSLSSKREGRPAGPYTGASYPQLETRSLLVRGSRGRSTGFRSTLPLPLVPWVTVQKQRLQSLWWNPGSRRRNTGAFEASSRCPIPFRLGLISL

SEQ ID NO: 768630 - protein, 117 aa, Homo sapiens
RKAGAAWARPPCAARAMHRTGRIPQAPCVQGAQEEAWGKETIAIPDLGEVGRGGGEGRSPTLSCPAHCRLRRLPRPSPTCTVAGPLWLTCTAALPRAASSPPTLAVLVPGLMGIRRL

SEQ ID NO: 768631 - protein, 69 aa, Homo sapiens
REFIILLREFIILQFIILPREFIILLRVFIICWVSRVAFSVKGTVEQPAAWWPGLRGLSSCYVLSPSQA

SEQ ID NO: 768632 - protein, 94 aa, Homo sapiens
YRQKRDYIHSLKLLNVLEEYITDEQKEEEEEEGEEEELIRIFQEQQKKWQQYRSVRRERLKEMKLLRDQFVKALEDFEDLCDRVFSDEDSELDN

SEQ ID NO: 768633 - protein, 154 aa, Homo sapiens
CECGPFALRAAGARPQNLLGRGLQGAGRGAERLLFLSCSRATAHAHLTTKLPSSPLAFLATREGPAQGHPATSSCFIVARATRCTRAEMATRSKGVPGEVYSDMDTKLIKDCLVCQREQDPWKRWPSGLPRTTGQAQWLMTIIPELWKAEVGRS

SEQ ID NO: 768634 - protein, 756 aa, Homo sapiens
MSPQKRVKNVQAQNRTSQGSSSFQTTLSAWKVKQDPSNSKNISKHGQNNPVGDYEHADDQAEEDALQMAVGYFEKGPIKASQNKDKTLEKHLKTVENVAWKNGLASEEIDILLNIALSGKFGNAVNTRILKCMIPATVISEDSVVKAVSWLCVGKCSGSTKVLFYRWLVAMFDFIDRKEQINLLYGFFFASLQDDALCPYVCHLLYLLTKKENVKPFRVRKLLDLQAKMGMQPHLQALLSLYKFFAPALISVSLPVRKKIYFKNSENLWKTALLAVKQRNRGPSPEPLKLMLGPANVRPLKRKWNSLSVIPVLNSSSYTKECGKKEMSLSDCLNRSGSFPLEQLQSFPQLLQNIHCLELPSQMGSVLNNSLLLHYINCVRDEPVLLRFYYWLSQTLQEECIWYKVNNYEHGKEFTNFLDTIIRAECFLQEGFYSCEAFLYKSLPLWDGLCCRSQFLQLVSWIPFSSFSEVKPLLFDHLAQLFFTSTIYFKCSVLQSLKELLQNWLLWLSMDIHMKPVTNSPLETTLGGSMNSVSKLIHYVGWLSTTAMRLESNNTFLLHFILDFYEKVCDIYINYNLPLVVLFPPGIFYSALLSLDTSILNQLCFIMHRYRKNLTAAKKNELVQKTKSEFNFSSKTYQEFNHYLTSMVGCLWTSKPFGKGIYIDPEILEKTGVAEYKNSLNVVHHPSFLSYAVSFLLQESPEERTVNVSSIRGKKWSWYLDYLFSQGLQGLKLFIRSSVHHSSIPRAEGINCNNQY

SEQ ID NO: 768635 - protein, 522 aa, Homo sapiens
MSPQKRVKNVQAQNRTSQGSSSFQTTLSAWKVKQDPSNSKNISKHGQNNPVGDYEHADDQAEEDALQMAVGYFEKGPIKASQNKDKTLEKHLKTVENVAWKNGLASEEIDILLNIALSGKFGNAVNTRILKCMIPATVISEDSVVKAVSWLCVGKCSGSTKVLFYRWLVAMFDFIDRKEQINLLYGFFFASLQDDALCPYVCHLLYLLTKKENVKPFRVRKLLDLQAKMGMQPHLQALLSLYKFFAPALISVSLPVRKKIYFKNSENLWKTALLAVKQRNRGPSPEPLKLMLGPANVRPLKRKWNSLSVIPVLNSSSYTKECGKKEMSLSDCLNRSGSFPLEQLQSFPQLLQNIHCLELPSQMGSVLNNSLLLHYINCVRDEPVLLRFYYWLSQTLQEECIWYKVNNYEHGKEFTNFLDTIIRAECFLQEGFYSCEAFLYKSLPLWDGLCCRSQFLQLVSWIPFSSFSEVKPLLFDHLAQLFFTSTIYFKCSVLQSLKELLQNWLLWLSMDIHMKPVTNSPL

SEQ ID NO: 768636 - protein, 742 aa, Homo sapiens
MSPQKRVKNVQAQNRTSQGSSSFQTTLSAWKVKQDPSNSKNISKHGQNNPVGDYEHADDQAEEDALQMAVGYFEKGPIKASQNKDKTLEKHLKTVENVAWKNGLASEEIDILLNIALSGKFGNAVNTRILKCMIPATVISEDSVVKAVSWLCVGKCSGSTKVLFYRWLVAMFDFIDRKEQINLLYGFFFASLQDDALCPYVCHLLYLLTKKENVKPFRVRKLLDLQAKMGMQPHLQALLSLYKFFAPALISVSLPVRKKIYFKNSENLWKTALLAVKQRNRGPSPEPLKLMLGPANVRPLKRKWNSLSVIPVLNSSSYTKECGKKEMSLSDCLNRSGSFPLEQLQSFPQLLQNIHCLELPSQMGSVLNNSLLLHYINCVRDEPVLLRFYYWLSQTLQEECIWYKVNNYEHGKEFTNFLDTIIRAECFLQEGFYSCEAFLYKSLPLWDGLCCRSQFLQLVSWIPFSSFSEVKPLLFDHLAQLFFTSTIYFKCSVLQSLKELLQNWLLWLSMDIHMKPVTNSPLETTLGGSMNSVSKLIHYVGWLSTTAMRLESNNTFLLHFILDFYEKVCDIYINYNLPLVVLFPPGIFYSALLSLDTSILNQLCFIMHRYRKNLTAAKKNELVQKTKSEFNFSSKTYQEFNHYLTSMVGCLWTSKPFGKGIYIDPEILEKTGVAEYKNSLNVVHHPSFLSYAVSFLLQGKKWSWYLDYLFSQGLQGLKLFIRSSVHHSSIPRAEGINCNNQY

SEQ ID NO: 768637 - protein, 88 aa, Homo sapiens
RTKLPLLLQTADRGRRTSGNGPTSDPNPRSPLPQGDPRLGSAEWRPGRLGIRVRRPREQRVNAAFHGSDYRGRALPPPPPRHFSHGTF

SEQ ID NO: 768638 - protein, 120 aa, Homo sapiens
MNLRAGGGSSERGAGSSVAGRPGGSSAAGRQMRGGGQQVPNPRPGFRGPAALEEWPSVSLRAPGPWQGDAGGMLWNMMRKLAGSGKAHSNPFNKQSGETDEQALVRGPDVTPEEALLELP

SEQ ID NO: 768639 - protein, 111 aa, Homo sapiens
MLRSDDDGVYAVMCGSQARIQHHQLFHLIPHQSFPSDPIWRRISHLRNPRVSYCSCMSSGAHALWTHTALCPPTADNVEPGCRSIRLLQASLPPLTVILSRTPQRKIISQL

SEQ ID NO: 768640 - protein, 78 aa, Homo sapiens
MFGRSQQSSQDPAAVKTQYAWWSLFQVQTREPRSELDPDPSLFQAQTREPRPEPDPSLFQAQTREGNHAQSRTRASSR

SEQ ID NO: 768641 - protein, 115 aa, Homo sapiens
PISPLFPSQMCTPANTPATPPNFPDALTMFSRLKASESFHSGGSGTPMAATATSPPPHFPHAATSSSAASSWPTRASPPGAHSTTSHSRPCGLQHPLLRLQTGHPWPPNRPPQNP

SEQ ID NO: 768642 - protein, 70 aa, Homo sapiens
MLFFKNLFPNLYGMANCWGVGLGREGLHERHTHTTPHAQAGPAPASGGQKEVSSPAPPPRGHSVPSWGEG

SEQ ID NO: 768643 - protein, 146 aa, Homo sapiens
VAPGLPGGGKSQAEPYKGLLFCPNTHISLILLLVTLPSSGFLKAKMSNTQAERSIIGMIDMFHKYTRRDDKIDKPSLLTMMKENFPNFLSACDKKGTNYLADVFEKKDKNEDKKIDFSEFLSLLGDIATDYHKQSHGAAPCSGGSQ

SEQ ID NO: 768644 - protein, 126 aa, Homo sapiens
GLGCRPAQTDYWLKDAALGSFLKAKMSNTQAERSIIGMIDMFHKYTRRDDKIDKPSLLTMMKENFPNFLSACDKKGTNYLADVFEKKDKNEDKKIDFSEFLSLLGDIATDYHKQSHGAAPCSGGSQ

SEQ ID NO: 768645 - protein, 85 aa, Homo sapiens
MIDMFHKYTRRDDKIDKPSLLTMMKENFPNFLSACDKKGTNYLADVFEKKDKNEDKKIDFSEFLSLLGDIATAISGTAFRYSHLG

SEQ ID NO: 768646 - protein, 163 aa, Homo sapiens
MARGDQNTADRIKQKETKARAREGTPERRRRREPRANRAKTREQGKKPQRTQTKDSGREGAGATTRERRGGEEEGRRDRQERRRGQEREKEGNEREGRRGDGRRARGGGEGGKEKARREGEENGETGGGGGGGEGKGQGGGGGRRAGGGGGRGGGGGGGGRGG

SEQ ID NO: 768647 - protein, 146 aa, Homo sapiens; identical to SEQ ID NO: 768643

SEQ ID NO: 768648 - protein, 92 aa, Homo sapiens
EPKPQLGTLIFSNITPKSFNMSWTTQAGLFAKIVINVSDAHSLHESQQFTVSGDAKQAHITGLVENTGYDVSVAGTTLAGDPTRPLTAFVIT

SEQ ID NO: 768649 - protein, 124 aa, Homo sapiens
QDYCQSLNVWSYLPWIFFSFGLGFINNLNIISYRITKEEVNLIHLRLQPKIQSNSSFSLSCFFFMFLLLIAARILHRISIEMYEILWSLHVRIAQYVTIQFQREPTFVRFTDQGVVEEVELQIR

SEQ ID NO: 768650 - protein, 56 aa, Homo sapiens
MGLNTVGKYLRGPGRGLHKPLNMKVKEKEAQERLWVGLGPGAVATPVIPALWEAEV

SEQ ID NO: 768651 - protein, 340 aa, Homo sapiens [sequence omitted]

SEQ ID NO: 768652 - protein, 340 aa, Homo sapiens [sequence omitted]

SEQ ID NO: 768653 - protein, 364 aa, Homo sapiens
METKDPSQMFSMLISKVSHPQPGASGSLGPEQPTHQPRQLQVTMDAEGLALLLPPVTLAALVDSWLREDCPGLNYAALVSGAGPSQAALWAKSPGVLAGQPFFDAIFTQLNCQVSWFLPEGSKLVPVARVAEVRGPAHCLLLGERVALNTLARCSGIASAAAAAVEAARGAGWTGHVAGTRKTTPGFRLVEKYGLLVGGAASHRYDLGGLVMVKDNHVVAAGGVEKAVRAARQAADFALKVEVECSSLQEAVQAAEAGADLVLLDNFKPEVKVGSASGEGSVVGSYLPLACVPQELHPTATVLKAQFPSVAVEASGGITLDNLPQFCGPHIDVISMGMLTQAAPALDFSLKLFAKEVAPVPKIH

SEQ ID NO: 768654 - protein, 129 aa, Homo sapiens [sequence omitted]

SEQ ID NO: 768655 - protein, 93 aa, Homo sapiens
AAVSYHCTTALQPGRQVETLSQKQNKAKTTPKSGFLINPKFMVHPKLFKCQSRLPAPQLQCWALSSPSPSRLPAPQCQVLGPVLTLVLPAAQQ

SEQ ID NO: 768656 - protein, 297 aa, Homo sapiens
MDAEGLALLLPPVTLAALVDSWLREDCPGLNYAALVSGAGPSQAALWAKSPGVLAGQPFFDAIFTQLNCQVSWFLPEGSKLVPVARVAEVRGPAHCLLLGERVALNTLARCSGIASAAAAAVEAARGAGWTGHVAGTRKTTPGFRLVEKYGLLVGGAASHRYDLGGLVMVKDNHVVAAGGVEKAVRAARQAADFALKVEVECSSLQEAVQAAEAGADLVLLDNFKPEELHPTATVLKAQFPSVAVEASGGITLDNLPQFCGPHIDVISMGMLTQAAPALDFSLKLFAKEVAPVPKIH

SEQ ID NO: 768657 - protein, 246 aa, Homo sapiens
VRLGVNRHRGQVTMDAERPGAAAAARHPGSPGGQLAPRGLPRAQLRSLGQRGRPLAGGAVGQIPWGTGRAAFLRCHIYPTQLPSLLVPPRGIEAGAGGQSGRGPGPASHRYDLGGLVMVKDNHVVAAGGVEKAVRAARQAADFALKVEVECSSLQEAVQAAEAGADLVLLDNFKPEELHPTATVLKAQFPSVAVEASGGITLDNLPQFCGPHIDVISMGMLTQAAPALDFSLKLFAKEVAPVPKIH

SEQ ID NO: 768658 - protein, 223 aa, Homo sapiens
METKDPSQMFSMLISKVSHPQPGASGSLGPEQPTHQPRQLQVTMDAEGLALLLPPVTLAALVDSWLREDCPGLNYAALVSGAGPSQAALWAKSPGVLAGQPFFDAIFTQLNCQVSWFLPEGSKLVPVARVAEVRGPAHCLLLGERVALNTLARCSGIASAAAAAVEAARGAGWTGHVAGTRKTTPGFRLVEIQCPKSTSPKPEEDDTGHGLTWLLRTLWVTHL

SEQ ID NO: 768659 - protein, 77 aa, Homo sapiens
GCTLQQGVGSEEALVPYSKPSFPSPGGHSSSGTASSKGSTGPRKTEVLRAGHQRNASDLLDIGYMGSNSQGQFTGEL

SEQ ID NO: 768660 - protein, 1064 aa, Homo sapiens
MSLLMFTQLLLCGFLYVRVDGSRLRQEDFPPRIVEHPSDVIVSKGEPTTLNCKAEGRPTPTIEWYKDGERVETDKDDPRSHRMLLPSGSLFFLRIVHGRRSKPDEGSYVCVARNYLGEAVSRNASLEVALLRDDFRQNPTDVVVAAGEPAILECQPPRGHPEPTIYWKKDKVRIDDKEERISIRGGKLMISNTRKSDAGMYTCVGTNMVGERDSDPAELTVFERPTFLRRPINQVVLEEEAVEFRCQVQGDPQPTVRWKKDDADLPRGRYDIKDDYTLRIKKTMSTDEGTYMCIAENRVGKMEASATLTVRAPPQFVVRPRDQIVAQGRTVTFPCETKGNPQPAVFWQKEGSQNLLFPNQPQQPNSRCSVSPTGDLTITNIQRSDAGYYICQALTVAGSILAKAQLEVTDVLTDRPPPIILQGPANQTLAVDGTALLKCKATGDPLPVISWLKEGFTFPGRDPRATIQEQGTLQIKNLRISDTGTYTCVATSSSGETSWSAVLDVTESGATISKNYDLSDLPGPPSKPQVTDVTKNSVTLSWQPGTPGTLPASAYIIEAFSQSVSNSWQTVANHVKTTLYTVRGLRPNTIYLFMVRAINPQGLSDPSPMSDPVRTQDISPPAQGVDHRQVQKELGDVLVRLHNPVVLTPTTVQVTWTVDRQPQFIQGYRVMYRQTSGLQATSSWQNLDAKVPTERSAVLVNLKKGVTYEIKVRPYFNEFQGMDSESKTVRTTEEAPSAPPQSVTVLTVGSYNSTSISVSWDPPPPDHQNGIIQEYKIWCLGNETRFHINKTVDAAIRSVIIGGLFPGIQYRVEVAASTSAGVGVKSEPQPIIIGRRNEVVITENNNSITEQITDVVKQPAFIAGIGGACWVILMGFSIWLYWRRKKRKGLSNYAVTFQRGDGGLMSNGSRPGLLNAGDPSYPWLADSWPATSLPVNNSNSGPNEIGNFGRGDVLPPVPGQGDKTATMLSDGAIYSSIDFTTKTSYNSSSQITQATPYATTQILHSNSIHELAVDLPDPQWKSSIQQKTDLMGFGYSLPDQNKGNNALLYIPDYRLAEGLSNRMP

SEQ ID NO: 768661 - protein, 1379 aa, Homo sapiens
MSLLMFTQLLLCGFLYVRVDGSRLRQEDFPPRIVEHPSDVIVSKGEPTTLNCKAEGRPTPTIEWYKDGERVETDKDDPRSHRMLLPSGSLFFLRIVHGRRSKPDEGSYVCVARNYLGEAVSRNASLEVALLRDDFRQNPTDVVVAAGEPAILECQPPRGHPEPTIYWKKDKVRIDDKEERISIRGGKLMISNTRKSDAGMYTCVGTNMVGERDSDPAELTVFERPTFLRRPINQVVLEEEAVEFRCQVQGDPQPTVRWKKDDADLPRGRYDIKDDYTLRIKKTMSTDEGTYMCIAENRVGKMEASATLTVRAPPQFVVRPRDQIVAQGRTVTFPCETKGNPQPAVFWQKEGSQNLLFPNQPQQPNSRCSVSPTGDLTITNIQRSDAGYYICQALTVAGSILAKAQLEVTDVLTDRPPPIILQGPANQTLAVDGTALLKCKATGDPLPVISWLKEGFTFPGRDPRATIQEQGTLQIKNLRISDTGTYTCVATSSSGETSWSAVLDVTESGATISKNYDLSDLPGPPSKPQVTDVTKNSVTLSWQPGTPGTLPASAYIIEAFSQSVSNSWQTVANHVKTTLYTVRGLRPNTIYLFMVRAINPQGLSDPSPMSDPVRTQDISPPAQGVDHRQVQKELGDVLVRLHNPVVLTPTTVQVTWTVDRQPQFIQGYRVMYRQTSGLQATSSWQNLDAKVPTERSAVLVNLKKGVTYEIKVRPYFNEFQGMDSESKTVRTTEEAPSAPPQSVTVLTVGSYNSTSISVSWDPPPPDHQNGIIQEYKIWCLGNETRFHINKTVDAAIRSVIIGGLFPGIQYRVEVAASTSAGVGVKSEPQPIIIGRRNEVVITENNNSITEQITDVVKQPAFIAGIGGACWVILMGFSIWLYWRRKKRKGLSNYAVTFQRGDGGLMSNGSRPGLLNAGDPSYPWLADSWPATSLPVNNSNSGPNEIGNFGRGDVLPPVPGQGDKTATMLSDGAIYSSIDFTTKTSYNSSSQITQATPYATTQILHSNSIHELAVDLPDPQWKSSIQQKTDLMGFGYSLPDQNKGNNGGKGGKKKKNKNSSKPQKNNGSTWANVPLPPPPVQPLPGTELEHYAVEQQENGYDSDSWCPPLPVQTYLHQGLEDELEEDDDRVPTPPVRGVASSPAISFGQQSTATLTPSPREGDATHAAGFTWDELTRAYQFDIAKQTWHIQSNNQPPQPPVPPLGYVSGALISDLETDVADDDADDEEEALEIPRPLRALDQTPGSSMDNLDSSVTGKAFTSSQRPRPTSPFSTDSNTSAALSQSQRPRPTKKHKGGRMDQQPALPHRREGMTDEEALVPYSKPSFPSPGGHSSSGTASSKGSTGPRKTEVLRAGHQRNASDLLDIGYMGSNSQGQFTGEL

SEQ ID NO: 768662 - protein, 289 aa, Homo sapiens
MSLLMFTQLLLCGFLYVRVDGSRLRQEDFPPRIVEHPSDVIVSKGEPTTLNCKAEGRPTPTIEWYKDGERVETDKDDPRSHRMLLPSGSLFFLRIVHGRRSKPDEGSYVCVARNYLGEAVSRNASLEVALLRDDFRQNPTDVVVAAGEPAILECQPPRGHPEPTIYWKKDKVRIDDKEERISIRGGKLMISNTRKSDAGMYTCVGTNMVGERDSDPAELTVFERPTFLRRPINQVVLEEEAVEFRCQVQGDPQPTVRWKKDDADLPRGRYDIKDDYTLRIKKTMSTGMS

SEQ ID NO: 768663 - protein, 144 aa, Homo sapiens
GQAFAQYSGLSIHIRSHSGKKPYQCKECGKAFTTSTSLIQHTRIHTGEKPYECVECGKTFITSSRRSKHLKTHSGEKPFVCKICGKAFLYSSRLNVHLRTHTGEKPFVCKECGKAFAVSSRLSRHERIHTGEKPYECKDMSVTI

SEQ ID NO: 768664 - protein, 144 aa, Homo sapiens; identical to SEQ ID NO: 768663

SEQ ID NO: 768665 - protein, 59 aa, Homo sapiens
VRRGAQPESPNSCQQGSKAATIAASLQGLSLPGGDLHPFKSYFSVLGCDSTNTVCSFQN

SEQ ID NO: 768666 - protein, 96 aa, Homo sapiens
MFARHDIVALGQRSRDVPQKCTLHAEPYLLFSTDKKLLLCIRCFRDMQKESRAHCVDLESAYVQGCERLEQAVLVSAGAWRAGPRGGDREPDHALS

SEQ ID NO: 768667 - protein, 115 aa, Homo sapiens
MVEEGLYGSQARPNASGGRARAPLPLWGNPSLGRVNHLRSCPTSTPSRAPLHHAAALRMEPRGTAGPALSTTCLPGGSGNWRRSGEGICPTPPPGLSCGPPGIGTHDPSVLFVFV

SEQ ID NO: 768668 - protein, 173 aa, Homo sapiens
MLVLNLKKIDLSCFAFPLPCFYPPSSCEIFFEKTRLSENIIFAVYFFLTVENGEHCDFTVLRNMLIREHTQDLKDVTNNVHYENYGIRKLAAVTYHGVDNKKNKGQLTKSPLAQMEEERREQVAKIKKMEMEMEQVFEMKVKEKVQKLKDSEAEVQRTFLASEKGLQKKRHRN

SEQ ID NO: 768669 - protein, 113 aa, Homo sapiens
LVPISCLEHTQDLKDVTNNVHYENYGIRKLAAVTYHGVDNKKNKGQLTKSPLAQMEEERREQVAKIKKMEMEMEQVFEMKVKEKVQKLKDSEAEVQRTFLASEKGLQKKRHRN

SEQ ID NO: 768670 - protein, 155 aa, Homo sapiens
KYLSQMLRDLPSCPCAYPLEAMDSPVSLQDEHQGRSFRWRDASGPRERLDIYQPTARFCLRSMLSGESSTLAAQHCCYDEDSRLLTRGKGAGMPNLISTDFSPKLHFKFDTTPWILCKGDWSRLHAVLPPNNGRACTDNPLEEEYLAQLQEAKEY

SEQ ID NO: 768671 - protein, 210 aa, Homo sapiens
GALLIFALLAAAVASDYWYILEVADAGNGSAWPGRAELLSSHSGLWRICEGQNGCIPLVDPFASESLDVSTSVQHLILLHRAVIVVLPLSLVLLVCGWICGLLSSLAQSVSLLLFTGCYFLLGSVLTLAGVSIYISYSHLAFAETVQQYGPQHMQGVRVSFGWSMALAWGSCALEAFSGTLLLSAAWTLSLSPPICGHLSPQQVGGRGGD

SEQ ID NO: 768672 - protein, 60 aa, Homo sapiens
SSHPPPSASQSAGITGMSHDTRPVIFFKDCHWVEPTGPSENYGKETHSCKPKPSTLRRTR

SEQ ID NO: 768673 - protein, 109 aa, Homo sapiens
FIDIGHYVRDISAYEELVSKLNLLVEDELKQIAENIESINQNKAPLKYIGNYAILDHLGSGAFGCVYKVRKHSGQNLLAMKEVNLHNPAFGKDKKDRDSSVRNIVSELT

SEQ ID NO: 768674 - protein, 173 aa, Homo sapiens
PDPLFGKVTWTSTAMAEGEDVPPLPTSSGDGWEKDLEEALEAGGCDLETLRNIIQGRPLPADLRAKVWKIALNVAGKGDSLASWDGILDLPEQNTIHKDCLQFIDQLSVPEEKAAELLLDIESVITFYCKSRNIKYSTSLSWIHLLKPLVHLQLPRSDLYNCFYAIMNKYIPR

SEQ ID NO: 768675 - protein, 698 aa, Homo sapiens
PDPLFGKVTWTSTAMAEGEDVPPLPTSSGDGWEKDLEEALEAGGCDLETLRNIIQGRPLPADLRAKVWKIALNVAGKGDSLASWDGILDLPEQNTIHKDCLQFIDQLSVPEEKAAELLLDIESVITFYCKSRNIKYSTSLSWIHLLKPLVHLQLPRSDLYNCFYAIMNKYIPRDCSQKGRPFHLFRLLIQYHEPELCSYLDTKKITPDSYALNWLGSLFACYCSTEVTQAIWDGYLQQADPFFIYFLMLIILVNAKEVILTQESDSKEEVIKFLENTPSSLNIEDIEDLFSLAQYYCSKTPASFRKDNHHLFGSTLLGIKDDDADLSQALCLAISVSEILQANQLQGEGVRFFVVDCRPAEQYNAGHLSTAFHLDSDLMLQNPSEFAQSVKSLLEAQKQSIESGSIAGGEHLCFMGSGREEEDMYMNMVLAHFLQKNKEYVSIASGGFMALQQHLADINVDGPENGYGHWIASTSGSRSSINSVDGESPNGSSDRGMKSLVNKMTVALKTKSVNVREKVISFIENTSTPVDRHVSSSDRVGKPYRGVKPVFSIGDEEEYDTDEIDSSSMSDDDRKEVVNIQTWINKPDVKHHFPCKEVKESGHMFPSHLLVTATHMYCLREIVSRKGLAYIQSRQALNSVVKITSKKKHPELITFKYGNSSASGIEILAIERYLIPNAGDATKAIKQQIMKVLDALES

SEQ ID NO: 768676 - protein, 660 aa, Homo sapiens
GSTFRQSDVDVNSNGGRRRCAAAANVERRRLIALNVAGKGDSLASWDGILDLPEQNTIHKDCLQFIDQLSVPEEKAAELLLDIESVITFYCKSRNIKYSTSLSWIHLLKPLVHLQLPRSDLYNCFYAIMNKYIPRDCSQKGRPFHLFRLLIQYHEPELCSYLDTKKITPDSYALNWLGSLFACYCSTEVTQAIWDGYLQQADPFFIYFLMLIILVNAKEVILTQESDSKEEVIKFLENTPSSLNIEDIEDLFSLAQYYCSKTPASFRKDNHHLFGSTLLGIKDDDADLSQALCLAISVSEILQANQLQGEGVRFFVVDCRPAEQYNAGHLSTAFHLDSDLMLQNPSEFAQSVKSLLEAQKQSIESGSIAGGEHLCFMGSGREEEDMYMNMVLAHFLQKNKEYVSIASGGFMALQQHLADINVDGPENGYGHWIASTSGSRSSINSVDGESPNGSSDRGMKSLVNKMTVALKTKSVNVREKVISFIENTSTPVDRHVSSSDRVGKPYRGVKPVFSIGDEEEYDTDEIDSSSMSDDDRKEVVNIQTWINKPDVKHHFPCKEVKESGHMFPSHLLVTATHMYCLREIVSRKGLAYIQSRQALNSVVKITSKKKHPELITFKYGNSSASGIEILAIERYLIPNAGDATKAIKQQIMKVLDALES

SEQ ID NO: 768677 - protein, 713 aa, Homo sapiens
PDPLFGKVTWTSTAMAEGEDVPPLPTSSGDGWEKDLEEALEAGGCDLETLRNIIQGRPLPADLRAKVWKIALNVAGKGDSLASWDGILDLPEQNTIHKDCLQFIDQLSVPEEKAAELLLDIESVITFYCKSRNIKYSTSLSWIHLLKPLVHLQLPRSDLYNCFYAIMNKYIPRDCSQKGRPFHLFRLLIQYHEPELCSYLDTKKITPDSYALNWLGSLFACYCSTEVTQAIWDGYLQQADPFFIYFLMLIILVNAKEVILTQESDSKEEVIKFLENTPSSLNIEDIEDLFSLAQYYCSKTPASFRKDNHHLFGSTLLGIKDDDADLSQALCLAISVSEILQANQLQGEGVRFFVVDCRPAEQYNAGHLSTAFHLDSDLMLQNPSEFAQSVKSLLEAQKQSIESGSIAGGEHLCFMGSGREEEDMYMNMVLAHFLQKNKEYVSIASGGFMALQQHLADINVDGPENGYGHWIASTSGSRSSINSVDGESPNGSSDRGMKSLVNKMTVALKTKSVNVREKVISFIENTSTPVDRMSFNLPWPDRSCTERHVSSSDRVGKPYRGVKPVFSIGDEEEYDTDEIDSSSMSDDDRKEVVNIQTWINKPDVKHHFPCKEVKESGHMFPSHLLVTATHMYCLREIVSRKGLAYIQSRQALNSVVKITSKKKHPELITFKYGNSSASGIEILAIERYLIPNAGDATKAIKQQIMKVLDALES

SEQ ID NO: 768678 - protein, 202 aa, Homo sapiens
MKSLVNKMTVALKTKSVNVREKVISFIENTSTPVDRHVSSSDRVGKPYRGVKPVFSIGDEEEYDTDEIDSSSMSDDDRKEVVNIQTWINKPDVKHHFPCKEVKESGHMFPSHLLVTATHMYCLREIVSRKGLAYIQSRQALNSVVKITSKKKHPELITFKYGNSSASGIEILAIERYLIPNAGDATKAIKQQIMKVLDALES

SEQ ID NO: 768679 - protein, 181 aa, Homo sapiens [sequence omitted]

SEQ ID NO: 768680 - protein, 698 aa, Homo sapiens; identical to SEQ ID NO: 768675

SEQ ID NO: 768681 - protein, 663 aa, Homo sapiens
  misc_feature (661)..(661): Xaa can be any naturally occurring amino acid
PDPLFGKVTWTSTAMAEGEDVPPLPTSSGDGWEKDLEEALEAGGCDLETLRNIIQGRPLPADLRAKVWKIALNVAGKGDSLASWDGILDLPEQNTIHKDCLQFIDQLSVPEEKAAELLLDIESVITFYCKSRNIKYSTSLSWIHLLKPLVHLQLPRSDLYNCFYAIMNKYIPRDCSQKGRPFHLFRLLIQYHEPELCSYLDTKKITPDSYALNWLGSLFACYCSTEVTQAIWDGYLQQADPFFIYFLMLIILVNAKEVILTQESDSKEEVIKFLENTPSSLNIEDIEDLFSLAQYYCSKTPASFRKDNHHLFGSTLLGIKDDDADLSQALCLAISVSEILQANQLQGEGVRFFVVDCRPAEQYNAGHLSTAFHLDSDLMLQNPSEFAQSVKSLLEAQKQSIESGSIAGGEHLCFMGSGREEEDMYMNMVLAHFLQKNKEYVSIASGGFMALQQHLADINVDGPENGYGHWIASTSGSRSSINSVDGESPNGSSDRGMKSLVNKMTVALKTKSVNVREKVISFIENTSTPVDRHVSSSDRVGKPYRGVKPVFSIGDEEEYDTDEIDSSSMSDDDRKEVVNIQTWINKPDVKHHFPCKEVKESGHMFPSHLLVTATHMYCLREIVSRKGLAYIQSRQALNSVVKITSKNRNLGNRKVFDSKCXGC

SEQ ID NO: 768682 - protein, 235 aa, Homo sapiens
MGGTLAWTLLLPLLLRESDSLEPSCTVSSADVDWNAEFSATCLNFSGLSLSLPHNQSLRASNVILLDLSGNGLRELPVTFFAHLQKLEVLNVLRNPLSRVDGALAARCDLDLQADCNCALESWHDIRRDNCSGQKPLLCWDTTSSQHNLSAFLEVSCAPGLASATIGAVVVSGCLLLGLAIAGPVLAWRLWRCRVARSRELNKPWAAQDGPKPGLGLQPRYGSRSAPKPQVAVPS

SEQ ID NO: 768683 - protein, 235 aa, Homo sapiens; identical to SEQ ID NO: 768682

SEQ ID NO: 768684 - protein, 235 aa, Homo sapiens; identical to SEQ ID NO: 768682

SEQ ID NO: 768685 - protein, 73 aa, Homo sapiens [sequence omitted]

SEQ ID NO: 768686 - protein, 493 aa, Homo sapiens
MGSLQPLATLYLLGMLVASCLGRLSWYDPDFQARLTRSNSKCQGQLEVYLKDGWHMVCSQSWGRSSKQWEDPSQASKVCQRLNCGVPLSLGPFLVTYTPQSSIICYGQLGSFSNCSHSRNDMCHSLGLTCLEPQKTTPPTTRPPPTTTPEPTAPPRLQLVAQSGGQHCAGVVEFYSGSLGGTISYEAQDKTQDLENFLCNNLQCGSFLKHLPETEAGRAQDPGEPREHQPLPIQWKIQNSSCTSLEHCFRKIKPQKSGRVLALLCSGFQPKVQSRLVGGSSICEGTVEVRQGAQWAALCDSSSARSSLRWEEVCREQQCGSVNSYRVLDAGDPTSRGLFCPHQKLSQCHELWERNSYCKKVFVTCQDPNPAGLAAGTVASIILALVLLVVLLVVCGPLAYKKLVKKFRQKKQRQWIGPTGMNQNMSFHRNHTATVRSHAENPTASHVDNEYSQPPRNSRLSAYPALEGVLHRSSMQPDNSSDSDYDLHGAQRL

SEQ ID NO: 768687 - protein, 493 aa, Homo sapiens; identical to SEQ ID NO: 768686

SEQ ID NO: 768688 - protein, 104 aa, Homo sapiens
GSDFVFQARVLGHHHQAQETRYEVRIQLVYKNRSPLRAREYVWAPGHCPCPMLAPHRDYLMAVQRLVSPDGTQDQLLLPHAGYARPWSPAEDSRIRLTARRCPG

SEQ ID NO: 768689 - protein, 104 aa, Homo sapiens; identical to SEQ ID NO: 768688

SEQ ID NO: 768690 - protein, 115 aa, Homo sapiens
  misc_feature (5)..(5): Xaa can be any naturally occurring amino acid
  misc_feature (8)..(8): Xaa can be any naturally occurring amino acid
GRYGXRVXIRRRRPPAGRHDPSPRRAGGGGDRRALLHSSCRRRDAQRGRAAWGPPPPPRRTMKLRSKAAALLLLALAALLLALLSLRAGRAEPPALPARPASAPQRHPAPVPARW

SEQ ID NO: 768691 - protein, 49 aa, Homo sapiens
ERRTAPSLDATTVTANSADRHQQCSPQQYPTCPPPWLILPSIAPPTSTP

SEQ ID NO: 768692 - protein, 349 aa, Homo sapiens
METPPVNTIGEKDTSQPQQEWEKNLRENLDSVIQIRQQPRDPPTETLELEVSPDPASQILEHTQGAEKLVAELEGDSHKSHGSTSQMPEALQASDLWYCPDGSFVKKIVIRGHGLDKPKLGSCCRVLALGFPFGSGPPEGWTELTMGVGPWREETWGELIEKCLESMCQGEEAELQLPGHSGPPVRLTLASFTQGRDSWELETSEKEALAREERARGTELFRAGNPEGAARCYGRALRLLLTLPPPGPPERTVLHANLAACQLLLGQPQLAAQSCDRVLEREPGHLKALYRRGVAQAALGNLEKATADLKKVLAIDPKNRAAQEELGKVVIQGKNQDAGLAQGLRKMFG

SEQ ID NO: 768693 - protein, 279 aa, Homo sapiens
MQGSEVVNVLKSLLSNLDEVKKEREGLENDLKSVNFDMTSKFLTALAQDGVINEEALSVTELDRVYGGLTTKVQESLKKQEGLLKNIQVSHQEFSKMKQSNNEANLREEVLKNLATAYDNFVELVANLKEGTKFYNELTEILVRFQNKCSDIVFARKTERDELLKDLQQSIAREPSAPSIPTPAYQSSPAGGHAPTPPTPAPRTMPPTKPQPPAKASTTCASSKSSSFCYCSISSGGWDCCASSITNAWLSSSSTGAGTTLSHLSRISWVLPNAHAHGL

SEQ ID NO: 768694 - protein, 160 aa, Homo sapiens
MQGSEVVNVLKSLLSNLDEVKKEREGLENDLKSVNFDMTSKFLTALAQDGVINEEALSVTELDRVYGGLTTKVQESLKKQEGLLKNIQVSHQEFSKMKQSNNEANLREEVLKNLATAYDNFVELVANLKEGTKFYNELTEILVRFQNKCSDIVLLVEGYR

SEQ ID NO: 768695 - protein, 193 aa, Homo sapiens
MQGSEVVNVLKSLLSNLDEVKKEREGLENDLKSVNFDMTSKFLTALAQDGVINEEALSVTELDRVYGGLTTKVQESLKKQEGLLKNIQVSHQEFSKMKQSNNEANLREEVLKNLATAYDNFVELVANLKEGTKFYNELTEILVRFQNKCSDIVFARKTERDELLKPETWEEAGEKMPSESLCLAAQARLYTRR

SEQ ID NO: 768696 - protein, 183 aa, Homo sapiens
MQGSEVVNVLKSLLSNLDEVKKEREGLENDLKSVNFDMTSKFLTALAQDGVINEEALSVTELDRVYGGLTTKVQESLKKQEGLLKNIQVSHQEFSKMKQSNNEANLREEVLKNLATAYDNFVELVANLKEGTKFYNELTEILVRFQNKCSDIVFAGGTLPPSSSKRPNESSEHPPVIDVPPGL

SEQ ID NO: 768697 - protein, 31 aa, Homo sapiens [sequence omitted]

SEQ ID NO: 768698 - protein, 139 aa, Homo sapiens
MTMEKGMSSGEGLPSRSSQVSAGKITAKELETKQSYKEKRGGFVLVHAGAGYHSESKAKEYKHVCKRACQKAIEKLQAGALATDAVTAALVELEDSPFTNAGMGSNLNLLGEIECDASIMDGKSLNFGAVGALSGMWAL

SEQ ID NO: 768699 - protein, 420 aa, Homo sapiens
MTMEKGMSSGEGLPSRSSQVSAGKITAKELETKQSYKEKRGGFVLVHAGAGYHSESKAKEYKHVCKRACQKAIEKLQAGALATDAVTAALVELEDSPFTNAGMGSNLNLLGEIECDASIMDGKSLNFGAVGALSGIKNPVSVANRLLCEGQKGKLSAGRIPPCFLVGEGAYRWAVDHGIPSCPPNIMTTRFSLAAFKRNKRKLELAERVDTDFMQLKKRRQSSEKENDSGTLDTVGAVVVDHEGNVAAAVSSGGLALKHPGRVGQAALYGCGCWAENTGAHNPYSTAVSTSGCGEHLVRTILARECSHALQAEDAHQALLETMQNKFISSPFLASEDGVLGGVIVLRSCRCSAEPDSSQNKQTLLVEFLWSHTTESMCVGYMSAQDGKAKTHISRLPPGAVAGQSVAIEGGVCRLESPVN

SEQ ID NO: 768700 - protein, 397 aa, Homo sapiens
MTMEKGMSSGEGLPSRSSQVSAGKITAKELETKQSYKEKRGGFVLVHAGAGYHSESKAKEYKHVCKRACQKDSPFTNAGMGSNLNLLGEIECDASIMDGKSLNFGAVGALSGIKNPVSVANRLLCEGQKGKLSAGRIPPCFLVGEGAYRWAVDHGIPSCPPNIMTTRFSLAAFKRNKRKLELAERVDTDFMQLKKRRQSSEKENDSGTLDTVGAVVVDHEGNVAAAVSSGGLALKHPGRVGQAALYGCGCWAENTGAHNPYSTAVSTSGCGEHLVRTILARECSHALQAEDAHQALLETMQNKFISSPFLASEDGVLGGVIVLRSCRCSAEPDSSQNKQTLLVEFLWSHTTESMCVGYMSAQDGKAKTHISRLPPGAVAGQSVAIEGGVCRLESPVN

SEQ ID NO: 768701 - protein, 373 aa, Homo sapiens
  misc_feature (343)..(343): Xaa can be any naturally occurring amino acid
  misc_feature (359)..(359): Xaa can be any naturally occurring amino acid
  misc_feature (364)..(364): Xaa can be any naturally occurring amino acid
  misc_feature (368)..(368): Xaa can be any naturally occurring amino acid
  misc_feature (373)..(373): Xaa can be any naturally occurring amino acid
MTMEKGMSSGEGLPSRSSQVSAGKITAKELETKQSYKEKRGGFVLVHAGAGYHSESKAKEYKHVCKRACQKAIEKLQAGALATDAVTAALVELEDSPFTNAGMGSNLNLLGEIECDASIMDGKSLNFGAVGALSGIKNPVSVANRLLCEGQKGKLSAGRIPPCFLVGEGAYRWAVDHGIPSCPPNIMTTRFSLAAFKRNKRKLELAERVDTDFMQLKKRRQSSEKENDSGTLDTVGAVVVDHEGNVAAAVSSGGLALKHPGRVGQAALYGCGCWAENTGAHNPYSTAVSTSGCGEHLVRTILARECSHALQAEDAHQALLETMQNKFIMFIVLTPTCRCMVLXQKQFFPGISSVRILLXTNGRXGDLXLNLFX

SEQ ID NO: 768702 - protein, 129 aa, Homo sapiens
MTMEKGMSSGEGLPSRSSQVSAGKITAKELETKQSYKEKRGGFVLVHAGAGYHSESKAKEYKHVCKRACQKAIEKLQAGALATDAVTAALVELEVYTHSYTSWSCIQPSIHVLLVKRQRKSPLPRISTF

SEQ ID NO: 768703 - protein, 318 aa, Homo sapiens
MGSNLNLLGEIECDASIMDGKSLNFGAVGALSGIKNPVSVANRLLCEGQKGKLSAGRIPPCFLVGEGAYRWAVDHGIPSCPPNIMTTRFSLAAFKRNKRKLELAERVDTDFMQLKKRRQSSEKENDSGTLDTVGAVVVDHEGNVAAAVSSGGLALKHPGRVGQAALYGCGCWAENTGAHNPYSTAVSTSGCGEHLVRTILARECSHALQAEDAHQALLETMQNKFISSPFLASEDGVLGGVIVLRSCRCSAEPDSSQNKQTLLVEFLWSHTTESMCVGYMSAQDGKAKTHISRLPPGAVAGQSVAIEGGVCRLESPVN

SEQ ID NO: 768704 - protein, 318 aa, Homo sapiens; identical to SEQ ID NO: 768703

SEQ ID NO: 768705 - protein, 132 aa, Homo sapiens
MTMEKGMSSGEGLPSRSSQVSAGKITAKELETKQSYKEKRGGFVLVHAGAGYHSESKAKEYKHVCKRACQKAIEKLQAGALATDAVTAALVELELMWKGQFQVLCVLTNLFLDIIKNPTKTKFKTISNVKVY

SEQ ID NO: 768706 - protein, 64 aa, Homo sapiens
EDTSMVRASPSPSNSAFPRLAPLVLCTVKPLPFNSPVASALIHQVSGMIYVSPHSLSEESFAWV

SEQ ID NO: 768707 - protein, 154 aa, Homo sapiens
RSPSWSFHIDLGPSMLGDVLSIMDKEEWDPEEGEGGYHGDEGAAGTITQAPPYAVAAPPLARQEGKAGPDLPSLPSHALEDEGWAAAAPSPGSARSMGSHTTRDSSSLSSCTSGILEERSPAFRGPDRARAAVSRQPDKEFSFMDEEEEDEIRV

SEQ ID NO: 768708 - protein, 154 aa, Homo sapiens; identical to SEQ ID NO: 768707

SEQ ID NO: 768709 - protein, 154 aa, Homo sapiens; identical to SEQ ID NO: 768707

SEQ ID NO: 768710 - protein, 154 aa, Homo sapiens; identical to SEQ ID NO: 768707

SEQ ID NO: 768711 - protein, 154 aa, Homo sapiens; identical to SEQ ID NO: 768707

SEQ ID NO: 768712 - protein, 154 aa, Homo sapiens; identical to SEQ ID NO: 768707

SEQ ID NO: 768713 - protein, 179 aa, Homo sapiens
MMFLFCLPLKRSCPWSPYIFYVLSLNGLNYIHGFKNYPDESQICIFSIDFTPELLSQISFISIWISHRHFKFHTLKTELIFLPIRRPPPSSHLSRNDSKVCGHLTLSLWSHARAFSLPHRHSPPLPTNAPLFQLANLYSFFKLHIGHHFSRNISPTPNVCVKYSSYVFLQHFLSPSVLL

SEQ ID NO: 768714 - protein, 67 aa, Homo sapiens
FSSQGTSLQMAMDREQNQVLMVASSHRKLVSPPAPPTHVERKLASPSCLSQSVCPHPPVYELVTWPS

SEQ ID NO: 768715 - protein, 321 aa, Homo sapiens
AARPEAQSRSSPTPESRSQEPLDLVLVPDDCRPGTPPSDLIEIQVVKVTDTTLVPEPPEPGSFHCALCPAAFRLVSELLFHEHGHLAGAEGGGQGGDPSRCHVCGHSCPGPASLRAHYSLHTGERPYRCALCPRAFKALAPLLRHQHRHGVEPGTSRRPPDTAAVAEQRPGVAPERAEVVMAAAAAGAAVGKPFACRFCAKPFRRSSDMRDHERVHTGERPYHCGICGKGFTQSSVLSGHARIHTGERPFRCTLCDRTFNNSSNFRKHQRTHFHGPGPGLGDSGGQLGSSAAEGSGSGCGVGDPAEEGRGETAKVKVEADQ

SEQ ID NO: 768716 - protein, 321 aa, Homo sapiens; identical to SEQ ID NO: 768715

SEQ ID NO: 768717 - protein, 321 aa, Homo sapiens; identical to SEQ ID NO: 768715

SEQ ID NO: 768718 - protein, 321 aa, Homo sapiens; identical to SEQ ID NO: 768715

SEQ ID NO: 768719 - protein, 1043 aa, Homo sapiens
MAASFPPTLGLSSAPDEIQHPHIKFSEWKFKLFRVRSFEKTPEEAQKEKKDSFEGKPSLEQSPAVLDKADGQKPVPTQPLLKAHPKFSKKFHDNEKARGKAIHQANLRHLCRICGNSFRADEHNRRYPVHGPVDGKTLGLLRKKEKRATSWPDLIAKVFRIDVKADVDSIHPTEFCHNCWSIMHRKFSSAPCEVYFPRNVTMEWHPHTPSCDICNTARRGLKRKSLQPNLQLSKKLKTVLDQARQARQHKRRAQARISSKDVMKKIANCSKIHLSTKLLAVDFPEHFVKSISCQICEHILADPVETNCKHVFCRVCILRCLKVMGSYCPSCRYPCFPTDLESPVKSFLSVLNSLMVKCPAKECNEEVSLEKYNHHISSHKESKEIFVHINKGGRPRQHLLSLTRRAQKHRLRELKLQVKAFADKEEGGDVKSVCMTLFLLALRARNEHRQADELEAIMQGKGSGLQPAVCLAIRVNTFLSCSQYHKMYRTVKAITGRQIFQPLHALRNAEKVLLPGYHHFEWQPPLKNVSSSTDVGIIDGLSGLSSSVDDYPVDTIAKRFRYDSALVSALMDMEEDILEGMRSQDLDDYLNGPFTVVVKESCDGMGDVSEKHGSGPVVPEKAVRFSFTIMKITIAHSSQNVKVFEEAKPNSELCCKPLCLMLADESDHETLTAILSPLIAEREAMKSSELMLELGGILRTFKFIFRGTGYDEKLVREVEGLEASGSVYICTLCDATRLEASQNLVFHSITRSHAENLERYEVWRSNPYHESVEELRDRVKGVSAKPFIETVPSIDALHCDIGNAAEFYKIFQLEIGEVYKNPNASKEERKRWQATLDKHLRKKMNLKPIMRMNGNFARKLMTKETVDAVCELIPSEERHEALRELMDLYLKMKPVWRSSCPAKECPESLCQYSFNSQRFAELLSTKFKYRYEGKITNYFHKTLAHVPEIIERDGSIGAWASEGNESGNKLFRRFRKMNARQSKCYEMEDVLKHHWLYTSKYLQKFMNAHNALKTSGFTMNPQASLGDPLGIEDSLESQDSMEF

SEQ ID NO: 768720 - protein, 328 aa, Homo sapiens
MMSGEPLHVKTPIRDSMALSKMAGTSVYLKMDSAQPSGSFKIRGIGHFCKRWAKQGCAHFVCSSAGNAGMAAAYAARQLGVPATIVVPSTTPALTIERLKNEGATVKVVGELLDEAFELAKALAKNNPGWVYIPPFDDPLIWEGHASIVKELKETLWEKPGAIALSVGGGGLLCGVVQGLQEVGWGDVPVIAMETFGAHSFHAATTAGKLVSLPKITSVAKALGVKTVGAQALKLFQEHPIFSEVISDQEAVAAIEKFVDDEKILVEPACGAALAAVYSHVIQKLQLEGNLRTPLPSLVVIVCGGSNISLAQLRALKEQLGMTNRLPK

SEQ ID NO: 768721 - protein, 136 aa, Homo sapiens
METFGAHSFHAATTAGKLVSLPKITSVAKALGVKTVGAQALKLFQEHPIFSEVISDQEAVAAIEKFVDDEKILVEPACGAALAAVYSHVIQKLQLEGNLRTPLPSLVVIVCGGSNISLAQLRALKEQLGMTNRLPK

SEQ ID NO: 768722 - protein, 266 aa, Homo sapiens
MMSGEPLHVKTPIRDSMALSKMAGTSVYLKMDSAQPSGSFKIRGIGHFCKRWAKQGCAHFVCSSAGNAGMAAAYAARQLGVPATIVVPSTTPALTIERLKNEGATVKVVGELLDEAFELAKALAKNNPGWVYIPPFDDPLIWEGHASIVKELKETLWEKPGAIALSVGGGGLLCGVVQGLQEVGWGDVPVIAMETFGAHSFHAATTAGKLVSLPKITSVAKALGVKTVGAQALKLFQEHPIFSEVISDQEAVAAIEKFVGMCQVLP

SEQ ID NO: 768723 - protein, 199 aa, Homo sapiens
MMSGEPLHVKTPIRDSMALSKMAGTSVYLKMDSAQPSGSFKIRGIGHFCKRWAKQGCAHFVCSSAGNAGMAAAYAARQLGVPATIVVPSTTPALTIERLKNEGATVKVVGELLDEAFELAKALAKNNPGWVYIPPFDDPLIWEGHASIVKELKETLWEKPGAIALSVGGGGLLCGVVQGLQEVGRVEEPSQPSSQEAHP

SEQ ID NO: 768724 - protein, 70 aa, Homo sapiens
PCPHLSPVSPTPILFWVPTSLSVAKALGVKTVGAQALKLFQEHPIFSEVISDQEAVAAIEKFVGMCQVLP

SEQ ID NO: 768725 - protein, 422 aa, Homo sapiens
MDDRKRAKRKSSYREQQPGPPRGRNALWGAADADRRGLGQERRGFTMLAGLKLLSSSDLPTSASRSAGTTSVSHRAQPFERFEAEELCVNGPVGMMSGEPLHVKTPIRDSMALSKMAGTSVYLKMDSAQPSGSFKIRGIGHFCKRWAKQGCAHFVCSSAGNAGMAAAYAARQLGVPATIVVPSTTPALTIERLKNEGATVKVVGELLDEAFELAKALAKNNPGWVYIPPFDDPLIWEGHASIVKELKETLWEKPGAIALSVGGGGLLCGVVQGLQEVGWGDVPVIAMETFGAHSFHAATTAGKLVSLPKITSVAKALGVKTVGAQALKLFQEHPIFSEVISDQEAVAAIEKFVDDEKILVEPACGAALAAVYSHVIQKLQLEGNLRTPLPSLVVIVCGGSNISLAQLRALKEQLGMTNRLPK

SEQ ID NO: 768726 - protein, 118 aa, Homo sapiens
MAAAYAARQLGVPATIVVPSTTPALTIERLKNEGATVKVVGEVSATQGKEERGRLVAGQGAPCASPPPISPVALQLLDEAFELAKALAKNNPGWVYIPPFDDPLIWYVEVKVTWWGWQ

SEQ ID NO: 768727 - protein, 75 aa, Homo sapiens
DNMYKILVKDYLSRNMTTAYILGDAFYGAVFYEGWCALQGAKDEHLESRKQVLDLGVQDQPDQHGETPSLLKIQN

SEQ ID NO: 768728 - protein, 105 aa, Homo sapiens
AALAPPAMALSDIRVAFSDYQHFALLYLEMRKGGLRNQWLQLYGGRAAGRRPRHPRFGSGMSPLCLHQPFLHAEGGTAGSWCLWPRVPAPPCPSLPLFAPPAPSL

SEQ ID NO: 768729 - protein, 139 aa, Homo sapiens
RKKARSDLFRKNSSHWDHDYSCTHSKGKRDRKKRVYDYESERLDCFQSKHKSASKPHHDDINFYSERKQNRPFFFACVPADSLEVIPKTIRWTIPPETLRKRNFRIPLVAKISSSWNIWSSSKKLLGSLSGSLTTVFHS

SEQ ID NO: 768730 - protein, 128 aa, Homo sapiens
LHSAPTPGPAAAIQSVRCYSHGSQETDEEFDARWVTYFNKPDIDAWELRKGINTLVTYDMVPEPKIIDAALRACRRLNDFASTVRILEVVKDKAGPHKEIYPYVIQELRPTLNELGISTPEELGLDKV

SEQ ID NO: 768731 - protein, 173 aa, Homo sapiens
KYFQPQPATQLGSPPVDPPSSAMMAEEHTDLEAQIVKDIHCKEIDLVNRDPKNINEDIVKVDFEDVIAEPVGTYSFDGVWKVSYTTFTVSKYWCYRLLSTLLGVPLALLWGFLFACISFCHIWAVVPCIKSYLIEIQCISHIYSLCIRTFCNPLFAALGQVCSSIKVVLRKEV

SEQ ID NO: 768732 - protein, 173 aa, Homo sapiens; identical to SEQ ID NO: 768731

SEQ ID NO: 768733 - protein, 73 aa, Homo sapiens
KYFQPQPATQLGSPPVDPPSSAMMAEEHTDLEAQIVKDIHCKEIDLVNRDPKNINEDIVKTGENGKREYPGGI

SEQ ID NO: 768734 - protein, 355 aa, Homo sapiens
MDFLHRNGVLIIQHLQKDYRAYYTFLNFMSNVGDPRNIFFIYFPLCFQFNQTVGTKMIWVAVIGDWLNLIFKWILFGHRPYWWVQETQIYPNHSSPCLEQFPTTCETGPGSPSGHAMGASCVWYVMVTAALSHTVCGMDKFSITLHRLTWSFLWSVFWLIQISVCISRVFIATHFPHQVILGVIGGMLVAEAFEHTPGIQTASLGTYLKTNLFLFLFAVGFYLLLRVLNIDLLWSVPIAKKWCANPDWIHIDTTPFAGLVRNLGVLFGLGFAINSEMFLLSCRGGNNYTLSFRLLCALTSLTILQLYHFLQIPTHEEHLFYVLSFCKSASIPLTVVAFIPYSVHMLMKQSGKKSQ

SEQ ID NO: 768735 - protein, 105 aa, Homo sapiens
TVDSNWALDQTDLIDIYRILHPETTECTFFSFAHGTFSKIDHMLSHKISLNKFLKITTILSVFSDHCGIKLEVNIKNSQNHRGTWKLNNLLLKDFCVNNRIKAEI

SEQ ID NO: 768736 - protein, 109 aa, Homo sapiens
DPSPDGRYKTEVECGLEESGFQGRRYLWRKLCYELYTLEAGCLLPIIKPNDEASKDTWAISYVAPALRLLVVWLPTGLFKGQKMLAAAGNEASRRAMLGFACTSKNCWG

SEQ ID NO: 768737 - protein, 160 aa, Homo sapiens
MRTAAGAVSPDSRPETRRQTRKNEEAAWGPRVCRAEREDNRKCPPSILKRSRPEHHRPEAKPQRTSRRVWFREPPAVTVHYIADKNATATVRVPGRPRPHGGSLLLQLCVCVLLVLALGLYCGRAKPVATALEDLRARLLGLVLHLRHVALTCWRGLLRL

SEQ ID NO: 768738 - protein, 138 aa, Homo sapiens
MDTAQAHVSLAVRVGGAGGAVIHKKKQRERQTFLRKSEFKSSSSPQDLSPWFLVLPVIFLVALEKITWGLHINPIINSKLLVLSRESQFKFTLAPLGSPEQILHQKVSKGLVYTTFKVKPINNGSTDPNAYPLIGEKS

SEQ ID NO: 768739 - protein, 108 aa, Homo sapiens
MKALCLLLLPVLGLLVSSKTLCSMEEAINERIQEVAGSLIFRAISSIGLECQSVTSRGDLATCPRGFAVTGCTCGSACGSWDVRAETTCHCQCAGMDWTGARCCRVQP

SEQ ID NO: 768740 - protein, 108 aa, Homo sapiens; identical to SEQ ID NO: 768739

SEQ ID NO: 768741 - protein, 127 aa, Homo sapiens
MRPLDIDEVEAPEEVEVLEPEEDFEQFLLPVINEMREDIASLIREHGRAYLRTRSKLWEMDNMLIQIKTQVEASEESALNHVQHPSGEADERVSELCEKAEEKAKEIAKMAEMLVELVWRIERSESS

SEQ ID NO: 768742 - protein, 127 aa, Homo sapiens; identical to SEQ ID NO: 768741

SEQ ID NO: 768743 - protein, 127 aa, Homo sapiens; identical to SEQ ID NO: 768741

SEQ ID NO: 768744 - protein, 102 aa, Homo sapiens
MRPLDIDEVEAPEEVEVLEPEEDFEQFLLPVINEMREDIASLIREHGRAYLRTRSKLWEMDNMLIQIMAKPTRECRSCARRLRRKPRRLRRWQRCWSSSSGE

SEQ ID NO: 768745 - protein, 79 aa, Homo sapiens
  misc_feature (4)..(4): Xaa can be any naturally occurring amino acid
  misc_feature (6)..(6): Xaa can be any naturally occurring amino acid
QKDXPXDDQKGREWTFAQIKTQVEASEESALNHVQHPSGEADERVSELCEKAEEKAKEIAKMAEMLVELVWRIERSESS

SEQ ID NO: 768746 - protein, 150 aa, Homo sapiens
DQRPGGPAAQQGLPSWVRLAGACGDLGGYSQGSVLPRATPAHLPWNRTRGFCLGEYLGTCLLCCPGHIPAAAHRGGTAWAQGQGPLCGDTRPGGDNASSELPPTPGLLQPGLSWGREGLSFLSTVGGRQGLRLKRPQHGAPGEKAPHLRE

SEQ ID NO: 768747 - protein, 105 aa, Homo sapiens
GRESGLHSIPSALQVVGEGGRSILRTGWHHHISPYIQELCKPTIALPAEHSRDPFASIHHQTVLERLSATAPNWKQPISIKFIQQGGQISNGIFICGILRSSENA

SEQ ID NO: 768748 - protein, 87 aa, Homo sapiens
LGEEIKIKITNMTFQYRKLKCMTDSESAPPDWPYYLAIDGILAKVPESCDGKLPDSQPPGPSTSQTEASLSPPAKSTPLYFPYNQCS

SEQ ID NO: 768749 - protein, 863 aa, Homo sapiens
MGNREMEELIPLVNRLQDAFSALGQSCLLELPQIAVVGGQSAGKSSVLENFVGRDFLPRGSGIVTRRPLVLQLVTSKAEYAEFLHCKGKKFTDFDEVRLEIEAETDRVTGMNKGISSIPINLRVYSPHVLNLTLIDLPGITKVPVGDQPPDIEYQIREMIMQFITRENCLILAVTPANTDLANSDALKLAKEVDPQGLRTIGVITKLDLMDEGTDARDVLENKLLPLRRGYVGVVNRSQKDIDGKKDIKAAMLAERKFFLSHPAYRHIADRMGTPHLQKVLNQQLTNHIRDTLPNFRNKLQGQLLSIEHEVEAYKNFKPEDPTRKTKALLQMVQQFAVDFEKRIEGSGDQVDTLELSGGAKINRIFHERFPFEIVKMEFNEKELRREISYAIKNIHGIRTGLFTPDMAFEAIVKKQIVKLKGPSLKSVDLVIQELINTVKKCTKKLANFPRLCEETERIVANHIREREGKTKDQVLLLIDIQVSYINTNHEDFIGFANAQQRSSQVHKKTTVGNQVIRKGWLTISNIGIMKGGSKGYWFVLTAESLSWYKDDEEKEKKYMLPLDNLKVRDVEKSFMSSKHIFALFNTEQRNVYKDYRFLELACDSQEDVDSWKASLLRAGVYPDKSVGNNKAENDENGQAENFSMDPQLERQVETIRNLVDSYMSIINKCIRDLIPKTIMHLMINNVKDFINSELLAQLYSSEDQNTLMEESAEQAQRRDEMLRMYQALKEALGIIGDISTATVSTPAPPPVDDSWIQHSRRSPPPSPTTQRRPTLSAPLARPTSGRGPAPAIPSPGPHSGAPPVPFRPGPLPPFPSSSDSFGAPPQVPSRPTRAPPSVPSRRPPPSPTRPTIIRPLESSLLD

SEQ ID NO: 768750 - protein, 753 aa, Homo sapiens
MNKGISSIPINLRVYSPHVLNLTLIDLPGITKVPVGDQPPDIEYQIREMIMQFITRENCLILAVTPANTDLANSDALKLAKEVDPQGLRTIGVITKLDLMDEGTDARDVLENKLLPLRRGYVGVVNRSQKDIDGKKDIKAAMLAERKFFLSHPAYRHIADRMGTPHLQKVLNQQLTNHIRDTLPNFRNKLQGQLLSIEHEVEAYKNFKPEDPTRKTKALLQMVQQFAVDFEKRIEGSGDQVDTLELSGGAKINRIFHERFPFEIVKMEFNEKELRREISYAIKNIHGIRTGLFTPDMAFEAIVKKQIVKLKGPSLKSVDLVIQELINTVKKCTKKLANFPRLCEETERIVANHIREREGKTKDQVLLLIDIQVSYINTNHEDFIGFANAQQRSSQVHKKTTVGNQVIRKGWLTISNIGIMKGGSKGYWFVLTAESLSWYKDDEEKEKKYMLPLDNLKVRDVEKSFMSSKHIFALFNTEQRNVYKDYRFLELACDSQEDVDSWKASLLRAGVYPDKSVGNNKAENDENGQAENFSMDPQLERQVETIRNLVDSYMSIINKCIRDLIPKTIMHLMINNVKDFINSELLAQLYSSEDQNTLMEESAEQAQRRDEMLRMYQALKEALGIIGDISTATVSTPAPPPVDDSWIQHSRRSPPPSPTTQRRPTLSAPLARPTSGRGPAPAIPSPGPHSGAPPVPFRPGPLPPFPSSSDSFGAPPQVPSRPTRAPPSVPSRRPPPSPTRPTIIRPLESSLLD

SEQ ID NO: 768751 - protein, 365 aa, Homo sapiens
FREPIFRLQGKLYELSSVIRKGWLTISNIGIMKGGSKGYWFVLTAESLSWYKDDEEKEKKYMLPLDNLKVRDVEKSFMSSKHIFALFNTEQRNVYKDYRFLELACDSQEDVDSWKASLLRAGVYPDKSVGNNKAENDENGQAENFSMDPQLERQVETIRNLVDSYMSIINKCIRDLIPKTIMHLMINNVKDFINSELLAQLYSSEDQNTLMEESAEQAQRRDEMLRMYQALKEALGIIGDISTATVSTPAPPPVDDSWIQHSRRSPPPSPTTQRRPTLSAPLARPTSGRGPAPAIPSPGPHSGAPPVPFRPGPLPPFPSSSDSFGAPPQVPSRPTRAPPSVPSRRPPPSPTRPTIIRPLESSLLD

SEQ ID NO: 768752 - protein, 815 aa, Homo sapiens
CILLLFSFYRWNTLKHEKSLYLEIIFENNPITNSELLKNNKEYAEFLHCKGKKFTDFDEVRLEIEAETDRVTGMNKGISSIPINLRVYSPHVLNLTLIDLPGITKVPVGDQPPDIEYQIREMIMQFITRENCLILAVTPANTDLANSDALKLAKEVDPQGLRTIGVITKLDLMDEGTDARDVLENKLLPLRRGYVGVVNRSQKDIDGKKDIKAAMLAERKFFLSHPAYRHIADRMGTPHLQKVLNQQLTNHIRDTLPNFRNKLQGQLLSIEHEVEAYKNFKPEDPTRKTKALLQMVQQFAVDFEKRIEGSGDQVDTLELSGGAKINRIFHERFPFEIVKMEFNEKELRREISYAIKNIHGIRTGLFTPDMAFEAIVKKQIVKLKGPSLKSVDLVIQELINTVKKCTKKLANFPRLCEETERIVANHIREREGKTKDQVLLLIDIQVSYINTNHEDFIGFANAQQRSSQVHKKTTVGNQVIRKGWLTISNIGIMKGGSKGYWFVLTAESLSWYKDDEEKEKKYMLPLDNLKVRDVEKSFMSSKHIFALFNTEQRNVYKDYRFLELACDSQEDVDSWKASLLRAGVYPDKSVGNNKAENDENGQAENFSMDPQLERQVETIRNLVDSYMSIINKCIRDLIPKTIMHLMINNVKDFINSELLAQLYSSEDQNTLMEESAEQAQRRDEMLRMYQALKEALGIIGDISTATVSTPAPPPVDDSWIQHSRRSPPPSPTTQRRPTLSAPLARPTSGRGPAPAIPSPGPHSGAPPVPFRPGPLPPFPSSSDSFGAPPQVPSRPTRAPPSVPRRPPPAVPGRPS

SEQ ID NO: 768753 - protein, 804 aa, Homo sapiens
CILLLFSFYRWNTLKHEKSLYLEIIFENNPITNSELLKNNKEYAEFLHCKGKKFTDFDEVRLEIEAETDRVTGMNKGISSIPINLRVYSPHVLNLTLIDLPGITKVPVGDQPPDIEYQIREMIMQFITRENCLILAVTPANTDLANSDALKLAKEVDPQGLRTIGVITKLDLMDEGTDARDVLENKLLPLRRGYVGVVNRSQKDIDGKKDIKAAMLAERKFFLSHPAYRHIADRMGTPHLQKVLNQQLTNHIRDTLPNFRNKLQGQLLSIEHEVEAYKNFKPEDPTRKTKALLQMVQQFAVDFEKRIEGSGDQVDTLELSGGAKINRIFHERFPFEIVKMEFNEKELRREISYAIKNIHGIRTGLFTPDMAFEAIVKKQIVKLKGPSLKSVDLVIQELINTVKKCTKKLANFPRLCEETERIVANHIREREGKTKDQVLLLIDIQVSYINTNHEDFIGFANAQQRSSQVHKKTTVGNQVIRKGWLTISNIGIMKGGSKGYWFVLTAESLSWYKDDEEKEKKYMLPLDNLKVRDVEKSFMSSKHIFALFNTEQRNVYKDYRFLELACDSQEDVDSWKASLLRAGVYPDKSVGNNKAENDENGQAENFSMDPQLERQVETIRNLVDSYMSIINKCIRDLIPKTIMHLMINNVKDFINSELLAQLYSSEDQNTLMEESAEQAQRRDEMLRMYQALKEALGIIGDISTATVSTPAPPPVDDSWIQHSRRSPPPSPTTQRRPTLSAPLARPTSGRGPAPAIPSPGPHSGAPPVPFRPGPLPPFPSSSDSFGAPPQVPSRPTRAPPSVPR

SEQ ID NO: 768754 - protein, 454 aa, Homo sapiens
VEVLIVEPWLPGGRSRTVVDGGVAVAPDSARRGRSCFAIRVGLPRQWRHESWAPYAAVPSLGKRRLLQRTDRRVPYRVDLQGSGMEPLFPAPFWEVIYGSHLQGNLSLLSPNHSLLPPHLLLNASHGAFLPLGLKVTIVGLYLAVCVGGLLGNCLVMYVILRHTKMKTATNIYIFNLALADTLVLLTLPFQGTDILLGFWPFGNALCKTVIAIDYYNMFTSTFTLTAMSVDRYVAICHPIRALDVRTSSKAQAVNVAIWALASVVGVPVAIMGSAQVEDEEIECLVEIPTPQDYWGPVFAICIFLFSFIVPVLVISVCYSLMIRRLRGVRLLSGSREKDRNLRRITRLVLVVVAVFVGCWTPVQVFVLAQGLGVQPSSETAVAILRFCTALGYVNSCLNPILYAFLDENFKACFRKFCCASALRRDVQVSDRVRSIAKDVALACKTSETVPRPA

SEQ ID NO: 768755 - protein, 429 aa, Homo sapiens
LPAHSAAASGLASAEKILFYPALHLCSTASRLRAGVSTVVPAPKEVAEVPYRVDLQGSGMEPLFPAPFWEVIYGSHLQGNLSLLSPNHSLLPPHLLLNASHGAFLPLGLKVTIVGLYLAVCVGGLLGNCLVMYVILRHTKMKTATNIYIFNLALADTLVLLTLPFQGTDILLGFWPFGNALCKTVIAIDYYNMFTSTFTLTAMSVDRYVAICHPIRALDVRTSSKAQAVNVAIWALASVVGVPVAIMGSAQVEDEEIECLVEIPTPQDYWGPVFAICIFLFSFIVPVLVISVCYSLMIRRLRGVRLLSGSREKDRNLRRITRLVLVVVAVFVGCWTPVQVFVLAQGLGVQPSSETAVAILRFCTALGYVNSCLNPILYAFLDENFKACFRKFCCASALRRDVQVSDRVRSIAKDVALACKTSETVPRPA

SEQ ID NO: 768756 - protein, 1274 aa, Homo sapiens
MASSNPPPQPAIGDQLVPGVPGPSSEAEDDPGEAFEFDDSDDEEDTSAALGVPSLAPERDTDPPLIHLDSIPVTDPDPAAAPPGTGVPAWVSNGDAADAAFSGARHSSWKRKSSRRIDRFTFPALEEDVIYDDVPCESPDAHQPGAERNLLYEDAHRAGAPRQAEDLGWSSSEFESYSEDSGEEAKPEVEVEPAKHRVSFQPKLSPDLTRLKERYARTKRDILALRVGGRDMQELKHKYDCKMTQLMKAAKSGTKDGLEKTRMAVMRKVSFLHRKDVLGDSEEEDMGLLEVSVSDIKPPAPELGPMPEGLSPQQVVRRHILGSIVQSEGSYVESLKRILQDYRNPLMEMEPKALSARKCQVVFFRVKEILHCHSMFQIALSSRVAEWDSTEKIGDLFVASFSKSMVLDVYSDYVNNFTSAMSIIKKACLTKPAFLEFLKRRQVCSPDRVTLYGLMVKPIQRFPQFILLLQDMLKNTPRGHPDRLSLQLALTELETLAEKLNEQKRLADQVAEIQQLTKSVSDRSSLNKLLTSGQRQLLLCETLTETVYGDRGQLIKSKERRVFLLNDMLVCANINFKGQLEISSLVPLGPKYVVKWNTALPQVQVVEVGQDGGTYDKDNVLIQHSGAKKASASGQAQNKVYLGPPRLFQELQDLQKDLAVVEQITLLISTLHGTYQNLNMTVAQDWCLALQRLMRVKEEEIHSANKCRLRLLLPGKPDKSGRPISFMVVFITPNPLSKISWVNRLHLAKIGLREENQPGWLCPDEDKKSKAPFWCPILACCIPAFSSRALSLQLGALVHSPVNCPLLGFSAVSTSLPQGYLWVGGGQEGAGGQVEIFSLNRPSPRTVKSFPLAAPVLCMEYIPELEEEAESRDESPTVADPSATVHPTICLGLQDGSILLYSSVDTGTQCLVSCRSPGLQPVLCLRHSPFHLLAGLQDGTLAAYPRTSGGVLWDLESPPVCLTVGPGPVRTLLSLEDAVWASCGPRVTVLEATTLQPQQSFEAHQDEAVSVTHMVKAGSGVWMAFSSGTSIRLFHTETLEHLQEINIATRTTFLLPGQKHLCVTSLLICQGLLWVGTDQGVIVLLPVPRLEGIPKITGKGMVSLNGHCGPVAFLAVATSILAPDILRSDQEEAEGPRAEEDKPDGQAHEPMPDSHVGRELTRKKGILLQYRLRSTAHLPGPLLSMREPAPADGAALEHSEEDGSIYEMADDPDVWVRSRPCARDAHRKEICSVAIISGGQGYRNFGSALGSSGRQAPCGETDSTLLIWQVPLML

SEQ ID NO: 768757 - protein, 1298 aa, Homo sapiens
MASSNPPPQPAIGDQLVPGVPGPSSEAEDDPGEAFEFDDSDDEEDTSAALGVPSLAPERDTDPPLIHLDSIPVTDPDPAAAPPGTGVPAWVSNGDAADAAFSGARHSSWKRKSSRRIDRFTFPALEEDVIYDDVPCESPDAHQPGAERNLLYEDAHRAGAPRQAEDLGWSSSEFESYSEDSGEEAKPEVEVEPAKHRVSFQPKLSPDLTRLKERYARTKRDILALRVGGRDMQELKHKYDCKMTQLMKAAKSGTKDGLEKTRMAVMRKVSFLHRKDVLGDSEEEDMGLLEVSVSDIKPPAPELGPMPEGLSPQQVVRRHILGSIVQSEGSYVESLKRILQDYRNPLMEMEPKALSARKCQVVFFRVKEILHCHSMFQIALSSRVAEWDSTEKIGDLFVASFSKSMVLDVYSDYVNNFTSAMSIIKKACLTKPAFLEFLKRRQVCSPDRVTLYGLMVKPIQRFPQFILLLQDMLKNTPRGHPDRLSLQLALTELETLAEKLNEQKRLADQVAEIQQLTKSVSDRSSLNKLLTSGQRQLLLCETLTETVYGDRGQLIKSKERRVFLLNDMLVCANINFKGQLEISSLVPLGPKYVVKWNTALPQVQVVEVGQDGGTYDKDNVLIQHSGAKKASASGQAQNKVYLGPPRLFQELQDLQKDLAVVEQITLLISTLHGTYQNLNMTVAQDWCLALQRLMRVKEEEIHSANKCRLRLLLPGKPDKSGRPISFMVVFITPNPLSKISWVNRLHLAKIGLREENQPGWLCPDEDKKSKAPFWCPILACCIPAFSSRALSLQLGALVHSPVNCPLLGFSAVSTSLPQGYLWVGGGQEGAGGQVEIFSLNRPSPRTVKSFPLAAPVLCMEYIPELEEEAESRDESPTVADPSATVHPTICLGLQDGSILLYSSVDTGTQCLVSCRSPGLQPVLCLRHSPFHLLAGLQDGTLAAYPRTSGGVLWDLESPPVCLTVGPGPVRTLLSLEDAVWASCGPRVTVLEATTLQPQQSFEAHQDEAVSVTHMVKAGSGVWMAFSSGTSIRLFHTETLEHLQEINIATRTTFLLPDRSLIKCSPEPELFKVVYLQIDGLGQKHLCVTSLLICQGLLWVGTDQGVIVLLPVPRLEGIPKITGKGMVSLNGHCGPVAFLAVATSILAPDILRSDQEEAEGPRAEEDKPDGQAHEPMPDSHVGRELTRKKGILLQYRLRSTAHLPGPLLSMREPAPADGAALEHSEEDGSIYEMADDPDVWVRSRPCARDAHRKEICSVAIISGGQGYRNFGSALGSSGRQAPCGETDSTLLIWQVPLML

SEQ ID NO: 768758 - protein, 1259 aa, Homo sapiens
MASSNPPPQPAIGDQLVPGVPGPSSEAEDDPGEAFEFDDSDDEEDTSAALGVPSLAPERDTDPPLIHLDSIPVTDPDPAAAPPGTGVPAWVSNGDAADAAFSGARHSSWKRKSSRRIDRFTFPALEEDVIYDDVPCESPDAHQPGAERNLLYEDAHRAGAPRQAEDLGWSSSEFESYSEDSGEEAKPEVEVEPAKHRVSFQPKMTQLMKAAKSGTKDGLEKTRMAVMRKVSFLHRKDVLGDSEEEDMGLLEVSVSDIKPPAPELGPMPEGLSPQQVVRRHILGSIVQSEGSYVESLKRILQDYRNPLMEMEPKALSARKCQVVFFRVKEILHCHSMFQIALSSRVAEWDSTEKIGDLFVASFSKSMVLDVYSDYVNNFTSAMSIIKKACLTKPAFLEFLKRRQVCSPDRVTLYGLMVKPIQRFPQFILLLQDMLKNTPRGHPDRLSLQLALTELETLAEKLNEQKRLADQVAEIQQLTKSVSDRSSLNKLLTSGQRQLLLCETLTETVYGDRGQLIKSKERRVFLLNDMLVCANINFKGQLEISSLVPLGPKYVVKWNTALPQVQVVEVGQDGGTYDKDNVLIQHSGAKKASASGQAQNKVYLGPPRLFQELQDLQKDLAVVEQITLLISTLHGTYQNLNMTVAQDWCLALQRLMRVKEEEIHSANKCRLRLLLPGKPDKSGRPISFMVVFITPNPLSKISWVNRLHLAKIGLREENQPGWLCPDEDKKSKAPFWCPILACCIPAFSSRALSLQLGALVHSPVNCPLLGFSAVSTSLPQGYLWVGGGQEGAGGQVEIFSLNRPSPRTVKSFPLAAPVLCMEYIPELEEEAESRDESPTVADPSATVHPTICLGLQDGSILLYSSVDTGTQCLVSCRSPGLQPVLCLRHSPFHLLAGLQDGTLAAYPRTSGGVLWDLESPPVCLTVGPGPVRTLLSLEDAVWASCGPRVTVLEATTLQPQQSFEAHQDEAVSVTHMVKAGSGVWMAFSSGTSIRLFHTETLEHLQEINIATRTTFLLPDRSLIKVLQEPELFKVVYLQIDGLGQKHLCVTSLLICQGLLWVGTDQGVIVLLPVPRLEGIPKITGKGMVSLNGHCGPVAFLAVATSILAPDILRSDQEEAEGPRAEEDKPDGQAHEPMPDSHVGRELTRKKGILLQYRLRSTAHLPGPLLSMREPAPADGAALEHSEEDGSIYEMADDPDVWVRSRPCARDAHRKEICSVAIISGGQGYRNFGSALGSSGRQAPCGETDSTLLIWQVPLML

SEQ ID NO: 768759 - protein, 1268 aa, Homo sapiens
MASSNPPPQPAIGDQLVPGVPGPSSEAEDDPGEAFEFDDSDDEEDTSAALGVPSLAPERDTDPPLIHLDSIPVTDPDPAAAPPGTGVPAWVSNGDAADAAFSGARHSSWKRKSSRRIDRFTFPALEEDVIYDDVPCESPDAHQPGAERNLLYEDAHRAGAPRQAEDLGWSSSEFESYSEDSGEEAKPEVEVEPAKHRVSFQPKLSPDLTRLKERYARTKRDILALRVGGRDMQELKHKYDCKMTQLMKAAKSGTKDGLEKTRMAVMRKVSFLHRKDVLGDSEEEDMGLLEVSVSDIKPPAPELGPMPEGLSPQQVVRRHILGSIVQSEGSYVESLKRILQDYRNPLMEMEPKALSARKCQVVFFRVKEILHCHSMFQIALSSRVAEWDSTEKIGDLFVASFSKSMVLDVYSDYVNNFTSAMSIIKKACLTKPAFLEFLKRRQVCSPDRVTLYGLMVKPIQRFPQFILLLQDMLKNTPRGHPDRLSLQLALTELETLAEKLNEQKRLADQVAEIQQLTKSVSDRSSLNKLLTSGQRQLLLCETLTETVYGDRGQLIKSKERRVFLLNDMLVCANINFKGQLEISSLVPLGPKYVVKWNTALPQVQVVEVGQDGGTYDKDNVLIQHSGAKKASASGQAQNKVYLGPPRLFQELQDLQKDLAVVEQITLLISTLHGTYQNLNMTVAQDWCLALQRLMRVKEEEIHSANKCRLRLLLPGKPDKSGRPISFMVVFITPNPLSKISWVNRLHLAKIGLREENQPGWLCPDEDKKSKAPFWCPILACCIPAFSSRALSLQLGALVHSPVNCPLLGFSAVSTSLPQGYLWVGGGQEGAGGQVEIFSLNRPSPRTVKSFPLAAPVLCMEYIPELEEEAESRDESPTVADPSATVHPTICLGLQDGSILLYSSVDTGTQCLVSCRSPGLQPVLCLRHSPFHLLAGLQDGTLAAYPRTSGGVLWDLESPPVCLTVGPGPVRTLLSLEDAVWASCGPRVTVLEATTLQPQQSFEAHQDEAVSVTHMVKAGSGVWMAFSSGTSIRLFHTETLEHLQEINIATRTTFLLPGQKHLCVTSLLICQGLLWVGTDQGVIVLLPVPRLEGIPKITVNGHCGPVAFLAVATSILAPDILRSDQEEAEGPRAEEDKPDGQAHEPMPDSHVGRELTRKKGILLQYRLRSTAHLPGPLLSMREPAPADGAALEHSEEDGSIYEMADDPDVWVRSRPCARDAHRKEICSVAIISGGQGYRNFGSALGSSGRQAPCGETDSTLLIWQVPLML

SEQ ID NO: 768760 - protein, 1274 aa, Homo sapiens; identical to SEQ ID NO: 768756

SEQ ID NO: 768761 - protein, 270 aa, Homo sapiens
SSWRLAQRRALGAGSGVWMAFSSGTSIRLFHTETLEHLQEINIATRTTFLLPGQKHLCVTSLLICQGLLWVGTDQGVIVLLPVPRLEGIPKITGKGMVSLNGHCGPVAFLAVATSILAPDILRSDQEEAEGPRAEEDKPDGQAHEPMPDSHVGRELTRKKGILLQYRLRSTAHLPGPLLSMREPAPADGAALEHSEEDGSIYEMADDPDVWVRSRPCARDAHRKEICSVAIISGGQGYRNFGSALGSSGRQAPCGETDSTLLIWQVPLML

SEQ ID NO: 768762 - protein, 1072 aa, Homo sapiens
MASSNPPPQPAIGDQLVPGVPGPSSEAEDDPGEAFEFDDSDDEEDTSAALGVPSLAPERDTDPPLIHLDSIPVTDPDPAAAPPGTGVPAWVSNGDAADAAFSGARHSSWKRKSSRRIDRFTFPALEEDVIYDDVPCESPDAHQPGAERNLLYEDAHRAGAPRQAEDLGWSSSEFESYSEDSGEEAKPEVEVEPAKHRVSFQPKLSPDLTRLKERYARTKRDILALRVGGRDMQELKHKYDCKMTQLMKAAKSGTKDGLEKTRMAVMRKVSFLHRKDVLGDSEEEDMGLLEVSVSDIKPPAPELGPMPEGLSPQQVVRRHILGSIVQSEGSYVESLKRILQDYRNPLMEMEPKALSARKCQVVFFRVKEILHCHSMFQIALSSRVAEWDSTEKIGDLFVASFSKSMVLDVYSDYVNNFTSAMSIIKKACLTKPAFLEFLKRRQVCSPDRVTLYGLMVKPIQRFPQFILLLQDMLKNTPRGHPDRLSLQLALTELETLAEKLNEQKRLADQVAEIQQLTKSVSDRSSLNKLLTSGQRQLLLCETLTETVYGDRGQLIKSKERRVFLLNDMLVCANINFKGQLEISSLVPLGPKYVVKWNTALPQVQVVEVGQDGGTYDKDNVLIQHSGAKKASASGQAQNKVYLGPPRLFQELQDLQKDLAVVEQITLLISTLHGTYQNLNMTVAQDWCLALQRLMRVKEEEIHSANKCRLRLLLPGKPDKSGRPISFMVVFITPNPLSKISWVNRLHLAKIGLREENQPGWLCPDEDKKSKAPFWCPILACCIPAFSSRALSLQLGALVHSPVNCPLLGFSAVSTSLPQGYLWVGGGQEGAGGQVEIFSLNRPSPRTVKSFPLAAPVLCMEYIPELEEEAESRDESPTVADPSATVHPTICLGLQDGSILLYSSVDTGTQCLVSCRSPGLQPVLCLRHSPFHLLAGLQDGTLAAYPRTSGGVLWDLESPPVCLTVGPGPVRTLLSLEDAVWASCGPRVTVLEATTLQPQQSFEAHQDEAVSVTHMVKAGSGVWMAFSSGTSIRLFHTETLEHLQEINIATRTTFLLPALVLKKFFSECFGEEF

SEQ ID NO: 768763 - protein, 81 aa, Homo sapiens
LRIPNPATDGSIYEMADDPDVWVRSRPCARDAHRKEICSVAIISGGQGYRNFGSALGSSGRQAPCGETDSTLLIWQVPLML

SEQ ID NO: 768764 - protein, 896 aa, Homo sapiens
MASSNPPPQPAIGDQLVPGVPGPSSEAEDDPGEAFEFDDSDDEEDTSAALGVPSLAPERDTDPPLIHLDSIPVTDPDPAAAPPGTGVPAWVSNGDAADAAFSGARHSSWKRKSSRRIDRFTFPALEEDVIYDDVPCESPDAHQPGAERNLLYEDAHRAGAPRQAEDLGWSSSEFESYSEDSGEEAKPEVEVEPAKHRVSFQPKLSPDLTRLKERYARTKRDILALRVGGRDMQELKHKYDCKMTQLMKAAKSGTKDGLEKTRMAVMRKVSFLHRKDVLGDSEEEDMGLLEVSVSDIKPPAPELGPMPEGLSPQQVVRRHILGSIVQSEGSYVESLKRILQDYRNPLMEMEPKALSARKCQVVFFRVKEILHCHSMFQIALSSRVAEWDSTEKIGDLFVASFSKSMVLDVYSDYVNNFTSAMSIIKKACLTKPAFLEFLKRRQVCSPDRVTLYGLMVKPIQRFPQFILLLQDMLKNTPRGHPDRLSLQLALTELETLAEKLNEQKRLADQVAEIQQLTKSVSDRSSLNKLLTSGQRQLLLCETLTETVYGDRGQLIKSKERRVFLLNDMLVCANINFKGQLEISSLVPLGPKYVVKWNTALPQVQVVEVGQDGGTYDKDNVLIQHSGAKKASASGQAQNKVYLGPPRLFQELQDLQKDLAVVEQITLLISTLHGTYQNLNMTVAQDWCLALQRLMRVKEEEIHSANKCRLRLLLPGKPDKSGRPISFMVVFITPNPLSKISWVNRLHLAKIGLREENQPGWLCPDEDKKSKAPFWCPILACCIPAFSSRALSLQLGALVHSPVNCPLLGFSAVSTSLPQGYLWVGGGQEGAGGQVEIFSLNRPSPRTVKSFPLAAPVLCMEYIPELEEEAESRDESPTVADPSTNDAANYGGISRVT

SEQ ID NO: 768765 - protein, 568 aa, Homo sapiens
MASSNPPPQPAIGDQLVPGVPGPSSEAEDDPGEAFEFDDSDDEEDTSAALGVPSLAPERDTDPPLIHLDSIPVTDPDPAAAPPGTGVPAWVSNGDAADAAFSGARHSSWKRKSSRRIDRFTFPALEEDVIYDDVPCESPDAHQPGAERNLLYEDAHRAGAPRQAEDLGWSSSEFESYSEDSGEEAKPEVEVEPAKHRVSFQPKLSPDLTRLKERYARTKRDILALRVGGRDMQELKHKYDCKMTQLMKAAKSGTKDGLEKTRMAVMRKVSFLHRKDVLGDSEEEDMGLLEVSVSDIKPPAPELGPMPEGLSPQQVVRRHILGSIVQSEGSYVESLKRILQDYRNPLMEMEPKALSARKCQVVFFRVKEILHCHSMFQIALSSRVAEWDSTEKIGDLFVASFSKSMVLDVYSDYVNNFTSAMSIIKKACLTKPAFLEFLKRRQVCSPDRVTLYGLMVKPIQRFPQFILLLQDMLKNTPRGHPDRLSLQLALTELETLAEKLNEQKRLADQVAEIQQLTKSVSDRSSLNKVSWASHLPALTCLPSPVLLPVPLPHATHTRWQCSLREGRP

SEQ ID NO: 768766 - protein, 157 aa, Homo sapiens
MASSNPPPQPAIGDQLVPGVPGPSSEAEDDPGEAFEFDDSDDEEDTSAALGVPSLAPERDTDPPLIHLDSIPVTDPDPAAAPPGTGVPAWVSNGDAADAAFSGARHSSWKRKSSRRIDRFTFPALEEDVIYDDVPCESPDAHQPGALRPMGKHSPCF

SEQ ID NO: 768767 - protein, 39 aa, Homo sapiens
MTVAQDWCLALQRLMRVKEEEIHSANKCRLRLLLPGKPD

SEQ ID NO: 768768 - protein, 122 aa, Homo sapiens [sequence omitted]

SEQ ID NO: 768769 - protein, 109 aa, Homo sapiens
ILNNEPWKATSTDSQLKLIHHLWIKQFLKTLSALKIKILAFESGSSLCTSNLGSGVLPKPVQARHKCLTSPRGFRSTMSSRGEPWSQAQSHLTSPKAWEVGGVIAPFYR

SEQ ID NO: 768770 - protein, 109 aa, Homo sapiens; identical to SEQ ID NO: 768769

SEQ ID NO: 768771 - protein, 109 aa, Homo sapiens; identical to SEQ ID NO: 768769

SEQ ID NO: 768772 - protein, 361 aa, Homo sapiens
ENEFGVGIPAETKEGVKITEKPSPPEKLGVTSISKDSVSLTWLKPEHDGGSRIVHYVVEALEKGQKNWVKCAVAKSTHHVVSGLRENSEYFFRVFAENQAGLSDPRELLLPVLIKEQLEPPEIDMKNFPSHTVYVRAGSNLKVDIPISGKPLPKVTLSRDGVPLKATMRFNTEITAENLTINLKESVTADAGRYEITAANSSGTTKAFINIVVLDRPGPPTGPVVISDITEESVTLKWEPPKYDGGSQVTNYILLKRETSTAVWTEVSATVARTMMKVMKLTTGEEYQFRIKAENRFGISDHIDSACVTVKLPYTTPGPPSTPWVTNVTRESITVGWHEPVSNGGSAVVGYHLEMKDRNSI

SEQ ID NO: 768773 - protein, 227 aa, Homo sapiens
LHRLGDAMFQGQRGWFCGSVSQDLRQFWVAEGGTISDPRAADFLFSCDASHPDTLRIYQSLDYIEDNATVFHAYYLSAVANAKIKNSVALGHFILPPACLQKEIRRKIGSFIWEQDQHFLIEKHDEVTPNEIKTLRENSELATEHKKELSKSPEKHFIRTPVVEKQMYFPLQNYPVNNMVTGYISIDAMKKFLGELHDFIPGTSGYLAYHVQNEINMSAIKNKLKRK

SEQ ID NO: 768774 - protein, 223 aa, Homo sapiens
MNKPLLWISVLTSLLEAFAHTDLSGKVFVFPRESVTDHVNLITPLEKPLQNFTLCFRAYSDLSRAYSLFSYNTQGRDNELLVYKERVGEYSLYIGRHKVTSKVIEKFPAPVHICVSWESSSGIAEFWINGTPLVKKGLRQGYFVEAQPKIVLGQEQDSYGGKFDRSQSFVGEIGDLYMWDSVLPPENILSAYQGTPLPANILDWQALNYEIRGYVIIKPLVWV

SEQ ID NO: 768775 - protein, 252 aa, Homo sapiens
  misc_feature (10)..(10): Xaa can be any naturally occurring amino acid
  misc_feature (35)..(35): Xaa can be any naturally occurring amino acid
  misc_feature (45)..(45): Xaa can be any naturally occurring amino acid
MNLDALRIHXHYVTKTALVCGTRSGSLKQKSHDRXRSGAINRTVXLSQAMVVPICRRENTDELAVHSSQLITPLEKPLQNFTLCFRAYSDLSRAYSLFSYNTQGRDNELLVYKERVGEYSLYIGRHKVTSKVIEKFPAPVHICVSWESSSGIAEFWINGTPLVKKGLRQGYFVEAQPKIVLGQEQDSYGGKFDRSQSFVGEIGDLYMWDSVLPPENILSAYQGTPLPANILDWQALNYEIRGYVIIKPLVWV

SEQ ID NO: 768776 - protein, 143 aa, Homo sapiens
MNKPLLWISVLTSLLEAFAHTDLSGKVFVFPRESVTDHVNLITPLEKPLQNFTLCFRAYSDLSRAYSLFSYNTQGRDNELLVYKERVGEYSLYIGRHKVTSKVIEKFPAPVHICVSWESSSGIAEFWINGTPLAGTGFLWGQV

SEQ ID NO: 768777 - protein, 114 aa, Homo sapiens
MNKPLLWISSSSGIAEFWINGTPLVKKGLRQGYFVEAQPKIVLGQEQDSYGGKFDRSQSFVGEIGDLYMWDSVLPPENILSAYQGTPLPANILDWQALNYEIRGYVIIKPLVWV

SEQ ID NO: 768778 - protein, 223 aa, Homo sapiens; identical to SEQ ID NO: 768774

SEQ ID NO: 768779 - protein, 167 aa, Homo sapiens
MNKPLLWISVLTSLLEAFAHTDLSGKVFVFPRESVTDHVNLITPLEKPLQNFTLCFRAYSDLSRAYSLFSYNTQGRDNELLVYKERVGEYSLYIGRHKVTSKVIEKFPAPVHICVSWESSSGIAEFWINGTPLLGICTCGTLCCPQKISCLPIRVPLSLPISWTGRL

SEQ ID NO: 768780 - protein, 79 aa, Homo sapiens
GTTFGRHLVKNIRLEQPCSCKAGQKKCTCHRPGKKETWLFSRFSTGWSCGLHADWTELTNCVPAIMEKKDCPRNHSHTR

SEQ ID NO: 768781 - protein, 249 aa, Homo sapiens
MFFSAALRARAAGLTAHWGRHVRNLHKTAMQNGAGGALFVHRDTPENNPDTPFDFTPENYKRIEAIVKNYPEGHKAAAVLPVLDLAQRQNGWLPISAMNKVAEVLQVPPMRVYEVATFYTMYNRKPVGKYHIQVCTTTPCMLRNSDSILEAIQKKLGIKVGETTPDKLFTLIEVECLGACVNAPMVQINDNYYEDLTAKDIEEIIDELKAGKIPKPGPRSGRFSCEPAGGLTSLTEPPKGPGFGVQAGL

SEQ ID NO: 768782 - protein, 204 aa, Homo sapiens
MFFSAALRARAAGLTAHWGRHVRNLHKTAMQNGAGGALFVHRDTPENNPDTPFDFTPENYKRIEAIVKNYPEGHKAAAVLPVLDLAQRQNGWLPISAMNKVAEVLQVPPMRVYEVATFYTMYNRKPVGKYHIQVCTTTPCMLRNSDSILEAIQKKLGIKVGETTPDKLFTLIEVECLGACVNAPMVQINDNYYNAFMGCTRFEI

SEQ ID NO: 768783 - protein, 72 aa, Homo sapiens
  misc_feature (6)..(6): Xaa can be any naturally occurring amino acid
  misc_feature (9)..(9): Xaa can be any naturally occurring amino acid
  misc_feature (13)..(13): Xaa can be any naturally occurring amino acid
RAPPGXNRXYLEXFFGEDLTAKDIEEIIDELKAGKIPKPGPRSGRFSCEPAGGLTSLTEPPKGPGFGVQAGL

SEQ ID NO: 768784 - protein, 107 aa, Homo sapiens
MFFSAALRARAAGLTAHWGRHVRNLHKTAMQNGAGGALFVHRDTPENNPDTPFDFTPENYKRIEAIVKNYPEGHKAAAVLPVLDLAQRQNGWLPISAMNKVLDSFLP

SEQ ID NO: 768785 - protein, 252 aa, Homo sapiens [sequence omitted]

SEQ ID NO: 768786 - protein, 220 aa, Homo sapiens
MQNGAGGALFVHRDTPENNPDTPFDFTPENYKRIEAIVKNYPEGHKAAAVLPVLDLAQRQNGWLPISAMNKVAEVLQVPPMRVYEVATFYTMYNRKPVGKYHIQVCTTTPCMLRNSDSILEAIQKKLGIKVGETTPDKLFTLIEVECLGACVNAPMVQINDNYYEDLTAKDIEEIIDELKAGKIPKPGPRSGRFSCEPAGGLTSLTEPPKGPGFGVQAGL

SEQ ID NO: 768787 - protein, 220 aa, Homo sapiens; identical to SEQ ID NO: 768786

SEQ ID NO: 768788 - protein, 249 aa, Homo sapiens; identical to SEQ ID NO: 768781

SEQ ID NO: 768789 - protein, 249 aa, Homo sapiens; identical to SEQ ID NO: 768781

SEQ ID NO: 768790 - protein, 249 aa, Homo sapiens; identical to SEQ ID NO: 768781

SEQ ID NO: 768791 - protein, 233 aa, Homo sapiens
MFFSAALRARAAGLTAHWGRHVRNLHKTAMQNGAGGALFVHRDTPENNPDTPFDFTPENYKRIEAIVKNYPEGHKAAAVLPVLDLAQRQNGWLPISAMNKVAEVLQVPPMRVYEVATFYTMYNRKPVGKYHIQVCTTTPCMLRNSDSILEAIQKKLEVECLGACVNAPMVQINDNYYEDLTAKDIEEIIDELKAGKIPKPGPRSGRFSCEPAGGLTSLTEPPKGPGFGVQAGL

SEQ ID NO: 768792 - protein, 249 aa, Homo sapiens; identical to SEQ ID NO: 768781

SEQ ID NO: 768793 - protein, 195 aa, Homo sapiens
DPRVADARIEAIVKNYPEGHKAAAVLPVLDLAQRQNGWLPISAMNKVAEVLQVPPMRVYEVATFYTMYNRKPVGKYHIQVCTTTPCMLRNSDSILEAIQKKLGIKVGETTPDKLFTLIEVECLGACVNAPMVQINDNYYEDLTAKDIEEIIDELKAGKIPKPGPRSGRFSCEPAGGLTSLTEPPKGPGFGVQAGL

SEQ ID NO: 768794 - protein, 81 aa, Homo sapiens
VPSGSPRPGVGSAHAVRPGRARDSRLARLGKVNSVARHVLLRGAPGPGGWPHRPLAQNLGLLWPDQFRRPSLRRRHLSFQA

SEQ ID NO: 768795 - protein, 220 aa, Homo sapiens; identical to SEQ ID NO: 768786

SEQ ID NO: 768796 - protein, 249 aa, Homo sapiens; identical to SEQ ID NO: 768781

SEQ ID NO: 768797 - protein, 233 aa, Homo sapiens
VTLLCCTFEQELLLITLHIFLENLKFRRECITADTPFDFTPENYKRIEAIVKNYPEGHKAAAVLPVLDLAQRQNGWLPISAMNKVAEVLQVPPMRVYEVATFYTMYNRKPVGKYHIQVCTTTPCMLRNSDSILEAIQKKLGIKVGETTPDKLFTLIEVECLGACVNAPMVQINDNYYEDLTAKDIEEIIDELKAGKIPKPGPRSGRFSCEPAGGLTSLTEPPKGPGFGVQAGL

SEQ ID NO: 768798 - protein, 249 aa, Homo sapiens; identical to SEQ ID NO: 768781

SEQ ID NO: 768799 - protein, 157 aa, Homo sapiens
MFFSAALRARAAGLTAHWGRHVRNLHKTAMQNGAGGALFVHRDTPENNPDTPFDFTPENYKRIEAIVKNYPEGHKAAAVLPVLDLAQRQNGWLPISAMNKVAEVLQVPPMRVYEVATFYTMYNRKPVGKYHIQVCTTTPCMLRNSDSILEAIQKKLG

SEQ ID NO: 768800 - protein, 116 aa, Homo sapiens
MHLPAFSSVYSGITVFINIWALHHNPYFWEDPQVFNPLRFSRENSEKIHPYAFIPFSAGLRNCIGQHFAIIECKVAVALTLLRFKLAPDHSRPPQPVRQVVLKSKNGIHVFAKKVC

SEQ ID NO: 768801 - protein, 214 aa, Homo sapiens
LERNTKDFSEADLQAEVKTFMFAGHDTTSSAISWILYCLAKYPEHQQRCRDEIRELLGDGSSITWEHLSQMPYTTMCIKECLRLYAPVVNISRLLDKPITFPDGRSLPAGITVFINIWALHHNPYFWEDPQVFNPLRFSRENSEKIHPYAFIPFSAGLRNCIGQHFAIIECKVAVALTLLRFKLAPDHSRPPQPVRQVVLKSKNGIHVFAKKVC

SEQ ID NO: 768802 - protein, 139 aa, Homo sapiens
MCIKECLRLYAPVVNISRLLDKPITFPDGRSLPAGITVFINIWALHHNPYFWEDPQVFNPLRFSRENSEKIHPYAFIPFSAGLRNCIGQHFAIIECKVAVALTLLRFKLAPDHSRPPQPVRQVVLKSKNGIHVFAKKVC

SEQ ID NO: 768803 - protein, 510 aa, Homo sapiens
  misc_feature (456)..(456): Xaa can be any naturally occurring amino acid
  misc_feature (460)..(460): Xaa can be any naturally occurring amino acid
  misc_feature (472)..(472): Xaa can be any naturally occurring amino acid
  misc_feature (476)..(477): Xaa can be any naturally occurring amino acid
  misc_feature (479)..(479): Xaa can be any naturally occurring amino acid
  misc_feature (481)..(481): Xaa can be any naturally occurring amino acid
  misc_feature (495)..(495): Xaa can be any naturally occurring amino acid
MRALRDRAGLLLCVLLLAALLEAALGLPVKKPRLRGPRPGSLTRLAEVSASPDPRPLKEEEEAPLLPRTHLQAEPHQHGCWTVTEPAAMTPGNTTPPRTPEVTPLRLELQKLPGLANTTLSTPNPDTQASASPDPRPLREEEEARLLPRTHLQAELHQHGCWTVTEPAALTPGNATPPRTQEVTPLLLELQKLPELVHATLSTPNPDNQVTIKVVEDPQAEVSIDLLAEPSNPPPQDTLSWLPALWSFLWGDYKGEEKDRAPGEKGEEKEEDEDYPSEDIEGEDQEDKEEDEEEQALWFNGTTDNWDQGWLAPGDWVFKDSVSYDYEPQKEWSPWSPCSGNCSTGKQQRTRPCGYGCTATETRTCDLPSCPGTEDKDTLGLPSEEWKLLARNATDMHDQDVDSCEKWLNCKSDFLIQVSEPDAAGPCPAARVPNPTGGHGTALWSLTGRAPGAQFXWRGXQWPFGEAAGHLXRPGXXCXVXCCWGEARKWAARMXMDEEAVVDRGKGRDA

SEQ ID NO: 768804 - protein, 401 aa, Homo sapiens
  misc_feature (347)..(347): Xaa can be any naturally occurring amino acid
  misc_feature (351)..(351): Xaa can be any naturally occurring amino acid
  misc_feature (363)..(363): Xaa can be any naturally occurring amino acid
  misc_feature (367)..(368): Xaa can be any naturally occurring amino acid
  misc_feature (370)..(370): Xaa can be any naturally occurring amino acid
  misc_feature (372)..(372): Xaa can be any naturally occurring amino acid
  misc_feature (386)..(386): Xaa can be any naturally occurring amino acid
IYQHTSSRYVRELELRMQHYDLTIPVTPDLAQEEARLLPRTHLQAELHQHGCWTVTEPAALTPGNATPPRTQEVTPLLLELQKLPELVHATLSTPNPDNQVTIKVVEDPQAEVSIDLLAEPSNPPPQDTLSWLPALWSFLWGDYKGEEKDRAPGEKGEEKEEDEDYPSEDIEGEDQEDKEEDEEEQALWFNGTTDNWDQGWLAPGDWVFKDSVSYDYEPQKEWSPWSPCSGNCSTGKQQRTRPCGYGCTATETRTCDLPSCPGTEDKDTLGLPSEEWKLLARNATDMHDQDVDSCEKWLNCKSDFLIQVSEPDAAGPCPAARVPNPTGGHGTALWSLTGRAPGAQFXWRGXQWPFGEAAGHLXRPGXXCXVXCCWGEARKWAARMXMDEEAVVDRGKGRDA

SEQ ID NO: 768805 - protein, 150 aa, Homo sapiens
MATDVQLADYPLMSPKAELKLEKKSGRKPRSPRDSGPQKELVIPGIVDFERIRRALRTPKPQTPGTYCFGRLSHHSFFSRHHPHPQHVTHIQASNPLQISPGSLSVSSGIFQPPCLSQLSFPAVKWGYPPSLSPLETHSLIGTPSFLLVG

SEQ ID NO: 768806 - protein, 98 aa, Homo sapiens
IRIGRTWRFPVDTGSVSLDRFLVSLEGSWPLLTEHPLWVSVVQAVHIHCVYAMTVRLLVEGAGSPLQSLRMGLHDWFRPTCWGAHSLSTKGIFILPDL

SEQ ID NO: 768807 - protein, 72 aa, Homo sapiens
VMRRGRPEREGVGVSCRRSFCQAGGTSGPPALTSRLLFMFENEIGGLGGRQFPVADRRKHHSWAFKQREFTH

SEQ ID NO: 768808 - protein, 113 aa, Homo sapiens
DVVLGLVNDQLGLVDSLIPLGILGSVQYTFSSLPLVTGEFLELDLNTLVGEAGGGLIDYPLGWPAVSPKPMPELPPMGDNTKSQLAMSANFLGSVLTLLQKQHALDLDITNGM

SEQ ID NO: 768809 - protein, 995 aa, Homo sapiens
MDVVIVLDGSNSIYPWSEVQTFLRRLVGKLFIDPEQIQVGLVQYGESPVHEWSLGDFRTKEEVVRAAKNLSRREGRETKTAQAIMVACTEGFSQSHGGRPEAARLLVVVTDGESHDGEELPAALKACEAGRVTRYGIAVLGHYLRRQRDPSSFLREIRTIASDPDERFFFNVTDEAALTDIVDALGDRIFGLEGSHAENESSFGLEMSQIGFSTHRLKDGILFGMVGVLWLEGGHRLFPPRMALEDEFPPALQNHAAYLGYSVSSMLLRGGRRLFLSGAPRFRHRGKVIAFQLKKDGAVRVAQSLQGEQIGSYFGSELCPLDTDRDGTTDVLLVAAPMFLGPQNKETGRVYVYLVGQQSLLTLQGTLQPEPPQDARFGFAMGALPDLNQDGFADVAVGAPLEDGHQGALYLYHGTQSGVRPHPAQRIAAASMPHALSYFGRSVDGRLDLDGDDLVDVAVGAQGAAILLSSRPIVHLTPSLEVTPQAISVVQRDCRRRGQEAVCLTAALCFQVTSRTPGRWDHQFYMRFTASLDEWTAGARAAFDGSGQRLSPRRLRLSVGNVTCEQLHFHVLDTSDYLRPVALTVTFALDNTTKPGPVLNEGSPTSIQKLVPFSKDCGPDNECVTDLVLQVNMDIRGSRKAPFVVRGGRRKVLVSTTLENRKENAYNTSLSLIFSRNLHLASLTPQRESPIKVECAAPSAHARLCSVGHPVFQTGAKVTFLLEFEFSCSSLLSQVFVKLTASSDSLERNGTLQDNTAQTSAYIQYEPHLLFSSESTLHRYEVHPYGTLPVGPGPEFKTTLRVQNLGCYVVSGLIISALLPAVAHGGNYFLSLSQVITNNASCIVQNLTEPPGPPVHPEELQHTNRLNGSNTQCQVVRCHLGQLAKGTEVSVGLLRLVHNEFFRRAKFKSLTVVSTFELGTEEGSVLQLTEASRWSESLLEVVQTRPILISLWILIGSVLGGLLLLALLVFCLWKLGFFAHKKIPEEEKREEKLEQ

SEQ ID NO: 768810 - protein, 82 aa, Homo sapiens
ACSEGALPSLGVTISPIPRPVPLSGLVLVAALSSVLGYVPVWMLHSSLREAWHPLPNVSQRKAEYLVPRRRYWVGKRWGKAV

SEQ ID NO: 768811 - protein, 1167 aa, Homo sapiens
MELPFVTHLFLPLVFLTGLCSPFNLDEHHPRLFPGPPEAEFGYSVLQHVGGGQRWMLVGAPWDGPSGDRRGDVYRCPVGGAHNAPCAKGHLGDYQLGNSSHPAVNMHLGMSLLETDGDGGFMACAPLWSRACGSSVFSSGICARVDASFQPQGSLAPTAQRCPTYMDVVIVLDGSNSIYPWSEVQTFLRRLVGKLFIDPEQIQVGLVQYGESPVHEWSLGDFRTKEEVVRAAKNLSRREGRETKTAQAIMVACTEGFSQSHGGRPEAARLLVVVTDGESHDGEELPAALKACEAGRVTRYGIAVLGHYLRRQRDPSSFLREIRTIASDPDERFFFNVTDEAALTDIVDALGDRIFGLEGSHAENESSFGLEMSQIGFSTHRLKDGILFGMVGAYDWGGSVLWLEGGHRLFPPRMALEDEFPPALQNHAAYLGYSVSSMLLRGGRRLFLSGAPRFRHRGKVIAFQLKKDGAVRVAQSLQGEQIGSYFGSELCPLDTDRDGTTDVLLVAAPMFLGPQNKETGRVYVYLVGQQSLLTLQGTLQPEPPQDARFGFAMGALPDLNQDGFADVAVGAPLEDGHQGALYLYHGTQSGVRPHPAQRIAAASMPHALSYFGRSVDGRLDLDGDDLVDVAVGAQGAAILLSSRPIVHLTPSLEVTPQAISVVQRDCRRRGQEAVCLTAALCFQVTSRTPGRWDHQFYMRFTASLDEWTAGARAAFDGSGQRLSPRRLRLSVGNVTCEQLHFHVLDTSDYLRPVALTVTFALDNTTKPGPVLNEGSPTSIQKLVPFSKDCGPDNECVTDLVLQVNMDIRGSRKAPFVVRGGRRKVLVSTTLENRKENAYNTSLSLIFSRNLHLASLTPQRESPIKVECAAPSAHARLCSVGHPVFQTGAKVTFLLEFEFSCSSLLSQVFVKLTASSDSLERNGTLQDNTAQTSAYIQYEPHLLFSSESTLHRYEVHPYGTLPVGPGPEFKTTLRVQNLGCYVVSGLIISALLPAVAHGGNYFLSLSQVITNNASCIVQNLTEPPGPPVHPEELQHTNRLNGSNTQCQVVRCHLGQLAKGTEVSVGLLRLVHNEFFRRAKFKSLTVVSTFELGTEEGSVLQLTEASRWSESLLEVVQTRPILISLWILIGSVLGGLLLLALLVFCLWKLGFFAHKKIPEEEKREEKLEQ

SEQ ID NO: 768812 - protein, 1009 aa, Homo sapiens
MDVVIVLDGSNSIYPWSEVQTFLRRLVGKLFIDPEQIQVGLVQYGESPVHEWSLGDFRTKEEVVRAAKNLSRREGRETKTAQAIMVACTEGFSQSHGGRPEAARLLVVVTDGESHDGEELPAALKACEAGRVTRYGIAVLGHYLRRQRDPSSFLREIRTIASDPDERFFFNVTDEAALTDIVDALGDRIFGLEGSHAENESSFGLEMSQIGFSTHRLKDGILFGMVGVLWLEGGHRLFPPRMALEDEFPPALQNHAAYLGYSVSSMLLRGGRRLFLSGAPRFRHRGKVIAFQLKKDGAVRVAQSLQGEQIGSYFGSELCPLDTDRDGTTDVLLVAAPMFLGPQNKETGRVYVYLVGQQSLLTLQGTLQPEPPQDARFGFAMGALPDLNQDGFADVAVGAPLEDGHQGALYLYHGTQSGVRPHPAQRIAAASMPHALSYFGRSVDGRLDLDGDDLVDVAVGAQGAAILLSSRPIVHLTPSLEVTPQAISVVQRDCRRRGQEAVCLTAALCFQVTSRTPGRWDHQFYMRFTASLDEWTAGARAAFDGSGQRLSPRRLRLSVGNVTCEQLHFHVLDTSDYLRPVALTVTFALDNTTKPGPVLNEGSPTSIQKLVPFSKDCGPDNECVTDLVLQVNMDIRGSRKAPFVVRGGRRKVLVSTTLENRKENAYNTSLSLIFSRNLHLASLTPQRESPIKVECAAPSAHARLCSVGHPVFQTGAKVTFLLEFEFSCSSLLSQVFVKLTASSDSLERNGTLQDNTAQTSAYIQYEPHLLFSSESTLHRYEVHPYGTLPVGPGPEFKTTLRVQNLGCYVVSGLIISALLPAVAHGGNYFLSLSQVITNNASCIVQNLTEPPGPPVHPEELQHTNRLNGSNTQCQVVRCHLGQLAKGTEVSVGLLRLVHNEFFRRAKFKSLTVVSTFELGTEEGSVLQLTEASRWSESLLEVVQTRPILISLWILIGSVLGGLLLLALLVFCLWKLGFFAHKKIPEEEKREEKLDPQVAGAGIAGRTGCT

SEQ ID NO: 768813 - protein, 62 aa, Homo sapiens
MLLRGGRRLFLSGAPRFRHRGKVIAFQLKKDGAVRVAQSLQGEQVGHPRKGGTFGFPGTSGL

SEQ ID NO: 768814 - protein, 117 aa, Homo sapiens
MIKHAQLHLELDLSLGLKTLAENLMCAWPSKAHLSLAWNSDQSPGGVFPDLLWGEPLGSDDKDPELAESCASSSPCLWVDRTRLGKERCLAMKGWLAKVEAQPAPAQAPSSRLSSHS

SEQ ID NO: 768815 - protein, 171 aa, Homo sapiens
LRHPLWPVRGLPSLRGGQTQGSKVPPPHPRGVDRRGRLGGQLLQAIVFAGGGGVGARAQRGPGSLELRKWHRSRARGLSKDLFWALGVLAVTVGLGGSRLQPLPQFRTLAGGLRLTSEKGQEGVNPQPHRGREDFSRSPPLGRGPLAAVPEGRKRCVTVGRVLNLSEPKWL

SEQ ID NO: 768816 - protein, 103 aa, Homo sapiens
HSHKVKEQFPKPLRGRVKTCDVGSLETPGPRVLQMWGAWKHPAHACCRCGEPGNTRPTRAADVGSLETPGPRVLQMWGARKHLAHACSVRHGVWFMVADTKSH

SEQ ID NO: 768817 - protein, 103 aa, Homo sapiens
  misc_feature (90)..(91): Xaa can be any naturally occurring amino acid
HSHKVKEQFPKPLRGRVKTCDVGSLETPGPRVLQMWGAWKHPAHACCRCGEPGNTRPTRAADVGSLETPGPRVLQMWGARKHLAHACCRXXEPGNTWAHACFS

SEQ ID NO: 768818 - protein, 107 aa, Homo sapiens
WAGTGGVALRTSRFPLTQSAPQSSRKAFGVGDGCDACRAPRPRDLHLAGVRTGAGEPRMRTGESLPGRRCSLRSPGLGARFFAGSPVIHCGSSAAPPLLVPVIPAAQ

SEQ ID NO: 768819 - protein, 73 aa, Homo sapiens
KTQKGGGVFQPRLERSGTISAHCSLDLWGSRDPHASASYVAGATDMHHHTWLEAILVLRLSSSGAGSSTVLCL

SEQ ID NO: 768820 - protein, 802 aa, Homo sapiens
MAATRAGPRAREIFTSLEYGPVPESHACALAWLDTQDRCLGHYVNGKWLKPEHRNSVPCQDPITGENLASCLQAQAEDVAAAVEAARMAFKGWSAHPGVVRAQHLTRLAEVIQKHQRLLWTLESLVTGRAVREVRDGDVQLAQQLLHYHAIQASTQEEALAGWEPMGVIGLILPPTFSFLEMMWRICPALAVGCTVVALVPPASPAPLLLAQLAGELGPFPGILNVVSGPASLVPILASQPGIRKVAFCGAPEEGRALRRSLAGECAELGLALGTESLLLLTDTADVDSAVEGVVDAAWSDRGPGGLRLLIQESVWDEAMRRLQERMGRLRSGRGLDGAVDMGARGAAACDLVQRFVREAQSQGAQVFQAGDVPSERPFYPPTLVSNLPPASPCAQVEVPWPVVVASPFRTAKEALLVANGTPRGGSASVWSERLGQALELGYGLQVGTVWINAHGLRDPSVPTGGCKESGCSWHGGPDGLYEYLRPSGTPARLSCLSKNLNYDTFGLAVPSTLPAGPEIGPSPAPPYGLFVGGRFQAPGARSSRPIRDSSGNLHGYVAEGGAKDIRGAVEAAHQAFPGWAGQSPGARAALLWALAAALERRKSTLASRLERQGAELKAAEAEVELSARRLRAWGARVQAQGHTLQVAGLRGPVLRLREPLGVLAVVCPDEWPLLAFVSLLAPALAYGNTVVMVPSAACPLLALEVCQDMATVFPAGLANVVTGDRDHLTRCLALHQDVQAMWYFGSAQGSQFVEWASAGNLKPVWASRGCPRAWDQEAEGAGPELGLRVARTKALWLPMGD

SEQ ID NO: 768821 - protein, 751 aa, Homo sapiens [sequence omitted]

SEQ ID NO: 768822 - protein, 715 aa, Homo sapiens [sequence omitted]

SEQ ID NO: 768823 - protein, 637 aa, Homo sapiens
MGVIGLILPPTFSFLEMMWRICPALAVGCTVVALVPPASPAPLLLAQLAGELGPFPGILNVVSGPASLVPILASQPGIRKVAFCGAPEEGRALRRSLAGECAELGLALGTESLLLLTDTADVDSAVEGVVDAAWSDRGPGGLRLLIQESVWDEAMRRLQERMGRLRSGRGLDGAVDMGARGAAACDLVQRFVREAQSQGAQVFQAGDVPSERPFYPPTLVSNLPPASPCAQVEVPWPVVVASPFRTAKEALLVANGTPRGGSASVWSERLGQALELGYGLQVGTVWINAHGLRDPSVPTGGCKESGCSWHGGPDGLYEYLRPSGTPARLSCLSKNLNYDTFGLAVPSTLPAGPEIGPSPAPPYGLFVGGRFQAPGARSSRPIRDSSGNLHGYVAEGGAKDIRGAVEAAHQAFPGWAGQSPGARAALLWALAAALERRKSTLASRLERQGAELKAAEAEVELSARRLRAWGARVQAQGHTLQVAGLRGPVLRLREPLGVLAVVCPDEWPLLAFVSLLAPALAYGNTVVMVPSAACPLLALEVCQDMATVFPAGLANVVTGDRDHLTRCLALHQDVQAMWYFGSAQGSQFVEWASAGNLKPVWASRGCPRAWDQEAEGAGPELGLRVARTKALWLPMGD

SEQ ID NO: 768824 - protein, 682 aa, Homo sapiens
NWLERPGVIGRGEVRDGDVQLAQQLLHYHAIQASTQEEALAGWEPMGVIGLILPPTFSFLEMMWRICPALAVGCTVVALVPPASPAPLLLAQLAGELGPFPGILNVVSGPASLVPILASQPGIRKVAFCGAPEEGRALRRSLAGECAELGLALGTESLLLLTDTADVDSAVEGVVDAAWSDRGPGGLRLLIQESVWDEAMRRLQERMGRLRSGRGLDGAVDMGARGAAACDLVQRFVREAQSQGAQVFQAGDVPSERPFYPPTLVSNLPPASPCAQVEVPWPVVVASPFRTAKEALLVANGTPRGGSASVWSERLGQALELGYGLQVGTVWINAHGLRDPSVPTGGCKESGCSWHGGPDGLYEYLRPSGTPARLSCLSKNLNYDTFGLAVPSTLPAGPEIGPSPAPPYGLFVGGRFQAPGARSSRPIRDSSGNLHGYVAEGGAKDIRGAVEAAHQAFPGWAGQSPGARAALLWALAAALERRKSTLASRLERQGAELKAAEAEVELSARRLRAWGARVQAQGHTLQVAGLRGPVLRLREPLGVLAVVCPDEWPLLAFVSLLAPALAYGNTVVMVPSAACPLLALEVCQDMATVFPAGLANVVTGDRDHLTRCLALHQDVQAMWYFGSAQGSQFVEWASAGNLKPVWASRGCPRAWDQEAEGAGPELGLRVARTKALWLPMGD

SEQ ID NO: 768825 - protein, 802 aa, Homo sapiens; identical to SEQ ID NO: 768820

SEQ ID NO: 768826 - protein, 613 aa, Homo sapiens
MAVGCTVVALVPPASPAPLLLAQLAGELGPFPGILNVVSGPASLVPILASQPGIRKVAFCGAPEEGRALRRSLAGECAELGLALGTESLLLLTDTADVDSAVEGVVDAAWSDRGPGGLRLLIQESVWDEAMRRLQERMGRLRSGRGLDGAVDMGARGAAACDLVQRFVREAQSQGAQVFQAGDVPSERPFYPPTLVSNLPPASPCAQVEVPWPVVVASPFRTAKEALLVANGTPRGGSASVWSERLGQALELGYGLQVGTVWINAHGLRDPSVPTGGCKESGCSWHGGPDGLYEYLRPSGTPARLSCLSKNLNYDTFGLAVPSTLPAGPEIGPSPAPPYGLFVGGRFQAPGARSSRPIRDSSGNLHGYVAEGGAKDIRGAVEAAHQAFPGWAGQSPGARAALLWALAAALERRKSTLASRLERQGAELKAAEAEVELSARRLRAWGARVQAQGHTLQVAGLRGPVLRLREPLGVLAVVCPDEWPLLAFVSLLAPALAYGNTVVMVPSAACPLLALEVCQDMATVFPAGLANVVTGDRDHLTRCLALHQDVQAMWYFGSAQGSQFVEWASAGNLKPVWASRGCPRAWDQEAEGAGPELGLRVARTKALWLPMGD

SEQ ID NO: 768827 - protein, 802 aa, Homo sapiens; identical to SEQ ID NO: 768820

SEQ ID NO: 768828 - protein, 667 aa, Homo sapiens
MAATRAGPRAREIFTSLEYGPVPESHACALAWLDTQDRCLGHYVNGKWLKPEHRNSVPCQDPITGENLASCLQAQAEDVAAAVEAARMAFKGWSAHPGVVRAQHLTRLAEVIQKHQRLLWTLESLVTGRAVREVRDGDVQLAQQLLHYHAIQASTQEEALAGWEPMGVIGLILPPTFSFLEMMWRICPALAVGGFGVAEELDGAVDMGARGAAACDLVQRFVREAQSQGAQVFQAGDVPSERPFYPPTLVSNLPPASPCAQVEVPWPVVVASPFRTAKEALLVANGTPRGGSASVWSERLGQALELGYGLQVGTVWINAHGLRDPSVPTGGCKESGCSWHGGPDGLYEYLRPSGTPARLSCLSKNLNYDTFGLAVPSTLPAGPEIGPSPAPPYGLFVGGRFQAPGARSSRPIRDSSGNLHGYVAEGGAKDIRGAVEAAHQAFPGWAGQSPGARAALLWALAAALERRKSTLASRLERQGAELKAAEAEVELSARRLRAWGARVQAQGHTLQVAGLRGPVLRLREPLGVLAVVCPDEWPLLAFVSLLAPALAYGNTVVMVPSAACPLLALEVCQDMATVFPAGLANVVTGDRDHLTRCLALHQDVQAMWYFGSAQGSQFVEWASAGNLKPVWASRGCPRAWDQEAEGAGPELGLRVARTKALWLPMGD

SEQ ID NO: 768829 - protein, 276 aa, Homo sapiens
MAAGPARDWPARRGLKRSAREPGAYCGTALESTRVRELPGGAMSCINLPTVLPGSPSKTRGQIQVILGPMFSGKSTELMRRVRRFQIAQYKCLVIKYAKDTRYSSSFCTHDRNTMEALPACLLRDVAQEALGVAVIGIDEGQFFPDIVEFCEAMANAGKTVIVAALDGTFQRKPFGAILNLVPLAESVVKLTAVCMECFREAAYTKRLGTEKEVEVIGGADKYHSVCRLCYFKKASGQPAGPDNKENCPVPGKPGEAVAARKLFAPQQILQCSPAN

SEQ ID NO: 768830 - protein, 276 aa, Homo sapiens; identical to SEQ ID NO: 768829

SEQ ID NO: 768831 - protein, 276 aa, Homo sapiens; identical to SEQ ID NO: 768829

SEQ ID NO: 768832 - protein, 129 aa, Homo sapiens
LQEEVGSGWAACRQRPVGGSGRKATPGGSREAWRVTTPWPSGNSPLCGCPTCRMLPPLLPTGLLKASLSAAGTIAQAGAGPAWWPGIWHTPSPWGEGQSPTLLTSACFFPSAAFTAEFLFSLGSLCQHL

SEQ ID NO: 768833 - protein, 234 aa, Homo sapiens
MSCINLPTVLPGSPSKTRGQIQVILGPMFSGKSTELMRRVRRFQIAQYKCLVIKYAKDTRYSSSFCTHDRNTMEALPACLLRDVAQEALGVAVIGIDEGQFFPDIVEFCEAMANAGKTVIVAALDGTFQRKPFGAILNLVPLAESVVKLTAVCMECFREAAYTKRLGTEKEVEVIGGADKYHSVCRLCYFKKASGQPAGPDNKENCPVPGKPGEAVAARKLFAPQQILQCSPAN

SEQ ID NO: 768834 - protein, 276 aa, Homo sapiens; identical to SEQ ID NO: 768829

SEQ ID NO: 768835 - protein, 276 aa, Homo sapiens; identical to SEQ ID NO: 768829

SEQ ID NO: 768836 - protein, 276 aa, Homo sapiens; identical to SEQ ID NO: 768829

SEQ ID NO: 768837 - protein, 276 aa, Homo sapiens; identical to SEQ ID NO: 768829

SEQ ID NO: 768838 - protein, 276 aa, Homo sapiens; identical to SEQ ID NO: 768829

SEQ ID NO: 768839 - protein, 276 aa, Homo sapiens; identical to SEQ ID NO: 768829

SEQ ID NO: 768840 - protein, 276 aa, Homo sapiens; identical to SEQ ID NO: 768829

SEQ ID NO: 768841 - protein, 234 aa, Homo sapiens; identical to SEQ ID NO: 768833

SEQ ID NO: 768842 - protein, 284 aa, Homo sapiens
MAAGPARDWPARRGLKRSAREPGAYCGTALESTRVRELPGGAMSCINLPTVLPGSPSKTRGQIQVILGPMFSGKSTELMRRVRRFQIAQYKCLVIKYAKDTRYSSSFCTHDRTRSRIIARNTMEALPACLLRDVAQEALGVAVIGIDEGQFFPDIVEFCEAMANAGKTVIVAALDGTFQRKPFGAILNLVPLAESVVKLTAVCMECFREAAYTKRLGTEKEVEVIGGADKYHSVCRLCYFKKASGQPAGPDNKENCPVPGKPGEAVAARKLFAPQQILQCSPAN

SEQ ID NO: 768843 - protein, 309 aa, Homo sapiens
MAAGPARDWPARRGLKRSAREPGAYCGTALESTRVRELPGGAMSCINLPTVLPGSPSKTRGQIQVILGPMFSGKSTELMRRVRRFQIAQYKCLVIKYAKDTRYSSSFCTHDRNTMEALPACLLRDVAQEALGVAVIGIDEGQFFPDIVEFCEAMANAGKTVIVAALDGTFQRKPFGAILNLVPLAESVVKLTAVCMECFREAAYTKRLGTEKEVAPPAFPAGRRGGGMALPPSCPGPSPIPCPCGQVEVIGGADKYHSVCRLCYFKKASGQPAGPDNKENCPVPGKPGEAVAARKLFAPQQILQCSPAN

SEQ ID NO: 768844 - protein, 156 aa, Homo sapiens
MANAGKTVIVAALDGTFQRKPFGAILNLVPLAESVVKLTAVCMECFREAAYTKRLGTEKEVAPPAFPAGRRGGGMALPPSCPGPSPIPCPCGQVEVIGGADKYHSVCRLCYFKKASGQPAGPDNKENCPVPGKPGEAVAARKLFAPQQILQCSPAN

SEQ ID NO: 768845 - protein, 222 aa, Homo sapiens
MAAGPARDWPARRGLKRSAREPGAYCGTALESTRVRELPGGAMSCINLPTVLPGSPSKTRGQIQVILGPMFSGKSTELMRRVRRFQIAQYKCLVIKYAKDTRYSSSFCTHDRNTMEALPACLLRDVAQEALGVAVIGIDEGQFFPDIVEFCEAMANAGKTVIVAALDGTFQRKPFGAILNLVPLAESVVKLTAVCMECFREAAYTKRLGTEKEQILQCSPAN

SEQ ID NO: 768846 - protein, 79 aa, Homo sapiens
SSRPATNLSVHYALTLYSRKLHSRLRTAIPRAPLVAPVRTLLGPISLDGGDHTLAFWELSFVWLPHLPHAPSSPTHWSA

SEQ ID NO: 768847 - protein, 253 aa, Homo sapiens
MARSLLLPLQILLLSLALETAGEEAQGDKIIDGAPCARGSHPWQVALLSGNQLHCGGVLVNERWVLTAAHCKMNEYTVHLGSDTLGDRRAQRIKASKSFRHPGYSTQTHVNDLMLVKLNSQARLSSMVKKVRLPSRCEPPGTTCTVSGWGTTTSPDVTFPSDLMCVDVKLISPQDCTKVYKDLLENSMLCAGIPDSKKNACNGDSGGPLVCRGTLQGLVSWGTFPCGQPNDPGVYTQVCKFTKWINDTMKKHR

SEQ ID NO: 768848 - protein, 253 aa, Homo sapiens; identical to SEQ ID NO: 768847

SEQ ID NO: 768849 - protein, 69 aa, Homo sapiens
LALEAPPIGLLTKKNACNGDSGGPLVCRGTLQGLVSWGTFPCGQPNDPGVYTQVCKFTKWINDTMKKHR

SEQ ID NO: 768850 - protein, 190 aa, Homo sapiens
MSPRSGGLQTPECLSREGSPIPHDPEFGSKLASVPEYRYSQSAPGSPVSAQPVIMAVPPRPSSLVAKPVAYMPASIVTSQQPAGHAIHVVQQAPTVTMVRVVTTSANSANGYILTSQGAAGGSHDAAGAAVLDLGSEARGNAAAAGSLRRTLCGGPGRQVPKAAPLAWAWGLRRMILCFCLSLPCPFKSA

SEQ ID NO: 768851 - protein, 639 aa, Homo sapiens
AASVRQSPGPALARLEGREFEFLMRQPSVTIGRNSSQGSVDLSMGLSSFISRRHLQLSFQEPHFYLRCLGKNGVFVDGAFQRRGAPALQLPKQCTFRFPSTAIKIQFTSLYHKEEAPASPLRPLYPQISPLKIHIPEPDLRSMVSPVPSPTGTISVPNSCPASPRGAGSSSYRFVQNVTSDLQLAAEFAAKAASEQQADTSGGDSPKDESKPPFSYAQLIVQAISSAQDRQLTLSGIYAHITKHYPYYRTADKGWQNSIRHNLSLNRYFIKVPRSQEEPGKGSFWRIDPASEAKLVEQAFRKRRQRGVSCFRTPFGPLSSRSAPASPTHPGLMSPRSGGLQTPECLSREGSPIPHDPEFGSKLASVPEYRYSQSAPGSPVSAQPVIMAVPPRPSSLVAKPVAYMPASIVTSQQPAGHAIHVVQQAPTVTMVRVVTTSANSANGYILTSQGAAGGSHDAAGAAVLDLGSEARGLEEKPTIAFATIPAAGGVIQTVASQMAPGVPGHTVTILQPATPVTLGQHHLPVRAVTQNGKHAVPTNSLAGNAYALTSPLQLLATQASSSAPVVVTRVCEVGPKEPAAAVAATATTTPATATTASASASSTGEPEVKRSRVEEPSGAVTTPAGVIAAAGPQGPGTGE

SEQ ID NO: 768852 - protein, 630 aa, Homo sapiens
  misc_feature (628)..(628): Xaa can be any naturally occurring amino acid
AASVRQSPGPALARLEGREFEFLMRQPSVTIGRNSSQGSVDLSMGLSSFISRRHLQLSFQEPHFYLRCLGKNGVFVDGAFQRRGAPALQLPKQCTFRFPSTAIKIQFTSLYHKEEAPASPLRPLYPQISPLKIHIPEPDLRSMVSPVPSPTGTISVPNSCPASPRGAGSSSYRFVQNVTSDLQLAAEFAAKAASEQQADTSGGDSPKDESKPPFSYAQLIVQAISSAQDRQLTLSGIYAHITKHYPYYRTADKGWQNSIRHNLSLNRYFIKVPRSQEEPGKGSFWRIDPASEAKLVEQAFRKRRQRGVSCFRTPFGPLSSRSAPASPTHPGLMSPRSGGLQTPECLSREGSPIPHDPEFGSKLASVPEYRYSQSAPGSPVSAQPVIMAVPPRPSSLVAKPVAYMPASIVTSQQPAGHAIHVVQQAPTVTMVRVVTTSANSANGYILTSQGAAGGSHDAAGAAVLDLGSEARGLEEKPTIAFATIPAAGGVIQTVASQMAPGVPGHTVTILQPATPVTLGQHHLPVRAVTQNGKHAVHDRYREAKPTGLEVLGLSESSGRGGPPRCQVGPGATQRCDERHTPTLSTDAPFKKTEKPGVNTGVHPGVSSREAGHLRRTDDTLNTHTMSLXDM

SEQ ID NO: 768853 - protein, 321 aa, Homo sapiens
AASVRQSPGPALARLEGREFEFLMRQPSVTIGRNSSQGSVDLSMGLSSFISRRHLQLSFQEPHFYLRCLGKNGVFVDGAFQRRGAPALQLPKQCTFRFPSTAIKIQFTSLYHKEEAPASPLRPLYPQISPLKIHIPEPDLRSMVSPVPSPTGTISVPNSCPASPRGAGSSSYRFVQNVTSDLQLAAEFAAKAASEQQADTSGGDSPKDESKPPFSYAQLIVQAISSAQDRQLTLSGIYAHITKHYPYYRTADKGWQNSIRHNLSLNRYFIKVPRSQEEPGKGSFWRIDPASEAKLVEQAFRKRRQRGVSCFRTPFGPLSSR

SEQ ID NO: 768854 - protein, 274 aa, Homo sapiens
MGFSSSKPIFSQCRPHFPHLSDLLPRRRGNRLSRWPSVVLTWFLSRRPGGETHHCVCHNPRGWWSHPDGGQPDGPRGPRTHGHHPAARHTRDPRAAPPSSPGRDPERKACGSHEQFSRQRLRPHQPFAAPCDPSEFIRAGGGHPGVRGGAQGASSSRRGHGHHHPSHCHHRLCLRLFHWRARGQKVPGGGAQWGCNHTGWSDRSCRPPGARHRGVRSPATRGSGTHPAATPKLDPAAQAAAPTDGGEQPAAACGHRRHLDTPSPFHLIACLPVV

SEQ ID NO: 768855 - protein, 208 aa, Homo sapiens
AASVRQSPGPALARLEGREFEFLMRQPSVTIGRNSSQGSVDLSMGLSSFISRRHLQLSFQEPHFYLRCLGKNGVFVDGAFQRRGAPALQLPKQCTFRFPSTAIKIQFTSLYHKEEAPASPLRPLYPQISPLKIHIPEPDLRSMVSPVPSPTGTISVPNSCPASPRGAGSSSYRFVQNVTSDLQLAAEFAAKAASEQQADTSGGDSPKV

SEQ ID NO: 768856 - protein, 34 aa, Homo sapiens
MTFSRNCTSSANTISFSLLVQYSINYMRYSTLYF

SEQ ID NO: 768857 - protein, 34 aa, Homo sapiens; identical to SEQ ID NO: 768856

SEQ ID NO: 768858 - protein, 87 aa, Homo sapiens
VSVASGVKPQTFVASVTAHEGSANPQVCSSRIFCEEPRNKASTPSEGTQAGCRCGLGWPAFIPLFGPTHILLIGPFYRMLIGPFTEC

SEQ ID NO: 768859 - protein, 109 aa, Homo sapiens
MNPALGNQTDVAGLFLANSSEALERAVRCCTQASVVTDDGFAEGGPDERSLYIMRVVQIAVMCVLSLTVVFGIFFLGCNLLIKSEGMINFLVKDRRPSKEVEAVVVGPY

SEQ ID NO: 768860 - protein, 109 aa, Homo sapiens; identical to SEQ ID NO: 768859

SEQ ID NO: 768861 - protein, 109 aa, Homo sapiens; identical to SEQ ID NO: 768859

SEQ ID NO: 768862 - protein, 251 aa, Homo sapiens
MTDSATANGDDRDPEIELFVKAGIDGESIGNCPFSQRLFMILWLKGVVFNVTTVDLKRKPADLHNLAPGTHPPFLTFNGDVKTDVNKIEEFLEETLTPEKYPKLAAKHRESNTAGIDIFSKFSAYIKNTKQQNNAALERGLTKALKKLDDYLNTPLPEEIDANTCGEDKGSRRKFLDGDELTLADCNLLPKLHVVKIVAKKYRNYDIPAEMTGLWRYLKNAYARDEFTNTCAADSEIELAYADVAKRLSRS

SEQ ID NO: 768863 - protein, 251 aa, Homo sapiens; identical to SEQ ID NO: 768862

SEQ ID NO: 768864 - protein, 118 aa, Homo sapiens
MPALERGLTKALKKLDDYLNTPLPEEIDANTCGEDKGSRRKFLDGDELTLADCNLLPKLHVVKIVAKKYRNYDIPAEMTGLWRYLKNAYARDEFTNTCAADSEIELAYADVAKRLSRS

SEQ ID NO: 768865 - protein, 130 aa, Homo sapiens
MPALERGLTKALKKLDDYLNTPLPEEIDANTCGEDKGSRRKFLDGDELTLADCNLLPKLHVVKTHLLTSSSNFLKIVAKKYRNYDIPAEMTGLWRYLKNAYARDEFTNTCAADSEIELAYADVAKRLSRS

SEQ ID NO: 768866 - protein, 410 aa, Homo sapiens
MNDEDYSTIYDTIQNERTYEVPDQPEENESPHYDDVHEYLRPENDLYATQLNTHEYDFVSVYTIKGEETSLASVQSEDRGYLLPDEIYSELQEAHPGEPQEDRGISMEGLYSSTQDQQLCAAELQENGSVMKEDLPSPSSFTIQHSKAFSTTKYSCYSDAEGLEEKEGAHMNPEIYLFVKAGIDGESIGNCPFSQRLFMILWLKGVVFNVTTVDLKRKPADLHNLAPGTHPPFLTFNGDVKTDVNKIEEFLEETLTPEKYPKLAAKHRESNTAGIDIFSKFSAYIKNTKQQNNAALERGLTKALKKLDDYLNTPLPEEIDANTCGEDKGSRRKFLDGDELTLADCNLLPKLHVVKIVAKKYRNYDIPAEMTGLWRYLKNAYARDEFTNTCAADSEIELAYADVAKRLSRS

SEQ ID NO: 768867 - protein, 410 aa, Homo sapiens; identical to SEQ ID NO: 768866

SEQ ID NO: 768868 - protein, 249 aa, Homo sapiens [sequence omitted]

SEQ ID NO: 768869 - protein, 410 aa, Homo sapiens; identical to SEQ ID NO: 768866

SEQ ID NO: 768870 - protein, 233 aa, Homo sapiens
MTDSATANGDDRDPEIELFVKAGIDGESIGNCPFSQRLFMILWLKGVVFNVTTVDLKRKPADLHNLAPGTHPPFLTFNGDVKTDVNKIEEFLEETLTPEKYPKLAAKHRESNTAGIDIFSKFSAYIIKKLDDYLNTPLPEEIDANTCGEDKGSRRKFLDGDELTLADCNLLPKLHVVKIVAKKYRNYDIPAEMTGLWRYLKNAYARDEFTNTCAADSEIELAYADVAKRLSRS

SEQ ID NO: 768871 - protein, 79 aa, Homo sapiens
MRGMLHPYGQPGVATPLLLMETREGRGQKALPKVSQPGACLHWSLCGQCCPGAAAVHWRVSCMEEPEEMVPRTELAALY

SEQ ID NO: 768872 - protein, 203 aa, Homo sapiens
GRRLCLGEPGLAGGDFLVRIEPAKRQNRKRPGAKATGVCGRDLSAESGPRFPGERRGPRAGARAALGLYFAARGRGDRPRTRGDEGTRGPCPVREAEGLEGLPGAGAGAPLPGRRLAPDTRQREAARAQQGFSPAPVPASPAASVRGPCPVLCRERCLSARDVDSFPLLLAWLLLTQVVRTPLGCHPCRKPPLVKGPRHPPHM

SEQ ID NO: 768873 - protein, 678 aa, Homo sapiens
MELRSYQWEVIMPALEGKNIIIWLPTGAGKTRAAAYVAKRHLETVDGAKVVVLVNRVHLVTQHGEEFRRMLDGRWTVTTLSGDMGPRAGFGHLARCHDLLICTAELLQMALTSPEEEEHVELTVFSLIVVDECHHTHKDTVYNVIMSQYLELKLQRAQPLPQVLGLTASPGTGGASKLDGAINHVLQLCANLDTWCIMSPQNCCPQLQEHSQQPCKQYNLCHRRSQDPFGDLLKKLMDQIHDHLEMPELSRKFGTQMYEQQVVKLSEAAALAGLQEQRVYALHLRRYNDALLIHDTVRAVDALAALQDFYHREHVTKTQILCAERRLLALFDDRKNELAHLATHGPENPKLEMLEKILQRQFSSSNSPRGIIFTRTRQSAHSLLLWLQQQQGLQTVDIRAQLLIGAGNSSQSTHMTQRDQQEVIQKFQDGTLNLLVATSVAEEGLDIPHCNVVVRYGLLTNEISMVQARGRARADQSVYAFVATEGSRELKRELINEALETLMEQAVAAVQKMDQAEYQAKIRDLQQAALTKRAAQAAQRENQRQQFPVEHVQLLCINCMVAVGHGSDLRKVEGTHHVNVNPNFSNYYNVSRDPVVINKVFKDWKPGGVISCRNCGEVWGLQMIYKSVKLPVLKVRSMLLETPQGRIQAKKWSRVPFSVPDFDFLQHCAENLSDLSLD

SEQ ID NO: 768874 - protein, 678 aa, Homo sapiens; identical to SEQ ID NO: 768873

SEQ ID NO: 768875 - protein, 299 aa, Homo sapiens
MTRCSSMTPSAPWMPWLRCRISITGSTSLKPRSCVPSAGCWPCSMRDQQEVIQKFQDGTLNLLVATSVAEEGLDIPHCNVVVRYGLLTNEISMVQARGRARADQSVYAFVATEGSRELKRELINEALETLMEQAVAAVQKMDQAEYQAKIRDLQQAALTKRAAQAAQRENQRQQFPVEHVQLLCINCMVAVGHGSDLRKVEGTHHVNVNPNFSDPVVINKVFKDWKPGGVISCRNCGEVWGLQMIYKSVKLPVLKVRSMLLETPQGRIQAKKWSRVPFSVPDFDFLQHCAENLSDLSLD

SEQ ID NO: 768876 - protein, 177 aa, Homo sapiens
GQGAGLWAAQTLRPIPAAALAGLQEQRVYALHLRRYNDALLIHDTVRAVDALAALQDFYHREHVTKTQILCAERRLLALFDDRKNELAHLATHGPSPCLTLTSCSIVPRTCRTSPWTDHLIAAVPGLGCRGRESLQQTPGPSFLNHQLWASGPPATQESWAPWLRLPQWENNRRARA

SEQ ID NO: 768877 - protein, 678 aa, Homo sapiens; identical to SEQ ID NO: 768873

SEQ ID NO: 768878 - protein, 71 aa, Homo sapiens
MSQYLELKLQRAQPLPQVLGLTASPGTGGASKLDGAINHVLQVSLAPVGLPLPDPPGTSLPPCLPCHYPVP

SEQ ID NO: 768879 - protein, 1218 aa, Homo sapiens
GTRPRRGGCRSGLPAPRRRCTPDPAAVPRAMDLPRGLVVAWALSLWPGFTDTFNMDTRKPRVIPGSRTAFFGYTVQQHDISGNKWLVVGAPLETNGYQKTGDVYKCPVIHGNCTKLNLGRVTLSNVSERKDNMRLGLSLATNPKDNSFLACSPLWSHECGSSYYTTGMCSRVNSNFRFSKTVAPALQRCQTYMDIVIVLDGSNSIYPWVEVQHFLINILKKFYIGPGQIQVGVVQYGEDVVHEFHLNDYRSVKDVVEAASHIEQRGGTETRTAFGIEFARSEAFQKGGRKGAKKVMIVITDGESHDSPDLEKVIQQSERDNVTRYAVAVLGYYNRRGINPETFLNEIKYIASDPDDKHFFNVTDEAALKDIVDALGDRIFSLEGTNKNETSFGLEMSQTGFSSHVVEDGVLLGAVGAYDWNGAVLKETSAGKVIPLRESYLKEFPEELKNHGAYLGYTVTSVVSSRQGRVYVAGAPRFNHTGKVILFTMHNNRSLTIHQAMRGQQIGSYFGSEITSVDIDGDGVTDVLLVGAPMYFNEGRERGKVYVYELRQNRFVYNGTLKDSHSYQNARFGSSIASVRDLNQDSYNDVVVGAPLEDNHAGAIYIFHGFRGSILKTPKQRITASELATGLQYFGCSIHGQLDLNEDGLIDLAVGALGNAVILWSRPVVQINASLHFEPSKINIFHRDCKRSGRDATCLAAFLCFTPIFLAPHFQTTTVGIRYNATMDERRYTPRAHLDEGGDRFTNRAVLLSSGQELCERINFHVLDTADYVKPVTFSVEYSLEDPDHGPMLDDGWPTTLRVSVPFWNGCNEDEHCVPDLVLDARSDLPTAMEYCQRVLRKPAQDCSAYTLSFDTTVFIIESTRQRVAVEATLENRGENAYSTVLNISQSANLQFASLIQKEDSDGSIECVNEERRLQKQVCNVSYPFFRAKAKVAFRLDFEFSKSIFLHHLEIELAAGSDSNERDSTKEDNVAPLRFHLKYEADVLFTRSSSLSHYEVKPNSSLERYDGIGPPFSCIFRIQNLGLFPIHGMMMKITIPIATRSGNRLLKLRDFLTDEANTSCNIWGNSTEYRPTPVEEDLRRAPQLNHSNSDVVSINCNIRLVPNQEINFHLLGNLWLRSLKALKYKSMKIMVNAALQRQFHSPFIFREEDPSRQIVFEISKQEDWQVPIWIIVGSTLGGLLLLALLVLALWKLGFFRSARRRREPGLDPTPKVLE

SEQ ID NO: 768880 - protein, 1218 aa, Homo sapiens; identical to SEQ ID NO: 768879

SEQ ID NO: 768881 - protein, 386 aa, Homo sapiens
MEYCQRVLRKPAQDCSAYTLSFDTTVFIIESTRQRVAVEATLENRGENAYSTVLNISQSANLQFASLIQKEDSDGSIECVNEERRLQKQVCNVSYPFFRAKAKVAFRLDFEFSKSIFLHHLEIELAAGSDSNERDSTKEDNVAPLRFHLKYEADVLFTRSSSLSHYEVKPNSSLERYDGIGPPFSCIFRIQNLGLFPIHGMMMKITIPIATRSGNRLLKLRDFLTDEANTSCNIWGNSTEYRPTPVEEDLRRAPQLNHSNSDVVSINCNIRLVPNQEINFHLLGNLWLRSLKALKYKSMKIMVNAALQRQFHSPFIFREEDPSRQIVFEISKQEDWQVPIWIIVGSTLGGLLLLALLVLALWKLGFFRSARRRREPGLDPTPKVLE

SEQ ID NO: 768882 - protein, 934 aa, Homo sapiens
GTRPRRGGCRSGLPAPRRRCTPDPAAVPRAMDLPRGLVVAWALSLWPGFTDTFNMDTRKPRVIPGSRTAFFGYTVQQHDISGNKWLVVGAPLETNGYQKTGDVYKCPVIHGNCTKLNLGRVTLSNVSERKDNMRLGLSLATNPKDNSFLACSPLWSHECGSSYYTTGMCSRVNSNFRFSKTVAPALQRCQTYMDIVIVLDGSNSIYPWVEVQHFLINILKKFYIGPGQIQVGVVQYGEDVVHEFHLNDYRSVKDVVEAASHIEQRGGTETRTAFGIEFARSEAFQKGGRKGAKKVMIVITDGESHDSPDLEKVIQQSERDNVTRYAVAVLGYYNRRGINPETFLNEIKYIASDPDDKHFFNVTDEAALKDIVDALGDRIFSLEGTNKNETSFGLEMSQTGFSSHVVEDGVLLGAVGAYDWNGAVLKETSAGKVIPLRESYLKEFPEELKNHGAYLGYTVTSVVSSRQGRVYVAGAPRFNHTGKVILFTMHNNRSLTIHQAMRGQQIGSYFGSEITSVDIDGDGVTDVLLVGAPMYFNEGRERGKVYVYELRQNRFVYNGTLKDSHSYQNARFGSSIASVRDLNQDSYNDVVVGAPLEDNHAGAIYIFHGFRGSILKTPKQRITASELATGLQYFGCSIHGQLDLNEDGLIDLAVGALGNAVILWSRPVVQINASLHFEPSKINIFHRDCKRSGRDATCLAAFLCFTPIFLAPHFQTTTVGIRYNATMDERRYTPRAHLDEGGDRFTNRAVLLSSGQELCERINFHVLDTADYVKPVTFSVEYSLEDPDHGPMLDDGWPTTLRVSVPFWNGCNEDEHCVPDLVLDARSDLPTAMEYCQRVLRKPAQDCSAYTLSFDTTVFIIESTRQRVAVEATLENRGENAYSTVLNISQSANLQFASLIQKEDSDGSIECVNEERRRGVYQAMISLALKCIII

SEQ ID NO: 768883 - protein, 851 aa, Homo sapiens
GTRPRRGGCRSGLPAPRRRCTPDPAAVPRAMDLPRGLVVAWALSLWPGFTDTFNMDTRKPRVIPGSRTAFFGYTVQQHDISGNKWLVVGAPLETNGYQKTGDVYKCPVIHGNCTKLNLGRVTLSNVSERKDNMRLGLSLATNPKDNSFLACSPLWSHECGSSYYTTGMCSRVNSNFRFSKTVAPALQRCQTYMDIVIVLDGSNSIYPWVEVQHFLINILKKFYIGPGQIQVGVVQYGEDVVHEFHLNDYRSVKDVVEAASHIEQRGGTETRTAFGIEFARSEAFQKGGRKGAKKVMIVITDGESHDSPDLEKVIQQSERDNVTRYAVAVLGYYNRRGINPETFLNEIKYIASDPDDKHFFNVTDEAALKDIVDALGDRIFSLEGTNKNETSFGLEMSQTGFSSHVVEDGVLLGAVGAYDWNGAVLKETSAGKVIPLRESYLKEFPEELKNHGAYLGYTVTSVVSSRQGRVYVAGAPRFNHTGKVILFTMHNNRSLTIHQAMRGQQIGSYFGSEITSVDIDGDGVTDVLLVGAPMYFNEGRERGKVYVYELRQNRFVYNGTLKDSHSYQNARFGSSIASVRDLNQDSYNDVVVGAPLEDNHAGAIYIFHGFRGSILKTPKQRITASELATGLQYFGCSIHGQLDLNEDGLIDLAVGALGNAVILWSRPVVQINASLHFEPSKINIFHRDCKRSGRDATCLAAFLCFTPIFLAPHFQTTTVGIRYNATMDERRYTPRAHLDEGGDRFTNRAVLLSSGQELCERINFHVLDTADYVKPVTFSVEYSLEDPDHGPMLDDGWPTTLRVSVPFWNGCNEDEHCVPDLVLDARSDLPTAMEYCQKGAEEAYPAALIGR

SEQ ID NO: 768884 - protein, 125 aa, Homo sapiens
MSSVVETELVYIEGEGLRVPTQLPTPGSPWPRCPSGTAAMRMSTVSLTLCWMPGVTCPRPCELAPSTPTLAPSPSLPEALGLLGPWIISWTSSSQAAWIKHCTWSLRSSPGSATNSCITSGKSLL

SEQ ID NO: 768885 - protein, 1218 aa, Homo sapiens; identical to SEQ ID NO: 768879

SEQ ID NO: 768886 - protein, 1218 aa, Homo sapiens; identical to SEQ ID NO: 768879

SEQ ID NO: 768887 - protein, 1086 aa, Homo sapiens
MRLGLSLATNPKDNSFLACSPLWSHECGSSYYTTGMCSRVNSNFRFSKTVAPALQRCQTYMDIVIVLDGSNSIYPWVEVQHFLINILKKFYIGPGQIQVGVVQYGEDVVHEFHLNDYRSVKDVVEAASHIEQRGGTETRTAFGIEFARSEAFQKGGRKGAKKVMIVITDGESHDSPDLEKVIQQSERDNVTRYAVAVLGYYNRRGINPETFLNEIKYIASDPDDKHFFNVTDEAALKDIVDALGDRIFSLEGTNKNETSFGLEMSQTGFSSHVVEDGVLLGAVGAYDWNGAVLKETSAGKVIPLRESYLKEFPEELKNHGAYLGYTVTSVVSSRQGRVYVAGAPRFNHTGKVILFTMHNNRSLTIHQAMRGQQIGSYFGSEITSVDIDGDGVTDVLLVGAPMYFNEGRERGKVYVYELRQNRFVYNGTLKDSHSYQNARFGSSIASVRDLNQDSYNDVVVGAPLEDNHAGAIYIFHGFRGSILKTPKQRITASELATGLQYFGCSIHGQLDLNEDGLIDLAVGALGNAVILWSRPVVQINASLHFEPSKINIFHRDCKRSGRDATCLAAFLCFTPIFLAPHFQTTTVGIRYNATMDERRYTPRAHLDEGGDRFTNRAVLLSSGQELCERINFHVLDTADYVKPVTFSVEYSLEDPDHGPMLDDGWPTTLRVSVPFWNGCNEDEHCVPDLVLDARSDLPTAMEYCQRVLRKPAQDCSAYTLSFDTTVFIIESTRQRVAVEATLENRGENAYSTVLNISQSANLQFASLIQKEDSDGSIECVNEERRLQKQVCNVSYPFFRAKAKVAFRLDFEFSKSIFLHHLEIELAAGSDSNERDSTKEDNVAPLRFHLKYEADVLFTRSSSLSHYEVKPNSSLERYDGIGPPFSCIFRIQNLGLFPIHGMMMKITIPIATRSGNRLLKLRDFLTDEANTSCNIWGNSTEYRPTPVEEDLRRAPQLNHSNSDVVSINCNIRLVPNQEINFHLLGNLWLRSLKALKYKSMKIMVNAALQRQFHSPFIFREEDPSRQIVFEISKQEDWQVPIWIIVGSTLGGLLLLALLVLALWKLGFFRSARRRREPGLDPTPKVLE

SEQ ID NO: 768888 - protein, 1219 aa, Homo sapiens
GTRPRRGGCRSGLPAPRRRCTPDPAAVPRAMDLPRGLVVAWALSLWPGFTDTFNMDTRKPRVIPGSRTAFFGYTVQQHDISGNKWLVVGAPLETNGYQKTGDVYKCPVIHGNCTKLNLGRVTLSNVSERKDNMRLGLSLATNPKDNSFLACSPLWSHECGSSYYTTGMCSRVNSNFRFSKTVAPALQRCQTYMDIVIVLDGSNSIYPWVEVQHFLINILKKFYIGPGQIQVGVVQYGEDVVHEFHLNDYRSVKDVVEAASHIEQRGGTETRTAFGIEFARSEAFQKGGRKGAKKVMIVITDGESHDSPDLEKVIQQSERDNVTRYAVAVLGYYNRRGINPETFLNEIKYIASDPDDKHFFNVTDEAALKDIVDALGDRIFSLEGTNKNETSFGLEMSQTGFSSHVVEDGVLLGAVGAYDWNGAVLKETSAGKVIPLRESYLKEFPEELKNHGAYLGYTVTSVVSSRQGRVYVAGAPRFNHTGKVILFTMHNNRSLTIHQAMRGQQIGSYFGSEITSVDIDGDGVTDVLLVGAPMYFNEGRERGKVYVYELRQNRFVYNGTLKDSHSYQNARFGSSIASVRDLNQDSYNDVVVGAPLEDNHAGAIYIFHGFRGSILKTPKQRITASELATGLQYFGCSIHGQLDLNEDGLIDLAVGALGNAVILWSRPVVQINASLHFEPSKINIFHRDCKRSGRDATCLAAFLCFTPIFLAPHFQTTTVGIRYNATMDERRYTPRAHLDEGGDRFTNRAVLLSSGQELCERINFHVLDTADYVKPVTFSVEYSLEDPDHGPMLDDGWPTTLRVSVPFWNGCNEDEHCVPDLVLDARSDLPTAMEYCQRVLRKPAQDCSAYTLSFDTTVFIIESTRQRVAVEATLENRGENAYSTVLNISQSANLQFASLIQKEDSDGSIECVNEERRLQKQVCNVSYPFFRAKAKVAFRLDFEFSKSIFLHHLEIELAAGSDSNERDSTKEDNVAPLRFHLKYEADVLFTRSSSLSHYEVKPNSSLERYDGIGPPFSCIFRIQNLGLFPIHGMMMKITIPIATRSGNRLLKLRDFLTDEANTSCNIWGNSTEYRPTPVEEDLRRAPQLNHSNSDVVSINCNIRLVPNQEINFHLLGNLWLRSLKALKYKSMKIMVNAALQRQFHSPFIFREEDPSRQIVFEISKQEDWQVPIWIIVGSTLGGLLLLALLVLALWKVRALAGEGRSSILAGRNGSLTLYQ

SEQ ID NO: 768889 - protein, 390 aa, Homo sapiens
GTRPRRGGCRSGLPAPRRRCTPDPAAVPRAMDLPRGLVVAWALSLWPGFTDTFNMDTRKPRVIPGSRTAFFGYTVQQHDISGNKWLVVGAPLETNGYQKTGDVYKCPVIHGNCTKLNLGRVTLSNVSERKDNMRLGLSLATNPKDNSFLACSPLWSHECGSSYYTTGMCSRVNSNFRFSKTVAPALQRCQTYMDIVIVLDGSNSIYPWVEVQHFLINILKKFYIGPGQIQVGVVQYGEDVVHEFHLNDYRSVKDVVEAASHIEQRGGTETRTAFGIEFARSEAFQKGGRKGAKKVMIVITDGESHDSPDLEKVIQQSERDNVTRYAVAVLGYYNRRGINPETFSGFDEEVLNLHPGVDAVGAIQDNDDVMYGLAPLESWGHGLGDLKIGV

SEQ ID NO: 768890 - protein, 131 aa, Homo sapiens
MRHRDSLEALSSLGPSVRSRTAHLLPDRLVLGNASSLPLVATLPHRQCHIPVNTNPLGLSGCATVTGSLGCHFTSWRLLWPVAALPEFCLGPLGSFHPLGLAGCACLSLLVQIPCLPRASQVQSSKGCMSK

SEQ ID NO: 768891 - protein, 161 aa, Homo sapiens
MDDIYKAAVEQLTEEQKNEFKAAFDIFVLGAEDGCISTKELGKVMRMLGQNPTPEELQEMIDEVDEDGSGTVDFDEFLVMMVRCMKDDSKGKSEEELSDLFRMFDKNADGYIDLDELKIMLQATGETITEDDIEELMKDGDKNNDGRIDYDEFLEFMKGVE

SEQ ID NO: 768892 - protein, 115 aa, Homo sapiens
MLGQNPTPEELQEMIDEVDEDGSGTVDFDEFLVMMVRCMKDDSKGKSEEELSDLFRMFDKNADGYIDLDELKIMLQATGETITEDDIEELMKDGDKNNDGRIDYDEFLEFMKGVE

SEQ ID NO: 768893 - protein, 161 aa, Homo sapiens; identical to SEQ ID NO: 768891

SEQ ID NO: 768894 - protein, 132 aa, Homo sapiens
MDDIYKAAVEQLTEEQKNEFKAAFDIFVLGAEDGCISTKELGKVMRMLGQNPTPEELQEMIDEVDEDELPRSHHQSRADSEEQRDSVKFQNWPDSSHYMIKKKTSGFVVKKIGFMVSIIVNFSSMFQLSPDF

SEQ ID NO: 768895 - protein, 161 aa, Homo sapiens; identical to SEQ ID NO: 768891

SEQ ID NO: 768896 - protein, 30 aa, Homo sapiens
MGDFPDPGGVEERRLFDVVQGQSVEGEWFR

SEQ ID NO: 768897 - protein, 177 aa, Homo sapiens
MDDIYKAAVEQLTEEQKNEFKAAFDIFVLGAEDGCISTKELGKVMRMLGQNPTPEELQEMIDEVDEDGSGTVDFDEFLVMMVRCMKDDSKGKSEEELSDLFRMFDKNADGYIDLDELKIMLQATGETITEDDIEELMKDGDKNNDGRIDYDELMELMKVLEEGLILVTDATDARRLT

SEQ ID NO: 768898 - protein, 91 aa, Homo sapiens
KGGDQEVGLLITTIEDRIVLEIDRLEDHGVAEAIPTMIDQTAAGIPSTVLLTTLQERSESGKRTKEGQFKRPKGGWKVLQYEYCTNILTLV

SEQ ID NO: 768899 - protein, 154 aa, Homo sapiens
MSKQRGTFSEVSLAQDPKRQQRKPKGNKSSISGTEQEIFQVELNLQNPSLNHQGIDKIYDCQGLLPPPEKLTAEVLGIICIVLMATVLKTIVLIPFLEQNNSSPNTRTQKARHCGHCPEEWITYSNSCYYIGKKEELGKRVCWPVLRRTPVCFL

SEQ ID NO: 768900 - protein, 154 aa, Homo sapiens; identical to SEQ ID NO: 768899

SEQ ID NO: 768901 - protein, 128 aa, Homo sapiens
PEADETPEVRLGELTAHSREASVDAGSHCQSRTRLRDFCLLKWTSAVLGECLYSFPYTTVGMVQLHIDRKPRETLDVRVPASPSGSFGTWPPQSSSTRSRDCQALPLIHHHKNVTCYGSLLAIKGYTL

SEQ ID NO: 768902 - protein, 105 aa, Homo sapiens
VTIRKHENSVECWNPDTNTWTSLERMNESRSTLGVVVLAGELYALGGYDGQSYLQSVEKYIPKIRKWQPVAPMTTTRSCFAAAVLDGMIYAIGGYGPAHMNRYLT

SEQ ID NO: 768903 - protein, 225 aa, Homo sapiens
VTIRKHENSVECWNPDTNTWTSLERMNESRSTLGVVVLAGELYALGGYDGQSYLQSVEKYIPKIRKWQPVAPMTTTRSCFAAAVLDGMIYAIGGYGPAHMNSVERYDPSKDSWEMVASMADKRIHFGVGVMLGFIFVVGGHNGVSHLSSIERYDPHQNQWTVCRPMKEPRTGVGAAVIDNYLYVVGGHSGSSYLNTVQKYDPISDTWLDSAGMIYCRCNFGLTAL

SEQ ID NO: 768904 - protein, 107 aa, Homo sapiens
PLYSSLGDTETTSQKNNQSINKRGVHVNESTVLTSAAGWTRGSVPPSVWCRAFRGLASRRGEPGAGCEHCCWPGHSRYAAVPDTSTRPLWANVWNLGTSGVGNRALR

SEQ ID NO: 768905 - protein, 106 aa, Homo sapiens
MLGPGQDSVSSQRSWDRGEGRSGSQRERQEVAKAESACAPSPTPLLCPWAVSTSPPQLPRSERGEAEQAADPATWGRGRRGWHCGALSAYCKLCLPGSSDSCASAS

SEQ ID NO: 768906 - protein, 819 aa, Homo sapiens
MSGTSKESLGHGGLPGLGKTCLTTMDTKLNMLNEKVDQLLHFQEDVTEKLQSMCRDMGHLERGLHRLEASRAPGPGGADGVPHIDTQAGWPEVLELVRAMQQDAAQHGARLEALFRMVAAVDRAIALVGATFQKSKVADFLMQGRVPWRRGSPGDSPEENKERVEEEGGKPKHVLSTSGVQSDAREPGEESQKADVLEGTAERLPPIRASGLGADPAQAVVSPGQGDGVPGPAQAFPGHLPLPTKVEAKAPETPSENLRTGLELAPAPGRVNVVSPSLEVAPGAGQGASSSRPDPEPLEEGTRLTPGPGPQCPGPPGLPAQARATHSGGETPPRISIHIQEMDTPGEMLMTGRGSLGPTLTTEAPAAAQPGKQGPPGTGRCLQAPGTEPGEQTPEGARELSPLQESSSPGGVKAEEEQRAGAEPGTRPSLARSDDNDHEVGALGLQQGKSPGAGNPEPEQDCAARAPVRAEAVRRMPPGAEAGSVVLDDSPAPPAPFEHRVVSVKETSISAGYEVCQHEVLGGGRFGQVHRCTEKSTGLPLAAKIIKVKSAKDREDVKNEINIMNQLSHVNLIQLYDAFESKHSCTLVMEYVDGGELFDRITDEKYHLTELDVVLFTRQICEGVHYLHQHYILHLDLKPENILCVNQTGHQIKIIDFGLARRYKPREKLKVNFGTPEFLAPEVVNYEFVSFPTDMWSVGVITYMLLSGLSPFLGETDAETMNFIVNCSWDFDADTFEGLSEEAKDFVSRLLVKEKSCRMSATQCLKHEWLNNLPAKASRSKTRLKSQLLLQKYIAQRKWKKHFYVVTAANRLRKFPTSP

SEQ ID NO: 768907 - protein, 304 aa, Homo sapiens
AVWLCLCRGRFGQVHRCTEKSTGLPLAAKIIKVKSAKDREDVKNEINIMNQLSHVNLIQLYDAFESKHSCTLVMEYVDGGELFDRITDEKYHLTELDVVLFTRQICEGVHYLHQHYILHLDLKPENILCVNQTGHQIKIIDFGLARRYKPREKLKVNFGTPEFLAPEVVNYEFVSFPTDMWSVGVITYMLLSGLSPFLGETDAETMNFIVNCSWDFDADTFEGLSEEAKDFVSRLLVKEKSCRMSATQCLKHEWLNNLPAKASRSKTRLKSQLLLQKYIAQRKWKKHFYVVTAANRLRKFPTSP

SEQ ID NO: 768908 - protein, 92 aa, Homo sapiens
SQYGQQQDAYQGPPPQQGYPPQQQQYPGQQGYPGQQQGYGPSQGGPGPQYPNYPQGQGQQYGGYRPTQPGPPQPPQQRPYGYDQGQYGNYQQ

SEQ ID NO: 768909 - protein, 92 aa, Homo sapiens; identical to SEQ ID NO: 768908

SEQ ID NO: 768910 - protein, 92 aa, Homo sapiens; identical to SEQ ID NO: 768908

SEQ ID NO: 768911 - protein, 415 aa, Homo sapiens
MATRNSPMPLGTAQGDPGEAGTRPGPDASLRDTGAATQLKMKPRKVHKIKAVIIDLGSQYCKCGYAGEPRPTYFISSTVGKRCPEAADAGDTRKWTLVGHELLNTEAPLKLVNPLKHGIVVDWDCVQDIWEYIFRTAMKILPEEHAVLVSDPPLSPSSNREKYAELMFETFGIPAMHVTSQSLLSIYSYGKTSGLVVESGHGVSHVVPISEGDVLPGLTSRADYAGGDLTNYLMQLLNEAGHAFTDDHLHIIEHIKKKCCYAAFLPEEELGLVPEELRVDYELPDGKLITIGQERFRCSEMLFQPSLAGSTQPGLPELTAACLGRCQDTGFKEEMAANVLLCGGCTMLDGFPERFQRELSLLCPGDSPAVAAAPERKTSVWTGGSILASLQAFQQLWVSKEEFEERGSVAIYSKC

SEQ ID NO: 768912 - protein, 270 aa, Homo sapiens
MHYYRYSNAKVSCWYKYLLFSYNIIFWLAGVVFLGVGLWAWSEKGVLSDLTKVTRMHGIDPVVLVLMVGVVMFTLGFAGCVGALRENICLLNFFCGTIVLIFFLELAVAVLAFLFQDWVRDRFREFFESNIKSYRDDIDLQNLIDSLQKANQCCGAYGPEDWDLNVYFNCSGASYSREKCGVPFSCCVPDPAQKVVNTQCGYDVRIQLKSKWDESIFTKGCIQALESWLPRNIYIVAGVFIAISLLQIFGIFLARTLISDIEAVKAGHHF

SEQ ID NO: 768913 - protein, 281 aa, Homo sapiens
SQVRPGLSDEGRAAPPLPPPRADSASQKMHYYRYSNAKVSCWYKYLLFSYNIIFWGVLSDLTKVTRMHGIDPVVLVLMVGVVMFTLGFAGCVGALRENICLLNFFCGTIVLIFFLELAVAVLAFLFQDWVRDRFREFFESNIKSYRDDIDLQNLIDSLQKANQCCGAYGPEDWDLNVYFNCSGASYSREKCGVPFSCCVPDPAQKVVNTQCGYDVRIQLKSKWDESIFTKGCIQALESWLPRNIYIVAGVFIAISLLQIFGIFLARTLISDIEAVKAGHHF

SEQ ID NO: 768914 - protein, 129 aa, Homo sapiens
DPHFPPGKQVITYFRIYFGSPLGNLAPEGQDFGPGHDCKPREPQPKMASLKLLARAPLVAMYPGLAGLPFASPRRQPFFCNHTPCLATTPGCSCSEAPGILFLVTAPNGISVITGPPFLSGLFWGCSWK

SEQ ID NO: 768915 - protein, 238 aa, Homo sapiens
MHYYRYSNAKVSCWYKYLLFSYNIIFWGVLSDLTKVTRMHGIDPVVLVLMVGVVMFTLGFAGCVGALRENICLLNFFCGTIVLIFFLELAVAVLAFLFQDWVRDRFREFFESNIKSYRDDIDLQNLIDSLQKANQCCGAYGPEDWDLNVYFNCSGASYSREKCGVPFSCCVPDPAQKVVNTQCGYDVRIQLKSKWDESIFTKGCIQALESWLPGPSLWGALALAGRLVSGGRPLGGGL

SEQ ID NO: 768916 - protein, 233 aa, Homo sapiens
VVNLDGPPADRRRTRADSASQKMHYYRYSNAKVSCWYKYLLFSYNIIFWLAGVVFLGVGLWAWSEKGVLSDLTKVTRMHGIDPVVLVLMVGVVMFTLGFAGCVGALRENICLLNFFCGTIVLIFFLELAVAVLAFLFQDWVRDRFREFFESNIKSYRDDIDLQNLIDSLQKANQCCGAYGPEDWDLNVYFNCSGASYSREKCGVPFSCCVPDPAAKSCEHTGGFDAGFTETSG

SEQ ID NO: 768917 - protein, 47 aa, Homo sapiens
MRNGKKARMDVYARMDVYARMDVYARMDVYARMDVYARMDVYARMDV

SEQ ID NO: 768918 - protein, 270 aa, Homo sapiens; identical to SEQ ID NO: 768912

SEQ ID NO: 768919 - protein, 311 aa, Homo sapiens
MPGWYRTEVLWIAPRNLLNFLEPSRAAPPLPPPRADSASQKMHYYRYSNAKVSCWYKYLLFSYNIIFWLAGVVFLGVGLWAWSEKGVLSDLTKVTRMHGIDPVVLVLMVGVVMFTLGFAGCVGALRENICLLNFFCGTIVLIFFLELAVAVLAFLFQDWVRDRFREFFESNIKSYRDDIDLQNLIDSLQKANQCCGAYGPEDWDLNVYFNCSGASYSREKCGVPFSCCVPDPAQKVVNTQCGYDVRIQLKSKWDESIFTKGCIQALESWLPRNIYIVAGVFIAISLLQIFGIFLARTLISDIEAVKAGHHF

SEQ ID NO: 768920 - protein, 281 aa, Homo sapiens; identical to SEQ ID NO: 768913

SEQ ID NO: 768921 - protein, 270 aa, Homo sapiens; identical to SEQ ID NO: 768912

SEQ ID NO: 768922 - protein, 270 aa, Homo sapiens; identical to SEQ ID NO: 768912

SEQ ID NO: 768923 - protein, 270 aa, Homo sapiens; identical to SEQ ID NO: 768912

SEQ ID NO: 768924 - protein, 270 aa, Homo sapiens; identical to SEQ ID NO: 768912

SEQ ID NO: 768925 - protein, 270 aa, Homo sapiens; identical to SEQ ID NO: 768912

SEQ ID NO: 768926 - protein, 313 aa, Homo sapiens
  misc_feature (1)..(1): Xaa can be any naturally occurring amino acid
XRRSDGPSRALPPRAAEDALELPRPSRAAPALPPPRADSASQKMHYYRYSNAKVSCWYKYLLFSYNIIFWLAGVVFLGVGLWAWSEKGVLSDLTKVTRMHGIDPVVLVLMVGVVMFTLGFAGCVGALRENICLLNFFCGTIVLIFFLELAVAVLAFLFQDWVRDRFREFFESNIKSYRDDIDLQNLIDSLQKANQCCGAYGPEDWDLNVYFNCSGASYSREKCGVPFSCCVPDPAQKVVNTQCGYDVRIQLKSKWDESIFTKGCIQALESWLPRNIYIVAGVFIAISLLQIFGIFLARTLISDIEAVKAGHHF

SEQ ID NO: 768927 - protein, 215 aa, Homo sapiens
MHGIDPVVLVLMVGVVMFTLGFAGCVGALRENICLLNFFCGTIVLIFFLELAVAVLAFLFQDWVRDRFREFFESNIKSYRDDIDLQNLIDSLQKANQCCGAYGPEDWDLNVYFNCSGASYSREKCGVPFSCCVPDPAQKVVNTQCGYDVRIQLKSKWDESIFTKGCIQALESWLPRNIYIVAGVFIAISLLQIFGIFLARTLISDIEAVKAGHHF

SEQ ID NO: 768928 - protein, 253 aa, Homo sapiens
MHYYRYSNAKVSCWYKYLLFSYNIIFWGVLSDLTKVTRMHGIDPVVLVLMVGVVMFTLGFAGCVGALRENICLLNFFCGTIVLIFFLELAVAVLAFLFQDWVRDRFREFFESNIKSYRDDIDLQNLIDSLQKANQCCGAYGPEDWDLNVYFNCSGASYSREKCGVPFSCCVPDPAQKVVNTQCGYDVRIQLKSKWDESIFTKGCIQALESWLPRNIYIVAGVFIAISLLQIFGIFLARTLISDIEAVKAGHHF

SEQ ID NO: 768929 - protein, 240 aa, Homo sapiens
MERKVLPCFLCLFQGVLSDLTKVTRMHGIDPVVLVLMVGVVMFTLGFAGCVGALRENICLLNFFCGTIVLIFFLELAVAVLAFLFQDWVRDRFREFFESNIKSYRDDIDLQNLIDSLQKANQCCGAYGPEDWDLNVYFNCSGASYSREKCGVPFSCCVPDPAQKVVNTQCGYDVRIQLKSKWDESIFTKGCIQALESWLPRNIYIVAGVFIAISLLQIFGIFLARTLISDIEAVKAGHHF

SEQ ID NO: 768930 - protein, 147 aa, Homo sapiens
MHYYRYSNAKVSCWYKYLLFSYNIIFWNQCCGAYGPEDWDLNVYFNCSGASYSREKCGVPFSCCVPDPAQKVVNTQCGYDVRIQLKSKWDESIFTKGCIQALESWLPRNIYIVAGVFIAISLLQIFGIFLARTLISDIEAVKAGHHF

SEQ ID NO: 768931 - protein, 270 aa, Homo sapiens; identical to SEQ ID NO: 768912

SEQ ID NO: 768932 - protein, 270 aa, Homo sapiens; identical to SEQ ID NO: 768912

SEQ ID NO: 768933 - protein, 270 aa, Homo sapiens; identical to SEQ ID NO: 768912

SEQ ID NO: 768934 - protein, 270 aa, Homo sapiens; identical to SEQ ID NO: 768912

SEQ ID NO: 768935 - protein, 227 aa, Homo sapiens
MHYYRYSNAKVSCWYKYLLFSYNIIFWLAGVVFLGVGLWAWSEKGVLSDLTKVTRMHGIDPVVLVLMVGVVMFTLGFAGCVGALRENICLLNFFCGTIVLIFFLELAVAVLAFLFQDWVRDRFREFFESNIKSYRDDIDLQNLIDSLQKANQCCGAYGPEDWDLNVYFNCSGASYSREKCGVPFSCCVPDPAPLFLLHILQPPSMHPTYKHSPTPQRGLTVFWSWCY

SEQ ID NO: 768936 - protein, 211 aa, Homo sapiens
  misc_feature (1)..(1): Xaa can be any naturally occurring amino acid
XRRSDGPSRALPPRAAEDALELPRPSRAAPALPPPRADSASQKMHYYRYSNAKVSCWYKYLLFSYNIIFWLAGVVFLGVGLWAWSEKGVLSDLTKVTRMHGIDPVVLVLMVGVVMFTLGFAGCVGALRENICLLNFFCGTIVLIFFLELAVAVLAFLFQDWVRDRFREFFESNIKSYRDDIDLQNLIDSLQKAKHSPTPQRGLTVFWSWCY

SEQ ID NO: 768937 - protein, 104 aa, Homo sapiens
SSSATFVEEQRHCKPREPQPKMASLKLLARAPLVAMYPGLAGLPFASPRRQPFFCNHTPCLATTPGCSCSEAPGILFLVTAPNGISVITGPPFLSGLFWGCSWK

SEQ ID NO: 768938 - protein, 105 aa, Homo sapiens
MYEQNVTVNDHKRKQKVLGPNQKLKFNPTELIIYCKDFRIVRFRFDESGPESAKKLAGVVFLGVGLWAWSEKGVLSDLTKVTQGWLACHLPLPGDSRSSATTPRA

SEQ ID NO: 768939 - protein, 126 aa, Homo sapiens
FLAEQRGCQSHQGTHLMASHLTMHMLTLKPWGLSCTPSSTLVHPLSGSCQRYFSCPVFLSLAFLSHPKNLPRPYGSLPFFPRQLLIWAVCTPSFAPPTMPHVAESCLSQLSTLAFFSLCSTRHCTS

SEQ ID NO: 768940 - protein, 266 aa, Homo sapiens
MHYYRYSNAKVSCWYKYLLFSYNIIFWLAGVVFLGVGLWAWSEKGVLSDLTKVTRMHGIDPVVLVLMVGVVMFTLGFAGCVGALRENICLLNFFCGTIVLIFFLELAVAVLAFLFQDWVRDRFREFFESNIKSYRDDIDLQNLIDSLQKAVSTSPAGPPIEHATSLCCLELSLAGASGLLCGLSACSLADSREAVEQATPPLVCSTLPACGCLVGQPFPIGIGQASPAAPEATHPPRARPSSFGPRSFQSCPIAIPAAILLRRCIP

SEQ ID NO: 768941 - protein, 266 aa, Homo sapiens; identical to SEQ ID NO: 768940

SEQ ID NO: 768942 - protein, 266 aa, Homo sapiens; identical to SEQ ID NO: 768940

SEQ ID NO: 768943 - protein, 247 aa, Homo sapiens
LVGTREDWVYLMEDIVDGIDLASEQREEIITSAIDLRVTDIGFSWRIRKEPGECERYQSLRLGKYSTDESITSLAELVVQKISPRHSEPVKRVLALTETCLVERDPATYNMATLKPLGAGLVMKAIIEEGDKEIATKMQELALSEGALPRHLHTAMFTISSDQRMLTNRQLSRHLVGLWTADNATATNLLKRILPPGLLAYLESSDLVPEKDADRMHVRDNVKIAMDQYGKFNKVPEWQRLAGKAAK

SEQ ID NO: 768944 - protein, 431 aa, Homo sapiens
MRALLARLLLCVLVVSDSKGSNELHQVPSNCDCLNGGTCVSNKYFSNIHWCNCPKKFGGQHCEIDKSKTCYEGNGHFYRGKASTDTMGRPCLPWNSATVLQQTYHAHRSDALQLGLGKHNYCRNPDNRRRPWCYVQVGLKLLVQECMVHDCADGKKPSSPPEELKFQCGQKTLRPRFKIIGGEFTTIENQPWFAAIYRRHRGGSVTYVCGGSLISPCWVISATHCFIDYPKKEDYIVYLGRSRLNSNTQGEMKFEVENLILHKDYSADTLAHHNDIALLKIRSKEGRCAQPSRTIQTICLPSMYNDPQFGTSCEITGFGKENSTDYLYPEQLKMTVVKLISHRECQQPHYYGSEVTTKMLCAADPQWKTDSCQGDSGGPLVCSLQGRMTLTGIVSWGRGCALKDKPGVYTRVSHFLPWIRSHTKEENGLAL

SEQ ID NO: 768945 - protein, 375 aa, Homo sapiens
MRALLARLLLCVLVVSDSKGSNELHQVPSNCDCLNGGTCVSNKYFSNIHWCNCPKKFGGQHCEIDKSKTCYEGNGHFYRGKASTDTMGRPCLPWNSATVLQQTYHAHRSDALQLGLGKHNYCRNPDNRRRPWCYVQVGLKLLVQECMVHDCADGKKPSSPPEELKFQCGQKTLRPRFKIIGGEFTTIENQPWFAAIYRRHRGGSVTYVCGGSLISPCWVISATHCFIDYPKKEDYIVYLGRSRLNSNTQGEMKFEVENLILHKDYSADTLAHHNDIALLKIRSKEGRCAQPSRTIQTICLPSMYNDPQFGTSCEITGFGKENSTDYLYPEQLKMTVVKLISHRECQQPHYYGSEVTTKMLCAADPQWKTDSCQAA

SEQ ID NO: 768946 - protein, 431 aa, Homo sapiens; identical to SEQ ID NO: 768944

SEQ ID NO: 768947 - protein, 431 aa, Homo sapiens; identical to SEQ ID NO: 768944

SEQ ID NO: 768948 - protein, 161 aa, Homo sapiens
ASEALPASREGGVVMELAAATPGPAPLPSASRGLFGDAPPAAARGPVEPGAARLALLPRPALTLLLLLMAAVIRCLEQAYTTDWRATLKTIRNGVHKIDTYLNAALDLLGGEDGLCQYKCSDGSKPFPRYGYKPSPPNGCGSPLFGVHLNIGIPSLTKCCN

SEQ ID NO: 768949 - protein, 120 aa, Homo sapiens
SPLPLAAACSGPCFHSPPRSEDPGLYHVKVGGLTPSLSEPHSALVAVRRLLVHSSYHGTTTSGDIALMELDSPLQASQFSPICLPGPQTPLAIGTVCWVNGLGVHSGEGEGEYALTSPYS

SEQ ID NO: 768950 - protein, 304 aa, Homo sapiens
PRAANIDFLRAEGEGPGGGGLQPRQGESMSKPVDHVKRPMNAFMVWSRAQRRKMAQENPKMHNSEISKRLGAEWKLLTESEKRPFIDEAKRLRAMHMKEHPDYKYRPRRKPKTLLKKDKFAFPVPYGLGGVADAEHPALKAGAGLHAGAGGGLVPESLLANPEKAAAAAAAAAARVFFPQSAAAAAAAAAAAAAGSPYSLLDLGSKMAEISSSSSGLPYASSLGYPTAGAGAFHGAAAAAAAAAAAAGGHTHSHPSPGNPGYMIPCNCSAWPSPGLQPPLAYILLPGMGKPQLDPYPAAYAAAL

SEQ ID NO: 768951 - protein, 192 aa, Homo sapiens
MGNISSNISAFQSLHIVMLGLDSAGKTTVLYRLKFNEFVNTVPTIGFNTEKIKLSNGTAKGISCHFWDVGGQEKLRPLWKSYSRCTDGIIYVVDSVDVDRLEEAKTELHKVTKFAENQGTPLLVIANKQDLPKSLPVAEIEKQLALHELIPATTYHVQPACAIIGEGLTEGMDKLYEMILKRRKSLKQKKKR

SEQ ID NO: 768952 - protein, 193 aa, Homo sapiens
ASRGPVLMDEAFQSLHIVMLGLDSAGKTTVLYRLKFNEFVNTVPTIGFNTEKIKLSNGTAKGISCHFWDVGGQEKLRPLWKSYSRCTDGIIYVVDSVDVDRLEEAKTELHKVTKFAENQGTPLLVIANKQDLPKSLPVAEIEKQLALHELIPATTYHVQPACAIIGEGLTEGMDKLYEMILKRRKSLKQKKKR

SEQ ID NO: 768953 - protein, 192 aa, Homo sapiens; identical to SEQ ID NO: 768951

SEQ ID NO: 768954 - protein, 136 aa, Homo sapiens
SARYRLQKLAGDVGGQEKLRPLWKSYSRCTDGIIYVVDSVDVDRLEEAKTELHKVTKFAENQGTPLLVIANKQDLPKSLPVAEIEKQLALHELIPATTYHVQPACAIIGEGLTEGMDKLYEMILKRRKSLKQKKKR

SEQ ID NO: 768955 - protein, 201 aa, Homo sapiens
MGNISSNISAFQSLHIVMLGLDSAGKTTVLYRLKFNEFVNTVPTIGFNTEKIKLSNGTAKGISCHFWDVGGQEKLRPLWKSYSRCTDGIIYVVDSVDVDRLEEAKTELHKVTKFAENQGTPLLVIANKQDLPKSLPVAEIEKQLALHELIPATTYHVQPACAIIGEGLTEGMDKLYEMILKRRKSLKQKKKRTGDLRSCEV

SEQ ID NO: 768956 - protein, 119 aa, Homo sapiens
MHFPEPWAYPPWGACWFWGDHLSLHSGAVKLSNFRSQGRPLLKFHLSCSGPKGGGGLGHQRTAWDGSAGTERCAGLAGDGRGGALFLVLCGGCRRPVLLRTAFQPGIRHLPDGLDPVHV

SEQ ID NO: 768957 - protein, 192 aa, Homo sapiens; identical to SEQ ID NO: 768951

SEQ ID NO: 768958 - protein, 192 aa, Homo sapiens; identical to SEQ ID NO: 768951

SEQ ID NO: 768959 - protein, 192 aa, Homo sapiens; identical to SEQ ID NO: 768951

SEQ ID NO: 768960 - protein, 192 aa, Homo sapiens; identical to SEQ ID NO: 768951

SEQ ID NO: 768961 - protein, 196 aa, Homo sapiens
KAYGRGRGLIRRGAFQSLHIVMLGLDSAGKTTVLYRLKFNEFVNTVPTIGFNTEKIKLSNGTAKGISCHFWDVGGQEKLRPLWKSYSRCTDGIIYVVDSVDVDRLEEAKTELHKVTKFAENQGTPLLVIANKQDLPKSLPVAEIEKQLALHELIPATTYHVQPACAIIGEGLTEGMDKLYEMILKRRKSLKQKKKR

SEQ ID NO: 768962 - protein, 192 aa, Homo sapiens; identical to SEQ ID NO: 768951

SEQ ID NO: 768963 - protein, 119 aa, Homo sapiens; identical to SEQ ID NO: 768956

SEQ ID NO: 768964 - protein, 192 aa, Homo sapiens; identical to SEQ ID NO: 768951

SEQ ID NO: 768965 - protein, 123 aa, Homo sapiens
RNMGLPQQWDFLPHSVCAFPMSERLLGEPQPVRKPCGNSSTDWTLKRACTEKRRPQHASSFEWRGHSLCWDREQRDAETLKMLLDSGLRLGQWQEIPFTQDLQDKRSAWQLHVFFFKLVARLA

SEQ ID NO: 768966 - protein, 452 aa, Homo sapiens
MPPGRWHAAYPAQAQSSRERGRLQTVKKEEEDESYTPVQAARPQTLNRPGQELFRQLFRQLRYHESSGPLETLSRLRELCRWWLRPDVLSKAQILELLVLEQFLSILPGELRVWVQLHNPESGEEAVALLEELQRDLDGTSWRDPGPAQSPDVHWMGTGALRSAQIWSLASPLRSSSALGDHLEPPYEIEARDFLAGQSDTPAAQMPALFPREGCPGDQVTPTRSLTAQLQETMTFKDVEVTFSQDEWGWLDSAQRNLYRDVMLENYRNMASLVGPFTKPALISWLEAREPWGLNMQAAQPKGNPVAAPTGDDLQSKTNKFILNQEPLEEAETLAVSSGCPATSVSEGIDRSILRESFQQNQSRDKMRDLREGQMEPPKSELIGWGGGETSRWVRGGASPPPALSPLFRITWSGHKDLKDLKVRGLRGLEAPRVNVWETEANQAASTPGPPA

SEQ ID NO: 768967 - protein, 218 aa, Homo sapiens
VEGRGRNKCGGPQSPAPRPSGTLKRRGRVSRARLCQLSDSHGTATNSVWLPRGAGGMSKGLPARQDMEKERETLQAWKERVGQELDRVVAFWMEHSHDQEHGGFFTCLGREGRVYDDLKYVWLQGRQVWMYCRLYRTFERFRHAQLLDAAKAGGEFLLRYARVAPPGKKCAFVLTRDGRPVKVQRTIFSECFYTMAMNELWRATGEVRYQTEAVCEMM

SEQ ID NO: 768968 - protein, 452 aa, Homo sapiens
VEGRGRNKCGGPQSPAPRPSGTLKRRGRVSRARLCQLSDSHGTATNSVWLPRGAGGMSKGLPARQDMEKERETLQAWKERVGQELDRVVAFWMEHSHDQEHGGFFTCLGREGRVYDDLKYVWLQGRQVWMYCRLYRTFERFRHAQLLDAAKAGGEFLLRYARVAPPGKKCAFVLTRDGRPVKVQRTIFSECFYTMAMNELWRATGEVRYQTEAVEMMDQIVHWVQEDASGLGRPQLQGAPAAEPMAVPMMLLNLVEQLGEADEELAGKYAELGDWCARRILQHVQRDGQAVLENVSEGGKELPGCLGRQQNPGHTLEAGWFLLRHCIRKGDPELRAHVIDKFLLLPFHSGWDPDHGGLFYFQDADNFCPTQLEWAMKLWWPHSEAMIAFLMGYSDSGDPVLLRLFYQVAEYTFRQFRDPEYGEWFGYLSREGKVALSIKGGPFKGCFHVPRA

SEQ ID NO: 768969 - protein, 517 aa, Homo sapiens
WRVAAGTSAGAGPQSPAPRPSGTLKRRGRVSRARLCQLSDSHGTATNSVWLPRGAGGMSKGLPARQDMEKERETLQAWKERVGQELDRVVAFWMEHSHDQEHGGFFTCLGREGRVYDDLKYVWLQGRQVWMYCRLYRTFERFRHAQLLDAAKAGGEFLLRYARVAPPGKKCAFVLTRDGRPVKVQRTIFSECFYTMAMNELWRATGEVRYQTEAVEMMDQIVHWVQEDASGLGRPQLQGAPAAEPMAVPMMLLNLVEQLGEADEELAGKYAELGDWCARRILQHVQRDGQAVLENVSEGGKELPGCLGRQQNPGHTLEAGWFLLRHCIRKGDPELRAHVIDKFLLLPFHSGWDPDHGGLFYFQDADNFCPTQLEWAMKLWWPHSEAMIAFLMGYSDSGDPVLLRLFYQVAEYTFRQAGAQWRDLSSLQPPPPVFKLFSRLSLPSILLGLQFRDPEYGEWFGYLSREGKVALSIKGGPFKGCFHVPRCLAMCEEMLGALLSRPAPAPSPAPTPACRGA

SEQ ID NO: 768970 - protein, 483 aa, Homo sapiens
WRVAAGTSAGAGPQSPAPRPSGTLKRRGRVSRARLCQLSDSHGTATNSVWLPRGAGGMSKGLPARQDMEKERETLQAWKERVGQELDRVVAFWMEHSHDQEHGGFFTCLGREGRVYDDLKYVWLQGRQVWMYCRLYRTFERFRHAQLLDAAKAGGEFLLRYARVAPPGKKCAFVLTRDGRPVKVQRTIFSECFYTMAMNELWRATGEVRYQTEAVEMMDQIVHWVQEDASGLGRPQLQGAPAAEPMAVPMMLLNLVEQLGEADEELAGKYAELGDWCARRILQHVQRDGQAVLENVSEGGKELPGCLGRQQNPGHTLEAGWFLLRHCIRKGDPELRAHVIDKFLLLPFHSGWDPDHGGLFYFQDADNFCPTQLEWAMKLWWPHSEAMIAFLMGYSDSGDPVLLRLFYQVAEYTFRQFRDPEYGEWFGYLSREGKVALSIKGGPFKGCFHVPRCLAMCEEMLGALLSRPAPAPSPAPTPACRGA

SEQ ID NO: 768971 - protein, 148 aa, Homo sapiens
QICWPQRGRRGWQGPFQTLLTLPSHRGFFTCLGREGRVYDDLKYVWLQGRQVWMYCRLYRTFERFRHAQLLDAAKAGGEFLLRYARVAPPGKKCAFVLTRDGRPVKVQRTIFSECFYTMAMNELWRATGEVRYQMEQPWSKWRDPLDS

SEQ ID NO: 768972 - protein, 150 aa, Homo sapiens
PPWHELLGHVPPGPQAAPAEAPNTTTVSGWSLAVLPLSPLPQVAGRTKRAQSLRRGQTSQSFDHGGHKGSHLQVESSQGCHLAHRTHIGHLHCSCLGVDNPCGQAPGPHLNHPQIQVWWSHNNLHHYWGRILAGHSEESKVPQGLGQDKT

SEQ ID NO: 768973 - protein, 1447 aa, Homo sapiens
MFRAGEASKRPLPGPSPPRVRSVEVARGRAGYGFTLSGQAPCVLSCVMRGSPADFVGLRAGDQILAVNEINVKKASHEDVVKLIGKCSGVLHMVIAEGVGRFESCSSDEEGGLYEGKGWLKPKLDSKALGINRAERVVEEMQSGGIFNMIFENPSLCASNSEPLKLKQRSLSESAATRFDVGHESINNPNPNMLSKEEISKVIHDDSVFSIGLESHDDFALDASILNVAMIVGYLGSIELPSTSSNLESDSLQAIRGCMRRLRAEQKIHSLVTMKIMHDCVQLSTDKAGVVAEYPAEKLAFSAVCPDDRRFFGLVTMQTNDDGSLAQEEEGALRTSCHVFMVDPDLFNHKIHQGIARRFGFECTADPDTNGCLEFPASSLPVLQFISVLYRDMGELIEGMRARAFLDGDADAHQNNSTSSNSDSGIGNFHQEEKSNRVLVVDLGGSSSRHGPGGSAWDGVGGRGAQPWGAPWTGPFCPDPEGSPPFEAAHQTDRFWDLNKHLGPASPVEVPPASLRSSVPPSKRGTVGAGCGFNQRWLPVHVLREWQCGHTSDQDSYTDSTDGWSSINCGTLPPPMSKIPADRYRVEGSFAQPPLNAPKREWSRKAFGMQSIFGPHRNVRKTKEDKKGSKFGRGTGLTQPSQRTSARRSFGRSKRFSITRSLDDLESATVSDGELTGADLKDCVSNNSLSSNASLPSVQSCRRLRERRVASWAVSFERLLQDPVGVRYFSDFLRKEFSEENILFWQACEYFNHVPAHDKKELSYRAREIFSKFLCSKATTPVNIDSQAQLADDVLRAPHPDMFKEQQLQIFNLMKFDSYTRFLKSPLYQECILAEVEGRALPDSQQVPSSPASKHSLGSDHSSVSTPKKLSGKSKSGRSLNEELGDEDSEKKRKGAFFSWSRTRSTGRSQKKREHGDHADDALHANGGLCRRESQGSVSSAGSLDLSEACRTLAPEKDKATKHCCIHLPDGTSCVVAVKAGFSIKDILSGLCERHGINGAAADLFLVGGDKPLVLHQDSSILESRDLRLEKRTLFRLDLVPINRSVGLKAKPTKPVTEVLRPVVARYGLDLSGLLVRLSGEKEPLDLGAPISSLDGQRVVLEEKDPSRGKASADKQKGVPVKQNTAVNSSSRNHSATGEERTLGKSNSIKIKGENGKNARDPRLSKREESIAKIGKKKYQKINLDEAEEFFELISKAQSNRADDQRGLLRKEDLVLPEFLRLPPGSTELTLPTPAAVAKGFSKRSATGNGRESASQPGEQWEPVQESSDSPSTSPGSASSPPGPPGTTPPGQKSPSGPFCTPQSPVSLAQEGTAQIWKRQSQEVEAGGIQTVEDEHVAELTLMGEGDISSPNSTLLPPPSTPQEVPGPSRPGSGTHGSRDLPVNRIIDVDLVTGSAPGRDGGIAGAQAGPGRSQASGGPPTSDLPGLGPVPGEPAKPKTSAHHATFV

SEQ ID NO: 768974 - protein, 799 aa, Homo sapiens
MNLGKELSNETHVSNDQQSATVSDGELTGADLKDCVSNNSLSSNASLPSVQSCRRLRERRVASWAVSFERLLQDPVGVRYFSDFLRKEFSEENILFWQACEYFNHVPAHDKKELSYRAREIFSKFLCSKATTPVNIDSQAQLADDVLRAPHPDMFKEQQLQIFNLMKFDSYTRFLKSPLYQECILAEVEGRALPDSQQVPSSPASKHSLGSDHSSVSTPKKLSGKSKSGRSLNEELGDEDSEKKRKGAFFSWSRTRSTGRSQKKREHGDHADDALHANGGLCRRESQGSVSSAGSLDLSEACRTLAPEKDKATKHCCIHLPDGTSCVVAVKAGFSIKDILSGLCERHGINGAAADLFLVGGDKPLVLHQDSSILESRDLRLEKRTLFRLDLVPINRSVGLKAKPTKPVTEVLRPVVARYGLDLSGLLVRLSGEKEPLDLGAPISSLDGQRVVLEEKDPSRGKASADKQKGVPVKQNTAVNSSSRNHSATGEERTLGKSNSIKIKGENGKNARDPRLSKREESIAKIGKKKYQKINLDEAEEFFELISKAQSNRADDQRGLLRKEDLVLPEFLRLPPGSTELTLPTPAAVAKGFSKRSATGNGRESASQPGEQWEPVQESSDSPSTSPGSASSPPGPPGTTPPGQKSPSGPFCTPQSPVSLAQEGTAQIWKRQSQEVEAGGIQTVEDEHVAELTLMGEGDISSPNSTLLPPPSTPQEVPGPSRPGSGTHGSRDLPVNRIIDVDLVTGSAPGRDGGIAGAQAGPGRSQASGGPPTSDLPGLGPVPGEPAKPKTSAHHATFV

SEQ ID NO: 768975 - protein, 817 aa, Homo sapiens
SGLPLGPPWLPVLFGFLLAQLTVSSSRPPPGHAGLPSATVSDGELTGADLKDCVSNNSLSSNASLPSVQSCRRLRERRVASWAVSFERLLQDPVGVRYFSDFLRKEFSEENILFWQACEYFNHVPAHDKKELSYRAREIFSKFLCSKATTPVNIDSQAQLADDVLRAPHPDMFKEQQLQIFNLMKFDSYTRFLKSPLYQECILAEVEGRALPDSQQVPSSPASKHSLGSDHSSVSTPKKLSGKSKSGRSLNEELGDEDSEKKRKGAFFSWSRTRSTGRSQKKREHGDHADDALHANGGLCRRESQGSVSSAGSLDLSEACRTLAPEKDKATKHCCIHLPDGTSCVVAVKAGFSIKDILSGLCERHGINGAAADLFLVGGDKPLVLHQDSSILESRDLRLEKRTLFRLDLVPINRSVGLKAKPTKPVTEVLRPVVARYGLDLSGLLVRLSGEKEPLDLGAPISSLDGQRVVLEEKDPSRGKASADKQKGVPVKQNTAVNSSSRNHSATGEERTLGKSNSIKIKGENGKNARDPRLSKREESIAKIGKKKYQKINLDEAEEFFELISKAQSNRADDQRGLLRKEDLVLPEFLRLPPGSTELTLPTPAAVAKGFSKRSATGNGRESASQPGEQWEPVQESSDSPSTSPGSASSPPGPPGTTPPGQKSPSGPFCTPQSPVSLAQEGTAQIWKRQSQEVEAGGIQTVEDEHVAELTLMGEGDISSPNSTLLPPPSTPQEVPGPSRPGSGTHGSRDLPVNRIIDVDLVTGSAPGRDGGIAGAQAGPGRSQASGGPPTSDLPGLGPVPGEPAKPKTSAHHATFV

SEQ ID NO: 768976 - protein, 1376 aa, Homo sapiens
MFRAGEASKRPLPGPSPPRVRSVEVARGRAGYGFTLSGQAPCVLSCVMRGSPADFVGLRAGDQILAVNEINVKKASHEDVVKLIGKCSGVLHMVIAEGVGRFESCSSDEEGGLYEGKGWLKPKLDSKALGINRAERVVEEMQSGGIFNMIFENPSLCASNSEPLKLKQRSLSESAATRFDVGHESINNPNPNMLSKEEISKVIHDDSVFSIGLESHDDFALDASILNVAMIVGYLGSIELPSTSSNLESDSLQAIRGCMRRLRAEQKIHSLVTMKIMHDCVQLSTDKAGVVAEYPAEKLAFSAVCPDDRRFFGLVTMQTNDDGSLAQEEEGALRTSCHVFMVDPDLFNHKIHQGIARRFGFECTADPDTNGCLEFPASSLPVLQFISVLYRDMGELIEGMRARAFLDGDADAHQNNSTSSNSDSGIGNFHQEEKSNRVLVVDLGGSSSRHGPGGSAWDGVGGRGAQPWGAPWTGPFCPDPEGSPPFEAAHQTDRFWDLNKHLGPASPVEVPPASLRSSVPPSKRGTVGAGCGFNQRWLPVHVLREWQCGHTSDQDSYTDSTDGWSSINCGTLPPPMSKIPADRYRVEGSFAQPPLNAPKREWSRKAFGMQSIFGPHRNVRKTKEDKKGSKFGRGTGLTQPSQRTSARRSFGRSKRFSITRSLDDLESATVSDGELTGADLKDCVSNNSLSSNASLPSVQSCRRLRERRVASWAVSFERLLQDPVGVRYFSDFLRKEFSEENILFWQACEYFNHVPAHDKKELSYRAREIFSKFLCSKATTPVNIDSQAQLADDVLRAPHPDMFKEQQLQIFNLMKFDSYTRFLKSPLYQECILAEVEGRALPDSQQVPSSPASKHSLGSDHSSVSTPKKLSGKSKSGRSLNEELGDEDSEKKRKGAFFSWSRTRSTGRSQKKREHGDHADDALHANGGLCRRESQGSVSSAGSLDLSEACRTLAPEKDKATKHCCIHLPDGTSCVVAVKAGFSIKDILSGLCERHGINGAAADLFLVGGDKPLVLHQDSSILESRDLRLEKRTLFRLDLVPINRSVGLKAKPTKPVTEVLRPVVARYGLDLSGLLVRLSGEKEPLDLGAPISSLDGQRVVLEEKDPSRGKASADKQKGVPVKQNTAVNSSSRNHSATGEERTLGKSNSIKIKGENGKNARDPRLSKREESIAKIGKKKYQKINLDEAEEFFELISKAQSNRADDQRGLLRKEDLVLPEFLRLPPGSTELTLPTPAAVAKGFSKRSATGNGRESASQPGEQWEPVQESSDSPSTSPGSASSPPGPPGTTPPGQKSPSGPFCTPQSPVSLAQEGTAQIWKRQSQEVEAGGIQTVEDEHVAELTLMGEGDISSPNSTLLPPPSTPQEVPGPSRPGTSRF

SEQ ID NO: 768977 - protein, 755 aa, Homo sapiens
DLSVLVPGAFKPATLLSSSPFHCSKPLPRRRLPNPPAGGRSCTAWSATVSDGELTGADLKDCVSNNSLSSNASLPSVQSCRRLRERRVASWAVSFERLLQDPVGVRYFSDFLRKEFSEENILFWQACEYFNHVPAHDKKELSYRAREIFSKFLCSKATTPVNIDSQAQLADDVLRAPHPDMFKEQQLQIFNLMKFDSYTRFLKSPLYQECILAEVEGRALPDSQQVPSSPASKHSLGSDHSSVSTPKKLSGKSKSGRSLNEELGDEDSEKKRKGAFFSWSRTRSTGRSQKKREHGDHADDALHANGGLCRRESQGSVSSAGSLDLSEACRTLAPEKDKATKHCCIHLPDGTSCVVAVKAGFSIKDILSGLCERHGINGAAADLFLVGGDKPLVLHQDSSILESRDLRLEKRTLFRLDLVPINRSVGLKAKPTKPVTEVLRPVVARYGLDLSGLLVRLSGEKEPLDLGAPISSLDGQRVVLEEKDPSRGKASADKQKGVPVKQNTAVNSSSRNHSATGEERTLGKSNSIKIKGENGKNARDPRLSKREESIAKIGKKKYQKINLDEAEEFFELISKAQSNRADDQRGLLRKEDLVLPEFLRLPPGSTELTLPTPAAVAKGFSKRSATGNGRESASQPGEQWEPVQESSDSPSTSPGSASSPPGPPGTTPPGQKSPSGPFCTPQSPVSLAQEGTAQIWKRQSQEVEAGGIQTVEDEHVAELTLMGEGDISSPNSTLLPPPSTPQEVPGPSRPGTSRF

SEQ ID NO: 768978 - protein, 720 aa, Homo sapiens
LLGSLLFWGLCSFGVFAQLTGADLKDCVSNNSLSSNASLPSVQSCRRLRERRVASWAVSFERLLQDPVGVRYFSDFLRKEFSEENILFWQACEYFNHVPAHDKKELSYRAREIFSKFLCSKATTPVNIDSQAQLADDVLRAPHPDMFKEQQLQIFNLMKFDSYTRFLKSPLYQECILAEVEGRALPDSQQVPSSPASKHSLGSDHSSVSTPKKLSGKSKSGRSLNEELGDEDSEKKRKGAFFSWSRTRSTGRSQKKREHGDHADDALHANGGLCRRESQGSVSSAGSLDLSEACRTLAPEKDKATKHCCIHLPDGTSCVVAVKAGFSIKDILSGLCERHGINGAAADLFLVGGDKPLVLHQDSSILESRDLRLEKRTLFRLDLVPINRSVGLKAKPTKPVTEVLRPVVARYGLDLSGLLVRLSGEKEPLDLGAPISSLDGQRVVLEEKDPSRGKASADKQKGVPVKQNTAVNSSSRNHSATGEERTLGKSNSIKIKGENGKNARDPRLSKREESIAKIGKKKYQKINLDEAEEFFELISKAQSNRADDQRGLLRKEDLVLPEFLRLPPGSTELTLPTPAAVAKGFSKRSATGNGRESASQPGEQWEPVQESSDSPSTSPGSASSPPGPPGTTPPGQKSPSGPFCTPQSPVSLAQEGTAQIWKRQSQEVEAGGIQTVEDEHVAELTLMGEGDISSPNSTLLPPPSTPQEVPGPSRPGTSRF

SEQ ID NO: 768979 - protein, 1157 aa, Homo sapiens
MFRAGEASKRPLPGPSPPRVRSVEVARGRAGYGFTLSGQAPCVLSCVMRGSPADFVGLRAGDQILAVNEINVKKASHEDVVKLIGKCSGVLHMVIAEGVGRFESCSSDEEGGLYEGKGWLKPKLDSKALGINRAERVVEEMQSGGIFNMIFENPSLCASNSEPLKLKQRSLSESAATRFDVGHESINNPNPNMLSKEEISKVIHDDSVFSIGLESHDDFALDASILNVAMIVGYLGSIELPSTSSNLESDSLQAIRGCMRRLRAEQKIHSLVTMKIMHDCVQLSTDKAGVVAEYPAEKLAFSAVCPDDRRFFGLVTMQTNDDGSLAQEEEGALRTSCHVFMVDPDLFNHKIHQGIARRFGFECTADPDTNGCLEFPASSLPVLQFISVLYRDMGELIEGMRARAFLDGDADAHQNNSTSSNSDSGIGNFHQEEKSNRVLVVDLGGSSSRHGPGGSAWDGVGGRGAQPWGAPWTGPFCPDPEGSPPFEAAHQTDRFWDLNKHLGPASPVEVPPASLRSSVPPSKRGTVGAGCGFNQRWLPVHVLREWQCGHTSDQDSYTDSTDGWSSINCGTLPPPMSKIPADRYRVEGSFAQPPLNAPKREWSRKAFGMQSIFGPHRNVRKTKEDKKGSKFGRGTGLTQPSQRTSARRSFGRSKRFSITRSLDDLESATVSDGELTGADLKDCVSNNSLSSNASLPSVQSCRRLRERRVASWAVSFERLLQDPVGVRYFSDFLRKEFSEENILFWQACEYFNHVPAHDKKELSYRAREIFSKFLCSKATTPVNIDSQAQLADDVLRAPHPDMFKEQQLQIFNLMKFDSYTRFLKSPLYQECILAEVEGRALPDSQQVPSSPASKHSLGSDHSSVSTPKKLSGKSKSGRSLNEELGDEDSEKKRKGAFFSWSRTRSTGRSQKKREHGDHADDALHANGGLCRRESQGSVSSAGSLDLSEACRTLAPEKDKATKHCCIHLPDGTSCVVAVKAGFSIKDILSGLCERHGINGAAADLFLVGGDKPLVLHQDSSILESRDLRLEKRTLFRLDLVPINRSVGLKAKPTKPVTEVLRPVVARYGLDLSGLLVRLSGEKEPLDLGAPISSLDGQRVVLEEKDPSRGKASADKQKGVPVKQNTAVNSSSRNHSATSFLSLFPKLRATEQMTNVGC

SEQ ID NO: 768980 - protein, 586 aa, Homo sapiens
RSRCSSSRRGHCSKEQRLQIFNLMKFDSYTRFLKSPLYQECILAEVEGRALPDSQQVPSSPASKHSLGSDHSSVSTPKKLSGKSKSGRSLNEELGDEDSEKKRKGAFFSWSRTRSTGRSQKKREHGDHADDALHANGGLCRRESQGSVSSAGSLDLSEACRTLAPEKDKATKHCCIHLPDGTSCVVAVKAGFSIKDILSGLCERHGINGAAADLFLVGGDKPLVLHQDSSILESRDLRLEKRTLFRLDLVPINRSVGLKAKPTKPVTEVLRPVVARYGLDLSGLLVRLSGEKEPLDLGAPISSLDGQRVVLEEKDPSRGKASADKQKGVPVKQNTAVNSSSRNHSATGEERTLGKSNSIKIKGENGKNARDPRLSKREESIAKIGKKKYQKINLDEAEEFFELISKAQSNRADDQRGLLRKEDLVLPEFLRLPPGSTELTLPTPAAVAKGFSKRSATGNGRESASQPGEQWEPVQESSDSPSTSPGSASSPPGPPGTTPPGQKSPSGPFCTPQSPVSLAQEGTAQIWKRQSQEVEAGGIQTVEDEHVAELTLMGEGDISSPNSTLLPPPSTPQEVPGPSRPGTSRF

SEQ ID NO: 768981 - protein, 1157 aa, Homo sapiens
MFRAGEASKRPLPGPSPPRVRSVEVARGRAGYGFTLSGQAPCVLSCVMRGSPADFVGLRAGDQILAVNEINVKKASHEDVVKLIGKCSGVLHMVIAEGVGRFESCSSDEEGGLYEGKGWLKPKLDSKALGINRAERVVEEMQSGGIFNMIFENPSLCASNSEPLKLKQRSLSESAATRFDVGHESINNPNPNMLSKEEISKVIHDDSVFSIGLESHDDFALDASILNVAMIVGYLGSIELPSTSSNLESDSLQAIRGCMRRLRAEQKIHSLVTMKIMHDCVQLSTDKAGVVAEYPAEKLAFSAVCPDDRRFFGLVTMQTNDDGSLAQEEEGALRTSCHVFMVDPDLFNHKIHQGIARRFGFECTADPDTNGCLEFPASSLPVLQFISVLYRDMGELIEGMRARAFLDGDADAHQNNSTSSNSDSGIGNFHQEEKSNRVLVVDLGGSSSRHGPGGSAWDGVGGRGAQPWGAPWTGPFCPDPEGSPPFEAAHQTDRFWDLNKHLGPASPVEVPPASLRSSVPPSKRGTVGAGCGFNQRWLPVHVLREWQCGHTSDQDSYTDSTDGWSSINCGTLPPPMSKIPADRYRVEGSFAQPPLNAPKREWSRKAFGMQSIFGPHRNVRKTKEDKKGSKFGRGTGLTQPSQRTSARRSFGRSKRFSITRSLDDLESATVSDGELTGADLKDCVSNNSLSSNASLPSVQSCRRLRERRVASWAVSFERLLQDPVGVRYFSDFLRKEFSEENILFWQACEYFNHVPAHDKKELSYRAREIFSKFLCSKATTPVNIDSQAQLADDVLRAPHPDMFKEQQLQIFNLMKFDSYTRFLKSPLYQECILAEVEGRALPDSQQVPSSPASKHSLGSDHSSVSTPKKLSGKSKSGRSLNEELGDEDSEKKRKGAFFSWSRTRSTGRSQKKREHGDHADDALHANGGLCRRESQGSVSSAGSLDLSEACRTLAPEKDKATKHCCIHLPDGTSCVVAVKAGFSIKDILSGLCERHGINGAAADLFLVGGDKPLVLHQDSSILESRDLRLEKRTLFRLDLVPINRSVGLKAKPTKPVTEVLRPVVARYGLDLSGLLVRLSGEKEPLDLGAPISSLDGQRVVLEEKDPSRGKASADKQKGVPVKQNTAVNSSSRNHSATEVGPMAAETSQSTESSMWIL

SEQ ID NO: 768982 - protein, 1125 aa, Homo sapiens
MFRAGEASKRPLPGPSPPRVRSVEVARGRAGYGFTLSGQAPCVLSCVMRGSPADFVGLRAGDQILAVNEINVKKASHEDVVKLIGKCSGVLHMVIAEGVGRFESCSSDEEGGLYEGKGWLKPKLDSKALGINRAERVVEEMQSGGIFNMIFENPSLCASNSEPLKLKQRSLSESAATRFDVGHESINNPNPNMLSKEEISKVIHDDSVFSIGLESHDDFALDASILNVAMIVGYLGSIELPSTSSNLESDSLQAIRGCMRRLRAEQKIHSLVTMKIMHDCVQLSTDKAGVVAEYPAEKLAFSAVCPDDRRFFGLVTMQTNDDGSLAQEEEGALRTSCHVFMVDPDLFNHKIHQGIARRFGFECTADPDTNGCLEFPASSLPVLQFISVLYRDMGELIEGMRARAFLDGDADAHQNNSTSSNSDSGIGNFHQEEKSNRVLVVDLGGSSSRHGPGGSAWDGVGGRGAQPWGAPWTGPFCPDPEGSPPFEAAHQTDRFWDLNKHLGPASPVEVPPASLRSSVPPSKRGTVGAGCGFNQRWLPVHVLREWQCGHTSDQDSYTDSTDGWSSINCGTLPPPMSKIPADRYRVEGSFAQPPLNAPKREWSRKAFGMQSIFGPHRNVRKTKEDKKGSKFGRGTGLTQPSQRTSARRSFGRSKRFSITRSLDDLESATVSDGELTGADLKDCVSNNSLSSNASLPSVQSCRRLRERRVASWAVSFERLLQDPVGVRYFSDFLRKEFSEENILFWQACEYFNHVPAHDKKELSYRAREIFSKFLCSKATTPVNIDSQAQLADDVLRAPHPDMFKEQQLQIFNLMKFDSYTRFLKSPLYQECILAEVEGRALPDSQQVPSSPASKHSLGSDHSSVSTPKKLSGKSKSGRSLNEELGDEDSEKKRKGAFFSWSRTRSTGRSQKKREHGDHADDALHANGGLCRRESQGSVSSAGSLDLSEACRTLAPEKDKATKHCCIHLPDGTSCVVAVKAGFSIKDILSGLCERHGINGAAADLFLVGGDKPLVLHQDSSILESRDLRLEKRTLFRLDLVPINRSVGLKAKPTKPVTEVLRPVVARYGLDLSGLLVRLSGEKEPLDLGAPISSLDGQRVVLEEKDPSRGKVLPWGSWVRPAAFGD

SEQ ID NO: 768983 - protein, 512 aa, Homo sapiens
MALEAQSSENDDRSLVLIHKTQHLRQCGLSLRCVHLGSCRWDRGRAPASPARAAWASWAALGGAPHPCDAGSLTAACLAAPQSEACRTLAPEKDKATKHCCIHLPDGTSCVVAVKAGFSIKDILSGLCERHGINGAAADLFLVGGDKPLVLHQDSSILESRDLRLEKRTLFRLDLVPINRSVGLKAKPTKPVTEVLRPVVARYGLDLSGLLVRLSGEKEPLDLGAPISSLDGQRVVLEEKDPSRGKASADKQKGVPVKQNTAVNSSSRNHSATGEERTLGKSNSIKIKGENGKNARDPRLSKREESIAKIGKKKYQKINLDEAEEFFELISKAQSNRADDQRGLLRKEDLVLPEFLRLPPGSTELTLPTPAAVAKGFSKRSATGNGRESASQPGEQWEPVQESSDSPSTSPGSASSPPGPPGTTPPGQKSPSGPFCTPQSPVSLAQEGTAQIWKRQSQEVEAGGIQTVEDEHVAELTLMGEGDISSPNSTLLPPPSTPQEVPGPSRPGTSRF

SEQ ID NO: 768984 - protein, 197 aa, Homo sapiens
MVTLGFLPIEFFELISKAQSNRADDQRGLLRKEDLVLPEFLRLPPGSTELTLPTPAAVAKGFSKRSATGNGRESASQPGEQWEPVQESSDSPSTSPGSASSPPGPPGTTPPGQKSPSGPFCTPQSPVSLAQEGTAQIWKRQSQEVEAGGIQTVEDEHVAELTLMGEGDISSPNSTLLPPPSTPQEVPGPSRPGTSRF

SEQ ID NO: 768985 - protein, 115 aa, Homo sapiens
TRLGTRLVVQHLAAAALHPPGSARTFQTRYLQVLIPPPWPRKRGLLSFQSERTVGPRLPLFAGGLRDPLLTCWLGASLALLERRGSCGPRPVSVRMVPPRRSGQASWCPERLLQE

SEQ ID NO: 768986 - protein, 847 aa, Homo sapiens
MFRAGEASKRPLPGPSPPRVRSVEVARGRAGYGFTLSGQAPCVLSCVMRGSPADFVGLRAGDQILAVNEINVKKASHEDVVKLIGKCSGVLHMVIAEGVGRFESCSSDEEGGLYEGKGWLKPKLDSKALGINRAERVVEEMQSGGIFNMIFENPSLCASNSEPLKLKQRSLSESAATRFDVGHESINNPNPNMLSKEEISKVIHDDSVFSIGLESHDDFALDASILNVAMIVGYLGSIELPSTSSNLESDSLQAIRGCMRRLRAEQKIHSLVTMKIMHDCVQLSTDKAGVVAEYPAEKLAFSAVCPDDRRFFGLVTMQTNDDGSLAQEEEGALRTSCHVFMVDPDLFNHKIHQGIARRFGFECTADPDTNGCLEFPASSLPVLQFISVLYRDMGELIEGMRARAFLDGDADAHQNNSTSSNSDSGIGNFHQEEKSNRVLVVDLGGSSSRHGPGGSAWDGVGGRGAQPWGAPWTGPFCPDPEGSPPFEAAHQTDRFWDLNKHLGPASPVEVPPASLRSSVPPSKRGTVGAGCGFNQRWLPVHVLREWQCGHTSDQDSYTDSTDGWSSINCGTLPPPMSKIPADRYRVEGSFAQPPLNAPKREWSRKAFGMQSIFGPHRNVRKTKEDKKGSKFGRGTGLTQPSQRTSARRSFGRSKRFSITRSLDDLESATVSDGELTGADLKDCVSNNSLSSNASLPSVQSCRRLRERRVASWAVSFERLLQDPVGVRYFSDFLRKEFSEENILFWQACEYFNHVPAHDKKELSYRAREIFSKFLCSKATTPVNIDSQAQLADDVLRAPHPDMFKEQQLQIFNLMKFDSYTRFLNPPPSVLVDTCVALTCVLSLFFQE

SEQ ID NO: 768987 - protein, 646 aa, Homo sapiens
MFKEQQLQIFNLMKFDSYTRFLKSPLYQECILAEVEGRALPDSQQVPSSPASKHSLGSDHSSVSTPKKLSGKSKSGRSLNEELGDEDSEKKRKGAFFSWSRTRSTGRSQKKREHGDHADDALHANGGLCRRESQGSVSSAGSLDLSEACRTLAPEKDKATKHCCIHLPDGTSCVVAVKAGFSIKDILSGLCERHGINGAAADLFLVGGDKPLVLHQDSSILESRDLRLEKRTLFRLDLVPINRSVGLKAKPTKPVTEVLRPVVARYGLDLSGLLVRLSGEKEPLDLGAPISSLDGQRVVLEEKDPSRGKASADKQKGVPVKQNTAVNSSSRNHSATGEERTLGKSNSIKIKGENGKNARDPRLSKREESIAKIGKKKYQKINLDEAEEFFELISKAQSNRADDQRGLLRKEDLVLPEFLRLPPGSTELTLPTPAAVAKGFSKRSATGNGRESASQPGEQWEPVQESSDSPSTSPGSASSPPGPPGTTPPGQKSPSGPFCTPQSPVSLAQEGTAQIWKRQSQEVEAGGIQTVEDEHVAELTLMGEGDISSPNSTLLPPPSTPQEVPGPSRPGSGTHGSRDLPVNRIIDVDLVTGSAPGRDGGIAGAQAGPGRSQASGGPPTSDLPGLGPVPGEPAKPKTSAHHATFV

SEQ ID NO: 768988 - protein, 1376 aa, Homo sapiens; identical to SEQ ID NO: 768976

SEQ ID NO: 768989 - protein, 1330 aa, Homo sapiens
MFRAGEASKRPLPGPSPPRVRSVEVARGRAGYGFTLSGQAPCVLSCVMRGSPADFVGLRAGDQILAVNEINVKKASHEDVVKLIGKCSGVLHMVIAEGVGRFESCSSDEEGGLYEGKGWLKPKLDSKALGINRAERVVEEMQSGGIFNMIFENPSLCASNSEPLKLKQRSLSESAATRFDVGHESINNPNPNMLSKEEISKVIHDDSVFSIGLESHDDFALDASILNVAMIVGYLGSIELPSTSSNLESDSLQAIRGCMRRLRAEQKIHSLVTMKIMHDCVQLSTDKAGVVAEYPAEKLAFSAVCPDDRRFFGLVTMQTNDDGSLAQEEEGALRTSCHVFMVDPDLFNHKIHQGIARRFGFECTADPDTNGCLEFPASSLPVLQFISVLYRDMGELIEGMRARAFLDGDADAHQNNSTSSNSDSGIGNFHQEEKSNRVLVVDLGGSSSRHGPGGSAWDGVGGRGAQPWGAPWTGPFCPDPEGSPPFEAAHQTDRFWDLNKHLGPASPVEVPPASLRSSVPPSKRGTVGAGCGFNQRWLPVHVLREWQCGHTSDQDSYTDSTDGWSSINCGTLPPPMSKIPADRYRVEGSFAQPPLNAPKREWSRKAFGMQSIFGPHRNVRKTKEDKEELTGADLKDCVSNNSLSSNASLPSVQSCRRLRERRVASWAVSFERLLQDPVGVRYFSDFLRKEFSEENILFWQACEYFNHVPAHDKKELSYRAREIFSKFLCSKATTPVNIDSQAQLADDVLRAPHPDMFKEQQLQIFNLMKFDSYTRFLKSPLYQECILAEVEGRALPDSQQVPSSPASKHSLGSDHSSVSTPKKLSGKSKSGRSLNEELGDEDSEKKRKGAFFSWSRTRSTGRSQKKREHGDHADDALHANGGLCRRESQGSVSSAGSLDLSEACRTLAPEKDKATKHCCIHLPDGTSCVVAVKAGFSIKDILSGLCERHGINGAAADLFLVGGDKPLVLHQDSSILESRDLRLEKRTLFRLDLVPINRSVGLKAKPTKPVTEVLRPVVARYGLDLSGLLVRLSGEKEPLDLGAPISSLDGQRVVLEEKDPSRGKASADKQKGVPVKQNTAVNSSSRNHSATGEERTLGKSNSIKIKGENGKNARDPRLSKREESIAKIGKKKYQKINLDEAEEFFELISKAQSNRADDQRGLLRKEDLVLPEFLRLPPGSTELTLPTPAAVAKGFSKRSATGNGRESASQPGEQWEPVQESSDSPSTSPGSASSPPGPPGTTPPGQKSPSGPFCTPQSPVSLAQEGTAQIWKRQSQEVEAGGIQTVEDEHVAELTLMGEGDISSPNSTLLPPPSTPQEVPGPSRPGTSRF

SEQ ID NO: 768990 - protein, 774 aa, Homo sapiens
MKKHDFAENLPSSLLIIILVIFTLSGSKFGRGTGLTQPSQRTSARRSFGRSKRFSITRSLDDLESATVSDGELTGADLKDCVSNNSLSSNASLPSVQSCRRLRERRVASWAVSFERLLQDPVGVRYFSDFLRKEFSEENILFWQACEYFNHVPAHDKKELSYRAREIFSKFLCSKATTPVNIDSQAQLADDVLRAPHPDMFKEQQLQIFNLMKFDSYTRFLKSPLYQECILAEVEGRALPDSQQVPSSPASKHSLGSDHSSVSTPKKLSGKSKSGRSLNEELGDEDSEKKRKGAFFSWSRTRSTGRSQKKREHGDHADDALHANGGLCRRESQGSVSSAGSLDLSEACRTLAPEKDKATKHCCIHLPDGTSCVVAVKAGFSIKDILSGLCERHGINGAAADLFLVGGDKPLVLHQDSSILESRDLRLEKRTLFRLDLVPINRSVGLKAKPTKPVTEVLRPVVARYGLDLSGLLVRLSGEKEPLDLGAPISSLDGQRVVLEEKDPSRGKASADKQKGVPVKQNTAVNSSSRNHSATGEERTLGKSNSIKIKGENGKNARDPRLSKREESIAKIGKKKYQKINLDEAEEFFELISKAQSNRADDQRGLLRKEDLVLPEFLRLPPGSTELTLPTPAAVAKGFSKRSATGNGRESASQPGEQWEPVQESSDSPSTSPGSASSPPGPPGTTPPGQKSPSGPFCTPQSPVSLAQEGTAQIWKRQSQEVEAGGIQTVEDEHVAELTLMGEGDISSPNSTLLPPPSTPQEVPGPSRPGTSRF

SEQ ID NO: 768991 - protein, 713 aa, Homo sapiens
VLCVHMLLCEELTGADLKDCVSNNSLSSNASLPSVQSCRRLRERRVASWAVSFERLLQDPVGVRYFSDFLRKEFSEENILFWQACEYFNHVPAHDKKELSYRAREIFSKFLCSKATTPVNIDSQAQLADDVLRAPHPDMFKEQQLQIFNLMKFDSYTRFLKSPLYQECILAEVEGRALPDSQQVPSSPASKHSLGSDHSSVSTPKKLSGKSKSGRSLNEELGDEDSEKKRKGAFFSWSRTRSTGRSQKKREHGDHADDALHANGGLCRRESQGSVSSAGSLDLSEACRTLAPEKDKATKHCCIHLPDGTSCVVAVKAGFSIKDILSGLCERHGINGAAADLFLVGGDKPLVLHQDSSILESRDLRLEKRTLFRLDLVPINRSVGLKAKPTKPVTEVLRPVVARYGLDLSGLLVRLSGEKEPLDLGAPISSLDGQRVVLEEKDPSRGKASADKQKGVPVKQNTAVNSSSRNHSATGEERTLGKSNSIKIKGENGKNARDPRLSKREESIAKIGKKKYQKINLDEAEEFFELISKAQSNRADDQRGLLRKEDLVLPEFLRLPPGSTELTLPTPAAVAKGFSKRSATGNGRESASQPGEQWEPVQESSDSPSTSPGSASSPPGPPGTTPPGQKSPSGPFCTPQSPVSLAQEGTAQIWKRQSQEVEAGGIQTVEDEHVAELTLMGEGDISSPNSTLLPPPSTPQEVPGPSRPGTSRF

SEQ ID NO: 768992 - protein, 718 aa, Homo sapiens [sequence omitted]

SEQ ID NO: 768993 - protein, 835 aa, Homo sapiens
RPHTARVRRDGGAPPHCSRQEGRGRPHTARIQWTRVMNGDFLGTSLLFIRELRRYWEPKATEGRFADTSGRIRCPGSALCHIPHRVSCKGAAEPTCVAEGLALDTVPESFVLRRSPHAEQCAVTGVWASHPEELTGADLKDCVSNNSLSSNASLPSVQSCRRLRERRVASWAVSFERLLQDPVGVRYFSDFLRKEFSEENILFWQACEYFNHVPAHDKKELSYRAREIFSKFLCSKATTPVNIDSQAQLADDVLRAPHPDMFKEQQLQIFNLMKFDSYTRFLKSPLYQECILAEVEGRALPDSQQVPSSPASKHSLGSDHSSVSTPKKLSGKSKSGRSLNEELGDEDSEKKRKGAFFSWSRTRSTGRSQKKREHGDHADDALHANGGLCRRESQGSVSSAGSLDLSEACRTLAPEKDKATKHCCIHLPDGTSCVVAVKAGFSIKDILSGLCERHGINGAAADLFLVGGDKPLVLHQDSSILESRDLRLEKRTLFRLDLVPINRSVGLKAKPTKPVTEVLRPVVARYGLDLSGLLVRLSGEKEPLDLGAPISSLDGQRVVLEEKDPSRGKASADKQKGVPVKQNTAVNSSSRNHSATGEERTLGKSNSIKIKGENGKNARDPRLSKREESIAKIGKKKYQKINLDEAEEFFELISKAQSNRADDQRGLLRKEDLVLPEFLRLPPGSTELTLPTPAAVAKGFSKRSATGNGRESASQPGEQWEPVQESSDSPSTSPGSASSPPGPPGTTPPGQKSPSGPFCTPQSPVSLAQEGTAQIWKRQSQEVEAGGIQTVEDEHVAELTLMGEGDISSPNSTLLPPPSTPQEVPGPSRPGTSRF

SEQ ID NO: 768994 - protein, 1190 aa, Homo sapiens
MFRAGEASKRPLPGPSPPRVRSVEVARGRAGYGFTLSGQAPCVLSCVMRGSPADFVGLRAGDQILAVNEINVKKASHEDVVKLIGKCSGVLHMVIAEGVGRFESCSSDEEGGLYEGKGWLKPKLDSKALGINRAERVVEEMQSGGIFNMIFENPSLCASNSEPLKLKQRSLSESAATRFDVGHESINNPNPNMLSKEEISKVIHDDSVFSIGLESHDDFALDASILNVAMIVGYLGSIELPSTSSNLESDSLQAIRGCMRRLRAEQKIHSLVTMKIMHDCVQLSTDKAGVVAEYPAEKLAFSAVCPDDRRFFGLVTMQTNDDGSLAQEEEGALRTSCHVFMVDPDLFNHKIHQGIARRFGFECTADPDTNGCLEFPASSLPVLQFISVLYRDMGELIEGMRARAFLDGDADAHQNNSTSSNSDSGIGNFHQEEKSNRVLVVDLGGSSSRHGPGGSAWDGVGGRGAQPWGAPWTGPFCPDPEGSPPFEAAHQTDRFWDLNKHLGPASPVEVPPASLRSSVPPSKRGTVGAGCGFNQRWLPVHVLREWQCGHTSDQDSYTDSTDGWSSINCGTLPPPMSKIPADRYRVEGSFAQPPLNAPKREWSRKAFGMQSIFGPHRNVRKTKEDKKGSKFGRGTGLTQPSQRTSARRSFGRSKRFSITRSLDDLESATVSDGELTGADLKDCVSNNSLSSNASLPSVQSCRRLRERRVASWAVSFERLLQDPVGVRYFSDFLRKEFSEENILFWQACEYFNHVPAHDKKELSYRAREIFSKFLCSKATTPVNIDSQAQLADDVLRAPHPDMFKEQQLQIFNLMKFDSYTRFLKSPLYQECILAEVEGRALPDSQQVPSSPASKHSLGSDHSSVSTPKKLSGKSKSGRSLNEELGDEDSEKKRKGAFFSWSRTRSTGRSQKKREHGDHADDALHANGGLCRRESQGSVSSAGSLDLSEACRTLAPEKDKATKHCCIHLPDGTSCVVAVKAGFSIKDILSGLCERHGINGAAADLFLVGGDKPLVLHQDSSILESRDLRLEKRTLFRLDLVPINRSVGLKAKPTKPVTEVLRPVVARYGLDLSGLLVRLSGEKEPLDLGAPISSLDGQRVVLEEKDPSRGKASADKQKGVPVKQNTAVNSSSRNHSATGEERTLGKSNSIKIKGENGKNARDPRLSKREESIAKIGKKKYQKINLDEAEGM

SEQ ID NO: 768995 - protein, 1382 aa, Homo sapiens
MFRAGEASKRPLPGPSPPRVRSVEVARGRAGYGFTLSGQAPCVLSCVMRGSPADFVGLRAGDQILAVNEINVKKASHEDVVKLIGKCSGVLHMVIAEGVGRFESCSSDEEGGLYEGKGWLKPKLDSKALGINRAERVVEEMQSGGIFNMIFENPSLCASNSEPLKLKQRSLSESAATRFDVGHESINNPNPNMLSKEEISKVIHDDSVFSIGLESHDDFALDASILNVAMIVGYLGSIELPSTSSNLESDSLQAIRGCMRRLRAEQKIHSLVTMKIMHDCVQLSTDKAGVVAEYPAEKLAFSAVCPDDRRFFGLVTMQTNDDGSLAQEEEGALRTSCHVFMVDPDLFNHKIHQGIARRFGFECTADPDTNGCLEFPASSLPVLQFISVLYRDMGELIEGMRARAFLDGDADAHQNNSTSSNSDSGIGNFHQEEKSNRVLVVDLGGSSSRHGPGGSAWDGVGGRGAQPWGAPWTGPFCPDPEGSPPFEAAHQTDRFWDLNKHLGPASPVEVPPASLRSSVPPSKRGTVGAGCGFNQRWLPVHVLREWQCGHTSDQDSYTDSTDGWSSINCGTLPPPMSKIPADRYRVEGSFAQPPLNAPKREWSRKAFGMQSIFGPHRNVRKTKEDKKGSKFGRGTGLTQPSQRTSARRSFGRSKRFSITRSLDDLESATVSDGELTGADLKDCVSNNSLSSNASLPSVQSCRRLRERRVASWAVSFERLLQDPVGVRYFSDFLRKEFSEENILFWQACEYFNHVPAHDKKELSYRAREIFSKFLCSKATTPVNIDSQAQLADDVLRAPHPDMFKEQQLQIFNLMKFDSYTRFLKSPLYQECILAEVEGRALPDSQQVPSSPASKHSLGSDHSSVSTPKKLSGKSKSGRSLNEELGDEDSEKKRKGAFFSWSRTRSTGRSQKKREHGDHADDALHANGGLCRRESQGSVSSAGSLDLSEACRTLAPEKDKATKHCCIHLPDGTSCVVAVKAGFSIKDILSGLCERHGINGAAADLFLVGGDKPLVLHQDSSILESRDLRLEKRTLFRLDLVPINRSVGLKAKPTKPVTEVLRPVVARYGLDLSGLLVRLLLISAQSGEKEPLDLGAPISSLDGQRVVLEEKDPSRGKASADKQKGVPVKQNTAVNSSSRNHSATGEERTLGKSNSIKIKGENGKNARDPRLSKREESIAKIGKKKYQKINLDEAEEFFELISKAQSNRADDQRGLLRKEDLVLPEFLRLPPGSTELTLPTPAAVAKGFSKRSATGNGRESASQPGEQWEPVQESSDSPSTSPGSASSPPGPPGTTPPGQKSPSGPFCTPQSPVSLAQEGTAQIWKRQSQEVEAGGIQTVEDEHVAELTLMGEGDISSPNSTLLPPPSTPQEVPGPSRPGTSRF

SEQ ID NO: 768996 - protein, 949 aa, Homo sapiens
MFRAGEASKRPLPGPSPPRVRSVEVARGRAGYGFTLSGQAPCVLSCVMRGSPADFVGLRAGDQILAVNEINVKKASHEDVVKLIGKCSGVLHMVIAEGVGRFESCSSDEEGGLYEGKGWLKPKLDSKALGINRAERVVEEMQSGGIFNMIFENPSLCASNSEPLKLKQRSLSESAATRFDVGHESINNPNPNMLSKEEISKVIHDDSVFSIGLESHDDFALDASILNVAMIVGYLGSIELPSTSSNLESDSLQAIRGCMRRLRAEQKIHSLVTMKIMHDCVQLSTDKAGVVAEYPAEKLAFSAVCPDDRRFFGLVTMQTNDDGSLAQEEEGALRTSCHVFMVDPDLFNHKIHQGIARRFGFECTADPDTNGCLEFPASSLPVLQFISVLYRDMGELIEGMRARAFLDGDADAHQNNSTQVPSSPASKHSLGSDHSSVSTPKKLSGKSKSGRSLNEELGDEDSEKKRKGAFFSWSRTRSTGRSQKKREHGDHADDALHANGGLCRRESQGSVSSAGSLDLSEACRTLAPEKDKATKHCCIHLPDGTSCVVAVKAGFSIKDILSGLCERHGINGAAADLFLVGGDKPLVLHQDSSILESRDLRLEKRTLFRLDLVPINRSVGLKAKPTKPVTEVLRPVVARYGLDLSGLLVRLSGEKEPLDLGAPISSLDGQRVVLEEKDPSRGKASADKQKGVPVKQNTAVNSSSRNHSATGEERTLGKSNSIKIKGENGKNARDPRLSKREESIAKIGKKKYQKINLDEAEEFFELISKAQSNRADDQRGLLRKEDLVLPEFLRLPPGSTELTLPTPAAVAKGFSKRSATGNGRESASQPGEQWEPVQESSDSPSTSPGSASSPPGPPGTTPPGQKSPSGPFCTPQSPVSLAQEGTAQIWKRQSQEVEAGGIQTVEDEHVAELTLMGEGDISSPNSTLLPPPSTPQEVPGPSRPGTSRF

SEQ ID NO: 768997 - protein, 464 aa, Homo sapiens
MSLCFPCQDALHANGGLCRRESQGSVSSAGSLDLSEACRTLAPEKDKATKHCCIHLPDGTSCVVAVKAGFSIKDILSGLCERHGINGAAADLFLVGGDKPLVLHQDSSILESRDLRLEKRTLFRLDLVPINRSVGLKAKPTKPVTEVLRPVVARYGLDLSGLLVRLSGEKEPLDLGAPISSLDGQRVVLEEKDPSRGKASADKQKGVPVKQNTAVNSSSRNHSATGEERTLGKSNSIKIKGENGKNARDPRLSKREESIAKIGKKKYQKINLDEAEEFFELISKAQSNRADDQRGLLRKEDLVLPEFLRLPPGSTELTLPTPAAVAKGFSKRSATGNGRESASQPGEQWEPVQESSDSPSTSPGSASSPPGPPGTTPPGQKSPSGPFCTPQSPVSLAQEGTAQIWKRQSQEVEAGGIQTVEDEHVAELTLMGEGDISSPNSTLLPPPSTPQEVPGPSRPGTSRF

SEQ ID NO: 768998 - protein, 464 aa, Homo sapiens; identical to SEQ ID NO: 768997

SEQ ID NO: 768999 - protein, 943 aa, Homo sapiens
MFRAGEASKRPLPGPSPPRVRSVEVARGRAGYGFTLSGQAPCVLSCVMRGSPADFVGLRAGDQILAVNEINVKKASHEDVVKLIGKCSGVLHMVIAEGVGRFESCSSDEEGGLYEGKGWLKPKLDSKALGINRAERVVEEMQSGGIFNMIFENPSLCASNSEPLKLKQRSLSESAATRFDVGHESINNPNPNMLSKEEISKVIHDDSVFSIGLESHDDFALDASILNVAMIVGYLGSIELPSTSSNLESDSLQAIRGCMRRLRAEQKIHSLVTMKIMHDCVQLSTDKAGVVAEYPAEKLAFSAVCPDDRRFFGLVTMQTNDDGSLAQEEEGALRTSCHVFMVDPDLFNHKIHQGIARRFGFECTADPDTNGCLEFPASSLPVLQFISVLYRDMGELIEGMRARAFLDGDADAHQNNSTSSNSDSGIGNFHQEEKSNRVLVVDLGGSSSRHGPGGSAWDGVGGRGAQPWGAPWTGPFCPDPEGSPPFEAAHQTDRFWDLNKHLGPASPVEVPPASLRSSVPPSKRGTVGAGCGFNQRWLPVHVLREWQCGHTSDQDSYTDSTDGWSSINCGTLPPPMSKIPADRYRVEGSFAQPPLNAPKREWSRKAFGMQSIFGPHRNVRKTKEDKKGSKFGRGTGLTQPSQRTSARRSFGRSKRFSITRSLDDLESATVSDGELTGADLKDCVSNNSLSSNASLPSVQSCRRLRERRVASWAVSFERLLQDPVGVRYFSDFLRKEFSEENILFWQACEYFNHVPAHDKKELSYRAREIFSKFLCSKATTPVNIDSQAQLADDVLRAPHPDMFKEQQLQIFNLMKFDSYTRFLKSPLYQECILAEVEGRALPDSQQVPSSPASKHSLGSDHSSVSTPKKLSGKSKSGRSLNEELGDEDSEKKRKGAFFSWSRTRSTGRSQKKREHGDHADGLWGGSWAVVSRPGSRVPVLASL

SEQ ID NO: 769000 - protein, 679 aa, Homo sapiens
MFRAGEASKRPLPGPSPPRVRSVEVARGRAGYGFTLSGQAPCVLSCVMRGSPADFVGLRAGDQILAVNEINVKKASHEDVVKLIGKCSGVLHMVIAEGVGRFESCSSDEEGGLYEGKGWLKPKLDSKALGINRAERVVEEMQSGGIFNMIFENPSLCASNSEPLKLKQRSLSESAATRFDVGHESINNPNPNMLSKEEISKVIHDDSVFSIGLESHDDFALDASILNVAMIVGYLGSIELPSTSSNLESDSLQAIRGCMRRLRAEQKIHSLVTMKIMHDCVQLSTDKAGVVAEYPAEKLAFSAVCPDDRRFFGLVTMQTNDDGSLAQEEEGALRTSCHVFMVDPDLFNHKIHQGIARRFGFECTADPDTNGCLEFPASSLPVLQFISVLYRDMGELIEGMRARAFLDGDADAHQNNSTSSNSDSGIGNFHQEEKSNRVLVVDLGGSSSRHGPGGSAWDGVGGRGAQPWGAPWTGPFCPDPEGSPPFEAAHQTDRFWDLNKHLGPASPVEVPPASLRSSVPPSKRGTVGAGCGFNQRWLPVHVLREWQCGHTSDQDSYTDSTDGWSSINCGTLPPPMSKIPADRYRVEGSFAQPPLNAPKREWSRKAFGMQSIFGPHRNVRKTKEDKKGSKFGRGTGLTQPSQRTSARRSFGRSKRFSITRSLDDLEWSTCARRCGNGYP

SEQ ID NO: 769001 - protein, 319 aa, Homo sapiens
PGRVRGRGGNMEELLRRELGCSSVRATGHSGGGCISQGRSYDTDQGRVFVKVNPKAEARRMFEGEMASLTAILKTNTVKVPKPIKVLDAPGGGSVLVMEHMDMRHLSSHAAKLGAQLADLHLDNKKLGEMRLKEAGTVGRGGGQEERPFVARFGFDVVTCCGYLPQVNDWQEDWVVFYARQRIQPQMDMVEKESGDREALQLWSALQLKIPDLFRDLEIIPALLHGDLWGGNVAEDSSGPVIFDPASFYGHSEYELAIAGMFGGFSSSFYSAYHGKIPKAPGFEKRLQLYQLFHYLNHWNHFGSGYRGSSLNIMRNLVK

SEQ ID NO: 769002 - protein, 178 aa, Homo sapiens
DWEVRTGLDLHSEVGHSGGGCISQGRSYDTDQGRVFVKVNPKAEARRMFEGEMASLTAILKTNTVKVPKPIKVLDAPGGGSVLVMEHMDMRHLSSHAAKLGAQLADLHLDNKKLGEMRLKEAGTVGMALRGPRVLPPRGGRSAGVGSERGPCSSRGRVGRGLMAEQGNVGLEPHLTVH

SEQ ID NO: 769003 - protein, 319 aa, Homo sapiens; identical to SEQ ID NO: 769001

SEQ ID NO: 769004 - protein, 254 aa, Homo sapiens
MASLTAILKTNTVKVPKPIKVLDAPGGGSVLVMEHMDMRHLSSHAAKLGAQLADLHLDNKKLGEMRLKEAGTVGRGGGQEERPFVARFGFDVVTCCGYLPQVNDWQEDWVVFYARQRIQPQMDMVEKESGDREALQLWSALQLKIPDLFRDLEIIPALLHGDLWGGNVAEDSSGPVIFDPASFYGHSEYELAIAGMFGGFSSSFYSAYHGKIPKAPGFEKRLQLYQLFHYLNHWNHFGSGYRGSSLNIMRNLVK

SEQ ID NO: 769005 - protein, 346 aa, Homo sapiens
PGRVRGRGGNMEELLRRELGCSSVRATGHSGGGCISQGRSYDTDQGRVFVKVNPKAEARRMFEGEMASLTAILKTNTVKVPKPIKVLDAPGGGSVLVMEHMDMRHLSSHAAKLGAQLADLHLDNKKLGEMRLKEAGTVEHNALSGSREFSGILICWHLESVCSPHGRGGGQEERPFVARFGFDVVTCCGYLPQVNDWQEDWVVFYARQRIQPQMDMVEKESGDREALQLWSALQLKIPDLFRDLEIIPALLHGDLWGGNVAEDSSGPVIFDPASFYGHSEYELAIAGMFGGFSSSFYSAYHGKIPKAPGFEKRLQLYQLFHYLNHWNHFGSGYRGSSLNIMRNLVK

SEQ ID NO: 769006 - protein, 190 aa, Homo sapiens
MRLKEAGTVGRGGGQEERPFVARFGFDVVTCCGYLPQVNDWQEDWVVFYARQRIQPQMDMVEKESGDREALQLWSALQLKIPDLFRDLEIIPALLHGDLWGGNVAEDSSGPVIFDPASFYGHSEYELAIAGMFGGFSSSFYSAYHGKIPKAPGFEKRLQLYQLFHYLNHWNHFGSGYRGSSLNIMRNLVK

SEQ ID NO: 769007 - protein, 165 aa, Homo sapiens
MLLQVSQVLVSLLLQTLSLLALQLHRFLQLAQLLLQLAQLLSQLPLDVLLRLQLKIPDLFRDLEIIPALLHGDLWGGNVAEDSSGPVIFDPASFYGHSEYELAIAGMFGGFSSSFYSAYHGKIPKAPGFEKRLQLYQLFHYLNHWNHFGSGYRGSSLNIMRNLVK

SEQ ID NO: 769008 - protein, 351 aa, Homo sapiens
PGRVRGRGGNMEELLRRELGCSSVRATGHSGGGCISQGRSYDTDQGRVFVKVNPKAEARRMFEGEMASLTAILKTNTVKVPKPIKVLDAPGGGSVLVMEHMDMRHLSSHAAKLGAQLADLHLDNKKLGEMRLKEAGTVGRGGGQEERPFVARFGFDVVTCCGYLPQVNDWQEDWVVFYARQRIQPQMDMVEKESGDREALQLWSALQLKIPDLFRDLEIIPALLHGDLWGGNVAEDSSGPVIFDPASFYGHSEYELAIAGMFGGFSSSFYSAYHGKIPKAPGFEKRLQLYQLFHYLNHWNHFGSGYRGSSLNIMRNLVKAPQQKAEQNRVPLECWFLCGVRKDRECGQFPT

SEQ ID NO: 769009 - protein, 351 aa, Homo sapiens; identical to SEQ ID NO: 769008

SEQ ID NO: 769010 - protein, 191 aa, Homo sapiens
PGRVRGRGGNMEELLRRELGCSSVRATGHSGGGCISQGRSYDTDQGRVFVKVNPKAEARRMFEGEMASLTAILKTNTVKVPKPIKVLDAPGGGSVLVMEHMDMRHLSSHAAKLGAQLADLHLDNKKLGEMRLKEAGTVGRGGGQEERPFVARFGFDVVTCCGYLPQVNDWQEDWVVFYARQILVSSHAGLA

SEQ ID NO: 769011 - protein, 319 aa, Homo sapiens; identical to SEQ ID NO: 769001

SEQ ID NO: 769012 - protein, 226 aa, Homo sapiens
VGPSRQHLCCSTPPTGWVHPDSTCAARLPPLGRSILTAPVLLDSPHWVGPSRQHLCCSDYPPGRSIPTAPVPLTSLPDVCVCRLAPHQVGPSRQHLCRSPPHRVGPSRQHLCRSPPCRVGPSRRRVCRLAQGPDIVPLSTASGARDPGHHRSVSAHQVPGARTSSFHSAQHQVPGTLDIIVPLSTASGAWDPGHHRSAQHSIRCPGPWTSFCISTTSPVTRASPSG

SEQ ID NO: 769013 - protein, 78 aa, Homo sapiens
PGRVRGRGGNMEELLRRELGCSSVRATGHSGGGCISQGRSYDTDQGRVFVKVNPKAEARRMFEGEMASLTAIAAGACW

SEQ ID NO: 769014 - protein, 191 aa, Homo sapiens
PGRVRGRGGNMEELLRRELGCSSVRATGHSGGGCISQGRSYDTDQGRVFVKVNPKAEARRMFEGEMASLTAILKTNTVKVPKPIKVLDAPGGGSVLVMEHMDMRHLSSHAAKLGAQLADLHLDNKKLGEMRLKEAGTVGMALRGPRVLPPRGGRSAGVGSERGPCSSRGRVGRGLMAEQGNVGLEPHLTVH

SEQ ID NO: 769015 - protein, 3829 aa, Homo sapiens
MNTFWPGRELIVQWYPFDENRNHPSVSWLKMVWKNLYIHFSEDLTLFDEMPLIPRTILEEGQTCVELIRLRIPSLVILDDESEAQLPEFLADIVQKLGGFVLKKLDASIQHPLIKKYIHSPLPSAVLQIMEKMPLQKLCNQITSLLPTHKDALRKFLASLTDSSEKEKRIIQELAIFKRINHSSDQGISSYTKLKGCKVLHHTAKLPADLRLSISVIDSSDEATIRLANMLKIEQLKTTSCLKLVLKDIENAFYSHEEVTQLMLWVLENLSSLKNENPNVLEWLTPLKFIQISQEQMVSAGELFDPDIEVLKDLFCNEEGTYFPPSVFTSPDILHSLRQIGLKNEASLKEKDVVQVAKKIEALQVGACPDQDVLLKKAKTLLLVLNKNHTLLQSSEGKMTLKKIKWVPACKERPPNYPGSLVWKGDLCNLCAPPDMCDVGHAILIGSSLPLVESIHVNLEKALGIFTKPSLSAVLKHFKIVVDWYSSKTFSDEDYYQFQHILLEIYGFMHDHLNEGKDSFRALKFPWVWTGKKFCPLAQAVIKPIHDLDLQPYLHNVPKTMAKFHQLFKVCGSIEELTSDHISMVIQKIYLKSDQDLSEQESKQNLHLMLNIIRWLYSNQIPASPNTPVPIHHSKNPSKLIMKPIHECCYCDIKVDDLNDLLEDSVEPIILVHEDIPMKTAEWLKVPCLSTRLINPENMGFEQSGQREPLTVRIKNILEEYPSVSDIFKELLQNADDANATECSFLIDMRRNMDIRENLLDPGMAACHGPALWSFNNSQFSDSDFVNITRLGESLKRGEVDKVGKFGLGFNSVYHITDIPIIMSREFMIMFDPNINHISKHIKDKSNPGIKINWSKQQKRLRKFPNQFKPFIDVFGCQLPLTVEAPYSYNGTLFRLSFRTQQEAKVSEVSSTCYNTADIYSLVDEFSLCGHRLIIFTQSVKSMYLKYLKIEETNPSLAQDTVIIKKKSCSSKALNTPVLSVLKEAAKLMKTCSSSNKKLPSDEPKSSCILQITVEEFHHVFRRIADLQSPLFRGPDDDPAALFEMAKSGQSKKPSDELSQKTVECTTWLLCTCMDTGEALKFSLSESGRRLGLVPCGAVGVQLSEIQDQKWTVKPHIGEVFCYLPLRIKTGLPVHINGCFAVTSNRKEIWKTDTKGRWNTTFMRHVIVKAYLQVLSVLRDLATSGELMDYTYYAVWPDPDLVHDDFSVICQGFYEDIAHGKGKELTKVFSDGSTWVSMKNVRFLDDSILKRRDVGSAAFKIFLKYLKKTGSKNLCAVELPSSVKLGFEEAGCKQILLENTFSEKQFFSEVFFPNIQEIEAELRDPLMIFVLNEKVDEFSGVLRVTPCIPCSLEGHPLVLPSRLIHPEGRVAKLFDIKDGRFPYGSTQDYLNPIILIKLVQLGMAKDDILWDDMLERAVSVAEINKSDHVAACLRSSILLSLIDEKLKIRDPRAKDFAAKYQTIRFLPFLTKPAGFSLDWKGNSFKPETMFAATDLYTAEHQDIVCLLQPILNENSHSFRGCGSVSLAVKEFLGLLKKPTVDLVINQLKEVAKSVDDGITLYQENITNACYKYLHEALMQNEITKMSIIDKLKPFSFILVENAYVDSEKVSFHLNFEAAPYLYQLPNKYKNNFRELFETVGVRQSCTVEDFALVLESIDQERGTKQITEENFQLCRRIISEGIWSLIREKKQEFCEKNYGKILLPDTNLMLLPAKSLCYNDCPWIKVKDTTVKYCHADIPREVAVKLGAVPKRHKALERYASNVCFTTLGTEFGQKEKLTSRIKSILNAYPSEKEMLKELLQNADDAKATEICFVFDPRQHPVDRIFDDKWAPLQGPALCVYNNQPFTEDDVRGIQNLGKGTKEGNPYKTGQYGIGFNSVYHITDCPSFISGNDILCIFDPHARYAPGATSISPGRMFRDLDADFRTQFSDVLDLYLGTHFKLDNCTMFRFPLRNAEMAKVSEISSVPASDRMVQNLLDKLRSDGAELLMFLNHMEKISICEIDKSTGALNVLYSVKGKITDGDRLKRKQFHASVIDSVTKKRQLKDIPVQQITYTMDTEDSEGNLTTWLICNRSGFSSMEKVSKSVISAHKNQDITLFPRGGVAACITHNYKKPHRAFCFLPLSLETGLPFHVNGHFALDSARRNLWRDDNGVGVRSDWNNSLMTALIAPAYVELLIQLKKRYFPGSDPTLSVLQNTPIHVVKDTLKKFLSFFPVNRLDLQPDLYCLVKALYNCIHEDMKRLLPVVRAPNIDGSDLHSAVIITWINMSTSNKTRPFFDNLLQDELQHLKNADYNITTRKTVAENVYRLKHLLLEIGFNLVYNCDETANLYHCLIDADIPVSYVTPADIRSFLMTFSSPDTNCHIGKLPCRLQQTNLKLFHSLKLLVDYCFKDAEENEIEVEGLPLLITLDSVLQTFDAKRPKFLTTYHELIPSRKDLFMNTLYLKYSNILLNCKVAKVFDISSFADLLSSVLPREYKTKSCTKWKDNFASESWLKNAWHFISESVSVKEDQEETKPTFDIVVDTLKDWALLPGTKFTVSANQLVVPEGDVLLPLSLMHIAVFPNAQSDKVFHALMKAGCIQLALNKICSKDSAFVPLLSCHTANIESPTSILKALHYMVQTSTFRAEKLVENDFEALLMYFNCNLNHLMSQDDIKILKSLPCYKSISGRYVSIGKFGTCYVLTKSIPSAEVEKWTQSSSSAFLEEKIHLKELYEVIGCVPVDDLEVYLKHLLPKIENLSYDAKLEHLIYLKNRLSSAEELSEIKEQLFEKLESLLIIHDANSRLKQAKHFYDRTVRVFEVMLPEKLFIPNDFFKKLEQLIKPKNHVTFMTSWVEFLRNIGLKYILSQQQLLQFAKEISVRANTENWSKETLQNTVDILLHHIFQERMDLLSGNFLKELSLIPFLCPERAPAEFIRFHPQYQEVNGTLPLIKFNGAQVNPKFKQCDVLQLLWTSCPILPEKATPLSIKEQEGSDLGPQEQLEQVLNMLNVNLDPPLDKVINNCRNICNITTLDEEMVKTRAKVLRSIYEFLSAEKREFRFQLRGVAFVMVEDGWKLLKPEEVVINLEYESDFKPYLYKLPLELGTFHQLFKHLGTEDIISTKQYVEVLSRIFKNSEGKQLDPNEMRTVKRVVSGLFRSLQNDSVKVRSDLENVRDLALYLPSQDGRLVKSSILVFDDAPHYKSRIQGNIGVQMLVDLSQCYLGKDHGFHTKLIMLFPQKLRPRLLSSILEEQLDEETPKVCQFGALCSLQGRLQLLLSSEQFITGLIRIMKHENDNAFLANEEKAIRLCKALREGLKVSCFEKLQTTLRVKGFNPIPHSRSETFAFLKRFGNAVILLYIQHSDSKDINFLLALAMTLKSATDNLISDTSYLIAMLGCNDIYRIGEKLDSLGVKYDSSEPSKLELPMPGTPIPAEIHYTLLMDPMNVFYPGEYVGYLVDAEGGDIYGSYQPTYTYAIIVQEVEREDADNSSFLGKIYQIDIGYSEYKIVSSLDLYKFSRPEESSQSRDSAPSTPTSPTEFLTPGLRSIPPLFSGRESHKTSSKHQSPKKLKVNSLPEILKEVTSVVEQAWKLPESERKKIIRRLYLKWHPDKNPENHDIANEVFKHLQNEINRLEKQAFLDQNADRASRRTFSTSASRFQSDKYSFQRFYTSWNQEATSHKSERQQQNKEKCPPSAGQTYSQRFFVPPTFKSVGNPVEARRWLRQARANFSAARNDLHKNANEWVCFKCYLSTKLALIAADYAVRGKSDKDVKPTALAQKIEEYSQQLEGLTNDVHTLEAYGVDSLKTRYPDLLPFPQIPNDRFTSEVAMRVMECTACIIIKLENFMQQKV

SEQ ID NO: 769016 - protein, 3829 aa, Homo sapiens; identical to SEQ ID NO: 769015

SEQ ID NO: 769017 - protein, 3647 aa, Homo sapiens
MNTFWPGRELIVQWYPFDENRNHPSVSWLKMVWKNLYIHFSEDLTLFDEMPLIPRTILEEGQTCVELIRLRIPSLVILDDESEAQLPEFLADIVQKLGGFVLKKLDASIQHPLIKKYIHSPLPSAVLQIMEKMPLQKLCNQITSLLPTHKDALRKFLASLTDSSEKEKRIIQELAIFKRINHSSDQGISSYTKLKGCKVLHHTAKLPADLRLSISVIDSSDEATIRLANMLKIEQLKTTSCLKLVLKDIENAFYSHEEVTQLMLWVLENLSSLKNENPNVLEWLTPLKFIQISQEQMVSAGELFDPDIEVLKDLFCNEEGTYFPPSVFTSPDILHSLRQIGLKNEASLKEKDVVQVAKKIEALQVGACPDQDVLLKKAKTLLLVLNKNHTLLQSSEGKMTLKKIKWVPACKERPPNYPGSLVWKGDLCNLCAPPDMCDVGHAILIGSSLPLVESIHVNLEKALGIFTKPSLSAVLKHFKIVVDWYSSKTFSDEDYYQFQHILLEIYGFMHDHLNEGKDSFRALKFPWVWTGKKFCPLAQAVIKPIHDLDLQPYLHNVPKTMAKFHQLFKVCGSIEELTSDHISMVIQKIYLKSDQDLSEQESKQNLHLMLNIIRWLYSNQIPASPNTPVPIHHSKNPSKLIMKPIHECCYCDIKVDDLNDLLEDSVEPIILVHEDIPMKTAEWLKVPCLSTRLINPENMGFEQSGQREPLTVRIKNILEEYPSVSDIFKELLQNADDANATECSFLIDMRRNMDIRENLLDPGMAACHGPALWSFNNSQFSDSDFVNITRLGESLKRGEVDKVGKFGLGFNSVYHITDIPIIMSREFMIMFDPNINHISKHIKDKSNPGIKINWSKQQKRLRKFPNQFKPFIDVFGCQLPLTVEAPYSYNGTLFRLSFRTQQEAKVSEVSSTCYNTADIYSLVDEFSLCGHRLIIFTQSVKSMYLKYLKIEETNPSLAQDTVIIKKKSCSSKALNTPVLSVLKEAAKLMKTCSSSNKKLPSDEPKSSCILQITVEEFHHVFRRIADLQSPLFRGPDDDPAALFEMAKSGQSKKPSDELSQKTVECTTWLLCTCMDTGEALKFSLSESGRRLGLVPCGAVGVQLSEIQDQKWTVKPHIGEVFCYLPLRIKTGLPVHINGCFAVTSNRKEIWKTDTKGRWNTTFMRHVIVKAYLQVLSVLRDLATSGELMDYTYYAVWPDPDLVHDDFSVICQGFYEDIAHGKGKELTKVFSDGSTWVSMKNVRFLDDSILKRRDVGSAAFKIFLKYLKKTGSKNLCAVELPSSVKLGFEEAGCKQILLENTFSEKQFFSEVFFPNIQEIEAELRDPLMIFVLNEKVDEFSGVLRVTPCIPCSLEGHPLVLPSRLIHPEGRVAKLFDIKDGRFPYGSTQDYLNPIILIKLVQLGMAKDDILWDDMLERAVSVAEINKSDHVAACLRSSILLSLIDEKLKIRDPRAKDFAAKYQTIRFLPFLTKPAGFSLDWKGNSFKPETMFAATDLYTAEHQDIVCLLQPILNENSHSFRGCGSVSLAVKEFLGLLKKPTVDLVINQLKEVAKSVDDGITLYQENITNACYKYLHEALMQNEITKMSIIDKLKPFSFILVENAYVDSEKVSFHLNFEAAPYLYQLPNKYKNNFRELFETVGVRQSCTVEDFALVLESIDQERGTKQITEENFQLCRRIISEGIWSLIREKKQEFCEKNYGKILLPDTNLMLLPAKSLCYNDCPWIKVKDTTVKYCHADIPREVAVKLGAVPKRHKALERYASNVCFTTLGTEFGQKEKLTSRIKSILNAYPSEKEMLKELLQNADDAKATEICFVFDPRQHPVDRIFDDKWAPLQGPALCVYNNQPFTEDDVRGIQNLGKGTKEGNPYKTGQYGIGFNSVYHITDCPSFISGNDILCIFDPHARYAPGATSISPGRMFRDLDADFRTQFSDVLDLYLGTHFKLDNCTMFRFPLRNAEMAKVSEISSVPASDRMVQNLLDKLRSDGAELLMFLNHMEKISICEIDKSTGALNVLYSVKGKITDGDRLKRKQFHASVIDSVTKKRQLKDIPVQQITYTMDTEDSEGNLTTWLICNRSGFSSMEKVSKSVISAHKNQDITLFPRGGVAACITHNYKKPHRAFCFLPLSLETGLPFHVNGHFALDSARRNLWRDDNGVGVRSDWNNSLMTALIAPAYVELLIQLKKRYFPGSDPTLSVLQNTPIHVVKDTLKKFLSFFPVNRLDLQPDLYCLVKALYNCIHEDMKRLLPVVRAPNIDGSDLHSAVIITWINMSTSNKTRPFFDNLLQDELQHLKNADYNITTRKTVAENVYRLKHLLLEIGFNLVYNCDETANLYHCLIDADIPVSYVTPADIRSFLMTFSSPDTNCHIGKLPCRLQQTNLKLFHSLKLLVDYCFKDAEENEIEVEGLPLLITLDSVLQTFDAKRPKFLTTYHELIPSRKDLFMNTLYLKYSNILLNCKVAKVFDISSFADLLSSVLPREYKTKSCTKWKDNFASESWLKNAWHFISESVSVKEDQEETKPTFDIVVDTLKDWALLPGTKFTVSANQLVVPEGDVLLPLSLMHIAVFPNAQSDKVFHALMKAGCIQLALNKICSKDSAFVPLLSCHTANIESPTSILKALHYMVQTSTFRAEKLVENDFEALLMYFNCNLNHLMSQDDIKILKSLPCYKSISGRYVSIGKFGTCYVLTKSIPSAEVEKWTQSSSSAFLEEKIHLKELYEVIGCVPVDDLEVYLKHLLPKIENLSYDAKLEHLIYLKNRLSSAEELSEIKEQLFEKLESLLIIHDANSRLKQAKHFYDRTVRVFEVMLPEKLFIPNDFFKKLEQLIKPKNHVTFMTSWVEFLRNIGLKYILSQQQLLQFAKEISVRANTENWSKETLQNTVDILLHHIFQERMDLLSGNFLKELSLIPFLCPERAPAEFIRFHPQYQEVNGTLPLIKFNGAQVNPKFKQCDVLQLLWTSCPILPEKATPLSIKEQEGSDLGPQEQLEQVLNMLNVNLDPPLDKVINNCRNICNITTLDEEMVKTRAKVLRSIYEFLSAEKREFRFQLRGVAFVMVEDGWKLLKPEEVVINLEYESDFKPYLYKLPLELGTFHQLFKHLGTEDIISTKQYVEVLSRIFKNSEGKQLDPNEMRTVKRVVSGLFRSLQNDSVKVRSDLENVRDLALYLPSQDGRLVKSSILVFDDAPHYKSRIQGNIGVQMLVDLSQCYLGKDHGFHTKLIMLFPQKLRPRLLSSILEEQLDEETPKVCQFGALCSLQGRLQLLLSSEQFITGLIRIMKHENDNAFLANEEKAIRLCKALREGLKVSCFEKLQTTLRVKGFNPIPHSRSETFAFLKRFGNAVILLYIQHSDSKDINFLLALAMTLKSATDNLISDTSYLIAMLGCNDIYRIGEKLDSLGVKYDSSEPSKLELPMPGTPIPAEIHYTLLMDPMNVFYPGEYVGYLVDAEGGDIYGSYQPTYTYAIIVQEVEREDADNSSFLGKIYQIDIGYSEYKIVSSLDLYKFSRPEESSQSRDSAPSTPTSPTEFLTPGLRSIPPLFSGRESHKTSSKHQSPKKLKVNSLPEILKEVTSVVEQAWKLPESERKKIIRRLYLKWHPDKNPENHDIANEVFKHLQNEINRLEKQAFLDQNADRASRRTFSTSASRFQSDKYSFQRF

SEQ ID NO: 769018 - protein, 66 aa, Homo sapiens
RCGKELPTSGLFDSPGLPAAGGSYPCRVSLTHQDNLPMERSYPLSVSSAESWTLGMTCLRYPLWVS

SEQ ID NO: 769019 - protein, 1358 aa, Homo sapiens
MGADGETVVLKNMLIGVNLILLGSMIKPSECQLEVTTERVQRQSVEEEGGIANYNTSSKEQPVVFNHVYNINVPLDNLCSSGLEASAEQEVSAEDETLAEYMGQTSDHESQVTFTHRINFPKKACPCASSAQVLQELLSRIEMLEREVSVLRDQCNANCCQESAATGQLDYIPHCSGHGNFSFESCGCICNEGWFGKNCSEPYCPLGCSSRGVCVDGQCICDSEYSGDDCSELRCPTDCSSRGLCVDGECVCEEPYTGEDCRELRCPGDCSGKGRCANGTCLCEEGYVGEDCGQRQCLNACSGRGQCEEGLCVCEEGYQGPDCSAVAPPEDLRVAGISDRSIELEWDGPMAVTEYVISYQPTALGGLQLQQRVPGDWSGVTITELEPGLTYNISVYAVISNILSLPITAKVATHLSTPQGLQFKTITETTVEVQWEPFSFSFDGWEISFIPKNNEGGVIAQVPSDVTSFNQTGLKPGEEYIVNVVALKEQARSPPTSASVSTVIDGPTQILVRDVSDTVAFVEWIPPRAKVDFILLKYGLVGGEGGRTTFRLQPPLSQYSVQALRPGSRYEVSVSAVRGTNESDSATTQFTTEIDAPKNLRVGSRTATSLDLEWDNSEAEVQEYKVVYSTLAGEQYHEVLVPRGIGPTTRATLTDLVPGTEYGVGISAVMNSQQSVPATMNARTELDSPRDLMVTASSETSISLIWTKASGPIDHYRITFTPSSGIASEVTVPKDRTSYTLTDLEPGAEYIISVTAERGRQQSLESTVDAFTGFRPISHLHFSHVTSSSVNITWSDPSPPADRLILNYSPRDEEEEMMEVSLDATKRHAVLMGLQPATEYIVNLVAVHGTVTSEPIVGSITTGIDPPKDITISNVTKDSVMVSWSPPVASFDYYRVSYRPTQVGRLDSSVVPNTVTEFTITRLNPATEYEISLNSVRGREESERICTLVHTAMDNPVDLIATNITPTEALLQWKAPVGEVENYVIVLTHFAVAGETILVDGVSEEFRLVDLLPSTHYTATMYATNGPLTSGTISTNFSTLLDPPANLTASEVTRQSALISWQPPRAEIENYVLTYKSTDGSRKELIVDAEDTWIRLEGLLENTDYTVLLQAAQDTTWSSITSTAFTTGGRVFPHPQDCAQHLMNGDTLSGVYPIFLNGELSQKLQVYCDMTTDGGGWIVFQRRQNGQTDFFRKWADYRVGFGNVEDEFWLGLDNIHRITSQGRYELRVDMRDGQEAAFASYDRFSVEDSRNLYKLRIGSYNGTAGDSLSYHQGRPFSTEDRDNDVAVTNCAMSYKGAWWYKNCHRTNLNGKYGESRHSQGINWYHWKGHEFSIPFVEMKMRPYNHRLMAGRKRQSLQF

SEQ ID NO: 769020 - protein, 250 aa, Homo sapiens
YVFNTYFIFLTFQNYHEIMTRHPENYQWENWSLENVATILAHRFPNSYIWVIKCSRMHLHKFSCYDNFVKSNMFGAPEHNTDFGAFKHLYMLLVNAFNLSQNSLSKKSLNVWNKDSIASNCRSSPSHTTNGCQGEKVRTCEKSDESAMSFYPPSLNDASFTLIGFSKGCVVLNQLLFELKEAKKDKNIDAFIKSIRTMYWLDGGHSGGSNTWVTYPEVLKEFAQTGIIVHTHVTPYQVRDPMRSWIGKEH

SEQ ID NO: 769021 - protein, 440 aa, Homo sapiens
AARGRRPLTSSPQRRLPAGPRPPTVEPPAEPPAEVPPSGTPPPPSTSEPLSRRRPMWGFRLLRSPPLLLLLPQLGIGNASSCSQARTMNPGGSGGARCSLSAEVRRRQCLQLSTVPGADPQRSNELLLLAAAGEGLERQDLPGDPAKEEPQPPPQHHVLYFPGDVQNYHEIMTRHPENYQWENWSLENVATILAHRFPNSYIWVIKCSRMHLHKFSCYDNFVKSNMFGAPEHNTDFGAFKHLYMLLVNAFNLSQNSLSKKSLNVWNKDSIASNCRSSPSHTTNGCQGEKVRTCEKSDESAMSFYPPSLNDASFTLIGFSKGCVVLNQLLFELKEAKKDKNIDAFIKSIRTMYWLDGGHSGGSNTWVTYPEVLKEFAQTGIIVHTHVTPYQVRDPMRSWIGKEHKKFVQILGDLGMQVTSQIHFTKEAPSIENHFRVHEVF

SEQ ID NO: 769022 - protein, 103 aa, Homo sapiens
TQLSKMQTLHLASPAPSAFWAWSFLATPFSVGLFPSLPASAFPFFPLGTFSGAFLGLLWLWRSRFSRQLCGSSLWFILHLGFISFSIPLSLSLGHAGNNSDGT

SEQ ID NO: 769023 - protein, 128 aa, Homo sapiens
GVARPALGAQSRRPGRGCGNPWLGGAERQAGPLSQLALPQVLGLILNLPSPVSLGLLSLPLRRRHWVALRQVDGVYYNLDSKLRAPEALGDEDGVRAFLAAALAQGLCEVLLVVTKEVEEKGSWLRTD

SEQ ID NO: 769024 - protein, 224 aa, Homo sapiens
VLPAPHSEPRAAAQEGDAETPGSVERRGRRAGAEDGMSQAPGAQPSPPTVYHERQRLELCAVHALNNVLQQQLFSQEAADEICKRLAPDSRLNPHRSLLGTGNYDVNVIMAALQGLGLAAVWWDRRRPLSQLALPQVLGLILNLPSPVSLGLLSLPLRRRHWVALRQVDGVYYNLDSKLRAPEALGDEDGVRAFLAAALAQGLCEVLLVVTKEVEEKGSWLRTD

SEQ ID NO: 769025 - protein, 113 aa, Homo sapiens
APRLSLLFPSFPPTVAKEGKGEGRVLESPHLTGCFQLSGSGRYLKMTISWALSQALRRLSALGTSTEDPSKSAMHQLWGPLPTRLPPLPFVCSDSGYWSHAILQEFLRIESRI

SEQ ID NO: 769026 - protein, 1262 aa, Homo sapiens
MSQKRQTKFQNGKSKTSENSSAKREKGMVVNSKEISDAVGQSKFVLENLRHYTVHPNLAQYYKPLKATALQKFLAQNRKNTSFMLKVTQYDQDKTLLIMTNNPPPCSITQQDKESASKYFSKELLLKVMESHHQHKPTENLWLPRMPQKKKLRSKLKPIFPLILSDDPTSKREQWFRFSTDNDFKSEGKYSKVYALRTQKKMYPQLTFAPVHERDMRKDASKKSASERPISKVIREPLTLASLLEDMPTRTAPGESAFRNGRAPQWIIKKATVIVVNTDPSVLPPRSLETEGSAEVATQIKPHSCCCGRGLPGRKPGGSSRSLRRAARGEGGVAASRGPRAAGEGGPWPRVKARRPNRRESAGPAFLQLFRSPAAAPGTVAVGLGAGKSSKMIKKFDKKDEESGSGSNPFQHLEKSAVLQEARIFNETPINPRRCLHILTKILYLLNQGEHFGTTEATEAFFAMTRLFQSNDQTLRRMCYLTIKEMATISEDVIIVTSSLTKDMTGKEDVYRGPAIRALCRITDGTMLQAIERYMKQAIVDKVSSVSSSALVSSLHMMKISYDVVKRWINEAQEAASSDNIMVQYHALGVLYHLRKNDRLAVSKMLNKFTKSGLKSQFAYCMLIRIASRLLKETEDGHESPLFDFIESCLRNKHEMVIYEAASAIIHLPNCTARELAPAVSVLQLFCSSPKPALRYAAVRTLNKVAMKHPSAVTACNLDLENLITDSNRSIATLAITTLLKTGSESSVDRLMKQISSFVSEISDEFKVVVVQAISALCQKYPRKHSVMMTFLSNMLRDDGGFEYKRAIVDCIISIVEENPESKEAGLAHLCEFIEDCEHTVLATKILHLLGKEGPRTPVPSKYIRFIFNRVVLENEAVRAAAVSALAKFGAQNESLLPSILVLLQRCMMDTDDEVRDRATFYLNVLQQRQMALNATYIFNGLTVSVPGMGKALHQYTLEPSEKPFDMKSIPLAMAPVFEQKAEITLVATKPEKLAPSRQDIFQEQLAAIPEFLNIGPLFKSSEPVQLTEAETEYFVRCIKHMFTNHIVFQFDCTNTLNDQLLEKVTVQMEPSDSYEVLSCIPAPSLPYNQPGICYTLVRLPDDDPTAVAGSFSCTMKFTVRDCDPNTGVPDEDGYDDEYVLEDLEVTVSDHIQKVLKPNFAAAWEEVGDAFEKEETFALSSTKTLVEAVNNIITFLGMQPCERSDKVPENKNSHSLYLAGIFRGGYDLLVRSRLALADGVTMQVTVRSKERTPVDVILASVG

SEQ ID NO: 769027 - protein, 765 aa, Homo sapiens
MILTKDMTGKEDVYRGPAIRALCRITDGTMLQAIERYMKQAIVDKVSSVSSSALVSSLHMMKISYDVVKRWINEAQEAASSDNIMVQYHALGVLYHLRKNDRLAVSKMLNKFTKSGLKSQFAYCMLIRIASRLLKETEDGHESPLFDFIESCLRNKHEMVIYEAASAIIHLPNCTARELAPAVSVLQLFCSSPKPALRYAAVRTLNKVAMKHPSAVTACNLDLENLITDSNRSIATLAITTLLKTGSESSVDRLMKQISSFVSEISDEFKVVVVQAISALCQKYPRKHSVMMTFLSNMLRDDGGFEYKRAIVDCIISIVEENPESKEAGLAHLCEFIEDCEHTVLATKILHLLGKEGPRTPVPSKYIRFIFNRVVLENEAVRAAAVSALAKFGAQNESLLPSILVLLQRCMMDTDDEVRDRATFYLNVLQQRQMALNATYIFNGLTVSVPGMGKALHQYTLEPSEKPFDMKSIPLAMAPVFEQKAEITLVATKPEKLAPSRQDIFQEQLAAIPEFLNIGPLFKSSEPVQLTEAETEYFVRCIKHMFTNHIVFQFDCTNTLNDQLLEKVTVQMEPSDSYEVLSCIPAPSLPYNQPGICYTLVRLPDDDPTAVAGSFSCTMKFTVRDCDPNTGVPDEDGYDDEYVLEDLEVTVSDHIQKVLKPNFAAAWEEVGDAFEKEETFALSSTKTLVEAVNNIITFLGMQPCERSDKVPENKNSHSLYLAGIFRGGYDLLVRSRLALADGVTMQVTVRSKERTPVDVILASVG

SEQ ID NO: 769028 - protein, 344 aa, Homo sapiens
MGCWGRNRGRLLCMLALTFMFMVLEVVVSRVTSSLAMLSDSFHMLSDVLALVVALVAERFARRTHATQKNTFGWIRAEVMGALVNAIERFIEPHEMQQPLVVLPKGPRVKSTRPGSSDINVAPGEQGPDQEETNTLVANTSNSNGLKLDPADPENPRSGDTVEVQVNGNLVREPDHMELEEDRAGQLNMRGVFLHVLGDALGSVIVVVNALVFYFSWKGCSEGDFCVNPCFPDPCKAFVEIINSTHASVYEAGPCWVLYLDPTLCVVMVCILLYTTYPLLKESALILLQTVPKQIDIRNLIKELRNVEGVEEVHELHVWQLAGSRIIATAHIKCEDPTSYMEGG

SEQ ID NO: 769029 - protein, 400 aa, Homo sapiens
MGCWGRNRGRLLCMLALTFMFMVLEVVVSRVTSSLAMLSDSFHMLSDVLALVVALVAERFARRTHATQKNTFGWIRAEVMGALVNAIFLTGLCFAILLEAIERFIEPHEMQQPLVVLGVGVAGLLVNVLGLCLFHHHSGFSQDSGHGHSHGGHGHGHGLPKGPRVKSTRPGSSDINVAPGEQGPDQEETNTLVANTSNSNGLKLDPADPENPRSGDTVEVQVNGNLVREPDHMELEEDRAGQLNMRGVFLHVLGDALGSVIVVVNALVFYFSWKGCSEGDFCVNPCFPDPCKAFVEIINSTHASVYEAGPCWVLYLDPTLCVVMVCILLYTTYPLLKESALILLQTVPKQIDIRNLIKELRNVEGVEEVHELHVWQLAGSRIIATAHIKCEDPTSYMEGG

SEQ ID NO: 769030 - protein, 400 aa, Homo sapiens; identical to SEQ ID NO: 769029

SEQ ID NO: 769031 - protein, 400 aa, Homo sapiens; identical to SEQ ID NO: 769029

SEQ ID NO: 769032 - protein, 239 aa, Homo sapiens
RARRLALQCHVCVCALTPGEQSGRRLPGQTWLMFSCFCFSLQDNSFSSTTVTECDEDPVSLHEDQTDCSSLRDENNKENYPDAGALVEEHAPPSWEPQQQNVEATVLVDSVLRPSMGNFKSRKPKSIFKAESGRSHGESQETEHVVSSQSECQVRAGTPAHESPQNNAFKCQETVRLQPRIDQRTAISPKDAFETRQDLNEEEAAQVHGVQGPGASINPERACPMGTDSADPSPVHKDG

SEQ ID NO: 769033 - protein, 123 aa, Homo sapiens
GPCLEQQDEERSTRLKDLLGRYFEEEEGQEPGGMEDAQGPEPGQARVSAVRPGSSSGLQVPWAAWGLLCGCSATGAQRKPDVPVHTAPGLGGPGPLRHPPVPVPEARGEVLQQGCGPHLPRHR

SEQ ID NO: 769034 - protein, 243 aa, Homo sapiens
MRGHISVLVAIRQCRLVVPCAGARADGCCACGGADAGDAGVLGDEDARLFPDGSAAVSVSDAEAYGAGCPGAEGLRARPAADAFPLQDDVEAAPEETRALYREYRTLKRTTGQAGGGLRSSESLPAAAEEAPEPRCWGPHLNRAATKSPQPTPGRSRQGSVPDYGQRLKANLKGTLQAGPALGRRPWPLGRASSKASTPKPPGTGPVPSFAEKVSDEPPQAPAGGPLTALHWGMSGRAGVVRG

SEQ ID NO: 769035 - protein, 282 aa, Homo sapiens
WSECTFFSTTPVLSLFAVFIQLAEKTYNYIYIEIACFLSIFFLSICVYSTVFRIRVFNYYYLASHHQTDAYSLLFSGMLFCRLTPPLCLNFLVFDPYGFIYLSQEYSTNCLYIYGFYIYYPMLVVILCIATYFSLGTRCLNLLGFQQFMGDDDMTSDLVNEGKELIRKEKRKRQRQEEGENRRREWKERYGHNREDSTRNRNIHTDPKESNFSDVNTNRSAFKYTRANNRTERDRIELLQDAEPLDFNAETFTDDPLESESGRYQPGGRYLSMSRSDIFNDV

SEQ ID NO: 769036 - protein, 294 aa, Homo sapiens
WSECTFFSTTPVLSLFAVFIQLAEKTYNYIYIEIACFLSIFFLSICVYSTVFRIRVFNYYYLASHHQTDAYSLLFSGMLFCRLTPPLCLNFLGLTHMDSSISHKNTQPTAYTSIMGSMKVLSFIADGFYIYYPMLVVILCIATYFSLGTRCLNLLGFQQFMGDDDMTSDLVNEGKELIRKEKRKRQRQEEGENRRREWKERYGHNREDSTRNRNIHTDPKESNFSDVNTNRSAFKYTRANNRTERDRIELLQDAEPLDFNAETFTDDPLESESGRYQPGGRYLSMSRSDIFNDV

SEQ ID NO: 769037 - protein, 107 aa, Homo sapiens
AGCTPRDLWDGRDGLALPGVGVARAWALAEFQARAEEGAAAAAAAAAGGYPSTGRCRCSLRGMEGTAVAVFEVMLGRERRGRTLSEETGFVRRPRSLGRGVGRRLRF

SEQ ID NO: 769038 - protein, 337 aa, Homo sapiens
MLFIPEDVAGMDLLGELILTPAAALCPSPKVSSNQLNRISSVSIFLYGPLGLPLILSTWEQPMTTFFKDTSSLVDWKKYHLCMIPNLDLNLDRDLVLPDVSYQVESSEEDQSQTMDPQGQTLLLFLFVDFHSAFPVQQMEIWGVYTLLTTHLNAILVESHSVVQGSIQFTVDKVLEQHHQAAKAADTQEFRTKLHKVFREITQHQFLHHCSCEVKQQLTLEKKDSAQGTEDAPDNSSLELLADTSGQAENKRLKRGSPRIEEMRALRSARAPSPSEAAPRRPEATAAPLTPRGREHREAHGRALAPGRASLGSRLEDVLWLQEVSNLSEWLSPSPGP

SEQ ID NO: 769039 - protein, 374 aa, Homo sapiens [sequence omitted]

SEQ ID NO: 769040 - protein, 374 aa, Homo sapiens [sequence omitted]

SEQ ID NO: 769041 - protein, 374 aa, Homo sapiens [sequence omitted]

SEQ ID NO: 769042 - protein, 374 aa, Homo sapiens [sequence omitted]

SEQ ID NO: 769043 - protein, 407 aa, Homo sapiens
MLNLTCLFSDSRPNFGTIESHCSRIHPVLGHPVMLFIPEDVAGMDLLGELILTPAAALCPSPKVSSNQLNRISSVSIFLYGPLGLPLILSTWEQPMTTFFKDTSSLVDWKKYHLCMIPNLDLNLDRDLVLPDVSYQVESSEEDQSQTMDPQGQTLLLFLFVDFHSAFPVQQMEIWGVYTLLTTHLNAILVESHSVVQGSIQFTVDKVLEQHHQAAKAQQKLQASLSVAVNSIMSILTGSTRSSFRKMCLQTLQAADTQEFRTKLHKVFREITQHQFLHHCSCEVKQQLTLEKKDSAQGTEDAPDNSSLELLADTSGQAENKRLKRGSPRIEEMRALRSARAPSPSEAAPRRPEATAAPLTPRGREHREAHGRALAPGRASLGSRLEDVLWLQEVSNLSEWLSPSPGP

SEQ ID NO: 769044 - protein, 531 aa, Homo sapiens
MVLKKFLKEIQSILPGISAKLTWTSEEGSYSQDMTGVTPFQMIFEVDEKPRTLMTDCLVIKHFLRKIIMVHPKVRFHFSVKVNGILSTEIFGVENEPTLNLGNGIALLVDSQHYVREGVKPCCPSACFTLLSSTNRPNFGTIESHCSRIHPVLGHPVMLFIPEDVAGMDLLGELILTPAAALCPSPKVSSNQLNRISSVSIFLYGPLGLPLILSTWEQPMTTFFKDTSSLVDWKKYHLCMIPNLDLNLDRDLVLPDVSYQVESSEEDQSQTMDPQGQTLLLFLFVDFHSAFPVQQMEIWGVYTLLTTHLNAILVESHSVVQGSIQFTVDKVLEQHHQAAKAQQKLQASLSVAVNSIMSILTGSTRSSFRKMCLQTLQAADTQEFRTKLHKVFREITQHQFLHHCSCEVKQQLTLEKKDSAQGTEDAPDNSSLELLADTSGQAENKRLKRGSPRIEEMRALRSARAPSPSEAAPRRPEATAAPLTPRGREHREAHGRALAPGRASLGSRLEDVLWLQEVSNLSEWLSPSPGP

SEQ ID NO: 769045 - protein, 421 aa, Homo sapiens
AGCTPRDLWDGRDGLALPGVGVARAWALAEFQARAEEGAAAAAAAAAGGYPSTGRCRCSLRGMEGTAVAVFGWSLTLLPRPECSGAVSAHCNLHLPGSSDSHASVPRVAGITDAHHHAWLIMVASAGSLFGGMVLKKFLKDLVLPDVSYQVESSEEDQSQTMDPQGQTLLLFLFVDFHSAFPVQQMEIWGVYTLLTTHLNAILVESHSVVQGSIQFTVDKVLEQHHQAAKAQQKLQASLSVAVNSIMSILTGSTRSSFRKMCLQTLQAADTQEFRTKLHKVFREITQHQFLHHCSCEVKQQLTLEKKDSAQGTEDAPDNSSLELLADTSGQAENKRLKRGSPRIEEMRALRSARAPSPSEAAPRRPEATAAPLTPRGREHREAHGRALAPGRASLGSRLEDVLWLQEVSNLSEWLSPSPGP

SEQ ID NO: 769046 - protein, 401 aa, Homo sapiens
MLFIPEDVAGMDLLGELILTPAAALCPSPKVSSNQLNRISSVSIFLYGPLGLPLILSTWEQPMTTFFKDTSSLVDWKKYHLCMIPNLDLNLDRDLVLPDVSYQVESSEEDQSQTMDPQGQTLLLFLFVDFHSAFPVQQMEIWGVYTLLTTHLNAILVESHSVVQGSIQFTVDKVLEQHHQAAKAQQKLQASLSVAVNSIMSILTGSTRSSFRKMCLQTLQAADTQEFRTKLHKVFREITQHQFLHHCSCEVKQQLTLEKKDSAQGTEDAPDNSSLELLAVLKQPSQPTAAGVQQLSHSVTSRDARYHTSGQAENKRLKRGSPRIEEMRALRSARAPSPSEAAPRRPEATAAPLTPRGREHREAHGRALAPGRASLGSRLEDVLWLQEVSNLSEWLSPSPGP

SEQ ID NO: 769047 - protein, 304 aa, Homo sapiens
MLFIPEDVAGMDLLGELILTPAAALCPSPKVSSNQLNRISSVSIFLYGPLGLPLILSTWEQPMTTFFKDTSSLVDWKKYHLCMIPNLDLNLDRDLVLPDVSYQVESSEEDQSQTMDPQGQTLLLFLFVDFHSAFPVQQMEIWGVYTLLTTHLNAILVESHSVVQGSIQFTVDKVLEQHHQAAKQLTLEKKDSAQGTEDAPDNSSLELLADTSGQAENKRLKRGSPRIEEMRALRSARAPSPSEAAPRRPEATAAPLTPRGREHREAHGRALAPGRASLGSRLEDVLWLQEVSNLSEWLSPSPGP

SEQ ID NO: 769048 - protein, 125 aa, Homo sapiens
AGCTPRDLWDGRDGLALPGVGVARAWALAEFQARAEEGAAAAAAAAAGGYPSTGRCRCSLRGMEGTAVAVFGCFCRKPFWWHGPQEVPKRNTVHTARNLCKADLDFRGRQLFSGYDRGNTLPDDF

SEQ ID NO: 769049 - protein, 374 aa, Homo sapiens [sequence omitted]

SEQ ID NO: 769050 - protein, 374 aa, Homo sapiens [sequence omitted]

SEQ ID NO: 769051 - protein, 374 aa, Homo sapiens [sequence omitted]

SEQ ID NO: 769052 - protein, 374 aa, Homo sapiens [sequence omitted]

SEQ ID NO: 769053 - protein, 374 aa, Homo sapiens [sequence omitted]

SEQ ID NO: 769054 - protein, 289 aa, Homo sapiens
  misc_feature (283)..(283): Xaa can be any naturally occurring amino acid
MLFIPEDVAGMDLLGELILTPAAALCPSPKVSSNQLNRISSVSIFLYGPLGLPLILSTWEQPMTTFFKDTSSLVDWKKYHLCMIPNLDLNLDRDLVLPDVSYQVESSEEDQSQTMDPQGQTLLLFLFVDFHSAFPVQQMEIWGVYTLLTTHLNAILVESHSVVQGSIQFTVDKVLEQHHQAAKAQQKLQASLSVAVNSIMSILTGSTRSSFRKMCLQTLQAADTQEFRTKLHKVFREITQHQFLHHCSCEVKQQLTLEKKDSAQGTEDAPDNSSLELLADTTXRGGGGP

SEQ ID NO: 769055 - protein, 179 aa, Homo sapiens
MGLIFAKLWSLFCNQEHKVIIVGLDNAGKTTILYQFLMNEVVHTSPTIGSNVEEIVVKNTHFLMWDIGGQESLRSSWNTYYSNTEFIILVVDSIDRERLAITKEELYRMLAHEDLRKAAVLIFANKQDMKGCMTAAEISKYLTLSSIKDHPWHIQSCCALTGEGLCQGLEWMTSRIGVR

SEQ ID NO: 769056 - protein, 76 aa, Homo sapiens
ASQTRFQMALHRPWTVLAEVGFSSLKSPGSGALILMNRSYVWDEWSLAHRTTLILEGRNEDRTIVILEGLNKYLLA

SEQ ID NO: 769057 - protein, 200 aa, Homo sapiens
AGLLETPGWKGPWPPVTCKGEMRLVRELWASPVAARCLSINSSHPAAPPTHLCTRHGPKKAPGSTEWLGEFLYSLLTWVLDYRLPQGRGRQGHLFIFLSSAPRTVTGTERAHSKYIPSVRVNDYSRFPEAGVGRKWPLLRSPGSPSPAVCFPLSRIKSNVDGRYLVDGVPFSCCNPSSPRPCIQYQITNNSAHYSYDHQT

SEQ ID NO: 769058 - protein, 346 aa, Homo sapiens
MALLKVKFDQKKRVKLAQGLWLMNWFSVLAGIIIFSLGLFLKIELRKRSDVMNNSESHFVPNSLIGMGVLSCVFNSLAGKICYDALDPAKYARWKPWLKPYLAICVLFNIILFLVALCCFLLRGSLENTLGQGLKNGMKYYRDTDTPGRCFMKKTIDMLQIEFKCCGNNGFRDWFEIQWISNRYLDFSSKEVKDRIKSNVDGRYLVDGVPFSCCNPSSPRPCIQYQITNNSAHYSYDHQTEELNLWVRGCRAALLSYYSSLMNSMGVVTLLIWLFEVTITIGLRYLQTSLDGVSNPEESESESEGWLLEKSVPETWKAFLESVKKLGKGNQVEAEGAGAGQAPEAG

SEQ ID NO: 769059 - protein, 103 aa, Homo sapiens
FQARDRQTVLQATEMEDNGHRTQVAFIPGQPQSKPHRTLHILDSDPISHPSCVPETTTSTNRPVIRLFFSKHTSSCTLMKTWLPLELSGVEISFRRIPLPLGL

SEQ ID NO: 769060 - protein, 82 aa, Homo sapiens
KDEIVFFKTVKFCKTQEPVQGNKHLHNRWNQELNVIVASLSTGQQTTRPACEMAAPQPCSVTSFLSNERQQLPADCSIVFIN

SEQ ID NO: 769061 - protein, 330 aa, Homo sapiens
MAAAAGRSLLLLLSSRGGGGGGAGGCGALTAGCFPGLGVSRHRQQQHHRTVHQRIASWQNLGAVYCSTVVPSDDVTVVYQNGLPVISVRLPSRRERCQFTLKPISDSVGVFLRQLQEEDRGIDRVAIYSPDGVRVAASTGIDLLLLDDFKLVINDLTYHVRPPKRVEMGFCHVGQNGFELLTSSYLPASASQSAEIIAVRIEISRKAEKRTTLVLWGGLAYMATQFGILARLTWWEYSWDIMEPVTYFITYGSAMAMYAYFVMTRQEYVYPEARDRQYLLFFHKGAKKSRFDLEKYNQLKDAIAQAEMDLKRLRDPLQVHLPLRQIGEKD

SEQ ID NO: 769062 - protein, 351 aa, Homo sapiens
MAAAAGRSLLLLLSSRGGGGGGAGGCGALTAGCFPGLGVSRHRQQQHHRTVHQRIASWQNLGAVYCSTVVPSDDVTVVYQNGLPVISVRLPSRRERCQFTLKPISDSVGVFLRQLQEEDRGIDRVAIYSPDGVRVAASTGIDLLLLDDFKLVINDLTYHVRPPKRDLLSHENAATLNDVKTLVQQLYTTLCIEQHQLNKERELIERLEDLKEQLAPLEKVRIEISRKAEKRTTLVLWGGLAYMATQFGILARLTWWEYSWDIMEPVTYFITYGSAMAMYAYFVMTRQEYVYPEARDRQYLLFFHKGAKKSRFDLEKYNQLKDAIAQAEMDLKRLRDPLQVHLPLRQIGEKD

SEQ ID NO: 769063 - protein, 302 aa, Homo sapiens
MVHQRIASWQNLGAVYCSTVVPSDDVTVVYQNGLPVISVRLPSRRERCQFTLKPISDSVGVFLRQLQEEDRGIDRVAIYSPDGVRVAASTGIDLLLLDDFKLVINDLTYHVRPPKRDLLSHENAATLNDVKTLVQQLYTTLCIEQHQLNKERELIERLEDLKEQLAPLEKVRIEISRKAEKRTTLVLWGGLAYMATQFGILARLTWWEYSWDIMEPVTYFITYGSAMAMYAYFVMTRQEYVYPEARDRQYLLFFHKGAKKSRFDLEKYNQLKDAIAQAEMDLKRLRDPLQVHLPLRQIGEKD

SEQ ID NO: 769064 - protein, 351 aa, Homo sapiens; identical to SEQ ID NO: 769062

SEQ ID NO: 769065 - protein, 1124 aa, Homo sapiens
MDSLASLVLCGVSLLLSGTVEGAMDLILINSLPLVSDAETSLTCIASGWRPHEPITIGRDFEALMNQHQDPLEVTQDVTREWAKKVVWKREKASKINGAYFCEGRVRGEAIRIRTMKMRQQASFLPATLTMTVDKGDNVNISFKKVLIKEEDAVIYKNGSFIHSVPRHEVPDILEVHLPHAQPQDAGVYSARYIGGNLFTSAFTRLIVRRCEAQKWGPECNHLCTACMNNGVCHEDTGECICPPGFMGRTCEKACELHTFGRTCKERCSGQEGCKSYVFCLPDPYGCSCATGWKGLQCNEACHPGFYGPDCKLRCSCNNGEMCDRFQGCLCSPGWQGLQCEREGIPRMTPKIVDLPDHIEVNSGKFNPICKASGWPLPTNEEMTLVKPDGTVLHPKDFNHTDHFSVAIFTIHRILPPDSGVWVCSVNTVAGMVEKPFNISVKVLPKPLNAPNVIDTGHNFAVINISSEPYFGDGPIKSKKLLYKPVNHYEAWQHIQVTNEIVTLNYLEPRTEYELCVQLVRRGEGGEGHPGPVRRFTTASIGLPPPRGLNLLPKSQTTLNLTWQPIFPSSEDDFYVEVERRSVQKSDQQNIKVPGNLTSVLLNNLHPREQYVVRARVNTKAQGEWSEDLTAWTLSDILPPQPENIKISNITHSSAVISWTILDGYSISSITIRYKVQGKNEDQHVDVKIKNATIIQYQLKGLEPETAYQVDIFAENNIGSSNPAFSHELVTLPESQAPADLGGGKMLLIAILGSAGMTCLTVLLAFLIILQLKRANVQRRMAQAFQNVREEPAVQFNSGTLALNRKVKNNPDPTIYPVLDWNDIKFQDVIGEGNFGQVLKARIKKDGLRMDAAIKRMKEYASKDDHRDFAGELEVLCKLGHHPNIINLLGACEHRGYLYLAIEYAPHGNLLDFLRKSRVLETDPAFAIANSTASTLSSQQLLHFAADVARGMDYLSQKQFIHRDLAARNILVGENYVAKIADFGLSRGQEVYVKKTMGRLPVRWMAIESLNYSVYTTNSDVWSYGVLLWEIVSLGGTPYCGMTCAELYEKLPQGYRLEKPLNCDDEVYDLMRQCWREKPYERPSFAQILVSLNRMLEERKTYVNTTLYEKFTYAGIDCSAEEAA

SEQ ID NO: 769066 - protein, 1124 aa, Homo sapiens; identical to SEQ ID NO: 769065

SEQ ID NO: 769067 - protein, 767 aa, Homo sapiens
SIQRKLGLCEFPDNDQFSNLEALLIQIGPKECVLPGGETAGDMGKLRQIIQRGGILITERKKADFSTKDIYQDLNRLLKGKKGEQMNSAVLPEMENQVAVSSLSAVIKFLELLSDDSNFGQFELTTFDFSQYMKLDIAAVRALNLFQGSVEDTTGSQSLAALLNKCKTPQGQRLVNQWIKQPLMDKNRIEERLNLVEAFVEDAELRQTLQEDLLRRFPDLNRLAKKFQRQAANLQDCYRLYQGINQLPNVIQALEKHEGKHQKLLLAVFVTPLTDLRSDFSKFQEMIETTLDMDQVENHEFLVKPSFDPNLSELREIMNDLEKKMQSTLISAARDLGLDPGKQIKLDSSAQFGYYFRVTCKEEKVLRNNKNFSTVDIQKNGVKFTNSKLTSLNEEYTKNKTEYEEAQDAIVKEIVNISSGYVEPMQTLNDVLAQLDAVVSFAHVSNGAPVPYVRPAILEKGQGRIILKASRHACVEVQDEIAFIPNDVYFEKDKQMFHIITGPNMGGKSTYIRQTGVIVLMAQIGCFVPCESAEVSIVDCILARVGAGDSQLKGVSTFMAEMLETASILRSATKDSLIIIDELGRGTSTYDGFGLAWAISEYIATKIGAFCMFATHFHELTALANQIPTVNNLHVTALTTEETLTMLYQVKKGVCDQSFGIHVAELANFPKHVIECAKQKALELEEFQYIGESQGYDIMEPAAKKCYLEREQGEKIIQEFLSKVKQMPFTEMSEENITIKLKQLKAEVIAKNNSFVNEIISRIKVTT

SEQ ID NO: 769068 - protein, 767 aa, Homo sapiens; identical to SEQ ID NO: 769067

SEQ ID NO: 769069 - protein, 757 aa, Homo sapiens
SIQRKLGLCEFPDNDQFSNLEALLIQIGPKECVLPGGETAGDMGKLRQIIQRGGILITERKKADFSTKDIYQDLNRLLKGKKGEQMNSAVLPEMENQVAVSSLSAVIKFLELLSDDSNFGQFELTTFDFSQYMKLDIAAVRALNLFQGSVEDTTGSQSLAALLNKCKTPQGQRLVNQWIKQPLMDKNRIEERLNLVEAFVEDAELRQTLQEDLLRRFPDLNRLAKKFQRQAANLQDCYRLYQGINQLPNVIQALEKHEGKHQKLLLAVFVTPLTDLRSDFSKFQEMIETTLDMDQVENHEFLVKPSFDPNLSELREIMNDLEKKMQSTLISAARDLGLDPGKQIKLDSSAQFGYYFRVTCKEEKVLRNNKNFSTVDIQKNGVKFTNSKLTSLNEEYTKNKTEYEEAQDAIVKEIVNISSGYVEPMQTLNDVLAQLDAVVSFAHVSNGAPVPYVRPAILEKGQGRIILKASRHACVEVQDEIAFIPNDVYFEKDKQMFHIITGPNMGGKSTYIRQTGVIVLMAQIGCFVPCESAEVSIVDCILARVGAGDSQLKGVSTFMAEMLETASILRSATKDSLIIIDELGRGTSTYDGFGLAWAISEYIATKIGAFCMFATHFHELTALANQIPTVNNLHVTALTTEETLTMLYQVKKGVCDQSFGIHVAELANFPKHVIECAKQKALELEEFQYIGESQGYDIMEPAAKKCYLERENLRVTEPKDQCLILLTWKRKLRGGKRSACSRPERQNQGSATPSASA

SEQ ID NO: 769070 - protein, 324 aa, Homo sapiens
SIQRKLGLCEFPDNDQFSNLEALLIQIGPKECVLPGGETAGDMGKLRQIIQRGGILITERKKADFSTKDIYQDLNRLLKGKKGEQMNSAVLPEMENQVAVSSLSAVIKFLELLSDDSNFGQFELTTFDFSQYMKLDIAAVRALNLFQGSVEDTTGSQSLAALLNKCKTPQGQRLVNQWIKQPLMDKNRIEERLNLVEAFVEDAELRQTLQEDLLRRFPDLNRLAKKFQRQAANLQDCYRLYQGINQLPNVIQALEKHEGKHQKLLLAVFVTPLTDLRSDFSKFQEMIETTLDMDQINGRQKYCSETSGSRMCFIPACLRMWSCL

SEQ ID NO: 769071 - protein, 298 aa, Homo sapiens
MGDHAWSFLKDFLAGGVAAAVSKTAVAPIERVKLLLQVQHASKQISAEKQYKGIIDCVVRIPKEQGFLSFWRGNLANVIRYFPTQALNFAFKDKYKQLFLGGVDRHKQFWRYFAGNLASGGAAGATSLCFVYPLDFARTRLAADVGKGAAQREFHGLGDCIIKIFKSDGLRGLYQGFNVSVQGIIIYRAAYFGVYDTAKGMLPDPKNVHIFVSWMIAQSVTAVAGLVSYPFDTVRRRMMMQSGRKGADIMYTGTVDCWRKIAKDEGAKAFFKGAWSNVLRGMGGAFVLVLYDEIKKYV

SEQ ID NO: 769072 - protein, 298 aa, Homo sapiens; identical to SEQ ID NO: 769071

SEQ ID NO: 769073 - protein, 298 aa, Homo sapiens; identical to SEQ ID NO: 769071

SEQ ID NO: 769074 - protein, 298 aa, Homo sapiens; identical to SEQ ID NO: 769071

SEQ ID NO: 769075 - protein, 305 aa, Homo sapiens
MPSLRNFLNDSSYQFSFIKPCYDAARSPLPDAGALTLDFSASRTVQHASKQISAEKQYKGIIDCVVRIPKEQGFLSFWRGNLANVIRYFPTQALNFAFKDKYKQLFLGGVDRHKQFWRYFAGNLASGGAAGATSLCFVYPLDFARTRLAADVGKGAAQREFHGLGDCIIKIFKSDGLRGLYQGFNVSVQGIIIYRAAYFGVYDTAKGMLPDPKNVHIFVSWMIAQSVTAVAGLVSYPFDTVRRRMMMQSGRKGADIMYTGTVDCWRKIAKDEGAKAFFKGAWSNVLRGMGGAFVLVLYDEIKKYV

SEQ ID NO: 769076 - protein, 260 aa, Homo sapiens
KEFRGMLDLQQQYKGIIDCVVRIPKEQGFLSFWRGNLANVIRYFPTQALNFAFKDKYKQLFLGGVDRHKQFWRYFAGNLASGGAAGATSLCFVYPLDFARTRLAADVGKGAAQREFHGLGDCIIKIFKSDGLRGLYQGFNVSVQGIIIYRAAYFGVYDTAKGMLPDPKNVHIFVSWMIAQSVTAVAGLVSYPFDTVRRRMMMQSGRKGADIMYTGTVDCWRKIAKDEGAKAFFKGAWSNVLRGMGGAFVLVLYDEIKKYV

SEQ ID NO: 769077 - protein, 298 aa, Homo sapiens; identical to SEQ ID NO: 769071

SEQ ID NO: 769078 - protein, 152 aa, Homo sapiens
MGDHAWSFLKDFLAGGVAAAVSKTAVAPIERVKLLLQVQHASKQISAEKQYKGIIDCVVRIPKEQGFLSFWRGNLANVIRYFPTQALNFAFKDKYKQLFLGGVDRHKQFWRYFAGNLASGGAAGATSLCFVYPLDFARTRLTVSSRSSSLMA

SEQ ID NO: 769079 - protein, 228 aa, Homo sapiens [sequence omitted]

SEQ ID NO: 769080 - protein, 208 aa, Homo sapiens
MGDHAWSFLKDFLAGGVAAAVSKTAVAPIERVKLLLQVQHASKQISAEKQYKGIIDCVVRIPKEQGFLSFWRGNLANVIRYFPTQALNFAFKDKYKQLFLGGVDRHKQFWRYFAGNLASGGAAGATSLCFVYPLDFARTRLAADVGKGAAQREFHGLGDCIIKIFKSDGLRGLYQGFNVSVQGIIIYRAAYFGVYDTAKVSGIIEASE

SEQ ID NO: 769081 - protein, 282 aa, Homo sapiens [sequence omitted]

SEQ ID NO: 769082 - protein, 228 aa, Homo sapiens [sequence omitted]

SEQ ID NO: 769083 - protein, 73 aa, Homo sapiens
VSGEKSLSSSVTEPSPAFVSTADIMYTGTVDCWRKIAKDEGAKAFFKGAWSNVLRGMGGAFVLVLYDEIKKYV

SEQ ID NO: 769084 - protein, 228 aa, Homo sapiens [sequence omitted]

SEQ ID NO: 769085 - protein, 252 aa, Homo sapiens
MGDHAWSFLKDFLAGGVAAAVSKTAVAPIERVKLLLQVQHASKQISAEKQYKGIIDCVVRIPKEQGFLSFWRGNLANVIRYFPTQALNFAFKDKYKQLFLGGVDRHKQFWRYFAGNLASGGAAGATSLCFVYPLDFARTRLAADVGKGAAQREFHGLGDCIIKIFKSDGLRGLYQGFNVSVQGIIIYRAAYFGVYDTAKGCCLTPRTCYKITTVFSHAQTVVLCVGCSTVLCQPTGGKARLTEGCSFRRKQH

SEQ ID NO: 769086 - protein, 40 aa, Homo sapiens
MMNETQYLLSNMLSSKGIRKAMLVSSYNSCHQRNKPTPGI

SEQ ID NO: 769087 - protein, 152 aa, Homo sapiens
TGFELSLPFVYLFVSCLRWSLALSPRLECSGVILAHCNLCLQGSSDSHASASQKTGITGAHHHTQLIFVFLVETVFHHVGQAHLKLLTSSDPPDSACQSAGITGVSHCTWPADLKKSMHCFTLKYKVDLIFYEISLVYASFRKKQIRAEFSL

SEQ ID NO: 769088 - protein, 257 aa, Homo sapiens
EPALCTLCACPSGRPSMRGPTVLLTVALPTLLAPRAGAPVQSQGSRNKLLLVSFDSFRWNYEQDVDTPNLDAMARDGVKARYMTPAFVTMTSPCHFTLVTGKYIENHGVVHNMYYNTTSKVKLPYHATLGIQRWWDNGSVPIWITAQRQGLRAGSFFYPGGNVTYQGVAVTRSRKEGIAHNYKNETEWRANIDTVMAWFTEEDLDLVTLYFGEPDSTGHRYGPESPERREMVRQVDRTVGYLRESIARNHLTDRSTD

SEQ ID NO: 769089 - protein, 75 aa, Homo sapiens
FLVHTGEKPFRCTFEGCGKRFSLDFNLRTHVRIHTGEKRFVCPFQGCNRRFIQSNNLKAHILTHANTNKNEQEGK

SEQ ID NO: 769090 - protein, 132 aa, Homo sapiens
MSNKFLGTWKLVSSENFDDYMKALGVGLATRKLGNLAKPTVIISKKGDIITIRTESTFKNTEISFKLGQEFEETTADNRKTKSIVTLQRGSLNQVQRWDGKETTIKRKLVNGKMVAECKMKGVVCTRIYEKV

SEQ ID NO: 769091 - protein, 132 aa, Homo sapiens; identical to SEQ ID NO: 769090

SEQ ID NO: 769092 - protein, 456 aa, Homo sapiens
MQRGTPDPSLPWGEGCGTQRGRGRGHWPRGGRRCCHSRYCPPWDPSLEPPILWLLPVATQLSGGHMHIPCSFPAHLPCPVAFLVPATETGELLQGEAAFWLLVYLDTDRPLVSRGAPCSPHGQQDTQDRPPPRSTWALGAAAFRMPPVPGRLVFSFCPEDERGSAVARARGRGSRSPLCGRYMSQSKHTEARELMYSGALLFFSHGQQNSAADLSMLVLESLEKAEVEVADELLENLAKVFSLMDPNSPERVTFVSRALKWSSGGSGKLGHPRLHQLLALTLWKEQNYCESRYHFLHSADGEGCANMLVEYSTSRGFRSEVDMFVAQAVLQFLCLKNKSSASVVFTTYTQKHPSIEDGPPFVEPLLNFIWFLLLAVDGGKLTVFTVLCEQYQPSLRRDPMYNEYLDRIGQLFFGVPPKQTSSYGGLLGNLLTSLMGSSEQEDGEESPSDGSPIELD

SEQ ID NO: 769093 - protein, 128 aa, Homo sapiens
EQEDGEESPSDGSPIELEPSDQPHGLLRAGGWGGEPQRRQPHRAGLNWPGHVETPRSTTAGGTFQRRVLGGSSPWGLLALRLAVAACRRVSVSVRRLRVARLLLTVLLGPKSGASPLLAAASPEIDPQ

SEQ ID NO: 769094 - protein, 103 aa, Homo sapiens
MRFCPWPHWRHREARRVWELVFPECPVPDGSRPPLSQSCPCRTGTRTAGHRVSGPVEAPAVVLGYMSQSKHTEARELMYSGALLFFSHGQKTVQQTTDDTTWY

SEQ ID NO: 769095 - protein, 359 aa, Homo sapiens
AEKGVGRPSGRKPGGAADRACDSVSPARSAGPMAAAAAMAEQESARNGGRNRGGVQRVEGKLRASVEKGDYYEAHQMYRTLFFRYMSQSKHTEARELMYSGALLFFSHGQQNSAADLSMLVLESLEKAEVEVADELLENLAKVFSLMDPNSPERVTFVSRALKWSSGGSGKLGHPRLHQLLALTLWKEQNYCESRYHFLHSADGEGCANMLVEYSTSRGFRSEVDMFVAQAVLQFLCLKNKSSASVVFTTYTQKHPSIEDGPPFVEPLLNFIWFLLLAVDGGKLTVFTVLCEQYQPSLRRDPMYNEYLDRIGQLFFGVPPKQTSSYGGLLGNLLTSLMGSSEQEDGEESPSDGSPIELD

SEQ ID NO: 769096 - protein, 359 aa, Homo sapiens; identical to SEQ ID NO: 769095

SEQ ID NO: 769097 - protein, 359 aa, Homo sapiens; identical to SEQ ID NO: 769095

SEQ ID NO: 769098 - protein, 359 aa, Homo sapiens; identical to SEQ ID NO: 769095

SEQ ID NO: 769099 - protein, 283 aa, Homo sapiens
MYRTLFFRYMSQSKHTEARELMYSGALLFFSHGQQNSAADLSMLVLESLEKAEVEVADELLENLAKVFSLMDPNSPERVTFVSRALKWSSGGSGKLGHPRLHQLLALTLWKEQNYCESRYHFLHSADGEGCANMLVEYSTSRGFRSEVDMFVAQAVLQFLCLKNKSSASVVFTTYTQKHPSIEDGPPFVEPLLNFIWFLLLAVDGGKLTVFTVLCEQYQPSLRRDPMYNEYLDRIGQLFFGVPPKQTSSYGGLLGNLLTSLMGSSEQEDGEESPSDGSPIELD

SEQ ID NO: 769100 - protein, 313 aa, Homo sapiens
  misc_feature (5)..(5): Xaa can be any naturally occurring amino acid
  misc_feature (8)..(8): Xaa can be any naturally occurring amino acid
  misc_feature (12)..(12): Xaa can be any naturally occurring amino acid
ASRKXRAXLERXGGQAARQSEKGDYYEAHQMYRTLFFRYMSQSKHTEARELMYSGALLFFSHGQQNSAADLSMLVLESLEKAEVEVADELLENLAKVFSLMDPNSPERVTFVSRALKWSSGGSGKLGHPRLHQLLALTLWKEQNYCESRYHFLHSADGEGCANMLVEYSTSRGFRSEVDMFVAQAVLQFLCLKNKSSASVVFTTYTQKHPSIEDGPPFVEPLLNFIWFLLLAVDGGKLTVFTVLCEQYQPSLRRDPMYNEYLDRIGQLFFGVPPKQTSSYGGLLGNLLTSLMGSSEQEDGEESPSDGSPIELD

SEQ ID NO: 769101 - protein, 338 aa, Homo sapiens
AEKGVGRPSGRKPGGAADRACDSVSPARSAGPMAAAAAMAEQESARNGGRNRGGVQRVEGKLRASVEKGDYYEAHQMYRTLFFRYMSQSKHTEARELMYSGALLFFSHGQQNSAADLSMLVLESLEKAEVEVADELLENLAKVFSLMDPNSPERVTFVSRALKWSSGGSGKLGHPRLHQLLALTLWKEQNYCESRYHFLHSADGEGCANMLVEYSTSRGFRSEVDMFVAQAVLQFLCLKNKSSASVVFTTYTQKHPSIEDGPPFVEPLLNFIWFLLLAVDGGKLTVFTVLCEQYQPSLRRDPMYNEVRAWGWGGRRGPHGLGPPPLSPLPVPCSTSTA

SEQ ID NO: 769102 - protein, 339 aa, Homo sapiens
MRFCPWPHWRHREARRVWELVFPECPVPDGSRPPLSQSCPCRTGTRTAGHRVSGPVEAPAVVLGYMSQSKHTEARELMYSGALLFFSHGQQNSAADLSMLVLESLEKAEVEVADELLENLAKVFSLMDPNSPERVTFVSRALKWSSGGSGKLGHPRLHQLLALTLWKEQNYCESRYHFLHSADGEGCANMLVEYSTSRGFRSEVDMFVAQAVLQFLCLKNKSSASVVFTTYTQKHPSIEDGPPFVEPLLNFIWFLLLAVDGGKLTVFTVLCEQYQPSLRRDPMYNEYLDRIGQLFFGVPPKQTSSYGGLLGNLLTSLMGSSEQEDGEESPSDGSPIELD

SEQ ID NO: 769103 - protein, 220 aa, Homo sapiens
AEKGVGRPSGRKPGGAADRACDSVSPARSAGPMAAAAAMAEQESARNGGRNRGGVQRVEGKLRASVEKGDYYEAHQMYRTLFFRYMSQSKHTEARELMYSGALLFFSHGQQNSAADLSMLVLESLEKAEVEVADELLENLAKVFSLMDPNSPERVTFVSRALKWSSGGSGKLGHPRLHQLLALTLWKDAGGVFHVPRLPQRGGHVRGPGRATVSLFKKQK

SEQ ID NO: 769104 - protein, 140 aa, Homo sapiens
MCLAVPRPHRTAVLRRPAQADVFLRGPAREPSDQPHGLLRAGGWGGEPQRRQPHRAGLNWPGHVETPRSTTAGGTFQRRVLGGSSPWGLLALRLAVAACRRVSVSVRRLRVARLLLTVLLGPKSGASPLLAAASPEIDPQ

SEQ ID NO: 769105 - protein, 285 aa, Homo sapiens
RRRASGGRRDGSREALPTAPATASARGGVQRVEGKLRASVEKGDYYEAHQMYRTLFFRYMSQSKHTEARELMYSGALLFFSHGQQNSAADLSMLVLESLEKAEVEVADELLENLAKVFSLMDPNSPERVTFVSRALKWSSGGSGKLGHPRLHQLLALTLWKEQNYCESRYHFLHSADGEGCANMLVEYSTSRGFRSEVDMFVAQAVLQFLCLKNKSSASVVFTTYTQKHPSIEDGPPFVEPLLNFIWFLLLAVDGVARLLLTVLLGPKSGASPLLAAASPEIDPQ

SEQ ID NO: 769106 - protein, 240 aa, Homo sapiens
AEKGVGRPSGRKPGGAADRACDSVSPARSAGPMAAAAAMAEQESARNGGRNRGGVQRVEGKLRASVEKGDYYEAHQMYRTLFFRYMSQSKHTEARELMYSGALLFFSHGQQNSAADLSMLVLESLEKAEVEVADELLENLAKVFSLMGRRAPATAAPSSWTELARPRGDTTVDDGWRDVSEASPGWLLALGAPGPEAGGGRMPARVCFCAAAQGGAAAAHCAAGTQEWGVAPAGRRVPRD

SEQ ID NO: 769107 - protein, 107 aa, Homo sapiens
GEPHPPALRSPWRMGRRAPATAAPSSWTELARPRGDTTVDDGWRDVSEASPGWLLALGAPGPEAGGGRMPARVCFCAAAQGGAAAAHCAAGTQEWGVAPAGRRVPRD

SEQ ID NO: 769108 - protein, 79 aa, Homo sapiens
ERIVSSLQVGAGGTFQRRVLGGSSPWGLLALRLAVAACRRVSVSVRRLRVARLLLTVLLGPKSGASPLLAAASPEIDPQ

SEQ ID NO: 769109 - protein, 311 aa, Homo sapiens
AEKGVGRPSGRKPGGAADRACDSVSPARSAGPMAAAAAMAEQESARNGGRNRGGVQRVEGKLRASVEKGDYYEAHQMYRTLFFRYMSQSKHTEARELMYSGALLFFSHGQQNSAADLSMLVLESLEKAEVEVADELLENLAKVFSLMDPNSPERVTFVSRALKWSSGGSGKLGHPRLHQLLALTLWKEQNYCESRYHFLHSADGEGCANMLVEYSTSRGFRSEVDMFVAQAVLQFLCLKNKSSASVVFTTYTQKHPSIEDGPPFVEPLLNFIWFLLLAVDGVARLLLTVLLGPKSGASPLLAAASPEIDPQ

SEQ ID NO: 769110 - protein, 359 aa, Homo sapiens; identical to SEQ ID NO: 769095

SEQ ID NO: 769111 - protein, 338 aa, Homo sapiens; identical to SEQ ID NO: 769101

SEQ ID NO: 769112 - protein, 337 aa, Homo sapiens
MQRGTPDPSLPWGEGCGTQRGRGRGHWPRGGRRCCHSRYCPPWDPSLEPPILWLLPVATQLSGGHMHIPCSFPAHLPCPVAFLVPATETGELLQGEAAFWLLVYLDTDRPLVSRGAPCSPHGQQDTQDRPPPRSTWALGAAAFRMPPVPGRLVFSFCPEDERGSAVARARGRGSRSPLCGRYMSQSKHTEARELMYSGALLFFSHGQQNSAADLSMLVLESLEKAEVEVADELLENLAKVFSLMGRRAPATAAPSSWTELARPRGDTTVDDGWRDVSEASPGWLLALGAPGPEAGGGRMPARVCFCAAAQGGAAAAHCAAGTQEWGVAPAGRRVPRD

SEQ ID NO: 769113 - protein, 324 aa, Homo sapiens
AEKGVGRPSGRKPGGAADRACDSVSPARSAGPMAAAAAMAEQESARNGGRNRGGVQRVEGKLRASVEKGDYYEAHQMYRTLFFRYMSQSKHTEARELMYSGALLFFSHGQQNSAADLSMLVLESLEKAEVEVADELLENLAKVFSLMDPNSPERVTFVSRALKWSSGGSGKLGHPRLHQLLALTLWKEQNYCESRYHFLHSADGEGCANMLVEYSTSRGFRSEVDMFVAQAVLQFLCLKNKSSASVVFTTYTQKHPSIEDGPPFVEPLLNFIWFLLLAVDGVRLGILQGEGAVNVRVVCRRGVDSCVGVCASVAMVWVAVWVYA

SEQ ID NO: 769114 - protein, 655 aa, Homo sapiens
MAEAPQVVEIDPDFEPLPRPRSCTWPLPRPEFSQSNSATSSPAPSGSAAANPDAAAGLPSASAAAVSADFMSNLSLLEESEDFPQAPGSVAAAVAAAAAAAATGGLCGDFQGPEAGCLHPAPPQPPPPGPLSQHPPVPPAAAGPLAGQPRKSSSSRRNAWGNLSYADLITKAIESSAEKRLTLSQIYEWMVKSVPYFKDKGDSNSSAGWKNSIRHNLSLHSKFIRVQNEGTGKSSWWMLNPEGGKSGKSPRRRAASMDNNSKFAKSRSRAAKKKASLQSGQEGAGDSPGSQFSKWPASPGSHSNDDFDNWSTFRPRTSSNASTISGRLSPIMTEQDDLGEGDVHSMVYPPSAAKMASTLPSLSEISNPENMENLLDNLNLLSSPTSLTVSTQSSPGTMMQQTPCYSFAPPNTSLNSPSPNYQKYTYGQSSMSPLPQMPIQTLQDNKSSYGGMSQYNCAPGLLKELLTSDSPPHNDIMTPVDPGVAQPNSRVLGQNVMMGPNSVMSTYGSQASHNKMMNPSSHTHPGHAQQTSAVNGRPLPHTVSTMPHTSGMNRLTQVKTPVQVPLPHPMQMSALGGYSSVSSCNGYGRMGLLHQEKLPSDLDGMFIERLDCDMESIIRNDLMDGDTLDFNFDNVLPNQSFPHSVKTTTHSWVSG

SEQ ID NO: 769115 - protein, 655 aa, Homo sapiens; identical to SEQ ID NO: 769114

SEQ ID NO: 769116 - protein, 655 aa, Homo sapiens; identical to SEQ ID NO: 769114

SEQ ID NO: 769117 - protein, 655 aa, Homo sapiens; identical to SEQ ID NO: 769114

SEQ ID NO: 769118 - protein, 680 aa, Homo sapiens
MAEAPQVVEIDPDFEPLPRPRSCTWPLPRPEFSQSNSATSSPAPSGSAAANPDAAAGLPSASAAAVSADFMSNLSLLEESEDFPQAPGSVAAAVAAAAAAAATGGLCGDFQGPEAGCLHPAPPQPPPPGPLSQHPPVPPAAAGPLAGQPRKSSSSRRNAWGNLSYADLITKAIESSAEKRLTLSQIYEWMVKSVPYFKDKGDSNSSAGWKPGSGVSAETWRDHLLAPFTIYLQLWNSIRHNLSLHSKFIRVQNEGTGKSSWWMLNPEGGKSGKSPRRRAASMDNNSKFAKSRSRAAKKKASLQSGQEGAGDSPGSQFSKWPASPGSHSNDDFDNWSTFRPRTSSNASTISGRLSPIMTEQDDLGEGDVHSMVYPPSAAKMASTLPSLSEISNPENMENLLDNLNLLSSPTSLTVSTQSSPGTMMQQTPCYSFAPPNTSLNSPSPNYQKYTYGQSSMSPLPQMPIQTLQDNKSSYGGMSQYNCAPGLLKELLTSDSPPHNDIMTPVDPGVAQPNSRVLGQNVMMGPNSVMSTYGSQASHNKMMNPSSHTHPGHAQQTSAVNGRPLPHTVSTMPHTSGMNRLTQVKTPVQVPLPHPMQMSALGGYSSVSSCNGYGRMGLLHQEKLPSDLDGMFIERLDCDMESIIRNDLMDGDTLDFNFDNVLPNQSFPHSVKTTTHSWVSG

SEQ ID NO: 769119 - protein, 689 aa, Homo sapiens
MAEAPQVVEIDPDFEPLPRPRSCTWPLPRPEFSQSNSATSSPAPSGSAAANPDAAAGLPSASAAAVSADFMSNLSLLEESEDFPQAPGSVAAAVAAAAAAAATGGLCGDFQGPEAGCLHPAPPQPPPPGPLSQHPPVPPAAAGPLAGQPRKSSSSRRNAWGNLSYADLITKAIESSAEKRLTLSQIYEWMVKSVPYFKDKGDSNSSAGWKEGNGLGHKNCLFDLLRNCQTAEKWLHHFTFLPCKNSIRHNLSLHSKFIRVQNEGTGKSSWWMLNPEGGKSGKSPRRRAASMDNNSKFAKSRSRAAKKKASLQSGQEGAGDSPGSQFSKWPASPGSHSNDDFDNWSTFRPRTSSNASTISGRLSPIMTEQDDLGEGDVHSMVYPPSAAKMASTLPSLSEISNPENMENLLDNLNLLSSPTSLTVSTQSSPGTMMQQTPCYSFAPPNTSLNSPSPNYQKYTYGQSSMSPLPQMPIQTLQDNKSSYGGMSQYNCAPGLLKELLTSDSPPHNDIMTPVDPGVAQPNSRVLGQNVMMGPNSVMSTYGSQASHNKMMNPSSHTHPGHAQQTSAVNGRPLPHTVSTMPHTSGMNRLTQVKTPVQVPLPHPMQMSALGGYSSVSSCNGYGRMGLLHQEKLPSDLDGMFIERLDCDMESIIRNDLMDGDTLDFNFDNVLPNQSFPHSVKTTTHSWVSG

SEQ ID NO: 769120 - protein, 562 aa, Homo sapiens
MAEAPQVVEIDPDFEPLPRPRSCTWPLPRPEFSQSNSATSSPAPSGSAAANPDAAAGLPSASAAAVSADFMSNLSLLEESEDFPQAPGSVAAAVAAAAAAAATGGLCGDFQGPEAGCNSIRHNLSLHSKFIRVQNEGTGKSSWWMLNPEGGKSGKSPRRRAASMDNNSKFAKSRSRAAKKKASLQSGQEGAGDSPGSQFSKWPASPGSHSNDDFDNWSTFRPRTSSNASTISGRLSPIMTEQDDLGEGDVHSMVYPPSAAKMASTLPSLSEISNPENMENLLDNLNLLSSPTSLTVSTQSSPGTMMQQTPCYSFAPPNTSLNSPSPNYQKYTYGQSSMSPLPQMPIQTLQDNKSSYGGMSQYNCAPGLLKELLTSDSPPHNDIMTPVDPGVAQPNSRVLGQNVMMGPNSVMSTYGSQASHNKMMNPSSHTHPGHAQQTSAVNGRPLPHTVSTMPHTSGMNRLTQVKTPVQVPLPHPMQMSALGGYSSVSSCNGYGRMGLLHQEKLPSDLDGMFIERLDCDMESIIRNDLMDGDTLDFNFDNVLPNQSFPHSVKTTTHSWVSG

SEQ ID NO: 769121 - protein, 324 aa, Homo sapiens [sequence omitted]

SEQ ID NO: 769122 - protein, 324 aa, Homo sapiens [sequence omitted]

SEQ ID NO: 769123 - protein, 324 aa, Homo sapiens [sequence omitted]

SEQ ID NO: 769124 - protein, 324 aa, Homo sapiens [sequence omitted]

SEQ ID NO: 769125 - protein, 324 aa, Homo sapiens [sequence omitted]

SEQ ID NO: 769126 - protein, 324 aa, Homo sapiens [sequence omitted]

SEQ ID NO: 769127 - protein, 168 aa, Homo sapiens
MRSIRKRWTICTISLLLIFYKTKEIARTEEHQETQLIGDGELSLSRSLVNSSDKIIRKAGSSIFQHNVEGWKINSSLVLEIRKNILRFLDAERDVSVVKSSFKPGDVIHYVLDRRRTLNISHDLHSLLPEVSPMKNRRFKTCAVVGNSGILLDSECGKEIDSHNFVIR

SEQ ID NO: 769128 - protein, 266 aa, Homo sapiens
MRSIRKRWTICTISLLLIFYKTKEIARTEEHQETQLIGDGELSLSRSLVNSSDKIIRKAGSSIFQHNVEGWKINSSLVLEIRKNILRFLDAERDVSVVKSSFKPGDVIHYVLDRRRTLNISHDLHSLLPEVSPMKNRRFKTCAVVGNSGILLDSECGKEIDSHNFVIRCNLAPVVEFAADVGTKSDFITMNPSVVQRAFGGFRNESDREKFVHRLSMLNDSVLWIPAFMVKGGEKHVEWVNALILKNKLKVRTAYPSLRLIHAVRG

SEQ ID NO: 769129 - protein, 180 aa, Homo sapiens
MRSIRKRWTICTISLLLIFYKTKEIARTEEHQETQLIGDGELSLSRSLVNSSDKIIRKAGSSIFQHNVEGWKINSSLVLEIRCNLAPVVEFAADVGTKSDFITMNPSVVQRAFGGFRNESDREKFVHRLSMLNDSVLWIPAFMVKGGEKHVEWVNALILKNKLKVRTAYPSLRLIHAVRG

SEQ ID NO: 769130 - protein, 359 aa, Homo sapiens
MRSIRKRWTICTISLLLIFYKTKEIARTEEHQETQLIGDGELSLSRSLVNSSDKIIRKAGSSIFQHNVEGWKINSSLVLEIRKNILRFLDAERDVSVVKSSFKPGDVIHYVLDRRRTLNISHDLHSLLPEVSPMKNRRFKTCAVVGNSGILLDSECGKEIDSHNFVIRCNLAPVVEFAADVGTKSDFITMNPSVVQRAFGGFRNESDREKFVHRLSMLNDSVLWIPAFMVKGGEKHVEWVNALILKNKLKVRTAYPSLRLIHAVRGYWLTNKVPIKRPSTGLLMYTLATRFCDEIHLYGFWPFPKDLNGKAVKYHYYDDLKYRYFSNASPHRMPLEFKTLNVLHNRGALKLTTGKCVKQ

SEQ ID NO: 769131 - protein, 133 aa, Homo sapiens
MHKVSHLKRNLSPRRRRGATLAELAQTGREVAGQRSRTRGSSATEDPSDLIPGSRLQALLAFYRFHPRDYLPKTEPLYQEKVRELGQPGLSRAPKMRSIRKRWTICTISLLLIFYKTKEIARTEEHQETQLIG

SEQ ID NO: 769132 - protein, 155 aa, Homo sapiens
RKGRQSNWNPQHLLILQAQFASSLFQTSEGKYLLSDLGPQERMQISKFTGLSMTTISHWLANVKYQLRKTGGTKFLKNMDKGHPIFYCSDCASQFRTPSTYISHLESHLGFQMKDMTRLSVDQQSKVEQEISRVSSAQRSPETIAAEEDTDSKFK

SEQ ID NO: 769133 - protein, 194 aa, Homo sapiens
RKGRQSNWNPQHLLILQAQFASSLFQTSEGKYLLSDLGPQERMQISKFTGLSMTTISHWLANVKYQLRKTGGTKFLKNMDKGHPIFYCSDCASQFRTPSTYISHLESHLGFQMKDMTRLSVDQQSKVEQEISRVSSAQRSPETIAAEEDTDSKFKCKLCCRTFVSKHAVKLHLSKTHSKSPEHHSQFVTDVDEE

SEQ ID NO: 769134 - protein, 234 aa, Homo sapiens
MHIPKSLQELANSEAVQFLRRPKTITRVFEGVFSLIVFSSLLTDGYQNKMESPQLHCILNSNSVACSFAVGAGFLAFLSCLAFLVLDTQETRIAGTRFKTAFQLLDFILAVLWAVVWFMGFCFLANQWQHSPPKEFLLGSSSAQAAIAFTFFSILVWIFQAYLAFQDLRNDAPVPYKRFLDEGGMVLTTLPLPSANSPVNMPTTGPNSLSYASSALSPCLTAPKSPRLAMMPDN

SEQ ID NO: 769135 - protein, 145 aa, Homo sapiens
SCIWFVDGGGLIKYQTTDSNVLLNRRRLFMGFCFLANQWQHSPPKEFLLGSSSAQAAIAFTFFSILVWIFQAYLAFQDLRNDAPVPYKRFLDEGGMVLTTLPLPSANSPVNMPTTGPNSLSYASSALSPCLTAPKSPRLAMMPDN

SEQ ID NO: 769136 - protein, 458 aa, Homo sapiens
MVNLRNAVHSFLVHLIGLLVWQCDISVSPVAAIVTDIFNTSDGGRFKFPDGVQNWPALSIVIIIIMTIGGNILVIMAVSMEKKLHNATNYFLMSLAIADMLVGLLVMPLSLLAILYDYVWPLPRYLCPVWISLDVLFSTASIMHLCAISLDRYVAIRNPIEHSRFNSRTKAIMKIAIVWAISIGVSVPIPVIGLRDEEKVFVNNTTCVLNDPNFVLIGSFVAFFIPLTIMVITYCLTIYVLRRQALMLLHGHTEEPPGLSLDFLKCCKRNTAEEENSANPNQDQNARRRKKKERRPRGTMQAINNERKASKVLGIVFFVFLIMWCPFFITNILSVLCEKSCNQKLMEKLLNVFVWIGYVCSGINPLVYTLFNKIYRRAFSNYLRCNYKVEKKPPVRQIPRVAATALSGRELNVNIYRHTNEPVIEKASDNEPGIEMQVENLELPVNPSSVVSERISSV

SEQ ID NO: 769137 - protein, 458 aa, Homo sapiens; identical to SEQ ID NO: 769136

SEQ ID NO: 769138 - protein, 458 aa, Homo sapiens; identical to SEQ ID NO: 769136

SEQ ID NO: 769139 - protein, 258 aa, Homo sapiens
MKMLKADLIASSDIEEFLRKAACMKEFDHPHVAKLVGVKPLSLWSRAKGCHPIPVVILPFMKHGDLHAFLLTSWLGENPFTLIRFMVDIACSMEYLSSRNFIHRDLAARNCMLAGDMTVCVADFGLSWKIYSGATIVRAVPPNVPVKWLALESLADNLYTVHSDVWAFGVTMWEIMTRGQTPYAGIENTEIYNYLIGGNHLKQLPECMEDVLTLPLHPSQGLLRPSDDLLYDLMYQCWSADPKQRPSFTCLRMELENI

SEQ ID NO: 769140 - protein, 366 aa, Homo sapiens
MSEEEQGSGTTTGCGLPSIEQMLAANPGKTPISLLQEYGTRIGKTPVYDLLKAEGQAHQPNFTFRVTVGDTSCTGQGPSKKAAKHKAAEVALKHLKGGSMLEPALEDSSSFSPLDSSLPEDIPVFTAAAAATPVPSVVLTRSPPMELQPPVSPQQSECNPVGALQELVVQKGWRLPEYTVTQESGPAHRKEFTMTCRVERFIEIGSGTSKKLAKRNAAAKMLLRVHTVPLDARDGNEVEPDDDHFSIGVGSRLDGLRNRGPGCTWDSLRNSVGEKILSLRSCSLGSLGALGPACCRVLSELSEEQAFHVSYLDIEELSLSGLCQCLVELSTQPATVCHGSATTREAARGEAARRALQYLKIMAGSK

SEQ ID NO: 769141 - protein, 345 aa, Homo sapiens
MLAANPGKTPISLLQEYGTRIGKTPVYDLLKAEGQAHQPNFTFRVTVGDTSCTGQGPSKKAAKHKAAEVALKHLKGGSMLEPALEDSSSFSPLDSSLPEDIPVFTAAAAATPVPSVVLTRSPPMELQPPVSPQQSECNPVGALQELVVQKGWRLPEYTVTQESGPAHRKEFTMTCRVERFIEIGSGTSKKLAKRNAAAKMLLRVHTVPLDARDGNEVEPDDDHFSIGVGSRLDGLRNRGPGCTWDSLRNSVGEKILSLRSCSLGSLGALGPACCRVLSELSEEQAFHVSYLDIEELSLSGLCQCLVELSTQPATVCHGSATTREAARGEAARRALQYLKIMAGSK

SEQ ID NO: 769142 - protein, 366 aa, Homo sapiens; identical to SEQ ID NO: 769140

SEQ ID NO: 769143 - protein, 222 aa, Homo sapiens
MELQPPVSPQQSECNPVGALQELVVQKGWRLPEYTVTQESGPAHRKEFTMTCRVERFIEIGSGTSKKLAKRNAAAKMLLRVHTVPLDARDGNEVEPDDDHFSIGVGSRLDGLRNRGPGCTWDSLRNSVGEKILSLRSCSLGSLGALGPACCRVLSELSEEQAFHVSYLDIEELSLSGLCQCLVELSTQPATVCHGSATTREAARGEAARRALQYLKIMAGSK

SEQ ID NO: 769144 - protein, 394 aa, Homo sapiens
MSEEEQGSGTTTGCGLPSIEQMLAANPGKTPISLLQEYGTRIGKTPVYDLLKAEGQAHQPNFTFRVTVGDTSCTGQGPSKKAAKHKAAEVALKHLKGGSMLEPALEDSSVREEPRHPRSPSRNPGPAPPTLPRGLASSFSPLDSSLPEDIPVFTAAAAATPVPSVVLTRSPPMELQPPVSPQQSECNPVGALQELVVQKGWRLPEYTVTQESGPAHRKEFTMTCRVERFIEIGSGTSKKLAKRNAAAKMLLRVHTVPLDARDGNEVEPDDDHFSIGVGSRLDGLRNRGPGCTWDSLRNSVGEKILSLRSCSLGSLGALGPACCRVLSELSEEQAFHVSYLDIEELSLSGLCQCLVELSTQPATVCHGSATTREAARGEAARRALQYLKIMAGSK

SEQ ID NO: 769145 - protein, 351 aa, Homo sapiens
MSEEEQGSGTTTGCGLPSLLQEYGTRIGKTPVYDLLKAEGQAHQPNFTFRVTVGDTSCTGQGPSKKAAKHKAAEVALKHLKGGSMLEPALEDSSSFSPLDSSLPEDIPVFTAAAAATPVPSVVLTRSPPMELQPPVSPQQSECNPVGALQELVVQKGWRLPEYTVTQESGPAHRKEFTMTCRVERFIEIGSGTSKKLAKRNAAAKMLLRVHTVPLDARDGNEVEPDDDHFSIGVGSRLDGLRNRGPGCTWDSLRNSVGEKILSLRSCSLGSLGALGPACCRVLSELSEEQAFHVSYLDIEELSLSGLCQCLVELSTQPATVCHGSATTREAARGEAARRALQYLKIMAGSK

SEQ ID NO: 769146 - protein, 345 aa, Homo sapiens; identical to SEQ ID NO: 769141

SEQ ID NO: 769147 - protein, 366 aa, Homo sapiens; identical to SEQ ID NO: 769140

SEQ ID NO: 769148 - protein, 374 aa, Homo sapiens
MLAANPGKTPISLLQEYGTRIGKTPVYDLLKAEGQAHQPNFTFRVTVGDTSCTGQGPSKKAAKHKAAEVALKHLKGGSMLEPALEDSSSFSPLDSSLPEDIPVFTAAAAATPVPSVVLTRSPPMELQPPVSPQQSECNPVGALQSLRLLRGDQRGCEKPFFTQPHAPCVSLSKELVVQKGWRLPEYTVTQESGPAHRKEFTMTCRVERFIEIGSGTSKKLAKRNAAAKMLLRVHTVPLDARDGNEVEPDDDHFSIGVGSRLDGLRNRGPGCTWDSLRNSVGEKILSLRSCSLGSLGALGPACCRVLSELSEEQAFHVSYLDIEELSLSGLCQCLVELSTQPATVCHGSATTREAARGEAARRALQYLKIMAGSK

SEQ ID NO: 769149 - protein, 328 aa, Homo sapiens
MSEEEQGSGTTTGCGLPSIEQMLAANPGKTPISLLQEYGTRIGKTPVYDLLKAEGQAHQPNFTFRVTVGDTSCTGQGPSKKAAKHKAAEVALKHLKGGSMLEPALEDSSSFSPLDSSLPEDIPVFTAAAAATPVPSVVLTRSPPMELQPPVSPQQSECNPVGALQELVVQKGWRLPEYTVTQESGPAHRKEFTMTCRVERFIEIGSGTSKKLAKRNAAAKMLLRVHTVPLDARDGNEVEPDDDHFSIGVGSRLDGLRNRGPGCTWDSLRNSVGEKILSLRSCSLGSLGALGPACCRVSLLFLPLGSCICAALVPSVGAISTSDTDCLP

SEQ ID NO: 769150 - protein, 268 aa, Homo sapiens
MSEEEQGSGTTTGCGLPSIEQMLAANPGKTPISLLQEYGTRIGKTPVYDLLKAEGQAHQPNFTFRVTVGDTSCTGQGPSKKAAKHKAAEVALKHLKGGSMLEPALEDSSSFSPLDSSLPEDIPVFTAAAAATPVPSVVLTRSPPMELQPPVSPQQSECNPVGALQELVVQKGWRLPEYTVTQESGPAHRKEFTMTCRVERFIEIGSGTSKKLAKRNAAAKMLLQVKPQLDSWMCTLCSLLFLPLGSCICAALVPSVGAISTSDTDCLP

SEQ ID NO: 769151 - protein, 109 aa, Homo sapiens
MSEEEQGSGTTTGCGLPSIEQMLAANPGKTPISLLQEYGTRIGKTPVYDLLKAEGQAHQPNFTFRVTVGDTSCTGQGPSKKAAKHKAAEVALKHLKGGSMLEPALEDSR

SEQ ID NO: 769152 - protein, 222 aa, Homo sapiens; identical to SEQ ID NO: 769143

SEQ ID NO: 769153 - protein, 256 aa, Homo sapiens
MSEEEQGSGTTTGCGLPSIEQMLAANPGKTPISLLQEYGTRIGKTPVYDLLKAEGQAHQPNFTFRVTVGDTSCTGQGPSKKAAKHKAAEVALKHLKGGSMLEPALEDSSSFSPLDSSLPEDIPVFTAAAAATPVPSVVLTRSPPMELQPPVSPQQSECNPVGALQELVVQKGWRLPEYTVTQESGPAHRKEFTMTCRVERFIEIGCGLPPGWSSKPGPRLHLGFSTKFSRREDPVPPQLLPGLPGCPGPCLLPCPQ

SEQ ID NO: 769154 - protein, 222 aa, Homo sapiens; identical to SEQ ID NO: 769143

SEQ ID NO: 769155 - protein, 222 aa, Homo sapiens; identical to SEQ ID NO: 769143

SEQ ID NO: 769156 - protein, 221 aa, Homo sapiens
  misc_feature (4)..(4): Xaa can be any naturally occurring amino acid
  misc_feature (15)..(17): Xaa can be any naturally occurring amino acid
MDAXPSPLSILMQPXXXLQGELVVQKGWRLPEYTVTQESGPAHRKEFTMTCRVERFIEIGSGTSKKLAKRNAAAKMLLRVHTVPLDARDGNEVEPDDDHFSIGVGSRLDGLRNRGPGCTWDSLRNSVGEKILSLRSCSLGSLGALGPACCRVLSELSEEQAFHVSYLDIEELSLSGLCQCLVELSTQPATVCHGSATTREAARGEAARRALQYLKIMAGSK

SEQ ID NO: 769157 - protein, 176 aa, Homo sapiens
FSPWPVQESRSVKMGRGLFQKLAERDRGAKIVALGDPGAFDGREGMRGDPDVTPSPIGVGSRLDGLRNRGPGCTWDSLRNSVGEKILSLRSCSLGSLGALGPACCRVLSELSEEQAFHVSYLDIEELSLSGLCQCLVELSTQPATVCHGSATTREAARGEAARRALQYLKIMAGSK

SEQ ID NO: 769158 - protein, 357 aa, Homo sapiens
MSEEEQGSGTTTGCGLPSIEQMLAANPGKTPISLLQEYGTRIGKTPVYDLLKAEGQAHQPNFTFRVTVGDTSCTGQGPSKKAAKHKAAEVALKHLKGGSMLEPALEDSSSFSPLDSSLPEDIPVFTAAAAATPVPSVVLTRSPPMELQPPVSPQQSECNPVGALQSLRLLRGDQRGCEKPFFTQPHAPCVSLSKELVVQKGWRLPEYTVTQESGPAHRKEFTMTCRVERFIEIGSGTSKKLAKRNAAAKMLLRVHTVPLDARDGNEVEPDDDHFSIGVGSRLDGLRNRGPGCTWDSLRNSVGEKILSLRSCSLGSLGALGPACCRVSLLFLPLGSCICAALVPSVGAISTSDTDCLP

SEQ ID NO: 769159 - protein, 114 aa, Homo sapiens
ILSCLVDVPWRTDRLNKQRVCKEAQSRREGSPAWLLVSTVTGWLCLSWLHCPEAGNMRKTSKGKTSPVGAMITLSARPGRGPKEMGSKSRDEKSKFLVSPWNSFPMPSFFVLLL

SEQ ID NO: 769160 - protein, 105 aa, Homo sapiens
KSSHVVNWTSRAGKAKPGLAKPTHLLQGVTVSLVCVCISTKEADTKGLRHTHTEQWENTDFGDRSNAQHPHLLAERPWESFLTPLSLFLLHVNRRSSNTQLARLI

SEQ ID NO: 769161 - protein, 965 aa, Homo sapiens
AVARERPRGPRAADGGDRGRRRARVSEAVASAPPHGRPQPLPQPSSLPLPFPPPPPRPPPSSLAGRARHGAASPPMALRRSMGRPGLPPLPLPPPPRLGLLLAALASLLLPESAAAGLKLMGAPVKLTVSQGQPVKLNCSVEGMEEPDIQWVKDGAVVQNLDQLYIPVSEQHWIGFLSLKSVERSDAGRYWCQVEDGGETEISQPVWLTVEGVPFFTVEPKDLAVPPNAPFQLSCEAVGPPEPVTIVWWRGTTKIGGPAPSPSVLNVTGVTQSTMFSCEAHNLKGLASSRTATVHLQALPAAPFNITVTKLSSSNASVAWMPGADGRALLQSCTVQVTQAPGGWEVLAVVVPVPPFTCLLRDLVPATNYSLRVRCANALGPSPYADWVPFQTKGLAPASAPQNLHAIRTDSGLILEWEEVIPEAPLEGPLGPYKLSWVQDNGTQDELTVEGTRANLTGWDPQKDLIVRVCVSNAVGCGPWSQPLVVSSHDRAGQQGPPHSRTSWVPVVLGVLTALVTAAALALILLRKRRKETRFGQAFDSVMARGEPAVHFRAARSFNRERPERIEATLDSLGISDELKEKLEDVLIPEQQFTLGRMLGKGEFGSVREAQLKQEDGSFVKVAVKMLKADIIASSDIEEFLREAACMKEFDHPHVAKLVGVSLRSRAKGRLPIPMVILPFMKHGDLHAFLLASRIGENPFNLPLQTLIRFMVDIACGMEYLSSRNFIHRDLAARNCMLAEDMTVCVADFGLSRKIYSGDYYRQGCASKLPVKWLALESLADNLYTVQSDVWAFGVTMWEIMTRGQTPYAGIENAEIYNYLIGGNRLKQPPECMEDVYDLMYQCWSADPKQRPSFTCLRMELENILGQLSVLSASQDPLYINIERAEEPTAGGSLELPGRDQPYSGAGDGSGMGAVGGTPSDCRYILTPGGLAEQPGQAEHQPESPLNETQRLLLLQQGLLPHSSC

SEQ ID NO: 769162 - protein, 877 aa, Homo sapiens
MALRRSMGRPGLPPLPLPPPPRLGLLLAGLKLMGAPVKLTVSQGQPVKLNCSVEGMEEPDIQWVKDGAVVQNLDQLYIPVSEQHWIGFLSLKSVERSDAGRYWCQVEDGGETEISQPVWLTVEGVPFFTVEPKDLAVPPNAPFQLSCEAVGPPEPVTIVWWRGTTKIGGPAPSPSVLNVTGVTQSTMFSCEAHNLKGLASSRTATVHLQALPAAPFNITVTKLSSSNASVAWMPGADGRALLQSCTVQVTQAPGGWEVLAVVVPVPPFTCLLRDLVPATNYSLRVRCANALGPSPYADWVPFQTKGLAPASAPQNLHAIRTDSGLILEWEEVIPEAPLEGPLGPYKLSWVQDNGTQDELTVEGTRANLTGWDPQKDLIVRVCVSNAVGCGPWSQPLVVSSHDRAGQQGPPHSRTSWVPVVLGVLTALVTAAALALILLRKRRKETRFGQAFDSVMARGEPAVHFRAARSFNRERPERIEATLDSLGISDELKEKLEDVLIPEQQFTLGRMLGKGEFGSVREAQLKQEDGSFVKVAVKMLKADIIASSDIEEFLREAACMKEFDHPHVAKLVGVSLRSRAKGRLPIPMVILPFMKHGDLHAFLLASRIGENPFNLPLQTLIRFMVDIACGMEYLSSRNFIHRDLAARNCMLAEDMTVCVADFGLSRKIYSGDYYRQGCASKLPVKWLALESLADNLYTVQSDVWAFGVTMWEIMTRGQTPYAGIENAEIYNYLIGGNRLKQPPECMEDVYDLMYQCWSADPKQRPSFTCLRMELENILGQLSVLSASQDPLYINIERAEEPTAGGSLELPGRDQPYSGAGDGSGMGAVGGTPSDCRYILTPGGLAEQPGQAEHQPESPLNETQRLLLLQQGLLPHSSC

SEQ ID NO: 769163 - protein, 890 aa, Homo sapiens
MALRRSMGRPGLPPLPLPPPPRLGLLLAALASLLLPESAAAGLKLMGAPVKLTVSQGQPVKLNCSVEGMEEPDIQWVKDGAVVQNLDQLYIPVSEQHWIGFLSLKSVERSDAGRYWCQVEDGGETEISQPVWLTVEGVPFFTVEPKDLAVPPNAPFQLSCEAVGPPEPVTIVWWRGTTKIGGPAPSPSVLNVTGVTQSTMFSCEAHNLKGLASSRTATVHLQALPAAPFNITVTKLSSSNASVAWMPGADGRALLQSCTVQVTQAPGGWEVLAVVVPVPPFTCLLRDLVPATNYSLRVRCANALGPSPYADWVPFQTKGLAPASAPQNLHAIRTDSGLILEWEEVIPEAPLEGPLGPYKLSWVQDNGTQDELTVEGTRANLTGWDPQKDLIVRVCVSNAVGCGPWSQPLVVSSHDRAGQQGPPHSRTSWVPVVLGVLTALVTAAALALILLRKRRKETRFGQAFDSVMARGEPAVHFRAARSFNRERPERIEATLDSLGISDELKEKLEDVLIPEQQFTLGRMLGKGEFGSVREAQLKQEDGSFVKVAVKMLKADIIASSDIEEFLREAACMKEFDHPHVAKLVGVSLRSRAKGRLPIPMVILPFMKHGDLHAFLLASRIGENPFNLPLQTLIRFMVDIACGMEYLSSRNFIHRDLAARNCMLAEDMTVCVADFGLSRKIYSGDYYRQGCASKLPVKWLALESLADNLYTVQSDVWAFGVTMWEIMTRGQTPYAGIENAEIYNYLIGGNRLKQPPECMEDVYDLMYQCWSADPKQRPSFTCLRMELENILGQLSVLSASQDPLYINIERAEEPTAGGSLELPGRDQPYSGAGDGSGMGAVGGTPSDCRYILTPGGLAEQPGQAEHQPESPLNETQRLLLLQQGLLPHSSC

SEQ ID NO: 769164 - protein, 1061 aa, Homo sapiens
MALRRSMGRPGLPPLPLPPPPRLGLLLAALASLLLPESAAAGLKLMGAPVKLTVSQGQPVKLNCSVEGMEEPDIQWVKDGAVVQNLDQLYIPVSEQHWIGFLSLKSVERSDAGRYWCQVEDGGETEISQPVWLTVEGVPFFTVEPKDLAVPPNAPFQLSCEAVGPPEPVTIVWWRGTTKIGGPAPSPSVLNVTGVTQSTMFSCEAHNLKGLASSRTATVHLQALPAAPFNITVTKLSSSNASVAWMPGADGRALLQSCTVQVTQAPGGWEVLAVVVPVPPFTCLLRDLVPATNYSLRVRCANALGPSPYADWVPFQTKGLAPASAPQNLHAIRTDSGLILEWEEVIPEAPLEGPLGPYKLSWVQDNGTQVRQNPPLSPLSWSISLQGSKAFKNFKMIVFGGPGSPAAPGNPFLLTLLCKLHFSKDYVSCWVASCVHFVNKAGSTFLLELGEGTDKALSPAQFAPIPHLCIPGLSLVCVLERPLQPGTGMYYSQKVVFLQPLNPQCPYTPMFPAGPFSVLRPQLEAFSPGSLWGGGFSWLQDELTVEGTRANLTGWDPQKDLIVRVCVSNAVGCGPWSQPLVVSSHDRAGQQGPPHSRTSWVPVVLGVLTALVTAAALALILLRKRRKETRFGQAFDSVMARGEPAVHFRAARSFNRERPERIEATLDSLGISDELKEKLEDVLIPEQQFTLGRMLGKGEFGSVREAQLKQEDGSFVKVAVKMLKADIIASSDIEEFLREAACMKEFDHPHVAKLVGVSLRSRAKGRLPIPMVILPFMKHGDLHAFLLASRIGENPFNLPLQTLIRFMVDIACGMEYLSSRNFIHRDLAARNCMLAEDMTVCVADFGLSRKIYSGDYYRQGCASKLPVKWLALESLADNLYTVQSDVWAFGVTMWEIMTRGQTPYAGIENAEIYNYLIGGNRLKQPPECMEDVYDLMYQCWSADPKQRPSFTCLRMELENILGQLSVLSASQDPLYINIERAEEPTAGGSLELPGRDQPYSGAGDGSGMGAVGGTPSDCRYILTPGGLAEQPGQAEHQPESPLNETQRLLLLQQGLLPHSSC

SEQ ID NO: 769165 - protein, 842 aa, Homo sapiens
MALRRSMGRPGLPPLPLPPPPRLGLLLAALASLLLPESAAAGLKLMGAPVKLTVSQGQPVKLNCSVEGMEEPDIQWVKDGAVVQNLDQLYIPVSEQHWIGFLSLKSVERSDAGRYWCQVEDGGETEISQPVWLTVEGVPFFTVEPKDLAVPPNAPFQLSCEAVGPPEPVTIVWWRGTTKIGGPAPSPSVLNVTGVTQSTMFSCEAHNLKGLASSRTATVHLQALPAAPFNITVTKLSSSNASVAWMPGADGRALLQSCTVQVTQAPGGWEVLAVVVPVPPFTCLLRDLVPATNYSLRVRCANALGPSPYADWVPFQTKGLAPASAPQNLHAIRTDSGLILEWEEVIPEAPLEGPLGPYKLSWVQDNGTQGQQGPPHSRTSWVPVVLGVLTALVTAAALALILLRKRRKETRFGQAFDSVMARGEPAVHFRAARSFNRERPERIEATLDSLGISDELKEKLEDVLIPEQQFTLGRMLGKGEFGSVREAQLKQEDGSFVKVAVKMLKADIIASSDIEEFLREAACMKEFDHPHVAKLVGVSLRSRAKGRLPIPMVILPFMKHGDLHAFLLASRIGENPFNLPLQTLIRFMVDIACGMEYLSSRNFIHRDLAARNCMLAEDMTVCVADFGLSRKIYSGDYYRQGCASKLPVKWLALESLADNLYTVQSDVWAFGVTMWEIMTRGQTPYAGIENAEIYNYLIGGNRLKQPPECMEDVYDLMYQCWSADPKQRPSFTCLRMELENILGQLSVLSASQDPLYINIERAEEPTAGGSLELPGRDQPYSGAGDGSGMGAVGGTPSDCRYILTPGGLAEQPGQAEHQPESPLNETQRLLLLQQGLLPHSSC

SEQ ID NO: 769166 - protein, 552 aa, Homo sapiens
MFPAGPFSVLRPQLEAFSPGSLWGGGFSWLQDELTVEGTRANLTGWDPQKDLIVRVCVSNAVGCGPWSQPLVVSSHDRAGQQGPPHSRTSWVPVVLGVLTALVTAAALALILLRKRRKETRFGQAFDSVMARGEPAVHFRAARSFNRERPERIEATLDSLGISDELKEKLEDVLIPEQQFTLGRMLGKGEFGSVREAQLKQEDGSFVKVAVKMLKADIIASSDIEEFLREAACMKEFDHPHVAKLVGVSLRSRAKGRLPIPMVILPFMKHGDLHAFLLASRIGENPFNLPLQTLIRFMVDIACGMEYLSSRNFIHRDLAARNCMLAEDMTVCVADFGLSRKIYSGDYYRQGCASKLPVKWLALESLADNLYTVQSDVWAFGVTMWEIMTRGQTPYAGIENAEIYNYLIGGNRLKQPPECMEDVYDLMYQCWSADPKQRPSFTCLRMELENILGQLSVLSASQDPLYINIERAEEPTAGGSLELPGRDQPYSGAGDGSGMGAVGGTPSDCRYILTPGGLAEQPGQAEHQPESPLNETQRLLLLQQGLLPHSSC

SEQ ID NO: 769167 - protein, 424 aa, Homo sapiens
SNRDPRGSVICGNNSVRNHACDERIEATLDSLGISDELKEKLEDVLIPEQQFTLGRMLGKGEFGSVREAQLKQEDGSFVKVAVKMLKADIIASSDIEEFLREAACMKEFDHPHVAKLVGVSLRSRAKGRLPIPMVILPFMKHGDLHAFLLASRIGENPFNLPLQTLIRFMVDIACGMEYLSSRNFIHRDLAARNCMLAEDMTVCVADFGLSRKIYSGDYYRQGCASKLPVKWLALESLADNLYTVQSDVWAFGVTMWEIMTRGQTPYAGIENAEIYNYLIGGNRLKQPPECMEDVYDLMYQCWSADPKQRPSFTCLRMELENILGQLSVLSASQDPLYINIERAEEPTAGGSLELPGRDQPYSGAGDGSGMGAVGGTPSDCRYILTPGGLAEQPGQAEHQPESPLNETQRLLLLQQGLLPHSSC

SEQ ID NO: 769168 - protein, 170 aa, Homo sapiens [sequence omitted]

SEQ ID NO: 769169 - protein, 919 aa, Homo sapiens
MALRRSMGRPGLPPLPLPPPPRLGLLLAALASLLLPESAAAGLKLMGAPVKLTVSQGQPVKLNCSVEGMEEPDIQWVKDGAVVQNLDQLYIPVSEQHWIGFLSLKSVERSDAGRYWCQVEDGGETEISQPVWLTVEGVPFFTVEPKDLAVPPNAPFQLSCEAVGPPEPVTIVWWRGTTKIGGPAPSPSVLNVTGVTQSTMFSCEAHNLKGLASSRTATVHLQALPAAPFNITVTKLSSSNASVAWMPGADGRALLQSCTVQVTQAPGGWEVLAVVVPVPPFTCLLRDLVPATNYSLRVRCANALGPSPYADWVPFQTKGLAPASAPQNLHAIRTDSGLILEWEEVIPEAPLEGPLGPYKLSWVQDNGTQVRQNPPLSPLSWSISLQGSKAFKNFKMIVFGGPGSPAAPGNPFLLTLLCKLHFSKDYVSCWVASCVHFVNKAGSTFLLELGEGTDKALSPAQFAPIPHLCIPGLSLVCVLERPLQPGTGMYYSQKVVFLQPLNPQCPYTPMFPAGPFSVLRPQLEAFSPGSLWGGGFSWLQDELTVEGTRANLTGWDPQKDLIVRVCVSNAVGCGPWSQPLVVSSHDRAGQQGPPHSRTSWVPVVLGVLTALVTAAALALILLRKRRKETRFGQAFDSVMARGEPAVHFRAARSFNRERPERIEATLDSLGISDELKEKLEDVLIPEQQFTLGRMLGKGEFGSVREAQLKQEDGSFVKVAVKMLKADIIASSDIEEFLREAACMKEFDHPHVAKLVGVSLRSRAKGRLPIPMVILPFMKHGDLHAFLLASRIGENPFNLPLQTLIRFMVDIACGMEYLSSRNFIHRDLAARNCMLAEDMTVCVADFGLSRKIYMTVGTYSPPEGWLSSQGRQSTSQRVPSMRHRGFCCCSKGYCHTVAVSPQAEGIGAIWPALVATELAD

SEQ ID NO: 769170 - protein, 232 aa, Homo sapiens
GRPRYPAPRRADPPSPCSDAPAPPRSRLSRVLLLPQVQAEPAEPWPALPAAPKPLASPEAGMAVPGWGRRTSLPKRRGWGCSWRGEAHSPRTARTGRTRRYRAGRRPAPRQVATAKDSGRARGAMASPSSSSEGHWQAPRQGWQSQDGGGGRPSLKRRGWGPVAGRGEAAQPEDCEDGEEPALPGRKETGTQTGGDGKGVSDAGAGVRECRGLGGAGDATKGRREAPWPSPG

SEQ ID NO: 769171 - protein, 122 aa, Homo sapiens
NELKMVCCVGEIENVSKMKCHEDGRRPYVPIIPLLTKSLQEFTGDTVSLCVVLKSKSPVMLENKEEYTHTHTHTHTHTHTHTHTYVFVFVGLFFFCFFLVLLQAINFKRLKADRIVSLRKTN

SEQ ID NO: 769172 - protein, 858 aa, Homo sapiens
MGDHLDLLLGVVLMAGPVFGIPSCSFDGRIAFYRFCNLTQVPQVLNTTERLLLSFNYIRTVTASSFPFLEQLQLLELGSQYTPLTIDKEAFRNLPNLRILDLGSSKIYFLHPDAFQGLFHLFELRLYFCGLSDAVLKDGYFRNLKALTRLDLSKNQIRSLYLHPSFGKLNSLKSIDFSSNQIFLVCEHELEPLQGKTLSFFSLAANSLYSRVSVDWGKCMNPFRNMVLEILDVSGNGWTVDITGNFSNAISKSQAFSLILAHHIMGAGFGFHNIKDPDQNTFAGLARSSVRHLDLSHGFVFSLNSRVFETLKDLKVLNLAYNKINKIADEAFYGLDNLQVLNLSYNLLGELYSSNFYGLPKVAYIDLQKNHIAIIQDQTFKFLEKLQTLDLRDNALTTIHFIPSIPDIFLSGNKLVTLPKINLTANLIHLSENRLENLDILYFLLRVPHLQILILNQNRFSSCSGDQTPSENPSLEQLFLGENMLQLAWETELCWDVFEGLSHLQVLYLNHNYLNSLPPGVFSHLTALRGLSLNSNRLTVLSHNDLPANLEILDISRNQLLAPNPDVFVSLSVLDITHNKFICECELSTFINWLNHTNVTIAGPPADIYCVYPDSFSGVSLFSLSTEGCDEEEVLKSLKFSLFIVCTVTLTLFLMTILTVTKFRGFCFICYKTAQRLVFKDHPQGTEPDMYKYDAYLCFSSKDFTWVQNALLKHLDTQYSDQNRFNLCFEERDFVPGENRIANIQDAIWNSRKIVCLVSRHFLRDGWCLEAFSYAQGRCLSDLNSALIMVVVGSLSQYQLMKHQSIRGFVQKQQYLRWPEDLQDVGWFLHKLSQQILKKEKEKKKDNNIPLQTVATIS

SEQ ID NO: 769173 - protein, 858 aa, Homo sapiens; identical to SEQ ID NO: 769172

SEQ ID NO: 769174 - protein, 79 aa, Homo sapiens
TGSGSQGGALQVTSWPTAPPWPCQPLTPQAVVGVGGRSAFRALPSCHCLSWPLIRACPLENKTKDVISQVPGPESQIQD

SEQ ID NO: 769175 - protein, 177 aa, Homo sapiens
MERNGRPRLVGRSPAADTGRDKGLGRFRSFLSCSPCKLFPPHGSLDESNKTGMEPDLTDGEAEASGSFPQHRRELLAFQQGVTGRKPGTWSNHLTLQMGNSWRYRKWQSTISALEVSPGAPAGWWGTQEPRPSPRVGCQFYGFPEYLTAEWMALVKAGLFPPTSTHKVSSWEAGKTV

SEQ ID NO: 769176 - protein, 132 aa, Homo sapiens
VTCYAAQNKVNTAFGWAANSCLNCDYCSFFYQKATLALWEWPSPVREKWKAKESPFQKSPSSLSPKYPFFRFSDGKQASTHSPHWGGECVGHSRPCLVKEKLNFSTCSSMFQKEQDCLCFEVHMKGSGTIAQ

SEQ ID NO: 769177 - protein, 175 aa, Homo sapiens
ELGAEPGARSRQSPAPVRWAPAPAVLPGCLRARPAMEPSHKDAETAAAAAAVAAADPRGASSSSGVVVQVREKKGPLRAAIPYMPFPVAVICLFLNTFVPGLGTFVSAFTVLCGARTDLPDRHVCCVFWLNIAAALIQILTAIVMVGWIMSIFWGMDMVILAIPGYKEQGIPQQL

SEQ ID NO: 769178 - protein, 126 aa, Homo sapiens
LFSGCVFSSSLSPLPPAASHSVLLQFPKSQATRSRASHSSCEPTGAAGEIQGGPVRAAPGSFGHKDLYMFFSAIFWTGGGKGVFLKILFILKTHLLFSAGCEGCQPLLLWKALWAQAPEHQRVGWR

SEQ ID NO: 769179 - protein, 154 aa, Homo sapiens
RPPELGAEPGARSRQSPAPVRWAPAPAVLPGCLRARPAMEPSHKDAETAAAAAAVAAADPRGASSSSGVVVQVREKKGPLRAAIPYMPFPVAVICLFLNTFVPGLGKTRLPRPLRPPPRRGRAWGERRARPETSWRGRALQVLRPRATARSWRP

SEQ ID NO: 769180 - protein, 266 aa, Homo sapiens
CDKAFNRFSYLTKHKIIHSGEKSYKCEQCGKGFNWSSTLTKHKRIHTGEKPYKCEECGKAFNVSSHLTTHKMIHTGEKPYKCEECGKAFNHSSKLTIHKIIHTGEKPYKCEECGKAFNQSSNLTKHKIIHTGEKLYKCEECGKAFNRSSNLTTHKRIHTGEKPYKCEECGKAFNRSSNLTKHNIIHTGEKSYKCEECGKAFNQSSTLTKHRKIQQGMVAHACNPNTLRGLGEQIARSGVQDQPGQHGKTPSLLEIQKFAGCGGRRL

SEQ ID NO: 769181 - protein, 107 aa, Homo sapiens
LSLGPRHQSKLKTQQWDSQTDGTMALSSQIWAACLLLLLLLASLTSGSVFPQQTGQLAELQPQDRAGARASWMPMFQRRRRRDTHFPICIFCCGCCHRSKCGMCCKT

SEQ ID NO: 769182 - protein, 686 aa, Homo sapiens
MGTLRDLQYALQEKIEELRQRDALIDELELELDQKDELIQKLQNELDKYRSVIRPATQQAQKQSASTLQGEPRTKRQAISAEPTAFDIQDLSHVTLPFYPKSPQSKDLIKEAILDNDFMKNLELSQIQEIVDCMYPVEYGKDSCIIKEGDVGSLVYVMEDGKVEVTKEGVKLCTMGPGKVFGELAILYNCTRTATVKTLVNVKLWAIDRQCFQTIMMRTGLIKHTEYMEFLKSVPTFQSLPEEILSKLADVLEETHYENGEYIIRQGARGDTFFIISKGTVNVTREDSPSEDPVFLRTLGKGDWFGEKALQGEDVRTANVIAAEAVTCLVIDRDSFKHLIGGLDDVSNKAYEDAEAKAKYEAEAAFFANLKLSDFNIIDTLGVGGFGRVELVQLKSEESKTFAMKILKKRHIVDTRQQEHIRSEKQIMQGAHSDFIVRLYRTFKDSKYLYMLMEACLGGELWTILRDRGSFEDSTTRFYTACVVEAFAYLHSKGIIYRDLKPENLILDHRGYAKLVDFGFAKKIGFGKKTWTFCGTPEYVAPEIILNKGHDISADYWSLGILMYELLTGSPPFSGPDPMKTYNIILRGIDMIEFPKKIAKNAANLIKKLCRDNPSERLGNLKNGVKDIQKHKWFEGFNWEGLRKGTLTPPIIPSVASPTDTSNFDSFPEDNDEPPPDDNSGWDIDF

SEQ ID NO: 769183 - protein, 682 aa, Homo sapiens
EKDFAEGLSEKMSELEEDFAKILMLKEERIKELEKRLSEKEEEIQELKRKLHKCQSVLPVPSTHIGPRTTRAQGISAEPQTYRSFHDLRQAFRKFTKSERSKDLIKEAILDNDFMKNLELSQIQEIVDCMYPVEYGKDSCIIKEGDVGSLVYVMEDGKVEVTKEGVKLCTMGPGKVFGELAILYNCTRTATVKTLVNVKLWAIDRQCFQTIMMRTGLIKHTEYMEFLKSVPTFQSLPEEILSKLADVLEETHYENGEYIIRQGARGDTFFIISKGTVNVTREDSPSEDPVFLRTLGKGDWFGEKALQGEDVRTANVIAAEAVTCLVIDRDSFKHLIGGLDDVSNKAYEDAEAKAKYEAEAAFFANLKLSDFNIIDTLGVGGFGRVELVQLKSEESKTFAMKILKKRHIVDTRQQEHIRSEKQIMQGAHSDFIVRLYRTFKDSKYLYMLMEACLGGELWTILRDRGSFEDSTTRFYTACVVEAFAYLHSKGIIYRDLKPENLILDHRGYAKLVDFGFAKKIGFGKKTWTFCGTPEYVAPEIILNKGHDISADYWSLGILMYELLTGSPPFSGPDPMKTYNIILRGIDMIEFPKKIAKNAANLIKKLCRDNPSERLGNLKNGVKDIQKHKWFEGFNWEGLRKGTLTPPIIPSVASPTDTSNFDSFPEDNDEPPPDDNSGWDIDF

SEQ ID NO: 769184 - protein, 323 aa, Homo sapiens
MGTLRDLQYALQEKIEELRQRDALIDELELELDQKDELIQKLQNELDKYRSVIRPATQQAQKQSASTLQGEPRTKRQAISAEPTAFDIQDLSHVTLPFYPKSPQSKDLIKEAILDNDFMKNLELSQIQEIVDCMYPVEYGKDSCIIKEGDVGSLVYVMEDGKVEVTKEGVKLCTMGPGKVFGELAILYNCTRTATVKTLVNVKLWAIDRQCFQTIMMRTGLIKHTEYMEFLKSVPTFQSLPEEILSKLADVLEETHYENGEYIIRQGARGDTFFIISKGTVNVTREDSPSEDPVFLRTLGKGDWFGEKALQGWTWNLFEYVVE

SEQ ID NO: 769185 - protein, 219 aa, Homo sapiens
MGTLRDLQYALQEKIEELRQRDALIDELELELDQKDELIQKLQNELDKYRSVIRPATQQAQKQSASTLQGEPRTKRQAISAEPTAFDIQDLSHVTLPFYPKSPQSKDLIKEAILDNDFMKNLELSQIQEIVDCMYPVEYGKDSCIIKEGDVGSLVYVMEDGKVEVTKEGVKLCTMGPGKVFGELAILYNCTRTATVKKMESCYVAQLFLNSWAQEVLLP

SEQ ID NO: 769186 - protein, 217 aa, Homo sapiens
MVKLGCSFSGKPGKDPGDQDGAAMDSVPLISPLDISQLQPPLPDQVVIKTQTEYQLSSPDQQNFPDLEGQRLNCSHPEEGRRLPTARMIAFAMALLGCVLIMYKAIWYDQFTCPDGFLLRHKICTPLTLEMYYTEMDPERHRSILAAIGAYPLSRKHGTETPAAWGDGYRAAKEERKGPTQAGAAAAATEPPGKPSAKAEKEAARKAAGSAAPPPAQ

SEQ ID NO: 769187 - protein, 158 aa, Homo sapiens
MVKLGCSFSGKPGKDPGDQDGAAMDSVPLISPLDISQLQPPLPDQVVIKTQTEYQLSSPDQQNFPDLEGQRLNCSHPEEGRRVTTPTPPTVGTQDRRRRWKAAGGAWVPSRPVWGPLALREERVAVSHPAQSWPHRLPCTHQAPSRGCRCRLTKQWRS

SEQ ID NO: 769188 - protein, 270 aa, Homo sapiens
MVKLGCSFSGKPGKDPGDQDGAAMDSVPLISPLDISQLQPPLPDQVVIKTQTEYQLSSPDQQNFPDLEGQRLNCSHPEEGRRLPTARMIAFAMALLGCVLIMYKAIWYDQFTCPDGFLLRGLSSELEADLRCPEAMAPLQTVRSVPNRRSGRAWARGAQEGSAPPTLTRPLPQHKICTPLTLEMYYTEMDPERHRSILAAIGAYPLSRKHGTETPAAWGDGYRAAKEERKGPTQAGAAAAATEPPGKPSAKAEKEAARKAAGSAAPPPAQ

SEQ ID NO: 769189 - protein, 135 aa, Homo sapiens
MAPLQTVRSVPNRRSGRAWARGAQEGSAPPTLTRPLPQHKICTPLTLEMYYTEMDPERHRSILAAIGAYPLSRKHGTETPAAWGDGYRAAKEERKGPTQAGAAAAATEPPGKPSAKAEKEAARKAAGSAAPPPAQ

SEQ ID NO: 769190 - protein, 217 aa, Homo sapiens; identical to SEQ ID NO: 769186

SEQ ID NO: 769191 - protein, 127 aa, Homo sapiens
VSSPAARPGVGARRGAPAGSAQVSSWPPATASEPKTPATLPFLFPPTRPARTSGLGVANPSPPGDAGSAGSPWPRRRSQPSGSVSAASSASSCDQRVSRCSPPCSCPQAPSLQPRPRGSLTLSLFSK

SEQ ID NO: 769192 - protein, 199 aa, Homo sapiens
MENFRKVRSEEAPAGCGAEGGGPGSGPFADLAPGAVHMRVKEGSKIRNLMAFATASMAQPATRAIVFSGCGRATTKTVTCAEILKRRLAGLHQVTRLRYRSVREVWQSLPPGPTQGQTPGEPAASLSVLKNVPGLAILLSKDALDPRQPGYQPPNPHPGPSSPPAAPASKRSLGEPAAGEGSAKRSQPEPGVADEDQTA

SEQ ID NO: 769193 - protein, 199 aa, Homo sapiens; identical to SEQ ID NO: 769192

SEQ ID NO: 769194 - protein, 199 aa, Homo sapiens; identical to SEQ ID NO: 769192

SEQ ID NO: 769195 - protein, 199 aa, Homo sapiens; identical to SEQ ID NO: 769192

SEQ ID NO: 769196 - protein, 199 aa, Homo sapiens; identical to SEQ ID NO: 769192

SEQ ID NO: 769197 - protein, 241 aa, Homo sapiens
MPDWCHDNGAYSVSTLTIAHLRSESPPQCTTCQFRFTRARRRMENFRKVRSEEAPAGCGAEGGGPGSGPFADLAPGAVHMRVKEGSKIRNLMAFATASMAQPATRAIVFSGCGRATTKTVTCAEILKRRLAGLHQVTRLRYRSVREVWQSLPPGPTQGQTPGEPAASLSVLKNVPGLAILLSKDALDPRQPGYQPPNPHPGPSSPPAAPASKRSLGEPAAGEGSAKRSQPEPGVADEDQTA

SEQ ID NO: 769198 - protein, 203 aa, Homo sapiens
MAVSPIFFLTTRLCRDSSRLAPCVSPPLQPCVLSLWSLQGQAQRLNSFKMVQGTAQSLASSSLLPHSASRAGPGLRGCCKWGPVYPCTSPLRERERHIVFLGGEGRSGRTASMNSPGGHCKGWQTLLRSLNLQPPDNKLNLTQKAGTKPPALWVGSPLHCPLSQKGQHTLGKGGGERLSTNPLLEITIQQRSWVLGCESLQAS

SEQ ID NO: 769199 - protein, 106 aa, Homo sapiens [sequence omitted]

SEQ ID NO: 769200 - protein, 199 aa, Homo sapiens; identical to SEQ ID NO: 769192

SEQ ID NO: 769201 - protein, 199 aa, Homo sapiens; identical to SEQ ID NO: 769192

SEQ ID NO: 769202 - protein, 199 aa, Homo sapiens; identical to SEQ ID NO: 769192

SEQ ID NO: 769203 - protein, 199 aa, Homo sapiens; identical to SEQ ID NO: 769192

SEQ ID NO: 769204 - protein, 203 aa, Homo sapiens
AGLRLRSPKDEAAPGFRSAGRPKGTAPRAAHAARARSADTPGMLAPQRTRAPSPRAAPRPTRSMLPAAMKGLGLALLAVLLCSAPAHGLWCQDCTLTTNSSHCTPKQCQPSDTVCASVRITDPSSSRKDHSVNKMCASSCDFVKRHFFSDYLMGFINSGILKVDVDCCEKDLCNGAAGAGHSPWALAGGLLLSLGPALLWAGP

SEQ ID NO: 769205 - protein, 202 aa, Homo sapiens
AAFQYPPSPEVQYGSQAVRPVPNSKALYQQPTAMAFDLTVPPSGQDSALHETIATARKQGDLEAWQYPVMLQPMPAGKGSQAGVKQYGPNSPYMRTLLNSIAHGNRLISYDWEILAKSSLSPSQYLQFKTWWIDGVQEQVRKNQATNPVAYIDEDQLLGRGPNWDTINQQSVMKMRLLNNYKGYLPQGLGKHSGPRNLMPFF

SEQ ID NO: 769206 - protein, 121 aa, Homo sapiens
SLLKNVASSYSCDEVGEPSPLPGTVSQITPQDSGPDGKPAALQPPNGEGTHHMGMLPQHREVPIIWRCSHCTDTPIAQILPQHREVPIIWGCSHCTDTPIAQILPPHREAPMIWGCSHCTD

SEQ ID NO: 769207 - protein, 73 aa, Homo sapiens
MPSQTHATHEYKAHALSILAHLLLTLQACGDLPPPRPRGGKPRRWEEAQVPLRVPECVCLCMCVSNPTPGSTS

SEQ ID NO: 769208 - protein, 199 aa, Homo sapiens
MTVGLLPPPEKLTAEVLGIICIVLMATVLKTIVLIPFLEQNNSSPNTRTQKARHCGHCPEEWITYSNSCYYIGKERRTWEESLLACTSKNSSLLSIDNEEEMKFLASILPSSWIGVFRNSSHHPWVTINGLAFKHKIKDSDNAELNCAVLQVNRLKSAQCGSSMIYHCKHKLCKAKHLRLTEIKILLYLSKQNFIVGQS

SEQ ID NO: 769209 - protein, 231 aa, Homo sapiens [sequence omitted]

SEQ ID NO: 769210 - protein, 39 aa, Homo sapiens
MVSVSLNILFPQTLRVEGPAQGICIPLHVIYKPAALAAS

SEQ ID NO: 769211 - protein, 80 aa, Homo sapiens
RLTRREELLCQNPLHRLRYLHHFQVHPFFRGVAFDPELLQKQPVNFVTETQATQPSSAETMPFDDFDCDLESFLLYPIPA

SEQ ID NO: 769212 - protein, 209 aa, Homo sapiens
MGFCRLEEAGLVSRSIRERNCLYNWDSRFSRERRQRLGMGAVSCRQGQHTQQGEHTRVAVPHKQGGNIRGPWARGWKSLWTGLGTIRSDLEELWELRGHHYLHQESLKPAPVLVEKPLPEWPVPQFINLFLPEFPIRPIRGQQQLKILGLVAKGSFGTVLKVLDCTQKAVFAVKVVPKVKVLQRDTVRQCKEEVSIQVISMTWASCIEM

SEQ ID NO: 769213 - protein, 312 aa, Homo sapiens
MGFCRLEEAGLVSRSIRERNCLYNWDSRFSRERRQRLGMGAVSCRQGQHTQQGEHTRVAVPHKQGGNIRGPWARGWKSLWTGLGTIRSDLEELWELRGHHYLHQESLKPAPVLVEKPLPEWPVPQFINLFLPEFPIRPIRGQQQLKILGLVAKGSFGTVLKVLDCTQKAVFAVKVVPKVKVLQRDTVRQCKEEVSIQRQINHPFVHSLGDSWQGKRHLFIMCSYCSTDLYSLWSAVGCFPEASIRLFAAELVLVLCYLHDLGIMHRDVKMENILLDERGHLKLTDFGLSRHVPQGAQAYTICGTLQYMGERG

SEQ ID NO: 769214 - protein, 285 aa, Homo sapiens
MGFCRLEEAGLVSRSIRERNCLYNWDSRFSRERRQRLGMGAVSCRQGQHTQQGEHTRVAVPHKQGGNIRGPWARGWKSLWTGLGTIRSDLEELWELRGHHYLHQESLKPAPVLVEKPLPEWPVPQFINLFLPEFPIRPIRGQQQLKILGLVAKGSFGTVLKVLDCTQKAVFAVKVVPKVKVLQRDTVRQCKEEVSIQRQINHPFVHSLGDSWQGKRHLFIMCSYCSTDLYSLWSAVGCFPEASIRLFAAELVLVLCYLHDLGIMHRDVKMENILLDERDTKISWS

SEQ ID NO: 769215 - protein, 222 aa, Homo sapiens
MGFCRLEEAGLVSRSIRERNCLYNWDSRFSRERRQRLGMGAVSCRQGQHTQQGEHTRVAVPHKQGGNIRGPWARGWKSLWTGLGTIRSDLEELWELRGHHYLHQESLKPAPVLVEKPLPEWPVPQFINLFLPEFPIRPIRGQQQLKILGLVAKGSFGTVLKVLDCTQKAVFAVKVVPKVKVLQRDTVRQCKEEVSIQRQINHPFVHSLGDSWQGKRHLFISE

SEQ ID NO: 769216 - protein, 222 aa, Homo sapiens; identical to SEQ ID NO: 769215

SEQ ID NO: 769217 - protein, 209 aa, Homo sapiens; identical to SEQ ID NO: 769212

SEQ ID NO: 769218 - protein, 529 aa, Homo sapiens
DTLFGRGFPRPRSGLDTRGGSIYARRAADACPVTRTARPARGGGGGRRLVTVTPILDLPLGGWGDPGFNWRLFWGTPDAMLWKITDNVKYEEDCEDRHDGSSNGNPRVPHLSSAGQHLYSPAPPLSHTGVAEYQPPPYFPPPYQQLAYSQSADPYSHLGEAYAAAINPLHQPAPTGSQQQAWPGRQSQEGAGLPSHHGRPAGLLPHLSGLEAGAVSARRDAYRRSDLLLPHAHALDAAGLAENLGLHDMPHQMDEVQNVDDQHLLLHDQTVIRKGPISMTKNPLNLPCQKELVGAVMNPTEVFCSVPGRLSLLSSTSKYKVTVAEVQRRLSPPECLNASLLGGVLRRAKSKNGGRSLREKLDKIGLNLPAGRRKAAHVTLLTSLVEGEAVHLARDFAYVCEAEFPSKPVAEYLTRPHLGGRNEMAARKNMLLAAQQLCKEFTELLSQDRTPHGTSRLAPVLETNIQNCLSHFSLITHGFGSQAICAAVSALQNYIKEALIVIDKSYMNPGDQSPADSNKTLEKMEKHRK

SEQ ID NO: 769219 - protein, 529 aa, Homo sapiens; identical to SEQ ID NO: 769218

SEQ ID NO: 769220 - protein, 114 aa, Homo sapiens
GRLPAAEEKGRLWAAAGRGGVARSAGWAPHLPAPKPIDAAATAAAERRLPRARGCARPMQDATEEARSKAKQNKFLQPCRLSPTHSSERMDTSYQPLTFVSVRIIIGMVLPGTI

SEQ ID NO: 769221 - protein, 190 aa, Homo sapiens
MHCNVGLERPHVREAPSTLITRKRPLPTVKAQMGLQASLEAETFVTLGTRKGLLSRVNSDVLVQLNLVDEFPATFTTRKRLFLAVRPLVGLQGSLPGEAPATLGTVEGPLPAVLGQMDLHAPLQAEAPVTLRTLEGLLSAVQPQVLRELALLHEGPPHSPQQNGRSPRCRHRCFFRLALYRKVLSHSGHG

SEQ ID NO: 769222 - protein, 449 aa, Homo sapiens
MHCNVGLERPHVREAPSTLITRKRPLPTVKAQMGLQASLLEEAFATLGTLEGPLSTVLIQVDLQAAPDAVALVTLRTLEGLLPAVDSNVFCEPVLLSETFAAHHTREWLLATVLQQVAFQISLEAESLLAFRTLVGLLSTVQPQVLGELRLMRVGLVTLTAREGLLVPVHPLVELHGGLPGEALVALGTLEGLLATVKPRVLCEMRASAETAAALGAGERLFRGVDLQVLREPRLLRKGLFALAAGKLLLPVVDSGVAGELGRPREALAALGAGEGLLLAVQALVGAHGVPPEEAPAALRALEGPLPNVLQPVGFQASLEAETFVTLGTRKGLLSRVNSDVLVQLNLVDEFPATFTTRKRLFLAVRPLVGLQGSLPGEAPATLGTVEGPLPAVLGQMDLHAPLQAEAPVTLRTLEGLLSAVQPQVLRELALLHEGPAALPAAERPLPAV

SEQ ID NO: 769223 - protein, 82 aa, Homo sapiens
SGELLASPGSSKLLQEGPSQTRRHADHHHSPGVLAASWDVAGRCGQQEHAGTLLQMLLLICGARDSPEGNPVLQKYQLHLLQ

SEQ ID NO: 769224 - protein, 173 aa, Homo sapiens
KQVSSVSHENPTEVFEDGENPPSSRSSESGFTEFIQYQADRTDDIDRELSEGQGAAAIPIGSTSSETETASTVGSEETIIQTPSVVTQGTATRSRKTAQKTAMQCCLEYVQQFLTRLINLYIIQNNSFSQSLATEHQGDLGREQGETSKWDRNSQGDVKEKNISKQKTSKEYL

SEQ ID NO: 769225 - protein, 67 aa, Homo sapiens
PAKMSCQQNQQQCQPPPSCPSPKCPPKSPAQCLPPPSSDCALSSGGCGPSSESGCCLSHHRHFRSHQ

SEQ ID NO: 769226 - protein, 1456 aa, Homo sapiens
KSGGPGTREREREKREERQSAWGRKERGREGWVRRRERSAANPRRRAWSPSQNSSPSRSRSQGGGCRDRQPCMMHLRLFCILLAAVSGAEGWGYYGCDEELVGPLYARSLGASSYYSLLTAPRFARLHGISGWSPRIGDPNPWLQIDLMKKHRIRAVATQGSFNSWDWVTRYMLLYGDRVDSWTPFYQRGHNSTFFGNVNESAVVRHDLHFHFTARYIRIVPLAWNPRGKIGLRLGLYGCPYKADILYFDGDDAISYRFPRGVSRSLWDVFAFSFKTEEKDGLLLHAEGAQGDYVTLELEGAHLLLHMSLGSSPIQPRPGHTTVSAGGVLNDQHWHYVRVDRFGRDVNFTLDGYVQRFILNGDFERLNLDTEMFIGGLVGAARKNLAYRHNFRGCIENVIFNRVNIADLAVRRHSRITFEGKVAFRCLDPVPHPINFGGPHNFVQVPGFPRRGRLAVSFRFRTWDLTGLLLFSRLGDGLGHVELTLSEGQVNVSIAQSGRKKLQFAAGYRLNDGFWHEVNFVAQENHAVISIDDVEGAEVRVSYPLLIRTGTSYFFGGCPKPASRWDCHSNQTAFHGCMELLKVDGQLVNLTLVEGRRLGFYAEVLFDTCGITDRCSPNMCEHDGRCYQSWDDFICYCELTGYKGETCHTPLYKESCEAYRLSGKTSGNFTIDPDGSGPLKPFVVYCDIRENRAWTVVRHDRLWTTRVTGSSMERPFLGAIQYWNASWEEVSALANASQHCEQWIEFSCYNSRLLNTAGGYPYSFWIGRNEEQHFYWGGSQPGIQRCACGLDRSCVDPALYCNCDADQPQWRTDKGLLTFVDHLPVTQVVIGDTNRSTSEAQFFLRPLRCYGDRNSWNTISFHTGAALRFPPIRANHSLDVSFYFRTSAPSGVFLENMGGPYCQWRRPYVRVELNTSRDVVFAFDVGNGDENLTVHSDDFEFNDDEWHLVRAEINVKQARLRVDHRPWVLRPMPLQTYIWMEYDQPLYVGSAELKRRPFVGCLRAMRLNGVTLNLEGRANASEGTSPNCTGHCAHPRLPCFHGGRCVERYSYYTCDCDLTAFDGPYCNHDIGGFFEPGTWMRYNLQSALRSAAREFSHMLSRPVPGYEPGYIPGYDTPGYVPGYHGPGYRLPDYPRPGRPVPGYRGPVYNVTGEEVSFSFSTSSAPAVLLYVSSFVRDYMAVLIKDDGTLQLRYQLGTSPYVYQLTTRPVTDGQPHSINITRVYRNLFIQVDYFPLTEQKFSLLVDSQLDSPKALYLGRVMETGVIDPEIQRYNTPGFSGCLSGVRFNNVAPLKTHFRTPRPMTAELAEALRVQGELSESNCGAMPRLVSEVPPELDPWYLPPDFPYYHDEGWVAILLGFLVAFLLLGLVGMLVLFYLQNHRYKGSYHTNEPKAAHEYHPGSKPPLPTSGPAQVPTPTAAPNQAPASAPAPAPTPAPAPGPRDQNLPQILEESRSE

SEQ ID NO: 769227 - protein, 1044 aa, Homo sapiens
MRLHFCPKGKVAFRCLDPVPHPINFGGPHNFVQVPGFPRRGRLAVSFRFRTWDLTGLLLFSRLGDGLGHVELTLSEGQVNVSIAQSGRKKLQFAAGYRLNDGFWHEVNFVAQENHAVISIDDVEGAEVRVSYPLLIRTGTSYFFGGCPKPASRWDCHSNQTAFHGCMELLKVDGQLVNLTLVEGRRLGFYAEVLFDTCGITDRCSPNMCEHDGRCYQSWDDFICYCELTGYKGETCHTPLYKESCEAYRLSGKTSGNFTIDPDGSGPLKPFVVYCDIRENRAWTVVRHDRLWTTRVTGSSMERPFLGAIQYWNASWEEVSALANASQHCEQWIEFSCYNSRLLNTAGGYPYSFWIGRNEEQHFYWGGSQPGIQRCACGLDRSCVDPALYCNCDADQPQWRTDKGLLTFVDHLPVTQVVIGDTNRSTSEAQFFLRPLRCYGDRNSWNTISFHTGAALRFPPIRANHSLDVSFYFRTSAPSGVFLENMGGPYCQWRRPYVRVELNTSRDVVFAFDVGNGDENLTVHSDDFEFNDDEWHLVRAEINVKQARLRVDHRPWVLRPMPLQTYIWMEYDQPLYVGSAELKRRPFVGCLRAMRLNGVTLNLEGRANASEGTSPNCTGHCAHPRLPCFHGGRCVERYSYYTCDCDLTAFDGPYCNHDIGGFFEPGTWMRYNLQSALRSAAREFSHMLSRPVPGYEPGYIPGYDTPGYVPGYHGPGYRLPDYPRPGRPVPGYRGPVYNVTGEEVSFSFSTSSAPAVLLYVSSFVRDYMAVLIKDDGTLQLRYQLGTSPYVYQLTTRPVTDGQPHSINITRVYRNLFIQVDYFPLTEQKFSLLVDSQLDSPKALYLGRVMETGVIDPEIQRYNTPGFSGCLSGVRFNNVAPLKTHFRTPRPMTAELAEALRVQGELSESNCGAMPRLVSEVPPELDPWYLPPDFPYYHDEGWVAILLGFLVAFLLLGLVGMLVLFYLQNHRYKGSYHTNEPKAAHEYHPGSKPPLPTSGPAQVPTPTAAPNQAPASAPAPAPTPAPAPGPRDQNLPQILEESRSE

SEQ ID NO: 769228 - protein, 780 aa, Homo sapiens
MPNSSQSSVPSCLPENRAWTVVRHDRLWTTRVTGSSMERPFLGAIQYWNASWEEVSALANASQHCEQWIEFSCYNSRLLNTAGGYPYSFWIGRNEEQHFYWGGSQPGIQRCACGLDRSCVDPALYCNCDADQPQWRTDKGLLTFVDHLPVTQVVIGDTNRSTSEAQFFLRPLRCYGDRNSWNTISFHTGAALRFPPIRANHSLDVSFYFRTSAPSGVFLENMGGPYCQWRRPYVRVELNTSRDVVFAFDVGNGDENLTVHSDDFEFNDDEWHLVRAEINVKQARLRVDHRPWVLRPMPLQTYIWMEYDQPLYVGSAELKRRPFVGCLRAMRLNGVTLNLEGRANASEGTSPNCTGHCAHPRLPCFHGGRCVERYSYYTCDCDLTAFDGPYCNHDIGGFFEPGTWMRYNLQSALRSAAREFSHMLSRPVPGYEPGYIPGYDTPGYVPGYHGPGYRLPDYPRPGRPVPGYRGPVYNVTGEEVSFSFSTSSAPAVLLYVSSFVRDYMAVLIKDDGTLQLRYQLGTSPYVYQLTTRPVTDGQPHSINITRVYRNLFIQVDYFPLTEQKFSLLVDSQLDSPKALYLGRVMETGVIDPEIQRYNTPGFSGCLSGVRFNNVAPLKTHFRTPRPMTAELAEALRVQGELSESNCGAMPRLVSEVPPELDPWYLPPDFPYYHDEGWVAILLGFLVAFLLLGLVGMLVLFYLQNHRYKGSYHTNEPKAAHEYHPGSKPPLPTSGPAQVPTPTAAPNQAPASAPAPAPTPAPAPGPRDQNLPQILEESRSE

SEQ ID NO: 769229 - protein, 1044 aa, Homo sapiens; identical to SEQ ID NO: 769227

SEQ ID NO: 769230 - protein, 974 aa, Homo sapiens
MRLHFCPKGKVAFRCLDPVPHPINFGGPHNFVQVPGFPRRGRLAVSFRFRTWDLTGLLLFSRLGDGLGHVELTLSEGQVNVSIAQSGRKKLQFAAGYRLNDGFWHEVNFVAQENHAVISIDDVEGAEVRVSYPLLIRTGTSYFFGGCPKPASRWDCHSNQTAFHGCMELLKVDGQLVNLTLVEGRRLGFYAEVLFDTCGITDRCSPNMCEHDGRCYQSWDDFICYCELTGYKGETCHTPLYKESCEAYRLSGKTSGNFTIDPDGSGPLKPFVVYCDIRENRAWTVVRHDRLWTTRVTGSSMERPFLGAIQYWNASWEEVSALANASQHCEQWIEFSCYNSRLLNTAGGYPYSFWIGRNEEQHFYWGGSQPGIQRCACGLDRSCVDPALYCNCDADQPQWRTDKGLLTFVDHLPVTQVVIGDTNRSTSEAQFFLRPLRCYGDRNSWNTISFHTGAALRFPPIRANHSLDVSFYFRTSAPSGVFLENMGGPYCQWRRPYVRVELNTSRDVVFAFDVGNGDENLTVHSDDFEFNDDEWHLVRAEINVKQARLRVDHRPWVLRPMPLQTYIWMEYDQPLYVGSAELKRRPFVGCLRAMRLNGVTLNLEGRANASEGTSPNCTGHCAHPRLPCFHGGRCVERYSYYTCDCDLTAFDGPYCNHDIGGFFEPGTWMRYNLQSALRSAAREFSHMLSRPVPGYEPGYIPGYDTPGYVPGYHGPGYRLPDYPRPGRPVPGYRGPVYNVTGEEVSFSFSTSSAPAVLLYVSSFVRDYMAVLIKDDGTLQLRYQLGTSPYVYQLTTRPVTDGQPHSINITRVYRNLFIQVDYFPLTEQKFSLLVDSQLDSPKALYLGRVMGKLRVRTRFRQGAVAYVPGSELPLFFFSVLVAFLLLGLVGMLVLFYLQNHRYKGSYHTNEPKAAHEYHPGSKPPLPTSGPAQVPTPTAAPNQAPASAPAPAPTPAPAPGPRDQNLPQILEESRSE

SEQ ID NO: 769231 - protein, 897 aa, Homo sapiens
MNISGSSCGSPNSADTSSDFKDLWTKLKECHDREVQGLQVKVTKLKQERILDAQRLEEFFTKNQQLREQQKVLHETIKVLEDRLRAGLCDRCAVTEEHMRKKQQEFENIRQQNLKLITELMNERNTLQEENKKLSEQLQQKIENDQQHQAAELECEEDVIPDSPITAFSFSGVNRLRRKENPHVRYIEQTHTKLEHSVCANEMRKVSKSSTHPQHNPNENEILVADTYDQSQSPMAKAHGTSSYTPDKSSFNLATVVAETLGLGVQEESETQGPMSPLGDELYHCLEGNHKKQPFEESTRNTEDSLRFSDSTSKTPPQEELPTRVSSPVFGATSSIKSGLDLNTSLSPSLLQPGKKKHLKTLPFSNTCISRLEKTRSKSEDSALFTHHSLGSEVNKIIIQSSNKQILINKNISESLGEQNRTEYGKDSNTDKHLEPLKSLGGRTSKRKKTEEESEHEVSCPQASFDKENAFPFPMDNQFSMNGDCVMDKPLDLSDRFSAIQRQEKSQGSETSKNKFRQVTLYEALKTIPKGFSSSRKASDGNCTLPKDSPGEPCSQECIILQPLNKCSPDNKPSLQIKEENAVFKIPLRPRESLETENVLDDIKSAGSHEPIKIQTRSDHGGCELASVLQLNPCRTGKIKSLQNNQDVSFENIQWSIDPGADLSQYKMDVTVIDTKDGSQSKLGGETVDMDCTLVSETVLLKMKKQEQKGEKSSNEERKMNDSLEDMFDRTTHEEYESCLADSFSQAADEEEELSTATKKLHTHGDKQDKVKQKAFVEPYFKGDERETSLQNFPHIEVVRKKEERRKLLGHTCKECEIYYADMPAEEREKKLASCSRHRFRYIPPNTPENFWEVGFPSTQTCMERGYIKEDLDPCPRPKRRQPYNAIFSPKGKEQKT

SEQ ID NO: 769232 - protein, 114 aa, Homo sapiens
GREREGDEERKMNDSLEDMFDRTTHEEYESCLADSFSQAADEEEELSTATKKLHTHGDKQDKVKQKAFVEPYFKGDERETSLQNFPHIEVVRKKEERRKLLGHTCKECEINCKY

SEQ ID NO: 769233 - protein, 897 aa, Homo sapiens; identical to SEQ ID NO: 769231

SEQ ID NO: 769234 - protein, 876 aa, Homo sapiens
MNISGSSCGSPNSADTSSDFKDLWTKLKECHDREVQGLQVKVTKLKQERILDAQRLEEFFTKNQQLREQQKVLHETIKVLEDRLRAGLCDRCAVTEEHMRKKQQEFENIRQQNLKLITELMNERNTLQEENKKLSEQLQQKIENDQQHQAAELECEEDVIPDSPITAFSFSGVNRLRRKENPHVRYIEQTHTKLEHSVCANEMRKVSKSSTHPQHNPNENEILVADTYDQSQSPMAKAHGTSSYTPDKSSFNLATVVAETLGLGVQEESETQGPMSPLGDELYHCLEGNHKKQPFEESTRNTEDSLRFSDSTSKTPPQEELPTRVSSPVFGATSSIKSGLDLNTSLSPSLLQPGKKKHLKTLPFSNTCISRLEKTRSKSEDSALFTHHSLGSEVNKIIIQSSNKQILINKNISESLGEQNRTEYGKDSNTDKHLEPLKSLGGRTSKRKKTEEESEHEVSCPQASFDKENAFPFPMDNQFSMNGDCVMDKPLDLSDRFSAIQRQEKSQGSETSKNKFRQVTLYEALKTIPKGFSSSRKASDGNCTLPKDSPGEPCSQECIILQPLNKCSPDNKPSLQIKEENAVFKIPLRPRESLETENVLDDIKSAGSHEPIKIQTRSDHGGCELASVLQLNPCRTGKIKSLQNNQDVSFENIQWSIDPGADLSQYKMDVTVIDTKDGSQSKLGGETVDMDCTLVSETVLLKMKKQEQKGEKSSNEERKMNDSLEDMFDRTTHEEYESCLADSFSQAADEEEELSTATKKLHKRLACKIFLILRWFGKKRREENCLGTRVRNVKFIMQICQQKKEKRNWLPAQDTDSATFHPTHQRIFGKLVFLPLRLVWKEVILRKILILVLVQKDVSLTTQYFLQKARSRRHRR

SEQ ID NO: 769235 - protein, 897 aa, Homo sapiens; identical to SEQ ID NO: 769231

SEQ ID NO: 769236 - protein, 897 aa, Homo sapiens; identical to SEQ ID NO: 769231

SEQ ID NO: 769237 - protein, 918 aa, Homo sapiens
  misc_feature (871)..(871): Xaa can be any naturally occurring amino acid
  misc_feature (884)..(884): Xaa can be any naturally occurring amino acid
  misc_feature (894)..(894): Xaa can be any naturally occurring amino acid
  misc_feature (907)..(907): Xaa can be any naturally occurring amino acid
  misc_feature (913)..(913): Xaa can be any naturally occurring amino acid
  misc_feature (916)..(916): Xaa can be any naturally occurring amino acid
MNISGSSCGSPNSADTSSDFKDLWTKLKECHDREVQGLQVKVTKLKQERILDAQRLEEFFTKNQQLREQQKVLHETIKVLEDRLRAGLCDRCAVTEEHMRKKQQEFENIRQQNLKLITELMNERNTLQEENKKLSEQLQQKIENDQQHQAAELECEEDVIPDSPITAFSFSGVNRLRRKENPHVRYIEQTHTKLEHSVCANEMRKVSKSSTHPQHNPNENEILVADTYDQSQSPMAKAHGTSSYTPDKSSFNLATVVAETLGLGVQEESETQGPMSPLGDELYHCLEGNHKKQPFEESTRNTEDSLRFSDSTSKTPPQEELPTRVSSPVFGATSSIKSGLDLNTSLSPSLLQPGKKKHLKTLPFSNTCISRLEKTRSKSEDSALFTHHSLGSEVNKIIIQSSNKQILINKNISESLGEQNRTEYGKDSNTDKHLEPLKSLGGRTSKRKKTEEESEHEVSCPQASFDKENAFPFPMDNQFSMNGDCVMDKPLDLSDRFSAIQRQEKSQGSETSKNKFRQVTLYEALKTIPKGFSSSRKASDGNCTLPKDSPGEPCSQECIILQPLNKCSPDNKPSLQIKEENAVFKIPLRPRESLETENVLDDIKSAGSHEPIKIQTRSDHGGCELASVLQLNPCRTGKIKSLQNNQDVSFENIQWSIDPGADLSQYKMDVTVIDTKDGSQSKLGGETVDMDCTLVSETVLLKMKKQEQKGEKSSNEERKMNDSLEDMFDRTTHEEYESCLADSFSQAADEEEELSTATKKLHTHGDKQDKVKQKAFVEPYFKGDERETSLQNFPHIEVVRKKEERRKLLGHTCKECEIYYADMPAEEREKKLASCSRHRFRYIPPNTPENFWEVGFPSTQTCMERGYIKGXPQLAKPCKYQCLXRNCPLFPNSXTSGPFSLPLGALXLCWPFXSPXGF

SEQ ID NO: 769238 - protein, 894 aa, Homo sapiens
MNISGSSCGSPNSADTSSDFKDLWTKLKECHDREVQGLQVKVTKLKQERILDAQRLEEFFTKNQQLREQQKVLHETIKVLEDRLRAGLCDRCAVTEEHMRKKQQEFENIRQQNLKLITELMNERNTLQEENKKLSEQLQQKIENDQQHQAAELECEEDVIPDSPITAFSFSGVNRLRRKENPHVRYIEQTHTKLEHSVCANEMRKVSKSSTHPQHNPNENEILVADTYDQSQSPMAKAHGTSSYTPDKSSFNLATVVAETLGLGVQEESETQGPMSPLGDELYHCLEGNHKKQPFEESTRNTEDSLRFSDSTSKTPPQEELPTRVSSPVFGATSSIKSGLDLNTSLSPSLLQPGKKKHLKTLPFSNTCISRLEKTRSKSEDSALFTHHSLGSEVNKIIIQSSNKQILINKNISESLGEQNRTEYGKDSNTDKHLEPLKSLGGRTSKRKKTEEESEHEVSCPQASFDKENAFPFPMDNQFSMNGDCVMDKPLDLSDRFSAIQRQEKSQGSETSKNKFRQVTLYEALKTIPKGFSSSRKASDGNCTLPKDSPGEPCSQECIILQPLNKCSPDNKPSLQIKEENAVFKIPLRPRESLETENVLDDIKSAGSHEPIKIQTRSDHGGCELASVLQLNPCRTGKIKSLQNNQDVSFENIQWSIDPGADLSQYKMDVTVIDTKDGSQSKLGGETVDMDCTLVSETVLLKMKKQEQKGEKSSNEERKMNDSLEDMFDRTTHEEYESCLADSFSQAADEEEELSTATKKLHTHGDKQDKVKQKAFVEPYFKGDERETSLQNFPHIEVVRKKEERRKLLGHTCKECEIHIYYADIQAEEREKNGFCKNDSVMHQNRDWSGSFNQLYGRVIRRLTACQRVLKNFQRGEIIDEEEGSLFIRESLVE

SEQ ID NO: 769239 - protein, 416 aa, Homo sapiens
THASPTRRPTRRSDRFSAIQRQEKSQGSETSKNKFRQVTLYEALKTIPKGFSSSRKASDGNCTLPKDSPGEPCSQECIILQPLNKCSPDNKPSLQIKEENAVFKIPLRPRESLETENVLDDIKSAGSHEPIKIQTRSDHGGCELASVLQLNPCRTGKIKSLQNNQDVSFENIQWSIDPGADLSQYKMDVTVIDTKDGSQSKLGGETVDMDCTLVSETVLLKMKKQEQKGEKSSNEERKMNDSLEDMFDRTTHEEYESCLADSFSQAADEEEELSTATKKLHTHGDKQDKVKQKAFVEPYFKGDERETSLQNFPHIEVVRKKEERRKLLGHTCKECEIYYADMPAEEREKKLASCSRHRFRYIPPNTPENFWEVGFPSTQTCMERGYIKEDLDPCPRPKRRQPYNAIFSPKGKEQKT

SEQ ID NO: 769240 - protein, 89 aa, Homo sapiens
SGRDVARAPGRGGSGRLRARPAAPGLKARAVRRGRLSHRGFGTLVREKGEREKRAAVLSQPQKVLASLRGLSRIPRQSRRRYLTCPKTT

SEQ ID NO: 769241 - protein, 897 aa, Homo sapiens; identical to SEQ ID NO: 769231

SEQ ID NO: 769242 - protein, 109 aa, Homo sapiens
GTVVHTNERDSGMLTSYATPDTATRYEQQCTAELECEEDVIPDSPITAFSFSGVNRLRRKENPRYSDQDEQQCRYEQQCRYEQQCRYEQQCRYEQQCRYEQQCRYEQQC

SEQ ID NO: 769243 - protein, 880 aa, Homo sapiens
MNISGSSCGSPNSADTSSDFKDLWTKLKECHDREVQGLQVKVTKLKQERILDAQRLEEFFTKNQQLREQQKVLHETIKVLEDRLRAGLCDRCAVTEEHMRKKQQEFENIRQQNLKLITELMNERNTLQEENKKLSEQLQQKIENDQQHQAAELECEEDVIPDSPITAFSFSGVNRLRRKENPHVRYIEQTHTKLEHSVCANEMRKVSKSSTHPQHNPNENEILVADTYDQSQSPMATTVVAETLGLGVQEESETQGPMSPLGDELYHCLEGNHKKQPFEESTRNTEDSLRFSDSTSKTPPQEELPTRVSSPVFGATSSIKSGLDLNTSLSPSLLQPGKKKHLKTLPFSNTCISRLEKTRSKSEDSALFTHHSLGSEVNKIIIQSSNKQILINKNISESLGEQNRTEYGKDSNTDKHLEPLKSLGGRTSKRKKTEEESEHEVSCPQASFDKENAFPFPMDNQFSMNGDCVMDKPLDLSDRFSAIQRQEKSQGSETSKNKFRQVTLYEALKTIPKGFSSSRKASDGNCTLPKDSPGEPCSQECIILQPLNKCSPDNKPSLQIKEENAVFKIPLRPRESLETENVLDDIKSAGSHEPIKIQTRSDHGGCELASVLQLNPCRTGKIKSLQNNQDVSFENIQWSIDPGADLSQYKMDVTVIDTKDGSQSKLGGETVDMDCTLVSETVLLKMKKQEQKGEKSSNEERKMNDSLEDMFDRTTHEEYESCLADSFSQAADEEEELSTATKKLHTHGDKQDKVKQKAFVEPYFKGDERETSLQNFPHIEVVRKKEERRKLLGHTCKECEIYYADMPAEEREKKLASCSRHRFRYIPPNTPENFWEVGFPSTQTCMERGYIKEDLDPCPRPKRRQPYNAIFSPKGKEQKT

SEQ ID NO: 769244 - protein, 897 aa, Homo sapiens; identical to SEQ ID NO: 769231

SEQ ID NO: 769245 - protein, 866 aa, Homo sapiens
LGLSLPASDKVSELKQERILDAQRLEEFFTKNQQLREQQKVLHETIKVLEDRLRAGLCDRCAVTEEHMRKKQQEFENIRQQNLKLITELMNERNTLQEENKKLSEQLQQKIENDQQHQAAELECEEDVIPDSPITAFSFSGVNRLRRKENPHVRYIEQTHTKLEHSVCANEMRKVSKSSTHPQHNPNENEILVADTYDQSQSPMAKAHGTSSYTPDKSSFNLATVVAETLGLGVQEESETQGPMSPLGDELYHCLEGNHKKQPFEESTRNTEDSLRFSDSTSKTPPQEELPTRVSSPVFGATSSIKSGLDLNTSLSPSLLQPGKKKHLKTLPFSNTCISRLEKTRSKSEDSALFTHHSLGSEVNKIIIQSSNKQILINKNISESLGEQNRTEYGKDSNTDKHLEPLKSLGGRTSKRKKTEEESEHEVSCPQASFDKENAFPFPMDNQFSMNGDCVMDKPLDLSDRFSAIQRQEKSQGSETSKNKFRQVTLYEALKTIPKGFSSSRKASDGNCTLPKDSPGEPCSQECIILQPLNKCSPDNKPSLQIKEENAVFKIPLRPRESLETENVLDDIKSAGSHEPIKIQTRSDHGGCELASVLQLNPCRTGKIKSLQNNQDVSFENIQWSIDPGADLSQYKMDVTVIDTKDGSQSKLGGETVDMDCTLVSETVLLKMKKQEQKGEKSSNEERKMNDSLEDMFDRTTHEEYESCLADSFSQAADEEEELSTATKKLHTHGDKQDKVKQKAFVEPYFKGDERETSLQNFPHIEVVRKKEERRKLLGHTCKECEIYYADMPAEEREKKLASCSRHRFRYIPPNTPENFWEVGFPSTQTCMERGYIKEDLDPCPRPKRRQPYNAIFSPKGKEQKT

SEQ ID NO: 769246 - protein, 836 aa, Homo sapiens
MNISGSSCGSPNSADTSSDFKDLWTKLKECHDREVQGLQVKVTKLKQERILDAQRLEEFFTKNQQLREQQKVLHETIKVLEDRLRAGLCDRCAVTEEHMRKKQQEFENIRQQNLKLITELMNERNTLQEENKKLSEQLQQKIENDQQHQAAELECEEDVIPDSPITAFSFSGVNRLRRKENPHVRYIEQTHTKLEHSVCANEMRKVSKSSTHPQHNPNENEILVADTYDQSQSPMAKAHGTSSYTPDKSSFNLATVVAETLGLGVQEESETQGPMSPLGDELYHCLEGNHKKQPFEESTRNTEDSLRFSDSTSKTPPQEELPTRVSSPVFGATSSIKSGLDLNTSLSPSLLQPGKKKHLKTLPFSNTCISRLEKTRSKSEDSALFTHHSLGSEVNKIIIQSSNKQILINKNISESLGEQNRTEYGKDSNTDKHLEPLKSLGGRTSKRKKTEEESEHEVSCPQASFDKENAFPFPMDNQFSMNGDCVMDKPLDLSDRFSAIQRQEKSQGSETSKNKFRQVTLYEALKTIPKGFSSSRKASDGNCTLPKDSPGEPCSQECIILQPLNKCSPDNKPSLQIKEENAVFKIPLRPRESLETENVLDDIKSAGSHEPIKIQTRSDHGGCELASVLQLNPCRTGKIKSLQNNQDVSFENIQWSIDPGADLSQYKMDVTVIDTKDGSQSKLGGETVDMDCTLVSETVLLKMKKQEQKGEKSSNEERKMNDSLEDMFDRTTHEEYESCLADSFSQAADEEEELSTATKKLHTHGDKQDKVKQKAFVEPYFKGDERETSLQNFPHIEVVRKKEERRKLLGHTCKECEILLTYVIYHQPHESAIHGH

SEQ ID NO: 769247 - protein, 341 aa, Homo sapiens
LLLLNSRPRRRSPDNKPSLQIKEENAVFKIPLRPRESLETENVLDDIKSAGSHEPIKIQTRSDHGGCELASVLQLNPCRTGKIKSLQNNQDVSFENIQWSIDPGADLSQYKMDVTVIDTKDGSQSKLGGETVDMDCTLVSETVLLKMKKQEQKGEKSSNEERKMNDSLEDMFDRTTHEEYESCLADSFSQAADEEEELSTATKKLHTHGDKQDKVKQKAFVEPYFKGDERETSLQNFPHIEVVRKKEERRKLLGHTCKECEIYYADMPAEEREKKLASCSRHRFRYIPPNTPENFWEVGFPSTQTCMERGYIKEDLDPCPRPKRRQPYNAIFSPKGKEQKT

SEQ ID NO: 769248 - protein, 810 aa, Homo sapiens
MNISGSSCGSPNSADTSSDFKDLWTKLKECHDREVQGLQVKVTKLKQERILDAQRLEEFFTKNQQLREQQKVLHETIKVLEDRLRAGLCDRCAVTEEHMRKKQQEFENIRQQNLKLITELMNERNTLQEENKKLSEQLQQKIENDQQHQAAELECEEDVIPDSPITAFSFSGVNRLRRKENPHVRYIEQTHTKLEHSVCANEMRKVSKSSTHPQHNPNENEILVADTYDQSQSPMAKAHGTSSYTPDKSSFNLATVVAETLGLGVQEESETQGPMSPLGDELYHCLEGNHKKQPFEESTRNTEDSLRFSDSTSKTPPQEELPTRVSSPVFGATSSIKSGLDLNTSLSPSLLQPGKKKHLKTLPFSNTCISRLEKTRSKSEDSALFTHHSLGSEVNKIIIQSSNKQILINKNISESLGEQNRTEYGKDSNTDKHLEPLKSLGGRTSKRKKTEEESEHEVSCPQASFDKENAFPFPMDNQFSMNGDCVMDKPLDLSDRFSAIQRQEKSQGSETSKNKFRQVTLYEALKTIPKGFSSSRKASDGNCTLPKDSPGEPCSQECIILQPLNKCSPDNKPALFMSSKTFQSPIKIQTRSDHGGCELASVLQLNPCRTGKIKSLQNNQDVSFENIQWSIDPGADLSQYKMDVTVIDTKDGSQSKLGGETVDMDCTLVSETVLLKMKKQEQKGEKSSNEERKMNDSLEDMFDRTTHEEYESCLADSFSQAADEEEELSTATKKLHTHGDKQDKVKQKAFVEPYFKGDERETSLQNFPHIEVVRKKEERRKLLGHTCKECEILLTYVIYHQPHESAIHGH

SEQ ID NO: 769249 - protein, 380 aa, Homo sapiens
MASLAAANAEFCFNLFREMDDNQGNGNVFFSSLSLFAALALVRLGAQDDSLSQIDKLLHVNTASGYGNSSNSQSGLQSQLKRVFSDINASHKDYDLSIVNGLFAEKVYGFHKDYIECAEKLYDAKVERVDFTNHLEDTRRNINKWVENETHGKIKNVIGEGGISSSAVMVLVNAVYFKGKWQSAFTKSETINCHFKSPKCSGKAVAMMHQERKFNLSVIEDPSMKILELRYNGGINMYVLLPENDLSEIENKLTFQNLMEWTNPRRMTSKYVEVFFPQFKIEKNYEMKQYLRALGLKDIFDESKADLSGIASGGRLYISRMMHKSYIEVTEEGTEATAATGSNIVEKQLPQSTLFRADHPFLFVIRKDDIILFSGKVSCP

SEQ ID NO: 769250 - protein, 380 aa, Homo sapiens; identical to SEQ ID NO: 769249

SEQ ID NO: 769251 - protein, 78 aa, Homo sapiens
PPHLGAGDPSAGLWTSSSRQGRRRSWSRSGDRGFPGVAMEGSPRCMLHITEGGRDTACPSLGQRLMRRTCKWGDGVSH

SEQ ID NO: 769252 - protein, 750 aa, Homo sapiens
MWNLLHETDSAVATARRPRWLCAGALVLAGGFFLLGFLFGWFIKSSNEATNITPKHNMKAFLDELKAENIKKFLYNFTQIPHLAGTEQNFQLAKQIQSQWKEFGLDSVELAHYDVLLSYPNKTHPNYISIINEDGNEIFNTSLFEPPPPGYENVSDIVPPFSAFSPQGMPEGDLVYVNYARTEDFFKLERDMKINCSGKIVIARYGKVFRGNKVKNAQLAGAKGVILYSDPADYFAPGVKSYPDGWNLPGGGVQRGNILNLNGAGDPLTPGYPANEYAYRRGIAEAVGLPSIPVHPIGYYDAQKLLEKMGGSAPPDSSWRGSLKVPYNVGPGFTGNFSTQKVKMHIHSTNEVTRIYNVIGTLRGAVEPDRYVILGGHRDSWVFGGIDPQSGAAVVHEIVRSFGTLKKEGWRPRRTILFASWDAEEFGLLGSTEWAEENSRLLQERGVAYINADSSIEGNYTLRVDCTPLMYSLVHNLTKELKSPDEGFEGKSLYESWTKKSPSPEFSGMPRISKLGSGNDFEVFFQRLGIASGRARYTKNWETNKFSGYPLYHSVYETYELVEKFYDPMFKYHLTVAQVRGGMVFELANSIVLPFDCRDYAVVLRKYADKIYSISMKHPQEMKTYSVSFDSLFSAVKNFTEIASKFSERLQDFDKSNPIVLRMMNDQLMFLERAFIDPLGLPDRPFYRHVIYAPSSHNKYAGESFPGIYDALFDIESKVDPSKAWGEVKRQIYVAAFTVQAAAETLSEVA

SEQ ID NO: 769253 - protein, 750 aa, Homo sapiens; identical to SEQ ID NO: 769252

SEQ ID NO: 769254 - protein, 688 aa, Homo sapiens
MWNLLHETDSAVATARRPRWLCAGALVLAGGFFLLGFLFGWFIKSSNEATNITPKHNMKAFLDELKAENIKKFLYNFTQIPHLAGTEQNFQLAKQIQSQWKEFGLDSVELAHYDVLLSYPNKTHPNYISIINEDGNEIFNTSLFEPPPPGYENVSDIVPPFSAFSPQGMPEGDLVYVNYARTEDFFKLERDMKINCSGKIVIARYGKVFRGNKNMLIGVELQRLLVFQVFLFIQIGYYDAQKLLEKMGGSAPPDSSWRGSLKVPYNVGPGFTGNFSTQKVKMHIHSTNEVTRIYNVIGTLRGAVEPDRYVILGGHRDSWVFGGIDPQSGAAVVHEIVRSFGTLKKEGWRPRRTILFASWDAEEFGLLGSTEWAEENSRLLQERGVAYINADSSIEGNYTLRVDCTPLMYSLVHNLTKELKSPDEGFEGKSLYESWTKKSPSPEFSGMPRISKLGSGNDFEVFFQRLGIASGRARYTKNWETNKFSGYPLYHSVYETYELVEKFYDPMFKYHLTVAQVRGGMVFELANSIVLPFDCRDYAVVLRKYADKIYSISMKHPQEMKTYSVSFDSLFSAVKNFTEIASKFSERLQDFDKSNPIVLRMMNDQLMFLERAFIDPLGLPDRPFYRHVIYAPSSHNKYAGESFPGIYDALFDIESKVDPSKAWGEVKRQIYVAAFTVQAAAETLSEVA

SEQ ID NO: 769255 - protein, 657 aa, Homo sapiens
MWNLLHETDSAVATARRPRWLCAGALVLAGGFFLLGFLFGWFIKSSNEATNITPKHNMKAFLDELKAENIKKFLYNFTQIPHLAGTEQNFQLAKQIQSQWKEFGLDSVELAHYDVLLSYPNKTHPNYISIINEDGNEIFNTSLFEPPPPGYENVSDIVPPFSAFSPQGMPEGDLVYVNYARTEDFFKLERDMKINCSGKIVIARYGKVFRGNKNMLIGVELQRLLVFQVFLFIQIGYYDAQKLLEKMGGSAPPDSSWRGSLKVPYNVGPGFTGNFSTQKVKMHIHSTNEVTRIYNVIGTLRGAVEPDRYVILGGHRDSWVFGGIDPQSGAAVVHEIVRSFGTLKKEGWRPRRTILFASWDAEEFGLLGSTEWAEENSRLLQERGVAYINADSSIEGNYTLRVDCTPLMYSLVHNLTKELKSPDEGFEGKSLYESWTKKSPSPEFSGMPRISKLGSGNDFEVFFQRLGIASGRARYTKNWETNKFSGYPLYHSVYETYELVEKFYDPMFKYHLTVAQVRGGMVFELANSIVLPFDCRDYAVVLRKYADKIYSISMKHPQEMKTYSVSFDSLFSAVKNFTEIASKFSERLQDFDKSKHVIYAPSSHNKYAGESFPGIYDALFDIESKVDPSKAWGEVKRQIYVAAFTVQAAAETLSEVA

SEQ ID NO: 769256 - protein, 507 aa, Homo sapiens
MWNLLHETDSAVATARRPRWLCAGALVLAGGFFLLGFLFGWFIKSSNEATNITPKHNMKAFLDELKAENIKKFLYNFTQIPHLAGTEQNFQLAKQIQSQWKEFGLDSVELAHYDVLLSYPNKTHPNYISIINEDGNEIFNTSLFEPPPPGYENVSDIVPPFSAFSPQGMPEGDLVYVNYARTEDFFKLERDMKINCSGKIVIARYGKVFRGNKNMLIGVELQRLLVFQVFLFIQIGYYDAQKLLEKMGGSAPPDSSWRGSLKVPYNVGPGFTGNFSTQKVKMHIHSTNEVTRIYNVIGTLRGAVEPDRYVILGGHRDSWVFGGIDPQSGAAVVHEIVRSFGTLKKEGWRPRRTILFASWDAEEFGLLGSTEWAEENSRLLQERGVAYINADSSIEGNYTLRVDCTPLMYSLVHNLTKELKSPDEGFEGKSLYESWTKKSPSPEFSGMPRISKLGSGNDFEVFFQRLGIASGRARYTKNWETNKFSGYPLYHSVYETYELVEKFNFHF

SEQ ID NO: 769257 - protein, 420 aa, Homo sapiens
MWNLLHETDSAVATARRPRWLCAGALVLAGGFFLLGFLFGWFIKSSNEATNITPKHNMKAFLDELKAENIKKFLYNFTQIPHLAGTEQNFQLAKQIQSQWKEFGLDSVELAHYDVLLSYPNKTHPNYISIINEDGNEIFNTSLFEPPPPGYENVSDIVPPFSAFSPQGMPEGDLVYVNYARTEDFFKLERDMKINCSGKIVIARYGKVFRGNKNMLIGVELQRLLVFQVFLFIQIGYYDAQKLLEKMGGSAPPDSSWRGSLKVPYNVGPGFTGNFSTQKVKMHIHSTNEVTRIYNVIGTLRGAVEPDRYVILGGHRDSWVFGGIDPQSGAAVVHEIVRSFGTLKKEGWRPRRTILFASWDAEEFGLLGSTEWAEENSRLLQERGVAYINADSSIEGNYTLRVDCTPLMYSLVHNLTKEVL

SEQ ID NO: 769258 - protein, 277 aa, Homo sapiens
MWNLLHETDSAVATARRPRWLCAGALVLAGGFFLLGFLFGWFIKSSNEATNITPKHNMKAFLDELKAENIKKFLYNFTQIPHLAGTEQNFQLAKQIQSQWKEFGLDSVELAHYDVLLSYPNKTHPNYISIINEDGNEIFNTSLFEPPPPGYENVSDIVPPFSAFSPQGMPEGDLVYVNYARTEDFFKLERDMKINCSGKIVIARYGKVFRGNKVKNAQLAGAKGVILYSDPADYFAPGVKSYPDGWNLPGGGVQRGNILNLNGAGDPLTPGYPANGE

SEQ ID NO: 769259 - protein, 107 aa, Homo sapiens
HACGQVPSDENSPRNRPTRSHVPSNENSLRNRPTRGQVPSDENNPRNRTPRGQVPSDENNPRNRTPRGQVPSDENDPRNHPTRSHVPSNDNNPRNHPTHGHIPSDEN

SEQ ID NO: 769260 - protein, 78 aa, Homo sapiens
TLSRAGPGPGRGAGTSARRCSPGPLGFSHLGIWGQWRSARSASNLCSGQRKPDSRIRWCHRQLLNANFVPALSEQDSS

SEQ ID NO: 769261 - protein, 258 aa, Homo sapiens [sequence omitted]

SEQ ID NO: 769262 - protein, 258 aa, Homo sapiens [sequence omitted]

SEQ ID NO: 769263 - protein, 141 aa, Homo sapiens
MGTRDDVPEAKVLVPVAVYCGSIPRTSAGPRVLPPGSINSSLPHGEGSLQPEPRALLNNEEPSQLLRGLGQLGGLKLDTPSKGWQARNGHPRNLRALSLGDQPLVLLPSPESEANSVARDTIQIKDKLKKRRLSEGLAASS

SEQ ID NO: 769264 - protein, 44 aa, Homo sapiens
SPSQLPALNTTGNGLPADLTHHLHHPSQQQLCSPAHPSQQQLCS

SEQ ID NO: 769265 - protein, 74 aa, Homo sapiens
GPAQIPQLRCSGTQGEKGDQVSWRGLMCGTRSRSRSPGEDLVPVKLAAPGGLSACFCSHCVSCLQASPLAFALP

SEQ ID NO: 769266 - protein, 474 aa, Homo sapiens
MELLTFRDVAIEFSPEEWKCLDPDQQNLYRDVMLENYRNLVSLGVAISNPDLVTCLEQRKEPYNVKIHKIVARPPAMCSHFTQDHWPVQGIEDSFHKLILRRYEKCGHDNLQLRKGCKSLNECKLQKGGYNEFNECLSTTQSKILQCKASVKVVSKFSNSNKRKTRHTGEKHFKECGKSFQKFSHLTQHKVIHAGEKPYTCEECGKAFKWSLIFNEHKRIHTGEKPFTCEECGSIFTTSSHFAKHKIIHTGEKPYKCEECGKAFNRFTTLTKHKRIHAGEKPITCEECRKIFTSSSNFAKHKRIHTGEKPYKCEECGKAFNRSTTLTKHKRIHTGEKPYTCEECGKAFRQSSKLNEHKKVHTGERPYKCDECGKAFGRSRVLNEHKKIHTGEKPYKCEECGKAFRRSTDRSQHKKIHSADKPYKCKECDKAFKQFSLLSQHKKIHTVDKPYKCKDCDKAFKRFSHLNKHKKIHT

SEQ ID NO: 769267 - protein, 967 aa, Homo sapiens
MQRAVPEGFGRRKLGSDMGNAERAPGSRSFGPVPTLLLLAAALLAVSDALGRPSEEDEELVVPELERAPGHGTTRLRLHAFDQQLDLELRPDSSFLAPGFTLQNVGRKSGSETPLPETDLAHCFYSGTVNGDPSSAAALSLCEGVRGAFYLLGEAYFIQPLPAASERLATAAPGEKPPAPLQFHLLRRNRQGDVGGTCGVVDDEPRPTGKAETEDEDEGTEGEDEGAQWSPQDPALQGVGQPTGTGSIRKKRFVSSHRYVETMLVADQSMAEFHGSGLKHYLLTLFSVAARLYKHPSIRNSVSLVVVKILVIHDEQKGPEVTSNAALTLRNFCNWQKQHNPPSDRDAEHYDTAILFTRQDLCGSQTCDTLGMADVGTVCDPSRSCSVIEDDGLQAAFTTAHELGHVFNMPHDDAKQCASLNGVNQDSHMMASMLSNLDHSQPWSPCSAYMITSFLDNGHGECLMDKPQNPIQLPGDLPGTSYDANRQCQFTFGEDSKHCPDAASTCSTLWCTGTSGGVLVCQTKHFPWADGTSCGEGKWCINGKCVNKTDRKHFDTPFHGSWGMWGPWGDCSRTCGGGVQYTMRECDNPVPKNGGKYCEGKRVRYRSCNLEDCPDNNGKTFREEQCEAHNEFSKASFGSGPAVEWIPKYAGVSPKDRCKLICQAKGIGYFFVLQPKVVDGTPCSPDSTSVCVQGQCVKAGCDRIIDSKKKFDKCGVCGGNGSTCKKISGSVTSAKPGYHDIITIPTGATNIEVKQRNQRGSRNNGSFLAIKAADGTYILNGDYTLSTLEQDIMYKGVVLRYSGSSAALERIRSFSPLKEPLTIQVLTVGNALRPKIKYTYFVKKKKESFNAIPTFSAWVIEEWGECSKSCELGWQRRLVECRDINGQPASECAKEVKPASTRPCADHPCPQWQLGEWSSCSKTCGKGYKKRSLKCLSHDGGVLSHESCDPLKKPKHFIDFCTMAECS

SEQ ID NO: 769268 - protein, 967 aa, Homo sapiens; identical to SEQ ID NO: 769267

SEQ ID NO: 769269 - protein, 570 aa, Homo sapiens [sequence omitted]

SEQ ID NO: 769270 - protein, 577 aa, Homo sapiens
MIHTLMWVLDCFLGHVFNMPHDDAKQCASLNGVNQDSHMMASMLSNLDHSQPWSPCSAYMITSFLDNGHGECLMDKPQNPIQLPGDLPGTSYDANRQCQFTFGEDSKHCPDAASTCSTLWCTGTSGGVLVCQTKHFPWADGTSCGEGKWCINGKCVNKTDRKHFDTPFHGSWGMWGPWGDCSRTCGGGVQYTMRECDNPVPKNGGKYCEGKRVRYRSCNLEDCPDNNGKTFREEQCEAHNEFSKASFGSGPAVEWIPKYAGVSPKDRCKLICQAKGIGYFFVLQPKVVDGTPCSPDSTSVCVQGQCVKAGCDRIIDSKKKFDKCGVCGGNGSTCKKISGSVTSAKPGYHDIITIPTGATNIEVKQRNQRGSRNNGSFLAIKAADGTYILNGDYTLSTLEQDIMYKGVVLRYSGSSAALERIRSFSPLKEPLTIQVLTVGNALRPKIKYTYFVKKKKESFNAIPTFSAWVIEEWGECSKSCELGWQRRLVECRDINGQPASECAKEVKPASTRPCADHPCPQWQLGEWSSCSKTCGKGYKKRSLKCLSHDGGVLSHESCDPLKKPKHFIDFCTMAECS

SEQ ID NO: 769271 - protein, 577 aa, Homo sapiens
GIHRYPLNDANADIRMPALNYCCDNVSMLNDCTRIPTGVVVMVSPAETTNSAVYCYNPYVITSFLDNGHGECLMDKPQNPIQLPGDLPGTSYDANRQCQFTFGEDSKHCPDAASTCSTLWCTGTSGGVLVCQTKHFPWADGTSCGEGKWCINGKCVNKTDRKHFDTPFHGSWGMWGPWGDCSRTCGGGVQYTMRECDNPVPKNGGKYCEGKRVRYRSCNLEDCPDNNGKTFREEQCEAHNEFSKASFGSGPAVEWIPKYAGVSPKDRCKLICQAKGIGYFFVLQPKVVDGTPCSPDSTSVCVQGQCVKAGCDRIIDSKKKFDKCGVCGGNGSTCKKISGSVTSAKPGYHDIITIPTGATNIEVKQRNQRGSRNNGSFLAIKAADGTYILNGDYTLSTLEQDIMYKGVVLRYSGSSAALERIRSFSPLKEPLTIQVLTVGNALRPKIKYTYFVKKKKESFNAIPTFSAWVIEEWGECSKSCELGWQRRLVECRDINGQPASECAKEVKPASTRPCADHPCPQWQLGEWSSCSKTCGKGYKKRSLKCLSHDGGVLSHESCDPLKKPKHFIDFCTMAECS

SEQ ID NO: 769272 - protein, 570 aa, Homo sapiens [sequence omitted]

SEQ ID NO: 769273 - protein, 967 aa, Homo sapiens; identical to SEQ ID NO: 769267

SEQ ID NO: 769274 - protein, 967 aa, Homo sapiens; identical to SEQ ID NO: 769267

SEQ ID NO: 769275 - protein, 967 aa, Homo sapiens; identical to SEQ ID NO: 769267

SEQ ID NO: 769276 - protein, 821 aa, Homo sapiens
MQRAVPEGFGRRKLGSDMGNAERAPGSRSFGPVPTLLLLAAALLAVSDALGRPSEEDEELVVPELERAPGHGTTRLRLHAFDQQLDLELRPDSSFLAPGFTLQNVGRKSGSETPLPETDLAHCFYSGTVNGDPSSAAALSLCEGVRGAFYLLGEAYFIQPLPAASERLATAAPGEKPPAPLQFHLLRRNRQGDVGGTCGVVDDEPRPTGKAETEDEDEGTEGEDEGAQWSPQDPALQGVGQPTGTGSIRKKRFVSSHRYVETMLVADQSMAEFHGSGLKHYLLTLFSVAARLYKHPSIRNSVSLVVVKILVIHDEQKGPEVTSNAALTLRNFCNWQKQHNPPSDRDAEHYDTAILFTRQDLCGSQTCDTLGMADVGTVCDPSRSCSVIEDDGLQAAFTTAHELGHVFNMPHDDAKQCASLNGVNQDSHMMASMLSNLDHSQPWSPCSAYMITSFLDNGHGECLMDKPQNPIQLPGDLPGTSYDANRQCQFTFGEDSKHCPDAASTCSTLWCTGTSGGVLVCQTKHFPWADGTSCGEGKWCINGKCVNKTDRKHFDTPFHGSWGMWGPWGDCSRTCGGGVQYTMRECDNPVPKNGGKYCEGKRVRYRSCNLEDCPDNNGKTFREEQCEAHNEFSKASFGSGPAVEWIPKYAGVSPKDRCKLICQAKGIGYFFVLQPKVVDGTPCSPDSTSVCVQGQCVKAGCDRIIDSKKKFDKCGVCGGNGSTCKKISGSVTSAKPGYHDIITIPTGATNIEVKQRNQRGSRNNGSFLAIKAADGTYILNGDYTLSTLEQDIMYKGVVLRYSGSSSWSNSRILVNVCSALL

SEQ ID NO: 769277 - protein, 138 aa, Homo sapiens
MKALLKREHLCCLVIFCTCSQTLKPVMSMAAWALNVYMIPAAFLLSQTMFINAFWYINSTSSSVTTVYVYFIFQEYPATGAQPLPLVPPGDLVNSSMSPQHCVIWHNKCSWAVVVVTPPKTTQEFNTVWPPVTDIAAP

SEQ ID NO: 769278 - protein, 153 aa, Homo sapiens
MYLCHASSQHPIVTVFACLSPLLHPHVPMPMRPQRARTVACSFALCLALSRDSVNECGMWFTQPGRMGYQPGQEQSTGWGRIQDKEVSSPSSGHSSSGDWEEGRFVYAVFLWLITVQTGHLPPATLTSGLVEPQGTFAGQPNFGPGPGAGPGS

SEQ ID NO: 769279 - protein, 807 aa, Homo sapiens
ARWLSRKMAALAEEQTEVAVKLEPEGPPTLLPPQAGDGAGEGSGGTTNNGPNGGGGNVAASSSTGGDGGTPKPTVAVSAAAPAGAAPVPAAAPDAGAPHDRQTLLAVLQFLRQSKLREAEEALRREAGLLEEAVAGAGAPGEVDSAGAEVTSALLSRVTASAPGPAAPDPPGTGASGATVVSGSASGPAAPGKVGSVAVEDQPDVSAVLSAYNQQGDPTMYEEYYSGLKHFIECSLDCHRAELSQLFYPLFVHMYLELVYNQHENEAKSFFEKFHGDQECYYQDDLRVLSSLTKKEHMKGNETMLDFRTSKFVLRISRDSYQLLKRHLQEKQNNQIWNIVQEHLYIDIFDGMPRSKQQIDAMVGSLAGEAKREANKSKVFFGLLKEPEIEVPLDDEDEEGENEEGKPKKKKPKKDSIGSKSKKQDPNAPPQNRIPLPELKDSDKLDKIMNMKETTKRVRLGPDCLPSICFYTFLNAYQGLTAVDVTDDSSLIAGGFADSTVRVWSVTPKKLRSVKQASDLSLIDKESDDVLERIMDEKTASELKILYGHSGPVYGASFSPDRNYLLSSSEDGTVRLWSLQTFTCLVGYKGHNYPVWDTQFSPYGYYFVSGGHDRVARLWATDHYQPLRIFAGHLADVNCTRFHPNSNYVATGSADRTVRLWDVLNGNCVRIFTGHKGPIHSLTFSPNGRFLATGATDGRVLLWDIGHGLMVGELKGHTDTVCSLRFSRDGEILASGSMDNTVRLWDAIKAFEDLETDDFTTATGHINLPENSQELLLGTYMTKSTPVVHLHFTRRNLVLAAGAYSPQ

SEQ ID NO: 769280 - protein, 783 aa, Homo sapiens
ARWLSRKMAALAEEQTEVAVKLEPEGPPTLLPPQAGDGAGEGSGGTTNNGPNGGGGNVAASSSTGGDGGTPKPTVAVSAAAPAGAAPVPAAAPDAGAPHDRQTLLAVLQFLRQSKLREAEEALRREAGLLEEAVAGAGAPGEVDSAGAEVTSALLSRVTASAPGPAAPDPPGTGASGATVVSGSASGPAAPGKVGSVAVEDQPDVSAVLSAYNQQGDPTMYEEYYSGLKHFIECSLDCHRAELSQLFYPLFVHMYLELVYNQHENEAKSFFEKFHGDQECYYQDDLRVLSSLTKKEHMKGNETMLDFRTSKFVLRISRDSYQLLKRHLQEKQNNQIWNIVQEHLYIDIFDGMPRSKQQIDAMVGSLAGEAKREANKSKVFFGLLKEPEIEVPLDDEDEEGENEEGKPKKKKPKKDSIGSKSKKQDPNAPPQNRIPLPELKDSDKLDKIMNMKETTKRVRLGPDCLPSICFYTFLNAYQGLTAVDVTDDSSLIAGGFADSTVRVWSVTPKKLRSVKQASDLSLIDKESDDVLERIMDEKTASELKILYGHSGPVYGASFSPDRNYLLSSSEDGTVRLWSLQTFTCLVGYKGHNYPVWDTQFSPYGYYFVSGGHDRVARLWATDHYQPLRIFAGHLADVNCTRFHPNSNYVATGSADRTVRLWDVLNGNCVRIFTGHKGPIHSLTFSPNGRFLATGATDGRVLLWDIGHGLMVGELKGHTDTVCSLRFSRDGEILASGSMDNTVRLWDAIKAFEDLETDDFTTATGHINLPENSQELLLGTYMTK

SEQ ID NO: 769281 - protein, 813 aa, Homo sapiens
ARWLSRKMAALAEEQTEVAVKLEPEGPPTLLPPQAGDGAGEGSGGTTNNGPNGGGGNVAASSSTGGDGGTPKPTVAVSAAAPAGAAPVPAAAPDAGAPHDRQTLLAVLQFLRQSKLREAEEALRREAGLLEEAVAGAGAPGEVDSAGAEVTSALLSRVTASAPGPAAPDPPGTGASGATVVSGSASGPAAPGKGEPWGPVGSVAVEDQPDVSAVLSAYNQQGDPTMYEEYYSGLKHFIECSLDCHRAELSQLFYPLFVHMYLELVYNQHENEAKSFFEKFHGDQECYYQDDLRVLSSLTKKEHMKGNETMLDFRTSKFVLRISRDSYQLLKRHLQEKQNNQIWNIVQEHLYIDIFDGMPRSKQQIDAMVGSLAGEAKREANKSKVFFGLLKEPEIEVPLDDEDEEGENEEGKPKKKKPKKDSIGSKSKKQDPNAPPQNRIPLPELKDSDKLDKIMNMKETTKRVRLGPDCLPSICFYTFLNAYQGLTAVDVTDDSSLIAGGFADSTVRVWSVTPKKLRSVKQASDLSLIDKESDDVLERIMDEKTASELKILYGHSGPVYGASFSPDRNYLLSSSEDGTVRLWSLQTFTCLVGYKGHNYPVWDTQFSPYGYYFVSGGHDRVARLWATDHYQPLRIFAGHLADVNCTRFHPNSNYVATGSADRTVRLWDVLNGNCVRIFTGHKGPIHSLTFSPNGRFLATGATDGRVLLWDIGHGLMVGELKGHTDTVCSLRFSRDGEILASGSMDNTVRLWDAIKAFEDLETDDFTTATGHINLPENSQELLLGTYMTKSTPVVHLHFTRRNLVLAAGAYSPQ

SEQ ID NO: 769282 - protein, 147 aa, Homo sapiens
AKTLAERTAGQERLAPLLPRILSDADPDTTWNSFSRTFLRVLWARAQLSPLSVALFFACLRDSAVGPPSARASPATQRPPRAQERGIAASSRGSPEARSFGGAPFESRNFLTCPLCQHVQQTSCCYCCRCCCCKGRNKPSTYPPPRW

SEQ ID NO: 769283 - protein, 690 aa, Homo sapiens
VSTIKLFLPDGMEARLRSDVIHAPLPSPVDKVAANTPSMYSQELFQLSQYLQEALHREQMLEQKLATLQRLLAITQEASDTSWQALIDEDRLLSRLEVMGNQLQACSKNQTEDSLRKELIALQEDKHNYETTAKESLRRVLQEKIEVVRKLSEVERSLSNTEDECTHLKEMNERTQEELRELANKYNGAVNEIKDLSDKLKVAEGKQEEIQQKGQAEKKELQHKIDEMEEKEQELQAKIEALQADNDFTNERLTALQEHLLSKSGGDCTFIHQFIECQKKLIVEGHLTKAVEETKLSKENQTRAKESDFSDTLSPSKEKSSDDTTDAQMDEQDLNEPLAKVSLLKDDLQGAQSEIEAKQEIQHLRKELIEAQELARTSKQKCFELQALLEEERKAYRNQVEESTKQIQVLQAQLQRLHIDTENLREEKDSEITSTRDELLSARDEILLLHQAAAKVASERDTDIASLQEELKKVRAELERWRKAASEYEKEITSLQNSFQLRCQQCEDQQREEATRLQGELEKLRKEWNALETECHSLKRENVLLSSELQRQEKELHNSQKQSLELTSDLSILQMSRKELENQVGSLKEQHLRDSADLKTLLSKAENQAKDVQKEYEKTQTVLSELKLKFEMTEQEKQSITDELKQCKNNLKLLREKGNNKPWPWMPMLAALVAVTAIVLYVPGLARASP

SEQ ID NO: 769284 - protein, 704 aa, Homo sapiens
VSTIKLFLPDGMEARLRSDVIHAPLPSPVDKVAANTPSMYSQELFQLSQYLQEALHREQMLEQKLATLQRLLAITQEASDTSWQALIDEDRLLSRLEVMGNQLQACSKNQTEDSLRKELIALQEDKHNYETTAKESLRRVLQEKIEVVRKLSEVERSLSNTEDECTHLKEMNERTQEELRELANKYNGAVNEIKDLSDKLKVAEGKQEEIQQKGQAEKKELQHKIDEMEEKEQELQAKIEALQADNDFTNERLTALQVRLEHLQEKTLKECSSLEHLLSKSGGDCTFIHQFIECQKKLIVEGHLTKAVEETKLSKENQTRAKESDFSDTLSPSKEKSSDDTTDAQMDEQDLNEPLAKVSLLKDDLQGAQSEIEAKQEIQHLRKELIEAQELARTSKQKCFELQALLEEERKAYRNQVEESTKQIQVLQAQLQRLHIDTENLREEKDSEITSTRDELLSARDEILLLHQAAAKVASERDTDIASLQEELKKVRAELERWRKAASEYEKEITSLQNSFQLRCQQCEDQQREEATRLQGELEKLRKEWNALETECHSLKRENVLLSSELQRQEKELHNSQKQSLELTSDLSILQMSRKELENQVGSLKEQHLRDSADLKTLLSKAENQAKDVQKEYEKTQTVLSELKLKFEMTEQEKQSITDELKQCKNNLKLLREKGNNPSILQPVPAVFIGLFLAFLFWCFGPLW

SEQ ID NO: 769285 - protein, 646 aa, Homo sapiens
VSTIKLFLPDGMEARLRSDVIHAPLPSPVDKVAANTPSMYSQELFQLSQYLQEALHREQMLEQKLATLQRLLAITQEASDTSWQALIDEDRLLSRLEVMGNQLQACSKNQTEDSLRKELIALQEDKHNYETTAKESLRRVLQEKIEVVRKLSEVERSLSNTEDECTHLKEMNERTQEELRELANKYNGAVNEIKDLSDKLKVAEGKQEEIQQKGQAEKKELQHKIDEMEEKEQELQAKIEALQADNDFTNERLTALQENQTRAKESDFSDTLSPSKEKSSDDTTDAQMDEQDLNEPLAKVSLLKDDLQGAQSEIEAKQEIQHLRKELIEAQELARTSKQKCFELQALLEEERKAYRNQVEESTKQIQVLQAQLQRLHIDTENLREEKDSEITSTRDELLSARDEILLLHQAAAKVASERDTDIASLQEELKKVRAELERWRKAASEYEKEITSLQNSFQLRCQQCEDQQREEATRLQGELEKLRKEWNALETECHSLKRENVLLSSELQRQEKELHNSQKQSLELTSDLSILQMSRKELENQVGSLKEQHLRDSADLKTLLSKAENQAKDVQKEYEKTQTVLSELKLKFEMTEQEKQSITDELKQCKNNLKLLREKGNNPSILQPVPAVFIGLFLAFLFWCFGPLW

SEQ ID NO: 769286 - protein, 646 aa, Homo sapiens; identical to SEQ ID NO: 769285

SEQ ID NO: 769287 - protein, 318 aa, Homo sapiens
MDEQDLNEPLAKVSLLKALLEEERKAYRNQVEESTKQIQVLQAQLQRLHIDTENLREEKDSEITSTRDELLSARDEILLLHQAAAKVASERDTDIASLQEELKKVRAELERWRKAASEYEKEITSLQNSFQLRCQQCEDQQREEATRLQGELEKLRKEWNALETECHSLKRENVLLSSELQRQEKELHNSQKQSLELTSDLSILQMSRKELENQVGSLKEQHLRDSADLKTLLSKAENQAKDVQKEYEKTQTVLSELKLKFEMTEQEKQSITDELKQCKNNLKLLREKGNNPSILQPVPAVFIGLFLAFLFWCFGPLW

SEQ ID NO: 769288 - protein, 772 aa, Homo sapiens
VSTIKLFLPDGMEARLRSDVIHAPLPSPVDKVAANTPSMYSQELFQLSQYLQEALHREQMLEQKLATLQRLLAITQEASDTSWQALIDEDRLLSRLEVMGNQLQACSKNQTEDSLRKELIALQEDKHNYETTAKESLRRVLQEKIEVVRKLSEVERSLSNTEDECTHLKEMNERTQEELRELANKYNGAVNEIKDLSDKLKVAEGKQEEIQQKGQAEKKELQHKIDEMEEKEQELQAKIEALQADNDFTNERLTALQVRLEHLQEKTLKECSSLEHLLSKSGGDCTFIHQFIECQKKLIVEGHLTKAVEETKLSKENQTRAKESDFSDTLSPSKEKSSDDTTDAQMDEQDLNEPLAKVSLLKDDLQGAQSEIEAKQEIQHLRKELIEAQELARTSKQKCFELQALLEEERKAYRNQVEESTKQIQVLQAQLQRLHIDTENLREEKDSEITSTRDELLSARDEILLLHQAAAKVASERDTDIASLQEELKKVRAELERWRKAASEYEKEITSLQNSFQLRCQQCEDQQREEATRLQGELEKLRKEWNALETECHSLKRENVLLSSELQRQEKELHNSQKQSLELTSDLSILQMSRKELENQVGSLKEQHLRDSADLKTLLSKAENQAKDVQKEYEKTQTVLSELKLKFEMTEQEKQSITDELKQCTFHITTRPSRIHRPIPGFPVLVFRSIVVEKETLALDAHVGCPGCSNSHRAVRARSGQSFSMRAFLESVHRPPSRSWHHTHAGDKQNHFLPLYLLKQQKYKNTAVGSLL

SEQ ID NO: 769289 - protein, 659 aa, Homo sapiens
VSTIKLFLPDGMEARLRSDVIHAPLPSPVDKVAANTPSMYSQELFQLSQYLQEALHREQMLEQKLATLQRLLAITQEASDTSWQALIDEDRLLSRLEVMGNQLQACSKNQTEDSLRKELIALQEDKHNYETTAKESLRRVLQEKIEVVRKLSEVERSLSNTEDECTHLKEMNERTQEELRELANKYNGAVNEIKDLSDKLKVAEGKQEEIQQKGQAEKKELQHKIDEMEEKEQELQAKIEALQADNDFTNERLTALQVRLEHLQEKTLKECSSLEHLLSKSGGDCTFIHQFIECQKKLIVEGHLTKAVEETKLSKENQTRAKESDFSDTLSPSKEKSSDDTTDAQMDEQDLNEPLAKVSLLKDDLQGAQSEIEAKQEIQHLRKELIEAQELARTSKQKCFELQALLEEERKAYRNQVEESTKQIQVLQAQLQRLHIDTENLREEKDSEITSTRDELLSARDEILLLHQAAAKVASERDTDIASLQEELKKVRAELERWRKAASEYEKEITSLQNSFQLRCQQCEDQQREEATRLQGELEKLRKEWNALETECHSLKRENVLLSSELQRQEKELHNSQKQSLELTSDLSILQMSRKELENQVGSLKEQHLRDSADLKTLLSKAENQAKDVQKEPSILQPVPAVFIGLFLAFLFWCFGPLW

SEQ ID NO: 769290 - protein, 646 aa, Homo sapiens; identical to SEQ ID NO: 769285

SEQ ID NO: 769291 - protein, 136 aa, Homo sapiens
MPSALAIFTCRPNSHPFQERHVYLDEPIKIGRSVARCRPAQNNATFDCKVLSRNHALVWFDHKTGKFYLQDTKSSNGTFINSQRLSRGSEESPPCEILSGDIIQFGVDVTENTRKVTHGCIVSTIKLFLPDGMEAR

SEQ ID NO: 769292 - protein, 642 aa, Homo sapiens
VSTIKLFLPDGMEARLRSDVIHAPLPSPVDKVAANTPSMYSQELFQLSQYLQEALHREQMLEQKLATLQRLLAITQEASDTSWQALIDEDRLLSRLEVMGNQLQACSKNQTEDSLRKELIALQEDKHNYETTAKESLRRVLQEKIEVVRKLSEVERSLSNTEDECTHLKEMNERTQEELRELANKYNGAVNEIKDLSDKLKVAEGKQEEIQQKGQAEKKELQHKIDEMEEKEQELQAKIEALQADNDFTNERLTALQVRLEHLQEKTLKECSSLEHLLSKSGGDCTFIHQFIECQKKLIVEGHLTKAVEETKLSKENQTRAKESDFSDTLSPSKEKSSDDTTDAQMDEQDLNEPLAKVSLLKDDLQGAQSEIEAKQEIQHLRKELIEAQELARTSKQKCFELQALLEEERKAYRNQVEESTKQIQVLQAQLQRLHIDTENLREEKDSEITSTRDELLSARDEILLLHQAAAKVASERDTDIASLQEELKKVRAELERWRKAASEYEKEITSLQNSFQLRCQQCEDQQREEATRLQGELEKLRKEWNALETECHSLKRENVLLSSELQRQEKELHKYARTTLFFRYKYFTGANVQPISVWLFGRLTILNKYFSFFFSCHHHYPTCPFLVLMEYRFIKCPKETL

SEQ ID NO: 769293 - protein, 389 aa, Homo sapiens
VSTIKLFLPDGMEARLRSDVIHAPLPSPVDKVAANTPSMYSQELFQLSQYLQEALHREQMLEQKLATLQRLLAITQEASDTSWQALIDEDRLLSRLEVMGNQLQACSKNQTEDSLRKELIALQEDKHNYETTAKESLRRVLQEKIEVVRKLSEVERSLSNTEDECTHLKEMNERTQEELRELANKYNGAVNEIKDLSDKLKVAEGKQEEIQQKGQAEKKELQHKIDEMEEKEQELQAKIEALQADNDFTNERLTALQVRLEHLQEKTLKECSSLEHLLSKSGGDCTFIHQFIECQKKLIVEGHLTKAVEETKLSKENQTRAKESDFSDTLSPSKEKSSDDTTDAQMDEQDLNEPLAKVSLLKGTLTCFYDIVNQGIKSPFAIKSVLDIM

SEQ ID NO: 769294 - protein, 646 aa, Homo sapiens; identical to SEQ ID NO: 769285

SEQ ID NO: 769295 - protein, 687 aa, Homo sapiens
VSTIKLFLPDGMEARLRSDVIHAPLPSPVDKVAANTPSMYSQELFQLSQYLQEALHREQMLEQKLATLQRLLAITQEASDTSWQALIDEDRLLSRLEVMGNQLQACSKNQTEDSLRKELIALQEDKHNYETTAKESLRRVLQEKIEVVRKLSEVERSLSNTEDECTHLKEMNERTQEELRELANKYNGAVNEIKDLSDKLKVAEGKQEEIQQKGQAEKKELQHKIDEMEEKEQELQAKIEALQADNDFTNERLTALQEHLLSKSGGDCTFIHQFIECQKKLIVEGHLTKAVEETKLSKENQTRAKESDFSDTLSPSKEKSSDDTTDAQMDEQDLNEPLAKVSLLKDDLQGAQSEIEAKQEIQHLRKELIEAQELARTSKQKCFELQALLEEERKAYRNQVEESTKQIQVLQAQLQRLHIDTENLREEKDSEITSTRDELLSARDEILLLHQAAAKVASERDTDIASLQEELKKVRAELERWRKAASEYEKEITSLQNSFQLRCQQCEDQQREEATRLQGELEKLRKEWNALETECHSLKRENVLLSSELQRQEKELHNSQKQSLELTSDLSILQMSRKELENQVGSLKEQHLRDSADLKTLLSKAENQAKDVQKEYEKTQTVLSELKLKFEMTEQEKQSITDELKQCKNNLKLLREKGNNPSILQPVPAVFIGLFLAFLFWCFGPLW

SEQ ID NO: 769296 - protein, 663 aa, Homo sapiens
VSTIKLFLPDGMEARLRSDVIHAPLPSPVDKVAANTPSMYSQELFQLSQYLQEALHREQMLEQKLATLQRLLAITQEASDTSWQALIDEDRLLSRLEVMGNQLQACSKNQTEDSLRKELIALQEDKHNYETTAKESLRRVLQEKIEVVRKLSEVERSLSNTEDECTHLKEMNERTQEELRELANKYNGAVNEIKDLSDKLKVAEGKQEEIQQKGQAEKKELQHKIDEMEEKEQELQAKIEALQADNDFTNERLTALQVRLEHLQEKTLKECSSLEHLLSKSGGDCTFIHQFIECQKKLIVEGHLTKAVEETKLSKENQTRAKESDFSDTLSPSKEKSSDDTTDAQMDEQDLNEPLAKVSLLKALLEEERKAYRNQVEESTKQIQVLQAQLQRLHIDTENLREEKDSEITSTRDELLSARDEILLLHQAAAKVASERDTDIASLQEELKKVRAELERWRKAASEYEKEITSLQNSFQLRCQQCEDQQREEATRLQGELEKLRKEWNALETECHSLKRENVLLSSELQRQEKELHNSQKQSLELTSDLSILQMSRKELENQVGSLKEQHLRDSADLKTLLSKAENQAKDVQKEYEKTQTVLSELKLKFEMTEQEKQSITDELKQCKNNLKLLREKGNNPSILQPVPAVFIGLFLAFLFWCFGPLW

SEQ ID NO: 769297 - protein, 294 aa, Homo sapiens
MDYSFILMGQENDGYTFAAQLQRLHIDTENLREEKDSEITSTRDELLSARDEILLLHQAAAKVASERDTDIASLQEELKKVRAELERWRKAASEYEKEITSLQNSFQLRCQQCEDQQREEATRLQGELEKLRKEWNALETECHSLKRENVLLSSELQRQEKELHNSQKQSLELTSDLSILQMSRKELENQVGSLKEQHLRDSADLKTLLSKAENQAKDVQKEYEKTQTVLSELKLKFEMTEQEKQSITDELKQCKNNLKLLREKGNNPSILQPVPAVFIGLFLAFLFWCFGPLW

SEQ ID NO: 769298 - protein, 646 aa, Homo sapiens; identical to SEQ ID NO: 769285

SEQ ID NO: 769299 - protein, 418 aa, Homo sapiens
VSTIKLFLPDGMEARLRSDVIHAPLPSPVDKVAANTPSMYSQELFQLSQYLQEALHREQMLEQKLATLQRLLAITQEASDTSWQALIDEDRLLSRLEVMGNQLQACSKNQTEDSLRKELIALQEDKHNYETTAKESLRRVLQEKIEVVRKLSEVERSLSNTEDECTHLKEMNERTQEELRELANKYNGAVNEIKDLSDKLKVAEGKQEEIQQKGQAEKKELQHKIDEMEEKEQELQAKIEALQADNDFTNERLTALQENQTRAKESDFSDTLSPSKEKSSDDTTDAQMDEQDLNEPLAKVSLLKDDLQGAQSEIEAKQEIQHLRKELIEAQELARTSKQKCFELQALLEEERKAYRNQVEESTKQIQVLQAQLQRLHIDTENLREEKDSEITSTRDELLSARDEILLLHQAATVPPAV

SEQ ID NO: 769300 - protein, 704 aa, Homo sapiens; identical to SEQ ID NO: 769284

SEQ ID NO: 769301 - protein, 934 aa, Homo sapiens [sequence omitted]

SEQ ID NO: 769302 - protein, 223 aa, Homo sapiens
  misc_feature (201)..(201): Xaa can be any naturally occurring amino acid
  misc_feature (222)..(222): Xaa can be any naturally occurring amino acid
MAVQPKETLQLESAAEVGFVRFFQGMPEKPTTTVRLFDRGDFYTAHGEDALLAAREVFKTQGVIKYMGPAGAKNLQSVVLSKMNFESFVKDLLLVRQYRVEVYKNRAGNKASKENDWYLAYKASPGNLSQFEDILFGNNDMSASIGVVGVKMSAVDGQRQVGVGYVDSIQRKLGLCEFPDNDQFSNLEALLIQIGPKGKCXFYPRERKKTGLGKTLGGKTWXN

SEQ ID NO: 769303 - protein, 725 aa, Homo sapiens
MGKLRQIIQRGGILITERKKADFSTKDIYQDLNRLLKGKKGEQMNSAVLPEMENQVAVSSLSAVIKFLELLSDDSNFGQFELTTFDFSQYMKLDIAAVRALNLFQGSVEDTTGSQSLAALLNKCKTPQGQRLVNQWIKQPLMDKNRIEERLNLVEAFVEDAELRQTLQEDLLRRFPDLNRLAKKFQRQAANLQDCYRLYQGINQLPNVIQALEKHEGKHQKLLLAVFVTPLTDLRSDFSKFQEMIETTLDMDQVENHEFLVKPSFDPNLSELREIMNDLEKKMQSTLISAARDLGLDPGKQIKLDSSAQFGYYFRVTCKEEKVLRNNKNFSTVDIQKNGVKFTNSKLTSLNEEYTKNKTEYEEAQDAIVKEIVNISSGYVEPMQTLNDVLAQLDAVVSFAHVSNGAPVPYVRPAILEKGQGRIILKASRHACVEVQDEIAFIPNDVYFEKDKQMFHIITGPNMGGKSTYIRQTGVIVLMAQIGCFVPCESAEVSIVDCILARVGAGDSQLKGVSTFMAEMLETASILRSATKDSLIIIDELGRGTSTYDGFGLAWAISEYIATKIGAFCMFATHFHELTALANQIPTVNNLHVTALTTEETLTMLYQVKKGVCDQSFGIHVAELANFPKHVIECAKQKALELEEFQYIGESQGYDIMEPAAKKCYLEREQGEKIIQEFLSKVKQMPFTEMSEENITIKLKQLKAEVIAKNNSFVNEIISRIKVTT

SEQ ID NO: 769304 - protein, 133 aa, Homo sapiens [sequence omitted]

SEQ ID NO: 769305 - protein, 794 aa, Homo sapiens
MSASIGVVGVKMSAVDGQRQVGVGYVDSIQRKLGLCEFPDNDQFSNLEALLIQIGPKECVLPGGETAGDMGKLRQIIQRGGILITERKKADFSTKDIYQDLNRLLKGKKGEQMNSAVLPEMENQVAVSSLSAVIKFLELLSDDSNFGQFELTTFDFSQYMKLDIAAVRALNLFQGSVEDTTGSQSLAALLNKCKTPQGQRLVNQWIKQPLMDKNRIEERLNLVEAFVEDAELRQTLQEDLLRRFPDLNRLAKKFQRQAANLQDCYRLYQGINQLPNVIQALEKHEGKHQKLLLAVFVTPLTDLRSDFSKFQEMIETTLDMDQVENHEFLVKPSFDPNLSELREIMNDLEKKMQSTLISAARDLGLDPGKQIKLDSSAQFGYYFRVTCKEEKVLRNNKNFSTVDIQKNGVKFTNSKLTSLNEEYTKNKTEYEEAQDAIVKEIVNISSGYVEPMQTLNDVLAQLDAVVSFAHVSNGAPVPYVRPAILEKGQGRIILKASRHACVEVQDEIAFIPNDVYFEKDKQMFHIITGPNMGGKSTYIRQTGVIVLMAQIGCFVPCESAEVSIVDCILARVGAGDSQLKGVSTFMAEMLETASILRSATKDSLIIIDELGRGTSTYDGFGLAWAISEYIATKIGAFCMFATHFHELTALANQIPTVNNLHVTALTTEETLTMLYQVKKGVCDQSFGIHVAELANFPKHVIECAKQKALELEEFQYIGESQGYDIMEPAAKKCYLEREQGEKIIQEFLSKVKQMPFTEMSEENITIKLKQLKAEVIAKNNSFVNEIISRIKVTT

SEQ ID NO: 769306 - protein, 57 aa, Homo sapiens
GKAARFGLSPPCSGERKGSNTGQTEPQSGGGPQIPAPVHSESHTDPAAGRLAPTSCQ

SEQ ID NO: 769307 - protein, 171 aa, Homo sapiens
MSSNECFKCGRSGHWARECPTGGGRGRGMRSRGRGFQFVSSSLPDICYRCGESGHLAKDCDLQEDEACYNCGRGGHIAKDCKEPKREREQCCYNCGKPGHLARDCDHADEQKCYSCGEFGHIQKDCTKVKCYRCGETGHVAINCSKTSEVNCYRCGESGHLARECTIEATA

SEQ ID NO: 769308 - protein, 118 aa, Homo sapiens
MSYWWRPWSWNEKPWQRLVLPRIEVSSLFPRLFQIFVIAVVSLVILPRIVIFRRMKPAITAVEVATLPRTARSPRESESNAATTVANQAIWLVTATMQMSRNAILVENSDTFKKTAPK

SEQ ID NO: 769309 - protein, 171 aa, Homo sapiens; identical to SEQ ID NO: 769307

SEQ ID NO: 769310 - protein, 171 aa, Homo sapiens; identical to SEQ ID NO: 769307

SEQ ID NO: 769311 - protein, 118 aa, Homo sapiens; identical to SEQ ID NO: 769308

SEQ ID NO: 769312 - protein, 118 aa, Homo sapiens; identical to SEQ ID NO: 769308

SEQ ID NO: 769313 - protein, 118 aa, Homo sapiens; identical to SEQ ID NO: 769308

SEQ ID NO: 769314 - protein, 118 aa, Homo sapiens; identical to SEQ ID NO: 769308

SEQ ID NO: 769315 - protein, 118 aa, Homo sapiens; identical to SEQ ID NO: 769308

SEQ ID NO: 769316 - protein, 118 aa, Homo sapiens; identical to SEQ ID NO: 769308

SEQ ID NO: 769317 - protein, 78 aa, Homo sapiens
LGLDCRTPRADWPRGRGGGEPCAAAYVGPCADPRVAQARTLKINSLYLASRLPQACVRVSAAAGPLRRGRSDCSHEQQ

SEQ ID NO: 769318 - protein, 142 aa, Homo sapiens
MSYWWRPWSWNEKPWQRCYRCGESGHLAKDCDLQEDEACYNCGRGGHIAKDCKEPKREREQCCYNCGKPGHLARDCDHADEQKCYSCGEFGHIQKDCTKVKCYRCGETGHVAINCSKTSEVNCYRCGESGHLARECTIEATA

SEQ ID NO: 769319 - protein, 126 aa, Homo sapiens
MCYRCGESGHLAKDCDLQEDEACYNCGRGGHIAKDCKEPKREREQCCYNCGKPGHLARDCDHADEQKCYSCGEFGHIQKDCTKVKCYRCGETGHVAINCSKTSEVNCYRCGESGHLARECTIEATA

SEQ ID NO: 769320 - protein, 118 aa, Homo sapiens; identical to SEQ ID NO: 769308

SEQ ID NO: 769321 - protein, 78 aa, Homo sapiens; identical to SEQ ID NO: 769317

SEQ ID NO: 769322 - protein, 171 aa, Homo sapiens; identical to SEQ ID NO: 769307

SEQ ID NO: 769323 - protein, 49 aa, Homo sapiens
MSSNECFKCGRSGHWARECPTGGGRGRGMRSRGRGQGRRGREFSSSRRP

SEQ ID NO: 769324 - protein, 171 aa, Homo sapiens; identical to SEQ ID NO: 769307

SEQ ID NO: 769325 - protein, 118 aa, Homo sapiens; identical to SEQ ID NO: 769308

SEQ ID NO: 769326 - protein, 118 aa, Homo sapiens; identical to SEQ ID NO: 769308

SEQ ID NO: 769327 - protein, 118 aa, Homo sapiens; identical to SEQ ID NO: 769308

SEQ ID NO: 769328 - protein, 118 aa, Homo sapiens; identical to SEQ ID NO: 769308

SEQ ID NO: 769329 - protein, 78 aa, Homo sapiens; identical to SEQ ID NO: 769317

SEQ ID NO: 769330 - protein, 118 aa, Homo sapiens; identical to SEQ ID NO: 769308

SEQ ID NO: 769331 - protein, 96 aa, Homo sapiens
QQHRVLLWGHAQLVVEGVVPDLLHVIPDGDDAMLDRVLQGQDVVLALGLMAHVGVLLAHAHHHTLVPGSPDDGGEHSSGAIHPQQSQLCTCQSHCQ

SEQ ID NO: 769332 - protein, 94 aa, Homo sapiens
GGLRWNPNLRGGTEVSGTLTDSLGSQELSGSSPKRRRAEDKDEGIGSPDIWEDEKAEDLRREMIELRQQLDKERSVRMMLEEQPCQHSTNPRYR

SEQ ID NO: 769333 - protein, 140 aa, Homo sapiens
MPLHSSLGDIARACLQKKSKRSLFFLYSSGPPLLLCQAFFWAMCFGGDSGWLRAPTVSWLAMYPRPSLLSGSSLLQAIQHIEGTQEKQELEEEQRRAVIVKPVRSCPEAPTSDTASDSEASDSDAMDQSREEPSGDGELP

SEQ ID NO: 769334 - protein, 338 aa, Homo sapiens
MEYFMVPTQKVPSLQHFRKTEKEVIGGLCSLANIPLTPETQRDQERRIRREIANSNERRRMQSINAGFQSLKTLIPHTDGEKLSKAAILQQTAEYIFSLEQEKTRLLQQNTQLKRFIQELSGSSPKRRRAEDKDEGIGSPDIWEDEKAEDLRREMIELRQQLDKERSVRMMLEEQVRSLEAHMYPEKLKVIAQQVQLQQQQEQVRLLHQEKLEREQQQLRTQLLPPPAPTHHPTVIVPAPPPPPSHHINVVTMGPSSVINSVSTSRQNLDTIVQAIQHIEGTQEKQELEEEQRRAVIVKPVRSCPEAPTSDTASDSEASDSDAMDQSREEPSGDGELP

SEQ ID NO: 769335 - protein, 338 aa, Homo sapiens; identical to SEQ ID NO: 769334

SEQ ID NO: 769336 - protein, 745 aa, Homo sapiens
MIRGRNSATSADEQPHIGNYRLLKTIGKGNFAKVKLARHILTGKEVAVKIIDKTQLNSSSLQKLFREVRIMKVLNHPNIVKLFEVIETEKTLYLVMEYASGGEVFDYLVAHGRMKEKEARAKFRQIVSAVQYCHQKFIVHRDLKAENLLLDADMNIKIADFGFSNEFTFGNKLDTFCGSPPYAAPELFQGKKYDGPEVDVWSLGVILYTLVSGSLPFDGQNLKELRERVLRGKYRIPFYMSTDCENLLKKFLILNPSKRGTLEQIMKDRWMNVGHEDDELKPYVEPLPDYKDPRRTELMVSMGYTREEIQDSLVGQRYNEVMATYLLLGYKSSELEGDTITLKPRPSADLTNSSAPSPSHKVQRSVSANPKQRRFSDQAGPAIPTSNSYSKKTQSNNAENKRPEEDRESGRKASSTAKVPASPLPGLERKKTTPTPSTNSVLSTSTNRSRNSPLLERASLGQASIQNGKDSLTMPGSRASTASASAAVSAARPRQHQKSMSASVHPNKASGLPPTESNCEVPRPSTAPQRVPVASPSAHNISSSGGAPDRTNFPRGVSSRSTFHAGQLRQVRDQQNLPYGVTPASPSGHSQGRRGASGSIFSKFTSKFVRRNLNEPESKDRVETLRPHVVGSGGNDKEKEEFREAKPRSLRFTWSMKTTSSMEPNEMMREIRKVLDANSCQSELHEKYMLLCMHGTPGHEDFVQWEMEVCKLPRLSLNGVRFKRISGTSMAFKNIASKIANELKL

SEQ ID NO: 769337 - protein, 745 aa, Homo sapiens; identical to SEQ ID NO: 769336

SEQ ID NO: 769338 - protein, 787 aa, Homo sapiens
MSSARTPLPTLNERDTEQPTLGHLDSKPSSKSNMIRGRNSATSADEQPHIGNYRLLKTIGKGNFAKVKLARHILTGKEVAVKIIDKTQLNSSSLQKLFREVRIMKVLNHPNIVKLFEVIETEKTLYLVMEYASGGEVFDYLVAHGRMKEKEARAKFRQIVSAVQYCHQKFIVHRDLKAENLLLDADMNIKIADFGFSNEFTFGNKLDTFCGSPPYAAPELFQGKKYDGPEVDVWSLGVILYTLVSGSLPFDGQNLKELRERVLRGKYRIPFYMSTDCENLLKKFLILNPSKRGTLEQIMKDRWMNVGHEDDELKPYVEPLPDYKDPRRTELMVSMGYTREEIQDSLVGQRYNEVMATYLLLGYKSSELEGDTITLKPRPSADLTNSSAPSPSHKVQRSVSANPKQRRFSDQAGPAIPTSNSYSKKTQSNNAENKRPEEDRESGRKASSTAKVPASPLPGLERKKTTPTPSTNSVLSTSTNRSRNSPLLERASLGQASIQNGKDSLTMPGSRASTASASAAVSAARPRQHQKSMSASVHPNKASGLPPTESNCEVPRPSTAPQRVPVASPSAHNISSSGGAPDRTNFPRGVSSRSTFHAGQLRQVRDQQNLPYGVTPASPSGHSQGRRGASGSIFSKFTSKFVRRKSVFRFARRNLNEPESKDRVETLRPHVVGSGGNDKEKEEFREAKPRSLRFTWSMKTTSSMEPNEMMREIRKVLDANSCQSELHEKYMLLCMHGTPGHEDFVQWEMEVCKLPRLSLNGVRFKRISGTSMAFKNIASKIANELKL

SEQ ID NO: 769339 - protein, 730 aa, Homo sapiens
  misc_feature (5)..(5): Xaa can be any naturally occurring amino acid
MPAVXGTRQTIGKGNFAKVKLARHILTGKEVAVKIIDKTQLNSSSLQKLFREVRIMKVLNHPNIVKLFEVIETEKTLYLVMEYASGGEVFDYLVAHGRMKEKEARAKFRQIVSAVQYCHQKFIVHRDLKAENLLLDADMNIKIADFGFSNEFTFGNKLDTFCGSPPYAAPELFQGKKYDGPEVDVWSLGVILYTLVSGSLPFDGQNLKELRERVLRGKYRIPFYMSTDCENLLKKFLILNPSKRGTLEQIMKDRWMNVGHEDDELKPYVEPLPDYKDPRRTELMVSMGYTREEIQDSLVGQRYNEVMATYLLLGYKSSELEGDTITLKPRPSADLTNSSAPSPSHKVQRSVSANPKQRRFSDQAGPAIPTSNSYSKKTQSNNAENKRPEEDRESGRKASSTAKVPASPLPGLERKKTTPTPSTNSVLSTSTNRSRNSPLLERASLGQASIQNGKDSLTMPGSRASTASASAAVSAARPRQHQKSMSASVHPNKASGLPPTESNCEVPRPSTAPQRVPVASPSAHNISSSGGAPDRTNFPRGVSSRSTFHAGQLRQVRDQQNLPYGVTPASPSGHSQGRRGASGSIFSKFTSKFVRRNLNEPESKDRVETLRPHVVGSGGNDKEKEEFREAKPRSLRFTWSMKTTSSMEPNEMMREIRKVLDANSCQSELHEKYMLLCMHGTPGHEDFVQWEMEVCKLPRLSLNGVRFKRISGTSMAFKNIASKIANELKL

SEQ ID NO: 769340 - protein, 516 aa, Homo sapiens
MSSARTPLPTLNERDTEQPTLGHLDSKPSSKSNMIRGRNSATSADEQPHIGNYRLLKTIGKGNFAKVKLARHILTGKEVAVKIIDKTQLNSSSLQKLFREVRIMKVLNHPNIVKLFEVIETEKTLYLVMEYASGGEVFDYLVAHGRMKEKEARAKFRQIVSAVQYCHQKFIVHRDLKAENLLLDADMNIKIADFGFSNEFTFGNKLDTFCGSPPYAAPELFQGKKYDGPEVDVWSLGVILYTLVSGSLPFDGQNLKELRERVLRGKYRIPFYMSTDCENLLKKFLILNPSKRGTLEQIMKDRWMNVGHEDDELKPYVEPLPDYKDPRRTELMVSMGYTREEIQDSLVGQRYNEVMATYLLLGYKSSELEGDTITLKPRPSADLTNSSAPSPPTFTPAQRFPLLLSPTGGKGRGGWMGGQGSPSVLRLHRVFRLNQEIFYYQKEKRKKKSQRPPFLPAPLGQSRLDLWGFPGGWLRAGTLSGKSGGAPVRPSARPTVGFSPLLPPSPPSKPPEVAFP

SEQ ID NO: 769341 - protein, 133 aa, Homo sapiens
  misc_feature (14)..(14): Xaa can be any naturally occurring amino acid
MWGCSSAEVAELRXRIMLDLLLGLESRCPKVGIIRRWAGVKSVLPVPCSMEPNEMMREIRKVLDANSCQSELHEKYMLLCMHGTPGHEDFVQWEMEVCKLPRLSLNGVRFKRISGTSMAFKNIASKIANELKL

SEQ ID NO: 769342 - protein, 129 aa, Homo sapiens
RDARLCPLHRPHVVGSGGNDKEKEEFREAKPRSLRFTWSMKTTSSMEPNEMMREIRKVLDANSCQSELHEKYMLLCMHGTPGHEDFVQWEMEVCKLPRLSLNGVRFKRISGTSMAFKNIASKIANELKL

SEQ ID NO: 769343 - protein, 504 aa, Homo sapiens
MSSARTPLPTLNERDTEQPTLGHLDSKPSSKSNMIRGRNSATSADEQPHIGNYRLLKTIGKGNFAKVKLARHILTGKEVAVKIIDKTQLNSSSLQKLFREVRIMKVLNHPNIVKLFEVIETEKTLYLVMEYASGGEVFDYLVAHGRMKEKEARAKFRQIVSAVQYCHQKFIVHRDLKAENLLLDADMNIKIADFGFSNEFTFGNKLDTFCGSPPYAAPELFQGKKYDGPEVDVWSLGVILYTLVSGSLPFDGQNLKELRERVLRGKYRIPFYMSTDCENLLKKFLILNPSKRGTLEQIMKDRWMNVGHEDDELKPYVEPLPDYKDPRRTELMVSMGYTREEIQDSLVGQRYNEVMATYLLLGYKSSELEGDTITLKPRPSADLTNSSAPSPSHKVQRSVSANPKQRRFSDQAGPAIPTSNSYSKKTQSNNAENKRPEEDRESGRKASSTAKVPASPLPGLERKKTTPTPSTNSVLSTSTNRSRNSPLLERASLGQASIQNGKDR

SEQ ID NO: 769344 - protein, 147 aa, Homo sapiens
LRRRQSPDLAPPPATAALGARSGRETWITAGFGALASTATFARIAYGQKPVSAEERTPESGAPAPVARLRDPKTWRDEGRPMSSCRHRRRFCVCAARRLVGNLRVTPHSPLPRDSPFSSPLLEAKEGEGGWGGRAPPRYCGCTEYFA

SEQ ID NO: 769345 - protein, 470 aa, Homo sapiens
MSSARTPLPTLNERDTEQPTLGHLDSKPSSKSNMIRGRNSATSADEQPHIGNYRLLKTIGKGNFAKVKLARHILTGKEVAVKIIDKTQLNSSSLQKLFREVRIMKVLNHPNIVKLFEVIETEKTLYLVMEYASGGEVFDYLVAHGRMKEKEARAKFRQIVSAVQYCHQKFIVHRDLKAENLLLDADMNIKIADFGFSNEFTFGNKLDTFCGSPPYAAPELFQGKKYDGPEVDVWSLGVILYTLVSGSLPFDGQNLKELRERVLRGKYRIPFYMSTDCENLLKKFLILNPSKRGTLEQIMKDRWMNVGHEDDELKPYVEPLPDYKDPRRTELMVSMGYTREEIQDSLVGQRYNEVMATYLLLGYKSSELEGDTITLKPRPSADLTNSSAPSPSHKVQRSVSANPKQRRFSDQAGPAIPTSNSYSKKTQSNNAENKRPEEDRESGRKASSTAKVPARPARGLAAPSADQPGS

SEQ ID NO: 769346 - protein, 387 aa, Homo sapiens
MSSARTPLPTLNERDTEQPTLGHLDSKPSSKSNMIRGRNSATSADEQPHIGNYRLLKTIGKGNFAKVKLARHILTGKEVAVKIIDKTQLNSSSLQKLFREVRIMKVLNHPNIVKLFEVIETEKTLYLVMEYASGGEVFDYLVAHGRMKEKEARAKFRQIVSAVQYCHQKFIVHRDLKAENLLLDADMNIKIADFGFSNEFTFGNKLDTFCGSPPYAAPELFQGKKYDGPEVDVWSLGVILYTLVSGSLPFDGQNLKELRERVLRGKYRIPFYMSTDCENLLKKFLILNPSKRGTLEQIMKDRWMNVGHEDDELKPYVEPLPDYKDPRRTELMVSMGYTREEIQDSLVGQRYNEVMATYLLLGYKSSELKAGVSGDGVAFQLGALVAQ

SEQ ID NO: 769347 - protein, 137 aa, Homo sapiens
LQRGYRFCGDLGNTTKFQSWFSHLLVVWLWASHFPSLASVEWGLAGLLASPVGNEHAWGWHSVDPLALPIPILPLAQQLVLPFPPLILTLRRLRVTTQKISGLRRTGSQGGKPAAQPRCLPAPCPVWRGRRPPQPPP

SEQ ID NO: 769348 - protein, 226 aa, Homo sapiens
HTAGAFFTSSIKGDSKVKMTLSHHTSQRPESRKKKMVILLTLPSLTVASENMVPSLTVHGSIRKSDGSALRCSKENLGPHHHQALSWCEISSSRAMLLGFSPTINNSSLLTDHMISPTLDNIPQHLVFPLPHPIKKEARLSPLLTRSNKAGRHVGVRGKDRTQQSQEGLALWLWSPLQEARRFPQQCILPVVSSPEFLTQSSNGVNFLPHLLILKKHFSVVITTPT

SEQ ID NO: 769349 - protein, 745 aa, Homo sapiens; identical to SEQ ID NO: 769336

SEQ ID NO: 769350 - protein, 691 aa, Homo sapiens
MIRGRNSATSADEQPHIGNYRLLKTIGKGNFAKVKLARHILTGKEVAVKIIDKTQLNSSSLQKLFREVRIMKVLNHPNIVKLFEVIETEKTLYLVMEYASGGEVFDYLVAHGRMKEKEARAKFRQIVSAVQYCHQKFIVHRDLKAENLLLDADMNIKIADFGFSNEFTFGNKLDTFCGSPPYAAPELFQGKKYDGPEVDVWSLGVILYTLVSGSLPFDGQNLKELRERVLRGKYRIPFYMSTDCENLLKKFLILNPSKRGTLEQIMKDRWMNVGHEDDELKPYVEPLPDYKDPRRTELMVSMGYTREEIQDSLVGQRYNEVMATYLLLGYKSSELEGDTITLKPRPSADLTNSSAPSPSHKVQRSVSANPKQRRFSDQAGPAIPTSNSYSKKTQSNNAENKRPEEDRESGRKASSTAKVPASPLPGLERKKTTPTPSTNSVLSTSTNRSRNSPLLERASLGQASIQNGKDSTAPQRVPVASPSAHNISSSGGAPDRTNFPRGVSSRSTFHAGQLRQVRDQQNLPYGVTPASPSGHSQGRRGASGSIFSKFTSKFVRRNLNEPESKDRVETLRPHVVGSGGNDKEKEEFREAKPRSLRFTWSMKTTSSMEPNEMMREIRKVLDANSCQSELHEKYMLLCMHGTPGHEDFVQWEMEVCKLPRLSLNGVRFKRISGTSMAFKNIASKIANELKL

SEQ ID NO: 769351 - protein, 787 aa, Homo sapiens; identical to SEQ ID NO: 769338

SEQ ID NO: 769352 - protein, 787 aa, Homo sapiens; identical to SEQ ID NO: 769338

SEQ ID NO: 769353 - protein, 724 aa, Homo sapiens
MSSARTPLPTLNERDTEQPTLGHLDSKPSSKSNMIRGRNSATSADEQPHIGNYRLLKTIGKGNFAKVKLARHILTGKEVAVKIIDKTQLNSSSLQKLFREVRIMKVLNHPNIVKLFEVIETEKTLYLVMEYASGGEVFDYLVAHGRMKEKEARAKFRQIVSAVQYCHQKFIVHRDLKAENLLLDADMNIKIADFGFSNEFTFGNKLDTFCGSPPYAAPELFQGKKYDGPEVDVWSLGVILYTLVSGSLPFDGQNLKELRERVLRGKYRIPFYMSTDCENLLKKFLILNPSKRGTLEQIMKDRWMNVGHEDDELKPYVEPLPDYKDPRRTELMVSMGYTREEIQDSLVGQRYNEVMATYLLLGYKSSELEGDTITLKPRPSADLTNSSAPSPSHKVQRSVSANPKQRRFSDQAGPAIPTSNSYSKKTQSNNAENKRPEEDRESGRKASSTAKVPASPLPGLERKKTTPTPSTNSVLSTSTNRSRNSPLLERASLGQASIQNGKDSTAPQRVPVASPSAHNISSSGGAPDRTNFPRGVSSRSTFHAGQLRQVRDQQNLPYGVTPASPSGHSQGRRGASGSIFSKFTSKFVRRNLNEPESKDRVETLRPHVVGSGGNDKEKEEFREAKPRSLRFTWSMKTTSSMEPNEMMREIRKVLDANSCQSELHEKYMLLCMHGTPGHEDFVQWEMEVCKLPRLSLNGVRFKRISGTSMAFKNIASKIANELKL

SEQ ID NO: 769354 - protein, 778 aa, Homo sapiens
MSSARTPLPTLNERDTEQPTLGHLDSKPSSKSNMIRGRNSATSADEQPHIGNYRLLKTIGKGNFAKVKLARHILTGKEVAVKIIDKTQLNSSSLQKLFREVRIMKVLNHPNIVKLFEVIETEKTLYLVMEYASGGEVFDYLVAHGRMKEKEARAKFRQIVSAVQYCHQKFIVHRDLKAENLLLDADMNIKIADFGFSNEFTFGNKLDTFCGSPPYAAPELFQGKKYDGPEVDVWSLGVILYTLVSGSLPFDGQNLKELRERVLRGKYRIPFYMSTDCENLLKKFLILNPSKRGTLEQIMKDRWMNVGHEDDELKPYVEPLPDYKDPRRTELMVSMGYTREEIQDSLVGQRYNEVMATYLLLGYKSSELEGDTITLKPRPSADLTNSSAPSPSHKVQRSVSANPKQRRFSDQAGPAIPTSNSYSKKTQSNNAENKRPEEDRESGRKASSTAKVPASPLPGLERKKTTPTPSTNSVLSTSTNRSRNSPLLERASLGQASIQNGKDSLTMPGSRASTASASAAVSAARPRQHQKSMSASVHPNKASGLPPTESNCEVPRPSTAPQRVPVASPSAHNISSSGGAPDRTNFPRGVSSRSTFHAGQLRQVRDQQNLPYGVTPASPSGHSQGRRGASGSIFSKFTSKFVRRNLNEPESKDRVETLRPHVVGSGGNDKEKEEFREAKPRSLRFTWSMKTTSSMEPNEMMREIRKVLDANSCQSELHEKYMLLCMHGTPGHEDFVQWEMEVCKLPRLSLNGVRFKRISGTSMAFKNIASKIANELKL

SEQ ID NO: 769355 - protein, 865 aa, Homo sapiens
MSSARTPLPTLNERDTEQPTLGHLDSKPSSKSNMIRGRNSATSADEQPHIGNYRLLKTIGKGNFAKVKLARHILTGKEVAVKIIDKTQLNSSSLQKLFREVRIMKVLNHPNIVKLFEVIETEKTLYLVMEYASGGEVFDYLVAHGRMKEKEARAKFRQIVSAVQYCHQKFIVHRDLKAENLLLDADMNIKIADFGFSNEFTFGNKLDTFCGSPPYAAPELFQGKKYDGPEVDVWSLGVILYTLVSGSLPFDGQNLKELRERVLRGKYRIPFYMSTDCENLLKKFLILNPSKRGTLEQIMKDRWMNVGHEDDELKPYVEPLPDYKDPRRTELMVSMGYTREEIQDSLVGQRYNEVMATYLLLGYKSSELEGDTITLKPRPSADLTNSSAPSPSHKVQRSVSANPKQRRFSDQAGPAIPTSNSYSKKTQSNNAENKRPEEDRESGRKASSTAKVPASPLPGLERKKTTPTPSTNSVLSTSTNRSRNSPLLERASLGQASIQNGKDSLTMPGSRASTASASAAVSAARPRQHQKSMSASVHPNKASGLPPTESNCEVPRPSTAPQRVPVASPSAHNISSSGGAPDRTNFPRGVSSRSTFHAGQLRQVRDQQNLPYGVTPASPSGHSQGRRGASGSIFSKFTSKFVRRNLNEPESKDRVETLRPHVVGSGGNDKEKEEFREAKPRSLRFTWSMKTTSSMEPNEMMREIRKVLDANSCQSELHEKYMLLCMHGTPGHEDFVQWEMEVCKLPRLSLNGVRFKRISGTSMAFKNIASGGPAGRAAGRCAAPPGRDCSDGLVCLPCWHFSPPWPFSVFSYMFVGGGRLFSSPPHSPLPRDSPFSSPLLEAKEGEGGWGGRAPPRYCGCTEYFA

SEQ ID NO: 769356 - protein, 852 aa, Homo sapiens
MSSARTPLPTLNERDTEQPTLGHLDSKPSSKSNMIRGRNSATSADEQPHIGNYRLLKTIGKGNFAKVKLARHILTGKEVAVKIIDKTQLNSSSLQKLFREVRIMKVLNHPNIVKLFEVIETEKTLYLVMEYASGGEVFDYLVAHGRMKEKEARAKFRQIVSAVQYCHQKFIVHRDLKAENLLLDADMNIKIADFGFSNEFTFGNKLDTFCGSPPYAAPELFQGKKYDGPEVDVWSLGVILYTLVSGSLPFDGQNLKELRERVLRGKYRIPFYMSTDCENLLKKFLILNPSKRGTLEQIMKDRWMNVGHEDDELKPYVEPLPDYKDPRRTELMVSMGYTREEIQDSLVGQRYNEVMATYLLLGYKSSELEGDTITLKPRPSADLTNSSAPSPSHKVQRSVSANPKQRRFSDQAGPAIPTSNSYSKKTQSNNAENKRPEEDRESGRKASSTAKVPASPLPGLERKKTTPTPSTNSVLSTSTNRSRNSPLLERASLGQASIQNGKDSLTMPGSRASTASASAAVSAARPRQHQKSMSASVHPNKASGLPPTESNCEVPRPSTAPQRVPVASPSAHNISSSGGAPDRTNFPRGVSSRSTFHAGQLRQVRDQQNLPYGVTPASPSGHSQGRRGASGSIFSKFTSKFVRRNLNEPESKDRVETLRPHVVGSGGNDKEKEEFREAKPRSLRFTWSMKTTSSMEPNEMMREIRKVLDANSCQSELHEKYMLLCMHGTPGHEDFVQWEMEVCKLPRLSLNGVRFKRISGTSMAFKNIASGGPAGRAAGRCAAPPGRDCSDGLVCLPCWHFSPPWPFSVFSPHSPLPRDSPFSSPLLEAKEGEGGWGGRAPPRYCGCTEYFA

SEQ ID NO: 769357 - protein, 764 aa, Homo sapiens
MSSARTPLPTLNERDTEQPTLGHLDSKPSSKSNMIRGRNSATSADEQPHIGNYRLLKTIGKGNFAKVKLARHILTGKEVAVKIIDKTQLNSSSLQKLFREVRIMKVLNHPNIVKLFEVIETEKTLYLVMEYASGGEVFDYLVAHGRMKEKEARAKFRQIVSAVQYCHQKFIVHRDLKAENLLLDADMNIKIADFGFSNEFTFGNKLDTFCGSPPYAAPELFQGKKYDGPEVDVWSLGVILYTLVSGSLPFDGQNLKELRERVLRGKYRIPFYMSTDCENLLKKFLILNPSKRGTLEQIMKDRWMNVGHEDDELKPYVEPLPDYKDPRRTELMVSMGYTREEIQDSLVGQRYNEVMATYLLLGYKSSELEGDTITLKPRPSADLTNSSAPSPSHKVQRSVSANPKQRRFSDQAGPAIPTSNSYSKKTQSNNAENKRPEEDRESGRKASSTAKVPASPLPGLERKKTTPTPSTNSVLSTSTNRSRNSPLLERASLGQASIQNGKDSLTMPGSRASTASASAAVSAARPRQHQKSMSASVHPNKASGLPPTESNCEVPRPSTAPQRVPVASPSAHNISSSGGAPDRTNFPRGVSSRSTFHAGQLRQVRDQQNLPYGVTPASPSGHSQGRRGASGSIFSKFTSKFVRRRPHVVGSGGNDKEKEEFREAKPRSLRFTWSMKTTSSMEPNEMMREIRKVLDANSCQSELHEKYMLLCMHGTPGHEDFVQWEMEVCKLPRLSLNGVRFKRISGTSMAFKNIASKIANELKL

SEQ ID NO: 769358 - protein, 146 aa, Homo sapiens
IFSKFTSKFVRRNLNEPESKDRVETLRPHVVGSGGNDKEKEEFREAKPRSLRFTWSMKTTSSMEPNEMMREIRKVLDANSCQSELHEKYMLLCMHGTPGHEDFVQWEMEVCKLPRLSLNGVRFKRISGTSMAFKNIASKIANELKL

SEQ ID NO: 769359 - protein, 182 aa, Homo sapiens
PTQLVPSSPVQEKEIQKSDDTFTPHITKTRIKEEENGHPSHSSLTHSGLGKHGPQSHSSWVNQEKRLICSEMLKGKSGSSPSSGAELVVKSVLPVPCSMEPNEMMREIRKVLDANSCQSELHEKYMLLCMHGTPGHEDFVQWEMEVCKLPRLSLNGVRFKRISGTSMAFKNIASKIANELKL

SEQ ID NO: 769360 - protein, 269 aa, Homo sapiens
EDPEEVGHGELRERVLRGKYRIPFYMSTDCENLLKKFLILNPSKRGTLEQIMKDRWMNVGHEDDELKPYVEPLPDYKDPRRTELMVSMGYTREEIQDSLVGQRYNEVMATYLLLGYKSSELEGDTITLKPRPSADLTNSSAPSPPTFTPAQRFPLLLSPTGGKGRGGWMGGQGSPSVLRLHRVFRLNQEIFYYQKEKRKKKSQRPPFLPAPLGQSRLDLWGFPGGWLRAGTLSGKSGGAPVRPSARPTVGFSPLLPPSPPSKPPEVAFP

SEQ ID NO: 769361 - protein, 398 aa, Homo sapiens
MSSARTPLPTLNERDTEQPTLGHLDSKPSSKSNMIRGRNSATSADEQPHIGNYRLLKTIGKGNFAKVKLARHILTGKEVAVKIIDKTQLNSSSLQKLFREVRIMKVLNHPNIVKLFEVIETEKTLYLVMEYASGGEVFDYLVAHGRMKEKEARAKFRQIVSAVQYCHQKFIVHRDLKAENLLLDADMNIKIADFGFSNEFTFGNKLDTFCGSPPYAAPELFQGKKYDGPEVDVWSLGVILYTLVSGSLPFDGQNLKELRERVLRGKYRIPFYMSTDCENLLKKFLILNPSKRGTLEQIMKDRWMNVGHEDDELKPYVEPLPDYKDPRRTELMVSMGYTREEIQDSLVGQRYNEVMATYLLLGYKSSELEGDTITLKPRPSADLTNSSAPSPKQCTGIL

SEQ ID NO: 769362 - protein, 316 aa, Homo sapiens
MSSARTPLPTLNERDTEQPTLGHLDSKPSSKSNMIRGRNSATSADEQPHIGNYRLLKTIGKGNFAKVKLARHILTGKEVAVKIIDKTQLNSSSLQKLFREVRIMKVLNHPNIVKLFEVIETEKTLYLVMEYASGGEVFDYLVAHGRMKEKEARAKFRQIVSAVQYCHQKFIVHRDLKAENLLLDADMNIKIADFGFSNEFTFGNKLDTFCGSPPYAAPELFQGKKYDGPEVDVWSLGVILYTLVSGSLPFDGQNLKELRERVLRGKYRIPFYMSTDCENLLKKFLILNPSKRGTLELRVACCNLMVSNEINTCRMF

SEQ ID NO: 769363 - protein, 234 aa, Homo sapiens
RAGGGGGHVGSSRSGGGCLCAGRGAVPLRAGEERGRRPAAAAESRRSGAARPKGGTAQPGVGGVRSGAARSRRGLARAAHPRAGVSGCPASPHPRPGPMRRVLLLEKPRPAGLRAFPSLPSSKLLGSLPRDTGAMSSARTPLPTLNERDTEQPTLGHLDSKPSSKSNMIRGRNSATSADEQPHIGNYRLLKTIGKGNFAKVKLARHILTGKEVAVKIIDKTQLNSSSLQKLFRD

SEQ ID NO: 769364 - protein, 91 aa, Homo sapiens
TTTITITTTTITITITTALCLLGSPHTKVFNRLQPKSSHKATTDQIVPEKHLATTLQSPAVHGTGGNRKLETGNRSATLVSCCEDNISKCA

SEQ ID NO: 769365 - protein, 714 aa, Homo sapiens
ERQAGTVWDVWASGLACGTQLPLYWGVTEWPGSRDMAAASAVSVLLVAAERNRWHRLPSLLLPPRTWVWRQRTMKYTTATADEAYSIGPAPSQQSYLSMEKIIQVAKTSAAQAIHPGCGFLSENMEFAELCKQEGIIFIGPPPSAIRDMGIKSTSKSIMAAAGVPVVEGYHGEDQSDQCLKEHARRIGYPVMIKAVRGGGGKGMRIVRSEQEFQEQLESARREAKKSFNDDAMLIEKFVDTPRHVEVQVFGDHHGNAVYLFERDCSVQRRHQKIIEEAPAPGIKSEVRKKLGEAAVRAAKAVNYVGAGTVEFIMDSKHNFCFMEMNTRLQVEHPVTEMITGTDLVEWQLRIAAGEKIPLSQEEITLQGHAFEARIYAEDPSNNFMPVAGPLVHLSTPRADPSTRIETGVRQGDEVSVHYDPMIAKLVVWAADRQAALTKLRYSLRQYNIVGLPTNIDFLLNLSGHPEFEAGNVHTDFIPQHHKQLLLSRKAAAKESLCQAALGLILKEKAMTDTFTLQAHDQFSPFSSSSGRRLNISYTRNMTLKDGKNNVAIAVTYNHDGSYSMQIEDKTFQVLGNLYSEGDCTYLKCSVNGVASKAKLIILENTIYLFSKEGSIEIDIPVPKYLSSVSSQETQGGPLAPMTGTIEKVFVKAGDKVKAGDSLMVMIAMKMEHTIKSPKDGTVKKVFYREGAQANRHTPLVEFEEEESDKRESE

SEQ ID NO: 769366 - protein, 567 aa, Homo sapiens
MKHIPSAPLPPSRATYLWRKSFKWPRPLLHRLSIQDAVFFQKTWNLLNFVSKKELGMRIVRSEQEFQEQLESARREAKKSFNDDAMLIEKFVDTPRHVEVQVFGDHHGNAVYLFERDCSVQRRHQKIIEEAPAPGIKSEVRKKLGEAAVRAAKAVNYVGAGTVEFIMDSKHNFCFMEMNTRLQVEHPVTEMITGTDLVEWQLRIAAGEKIPLSQEEITLQGHAFEARIYAEDPSNNFMPVAGPLVHLSTPRADPSTRIETGVRQGDEVSVHYDPMIAKLVVWAADRQAALTKLRYSLRQYNIVGLPTNIDFLLNLSGHPEFEAGNVHTDFIPQHHKQLLLSRKAAAKESLCQAALGLILKEKAMTDTFTLQAHDQFSPFSSSSGRRLNISYTRNMTLKDGKNNVAIAVTYNHDGSYSMQIEDKTFQVLGNLYSEGDCTYLKCSVNGVASKAKLIILENTIYLFSKEGSIEIDIPVPKYLSSVSSQETQGGPLAPMTGTIEKVFVKAGDKVKAGDSLMVMIAMKMEHTIKSPKDGTVKKVFYREGAQANRHTPLVEFEEEESDKRESE

SEQ ID NO: 769367 - protein, 566 aa, Homo sapiens
MAAASAVSVLLVAAERNRWHRLPSLLLPPRTWVWRQRTMKYTTATGRNITKVLIANRGEIACRVMRTAKKLGVQTVAVYSEADRNSMHVDMADEAYSIGPAPSQQSYLSMEKIIQVAKTSAAQAIHPGCGFLSENMEFAELCKQEGIIFIGPPPSAIRDMGIKSTSKSIMAAAGVPVVEGYHGEDQSDQCLKEHARRIGYPVMIKAVRGGGGKGMRIVRSEQEFQEQLESARREAKKSFNDDAMLIEKFVDTPRHVEVQVFGDHHGNAVYLFERDCSVQRRHQKIIEEAPAPGIKSEVRKKLGEAAVRAAKAVNYVGAGTVEFIMDSKHNFCFMEMNTRLQVEHPVTEMITGTDLVEWQLRIAAGEKIPLSQEEITLQGHAFEARIYAEDPSNNFMPVAGPLVHLSTPRADPSTRIETGVRQGDEVSVHYDPMIAKLVVWAADRQAALTKLRYSLRQYNIVGLPTNIDFLLNLSGHPEFEAGNVHTDFIPQHHKQLLLSRKAAAKESLCQAALGLILKEKAMTDTFTLQAHDQFSPFSSSSGRRLNISYTRNMTLKDGKNSFRLLG

SEQ ID NO: 769368 - protein, 662 aa, Homo sapiens
MAAASAVSVLLVAAERNRWHRLPSLLLPPRTWVWRQRTMKYTTATGRNITKVLIANRGEIACRVMRTAKKLGVQTVAVYSEADRNSMHVDMADEAYSIGPAPSQQSYLSMEKIIQVAKTSAAQAIHPGCGFLSENMEFAELCKQEGIIFIGPPPSAIRDMGIKSTSKSIMAAAGVPVVEGYHGEDQSDQCLKEHARRIGYPVMIKAVRGGGGKGMRIVRSEQEFQEQLESARREAKKSFNDDAMLIEKFVDTPRHVEVQVFGDHHGNAVYLFERDCSVQRRHQKIIEEAPAPGIKSEVRKKLGEAAVRAAKAVNYVGAGTVEFIMDSKHNFCFMEMNTRLQVEHPVTEMITGTDLVEWQLRIAAGEKIPLSQEEITLQGHAFEARIYAEDPSNNFMPVAGPLVHLSTPRADPSTRIETGVRQGDEVSVHYDPMIAKLVVWAADRQAALTKLRYSLRQYNIVGLPTNIDFLLNLSGHPEFEAGNVHTDFIPQHHKQLLLSRKAAAKESLCQAALGLILKEKAMTDTFTLQAHDQFSPFSSSSGRRLNISYTRNMTLKDGKNNVAIAVTYNHDGSYSMQIEDKTFQVLGNLYSEGDCTYLKCSVNGVASKAKLIILENTIYLFSKEGSIEIDIPVPKYLSSVSSQETQGGPLAPMTGTIEKVIT

SEQ ID NO: 769369 - protein, 161 aa, Homo sapiens
NVIYPGRGLLAWAIEDKTFQVLGNLYSEGDCTYLKCSVNGVASKAKLIILENTIYLFSKEGSIEIDIPVPKYLSSVSSQETQGGPLAPMTGTIEKVFVKAGDKVKAGDSLMVMIAMKMEHTIKSPKDGTVKKVFYREGAQANRHTPLVEFEEEESDKRESE

SEQ ID NO: 769370 - protein, 502 aa, Homo sapiens
MAAASAVSVLLVAAERNRWHRLPSLLLPPRTWVWRQRTMKYTTATGRNITKVLIANRGEIACRVMRTAKKLGVQTVAVYSEADRNSMHVDMADEAYSIGPAPSQQSYLSMEKIIQVAKTSAAQAIHPGCGFLSENMEFAELCKQEGIIFIGPPPSAIRDMGIKSTSKSIMAAAGVPVVEGYHGEDQSDQCLKEHARRIGYPVMIKAVRGGGGKGMRIVRSEQEFQEQLESARREAKKSFNDDAMLIEKFVDTPRHVEVQVFGDHHGNAVYLFERDCSVQRRHQKIIEEAPAPGIKSEVRKKLGEAAVRAAKAVNYVGAGTVEFIMDSKHNFCFMEMNTRLQVEHPVTEMITGTDLVEWQLRIAAGEKIPLSQEEITLQGHAFEARIYAEDPSNNFMPVAGPLVHLSTPRADPSTRIETGVRQGDEVSVHYDPMIAKLVVWAADRQAALTKLRYSLRQYNIVGLAPNGFLSTVGPNLNWNVPGFPQPNVLPRRGKVFGAVFPG

SEQ ID NO: 769371 - protein, 110 aa, Homo sapiens
MAAASAVSVLLVAAERNRWHRLPSLLLPPRTWVWRQRTMKYTTATGRNITKVLIANRGEIACRVMRTAKKLGVQTVAVYSEADRNSMHVDMGVAGTTGADHQAQLILARY

SEQ ID NO: 769372 - protein, 104 aa, Homo sapiens
MAAASAVSVLLVAAERNRWHRLPSLLLPPRTWVWRQRTMKYTTATGRNITKVLIANRGEIACRVMRTAKKLGVQTVAVYSEADRNSMHVDMVVCVKNWKPRLTF

SEQ ID NO: 769373 - protein, 725 aa, Homo sapiens
MAAASAVSVLLVAAERNRWHRLPSLLLPPRTWVWRQRTMKYTTATGRNITKVLIANRGEIACRVMRTAKKLGVQTVAVYSEADRNSMHVDMADEAYSIGPAPSQQSYLSMEKIIQVAKTSAAQAIHPGCGFLSENMEFAELCKQEGIIFIGPPPSAIRDMGIKSTSKSIMAAAGVPVVEGYHGEDQSDQCLKEHARRIGYPVMIKAVRGGGGKGMRIVRSEQEFQEQLESARREAKKSFNDDAMLIEKFVDTPRHVEVQVFGDHHGNAVYLFERDCSVQRRHQKIIEEAPAPGIKSEVRKKLGEAAVRAAKAVNYVGAGTVEFIMDSKHNFCFMEMNTRLQVEHPVTEMITGTDLVEWQLRIAAGEKIPLSQEEITLQGHAFEARIYAEDPSNNFMPVAGPLVHLSTPRADPSTRIETGVRQGDEVSVHYDPMIAKLVVWAADRQAALTKLRYSLRQYNIVGLPTNIDFLLNLSGHPEFEAGNVHTDFIPQHHKQLLLSRKAAAKESLCQAALGLILKEKAMTDTFTLQAHDQFSPFSSSSGRRLNISYTRNMTLKDGKNNVAIAVTYNHDGSYSMQIEDKTFQVLGNLYSEGDCTYLKCSVNGVASKAKLIILENTIYLFSKEGSIEIDIPVPKYLSSVSSQETQGGPLAPMTGTIEKVFVKAGDKVKAGDSLMVMIAMKMEHTIKSPKDGTVKKVFYREGAQANRHTPLVEFEEEESDKRESE

SEQ ID NO: 769374 - protein, 652 aa, Homo sapiens
MAAASAVSVLLVAAERNRWHRLPSLLLPPRTWVWRQRTMKYTTATGRNITKVLIANRGEIACRVMRTAKKLGVQTVAVYSEADRNSMHVDMADEAYSIGPAPSQQSYLSMEKIIQVAKTSAAQAIHPGCGFLSENMEFAELCKQEGIIFIGPPPSAIRDMGIKSTSKSIMAAAGVPVVEGYHGEDQSDQCLKEHARRIGYPVMIKAVRGGGGKGMRIVRSEQEFQEQLESARREAKKSFNDDAMLIEKFVDTPRHVEVQVFGDHHGNAVYLFERDCSVQRRHQKIIEEAPAPGIKSEVRKKLGEAAVRAAKAVNYVGAGTVEFIMDSKHNFCFMEMNTRLQVEHPVTEMITGTDLVEWQLRIAAGEKIPLSQEEITLQGHAFEARIYAEDPSNNFMPVAGPLVHLSTPRADPSTRIETGVRQGDEVSVHYDPMIAKLVVWAADRQAALTKLRYSLRQYNIVGLPTNIDFLLNLSGHPEFEAGNVHTDFIPQHHKQLLLSRKAAAKESLCQAALGLILKEKAMTDTFTLQAHDQFSPFSSSSGRRLNISYTRNMTLKDGKNNVAIAVTYNHDGSYSMQIEDKTFQVLGNLYSEGDCTYLKCSVNGVASKAKLIILENTIYLFSKEGSIEIDIPVPKYLSSVSSQEIPMRPGLQ

SEQ ID NO: 769375 - protein, 219 aa, Homo sapiens
TSRIPAVRTILKDKAMTDTFTVQAHDQFSPFSSSSGRRLNISYTRNMTLKDGKNNVAIAVTYNHDGSYSMQIEDKTFQVLGNLYSEGDCTYLKCSVNGVASKAKLIILENTIYLFSKEGSIEIDIPVPKYLSSVSSQETQGGPLAPMTGTIEKVFVKAGDKVKAGDSLMVMIAMKMEHTIKSPKDGTVKKVFYREGAQANRHTPLVEFEEEESDKRESE

SEQ ID NO: 769376 - protein, 148 aa, Homo sapiens
MAAASAVSVLLVAAERNRWHRLPSLLLPPRTWVWRQRTMKYTTATGRNITKVLIANRGEIACRVMRTAKKLGVQTVAVYSEADRNSMHVDMADEAYSIGPAPSQQSYLSMEKIIQVAKTSAAQRLIGGRDLPCLRRDVGLWTFELMLK

SEQ ID NO: 769377 - protein, 254 aa, Homo sapiens
MEYASDASLDPEAPWPPAPRARACRVLPWALVAGLLLLLLLAAACAVFLACPWAVSGARASPGSAASPRLREGPELSPDDPAGLLDLRQGMFAQLVAQNVLLIDGPLSWYSDPGLAGVSLTGGLSYKEDTKELVVAKAGVYYVFFQLELRRVVAGEGSGSVSLALHLQPLRSAAGAAALALTVDLPPASSEARNSAFGFQGRLLHLSAGQRLGVHLHTEARARHAWQLTQGATVLGLFRVTPEIPAGLPSPRSE

SEQ ID NO: 769378 - protein, 1530 aa, Homo sapiens
MYIRVSYDTKPDSLLHLMVKDWQLELPKLLISVHGGLQNFEMQPKLKQVFGKGLIKAAMTTGAWIFTGGVSTGVISHVGDALKDHSSKSRGRVCAIGIAPWGIVENKEDLVGKDVTRVYQTMSNPLSKLSVLNNSHTHFILADNGTLGKYGAEVKLRRLLEKHISLQKINTRLGQGVPLVGLVVEGGPNVVSIVLEYLQEEPPIPVVICDGSGRASDILSFAHKYCEEGGIINESLREQLLVTIQKTFNYNKAQSHQLFAIIMECMKKKELVTVFRMGSEGQQDIEMAILTALLKGTNVSAPDQLSLALAWNRVDIARSQIFVFGPHWPPLGSLAPPTDSKATEKEKKPPMATTKGGRGKGKGKKKGKVKEEVEEETDPRKIELLNWVNALEQAMLDALVLDRVDFVKLLIENGVNMQHFLTIPRLEELYNTRLGPPNTLHLLVRDVKKSNLPPDYHISLIDIGLVLEYLMGGAYRCNYTRKNFRTLYNNLFGPKRPKALKLLGMEPPAKGKKKKKKKKEEEIDIDVDDPAVSRFQYPFHELMVWAVLMKRQKMAVFLWQRGEESMAKALVACKLYKAMAHESSESDLVDDISQDLDNNSKDFGQLALELLDQSYKHDEQIAMKLLTYELKNWSNSTCLKLAVAAKHRDFIAHTCSQMLLTDMWMGRLRMRKNPGLKVIMGILLPPTILFLEFRTYDDFSYQTSKENEDGKEKEEENTDANADAGSRKGDEENEHKKQRSIPIGTKICEFYNAPIVKFWFYTISYLGYLLLFNYVILVRMDGWPSLQEWIVISYIVSLALEKIREILMSEPGKLSQKIKVWLQEYWNITDLVAISTFMIGAILRLQNQPYMGYGRVIYCVDIIFWYIRVLDIFGVNKYLGPYVMMIGKMMIDMLYFVVIMLVVLMSFGVARQAILHPEEKPSWKLARNIFYMPYWMIYGEVFADQIDLYAMEINPPCGENLYDEEGKRLPPCIPGAWLTPALMACYLLVANILLVNLLIAVFNNTFFEVKSISNQVWKFQRYQLIMTFHDRPVLPPPMIILSHIYIIIMRLSGRCRKKREGDQEERDRGLKLFLSDEELKRLHEFEEQCVQEHFREKEDEQQSSSDERIRVTSERVENMSMRLEEINERETFMKTSLQTVDLRLAQLEELSNRMVNALENLAGIDRSDLIQARSRASSECEATYLLRQSSINSADGYSLYRYHFNGEELLFEDTSLSTSPGTGVRKKTCSFRIKEEKDVKTHLVPECQNSLHLSLGTSTSATPDGSHLAVDDLKNAEESKLGPDIGISKEDDERQTDSKKEETISPSLNKTDVIHGQDKSDVQNTQLTVETTNIEGTISYPLEETKITRYFPDETINACKTMKSRSFVYSRGRKLVGGVNQDVEYSSITDQQLTTEWQCQVQKITRSHSTDIPYIVSEAAVQAEHKEQFADMQDEHHVAEAIPRIPRLSLTITDRNGMENLLSVKPDQTLGFPSLRSKSLHGHPRNVKSIQGKLDRSGHASSVSSLVIVSGMTAEEKKVKKEKASTETEC

SEQ ID NO: 769379 - protein, 758 aa, Homo sapiens
MTWNVPSVLLFQDSKTRLLIRHLSLLFFGVCFQILMSEPGKLSQKIKVWLQEYWNITDLVAISTFMIGAILRLQNQPYMGYGRVIYCVDIIFWYIRVLDIFGVNKYLGPYVMMIGKMMIDMLYFVVIMLVVLMSFGVARQAILHPEEKPSWKLARNIFYMPYWMIYGEVFADQIDLYAMEINPPCGENLYDEEGKRLPPCIPGAWLTPALMACYLLVANILLVNLLIAVFNNTFFEVKSISNQVWKFQRYQLIMTFHDRPVLPPPMIILSHIYIIIMRLSGRCRKKREGDQEERDRGLKLFLSDEELKRLHEFEEQCVQEHFREKEDEQQSSSDERIRVTSERVENMSMRLEEINERETFMKTSLQTVDLRLAQLEELSNRMVNALENLAGIDRSDLIQARSRASSECEATYLLRQSSINSADGYSLYRYHFNGEELLFEDTSLSTSPGTGVRKKTCSFRIKEEKDVKTHLVPECQNSLHLSLGTSTSATPDGSHLAVDDLKNAEESKLGPDIGISKEDDERQTDSKKEETISPSLNKTDVIHGQDKSDVQNTQLTVETTNIEGTISYPLEETKITRYFPDETINACKTMKSRSFVYSRGRKLVGGVNQDVEYSSITDQQLTTEWQCQVQKITRSHSTDIPYIVSEAAVQAEHKEQFADMQDEHHVAEAIPRIPRLSLTITDRNGMENLLSVKPDQTLGFPSLRSKSLHGHPRNVKSIQGKLDRSGHASSVSSLVIVSGMTAEEKKVKKEKASTETEC

SEQ ID NO: 769380 - protein, 988 aa, Homo sapiens
MVWAVLMKRQKMAVFLWQRGEESMAKALVACKLYKAMAHESSESDLVDDISQDLDNNSKDFGQLALELLDQSYKHDEQIAMKLLTYELKNWSNSTCLKLAVAAKHRDFIAHTCSQMLLTDMWMGRLRMRKNPGLKVIMGILLPPTILFLEFRTYDDFSYQTSKENEDGKEKEEENTDANADAGSRKGDEENEHKKQRSIPIGTKICEFYNAPIVKFWFYTISYLGYLLLFNYVILVRMDGWPSLQEWIVISYIVSLALEKIREILMSEPGKLSQKIKVWLQEYWNITDLVAISTFMIGAILRLQNQPYMGYGRVIYCVDIIFWYIRVLDIFGVNKYLGPYVMMIGKMMIDMLYFVVIMLVVLMSFGVARQAILHPEEKPSWKLARNIFYMPYWMIYGEVFADQIDLYAMEINPPCGENLYDEEGKRLPPCIPGAWLTPALMACYLLVANILLVNLLIAVFNNTFFEVKSISNQVWKFQRYQLIMTFHDRPVLPPPMIILSHIYIIIMRLSGRCRKKREGDQEERDRGLKLFLSDEELKRLHEFEEQCVQEHFREKEDEQQSSSDERIRVTSERVENMSMRLEEINERETFMKTSLQTVDLRLAQLEELSNRMVNALENLAGIDRSDLIQARSRASSECEATYLLRQSSINSADGYSLYRYHFNGEELLFEDTSLSTSPGTGVRKKTCSFRIKEEKDVKTHLVPECQNSLHLSLGTSTSATPDGSHLAVDDLKNAEESKLGPDIGISKEDDERQTDSKKEETISPSLNKTDVIHGQDKSDVQNTQLTVETTNIEGTISYPLEETKITRYFPDETINACKTMKSRSFVYSRGRKLVGGVNQDVEYSSITDQQLTTEWQCQVQKITRSHSTDIPYIVSEAAVQAEHKEQFADMQDEHHVAEAIPRIPRLSLTITDRNGMENLLSVKPDQTLGFPSLRSKSLHGHPRNVKSIQGKLDRSGHASSVSSLVIVSGMTAEEKKVKKEKASTETEC

SEQ ID NO: 769381 - protein, 751 aa, Homo sapiens
MDGWPSLQEWIVISYIVSLALEKIREILMSEPGKLSQKIKVWLQEYWNITDLVAISTFMIGAILRLQNQPYMGYGRVIYCVDIIFWYIRVLDIFGVNKYLGPYVMMIGKMMIDMLYFVVIMLVVLMSFGVARQAILHPEEKPSWKLARNIFYMPYWMIYGEVFADQIDLYAMEINPPCGENLYDEEGKRLPPCIPGAWLTPALMACYLLVANILLVNLLIAVFNNTFFEVKSISNQVWKFQRYQLIMTFHDRPVLPPPMIILSHIYIIIMRLSGRCRKKREGDQEERDRGLKLFLSDEELKRLHEFEEQCVQEHFREKEDEQQSSSDERIRVTSERVENMSMRLEEINERETFMKTSLQTVDLRLAQLEELSNRMVNALENLAGIDRSDLIQARSRASSECEATYLLRQSSINSADGYSLYRYHFNGEELLFEDTSLSTSPGTGVRKKTCSFRIKEEKDVKTHLVPECQNSLHLSLGTSTSATPDGSHLAVDDLKNAEESKLGPDIGISKEDDERQTDSKKEETISPSLNKTDVIHGQDKSDVQNTQLTVETTNIEGTISYPLEETKITRYFPDETINACKTMKSRSFVYSRGRKLVGGVNQDVEYSSITDQQLTTEWQCQVQKITRSHSTDIPYIVSEAAVQAEHKEQFADMQDEHHVAEAIPRIPRLSLTITDRNGMENLLSVKPDQTLGFPSLRSKSLHGHPRNVKSIQGKLDRSGHASSVSSLVIVSGMTAEEKKVKKEKASTETEC

SEQ ID NO: 769382 - protein, 640 aa, Homo sapiens
MIDMLYFVVIMLVVLMSFGVARQAILHPEEKPSWKLARNIFYMPYWMIYGEVFADQIDRKSRIHTPCGENLYDEEGKRLPPCIPGAWLTPALMACYLLVANILLVNLLIAVFNNTFFEVKSISNQVWKFQRYQLIMTFHDRPVLPPPMIILSHIYIIIMRLSGRCRKKREGDQEERDRGLKLFLSDEELKRLHEFEEQCVQEHFREKEDEQQSSSDERIRVTSERVENMSMRLEEINERETFMKTSLQTVDLRLAQLEELSNRMVNALENLAGIDRSDLIQARSRASSECEATYLLRQSSINSADGYSLYRYHFNGEELLFEDTSLSTSPGTGVRKKTCSFRIKEEKDVKTHLVPECQNSLHLSLGTSTSATPDGSHLAVDDLKNAEESKLGPDIGISKEDDERQTDSKKEETISPSLNKTDVIHGQDKSDVQNTQLTVETTNIEGTISYPLEETKITRYFPDETINACKTMKSRSFVYSRGRKLVGGVNQDVEYSSITDQQLTTEWQCQVQKITRSHSTDIPYIVSEAAVQAEHKEQFADMQDEHHVAEAIPRIPRLSLTITDRNGMENLLSVKPDQTLGFPSLRSKSLHGHPRNVKSIQGKLDRSGHASSVSSLVIVSGMTAEEKKVKKEKASTETEC

SEQ ID NO: 769383 - protein, 306 aa, Homo sapiens
MTWNVPSVLLFQDSKTRLLIRHLSLLFFGVCFQILMSEPGKLSQKIKVWLQEYWNITDLVAISTFMIGAILRLQNQPYMGYGRVIYCVDIIFWYIRVLDIFGVNKYLGPYVMMIGKMMIDMLYFVVIMLVVLMSFGVARQAILHPEEKPSWKLARNIFYMPYWMIYGEVFADQIDLYAMEINPPCGENLYDEEGKRLPPCIPGAWLTPALMACYLLVANILLVNLLIAVFNNTFFEVKSISNQVWKFQRYQLIMTFHDRPVLPPPMIILSHIYIIIMRLSGRCRKKREGDQEERDRGLSMCRALHF

SEQ ID NO: 769384 - protein, 339 aa, Homo sapiens
MYIRVSYDTKPDSLLHLMVKDWQLELPKLLISVHGGLQNFEMQPKLKQVFGKGLIKAAMTTGAWIFTGGVSTGVISHVGDALKDHSSKSRGRVCAIGIAPWGIVENKEDLVGKDVTRVYQTMSNPLSKLSVLNNSHTHFILADNGTLGKYGAEVKLRRLLEKHISLQKINTRLGQGVPLVGLVVEGGPNVVSIVLEYLQEEPPIPVVICDGSGRASDILSFAHKYCEEGGIINESLREQLLVTIQKTFNYNKAQSHQLFAIIMECMKKKELVTVFRMGSEGQQDIEMAILTALLKGTNVSAPDQLSLALAWNRVDIARSQIFVFGPHWPVKLFFFDSYH

SEQ ID NO: 769385 - protein, 610 aa, Homo sapiens
LLIMVTNKMTAAFRNPSGKQVATDKVAEKLSSTLSWVKNTVSHTVSQMASQVASPSTSLHTTSSSTTLSTPALSPSSPSQLSPDDLELLAKLEEQNRLLETDSKSLRSVNGSRRNSGSSLVSSSSASSNLSHLEEDSWILWGRIVNEWEDVRKKKEKQVKELVHKGIPHHFRAIVWQLLCSAQSMPIKDQYSELLKMTSPCEKLIRRDIARTYPEHNFFKEKDSLGQEVLFNVMKAYSLVDREVGYCQGSAFIVGLLLMQMPEEEAFCVFVKLMQDYRLRELFKPSMAELGLCMYQFECMIQEHLPELFVHFQSQSFHTSMYASSWFLTIFLTTFPLPVATRIFDIFMSEGLEIVFRVGLALLQMNQAELMQLDMEGMLQHFQKVIPHQFDGVPDKLIQAAYQVKYNSKKMKKLEKEYTTIKTKEMEEQVEIKRLRTENRLLKQRIETLEKHKCSSNYNEDFVLQLEKELVQARLSEAESQCALKEMQDKVLDIEKRNNSLPDENNIARLQEELIAVKLREAEAIMGLKELRQQVKDLEEHWQRHLARTTGRWKDPPKKNAMNELQDELMTIRLREAETQAEIREIKQRMMEMETQLVESADVEPAYMKG

SEQ ID NO: 769386 - protein, 67 aa, Homo sapiens
MEDLFSPSILPPAPNISVPILLGWGLNLTLGQGAPASGPPSRRVRLVFLGVILVVAVAGNTTVLCRL

SEQ ID NO: 769387 - protein, 59 aa, Homo sapiens
MWRPRGAVFRVVSAAWRPPGQTSAIAFPGGPQAICVSPQAPPALAQYSDLGLPGVGGEP

SEQ ID NO: 769388 - protein, 1287 aa, Homo sapiens
MVPGEENQLVPKEHHWIITSDKSLLDANFEPGKKNFLHLTDKDGEQPQILLEDSSAGEDSVHDRFIGPLPREGSVGSTSDYVSQSYSYSSILNKSETGYVGLVNQAMTCYLNSLLQTLFMTPEFRNALYKWEFEESEEDPVTSIPYQLQRLFVLLQTSKKRAIETTDVTRSFGWDSSEAWQQHDVQELCRVMFDALEQKWKQTEQADLINELYQGKLKDYVRCLECGYEGWRIDTYLDIPLVIRPYGSSQAFASVEEALHAFIQPEILDGPNQYFCERCKKKCDARKGLRFLHFPYLLTLQLKRFDFDYTTMHRIKLNDRMTFPEELDMSTFIDVEDEKSPQTESCTDSGAENEGSCHSDQMSNDFSNDDGVDEGICLETNSGTEKISKSGLEKNSLIYELFSVMAHSGSAAGGHYYACIKSFSDEQWYSFDDQHVSRITQEDIKKTHGGSSGSRGYYSSAFASSTNAYMLIYRLKDPARNAKFLEVGEYPEHIKNLVQKERELEEQEKRQREIERNTCKIKLFCLHPTKQVMMENKLEVHKDKTLKEAVEMAYKMMDLEEVIPLDCCRLVKYDEFHDYLERSYEGEEDTPMGLLLGGVKSTYMFDLLLETRKPDQVFQSYKPGEVMVKVHVVDLKAESVAAPITVRAYLNQTVTEFKQLISKAIHLPAETMRIVLERCYNDLRLLSVSSKTLKAEGFFRSNKVFVESSETLDYQMAFADSHLWKLLDRHANTIRLFVLLPEQSPVSYSKRTAYQKAGGDSGNVDDDCERVKGPVGSLKSVEAILEESTEKLKSLSLQQQQDGDNGDSSKSTETSDFENIESPLNERDSSASVDNRELEQHIQTSDPENFQSEERSDSDVNNDRSTSSVDSDILSSSHSSDTLCNADNAQIPLANGLDSHSITSSRRTKANEGKKETWDTAEEDSGTDSEYDESGKSRGEMQYMYFKAEPYAADEGSGEGHKWLMVHVDKRITLAAFKQHLEPFVGVLSSHFKVFRVYASNQEFESVRLNETLSSFSDDNKITIRLGRALKKGEYRVKVYQLLVNEQEPCKFLLDAVFAKGMTVRQSKEELIPQLREQCGLELSIDRFRLRKKTWKNPGTVFLDYHIYEEDINISSNWEVFLEVLDGVEKMKSMSQLAVLSRRWKPSEMKLDPFQEVVLESSSVDELREKLSEISGIPLDDIEFAKGRGTFPCDISVLDIHQDLDWNPKVSTLNVWPLYICDDGAVIFYRDKTEELMELTDEQRNELMKKESSRLQKTGHRVTYSPRKEKALKIYLDGAPNKDLTQD

SEQ ID NO: 769389 - protein, 1207 aa, Homo sapiens
MVPGEENQLVPKEIENAAEEPRVLCIIQDTTNSKTVNERITLNLPASTPVRKLFEDVANKVGYINGTFDLVWGNGINTADMAPLDHTSDKSLLDANFEPGKKNFLHLTDKDGEQPQILLEDSSAGEDSVHDRFIGPLPREGSVGSTSDYVSQSYSYSSILNKSETGYVGLVNQAMTCYLNSLLQTLFMTPEFRNALYKWEFEESEEDPVTSIPYQLQRLFVLLQTSKKRAIETTDVTRSFGWDSSEAWQQHDVQELCRVMFDALEQKWKQTEQADLINELYQGKLKDYVRCLECGYEGWRIDTYLDIPLVIRPYGSSQAFASVEEALHAFIQPEILDGPNQYFCERCKKKCDARKGLRFLHFPYLLTLQLKRFDFDYTTMHRIKLNDRMTFPEELDMSTFIDVEDEKSPQTESCTDSGAENEGSCHSDQMSNDFSNDDGVDEGICLETNSGTEKISKSGLEKNSLIYELFSVMAHSGSAAGGHYYACIKSFSDEQWYSFDDQHVSRITQEDIKKTHGGSSGSRGYYSSAFASSTNAYMLIYRLKDPARNAKFLEVGEYPEHIKNLVQKERELEEQEKRQREIERNTCKIKLFCLHPTKQVMMENKLEVHKDKTLKEAVEMAYKMMDLEEVIPLDCCRLVKYDEFHDYLERSYEGEEDTPMGLLLGGVKSTYMFDLLLETRKPDQVFQSYKPGEVMVKVHVVDLKAESVAAPITVRAYLNQTVTEFKQLISKAIHLPAETMRIVLERCYNDLRLLSVSSKTLKAEGFFRSNKVFVESSETLDYQMAFADSHLWKLLDRHANTIRLFVLLPEQSPVSYSKRTAYQKAGGDSGNVDDDCERVKGPVGSLKSVEAILEESTEKLKSLSLQQQQDGDNGDSSKSTETSDFENIESPLNERDSSASVDNRELEQHIQTSDPENFQSEERSDSDVNNDRSTSSVDSDILSSSHSSDTLCNADNAQIPLANGLDSHSITSSRRTKANEGKKETWDTAEEDSGTDSEYDESGKSRGEMQYMYFKAEPYAADEGSGEGHKWLMVHVDKRITLAAFKQHLEPFVGVLSSHFKVFRVYASNQEFESVRLNETLSSFSDDNKITIRLGRALKKGEYRVKVYQLLVNEQEPCKFLLDAVFAKGMTVRQSKEELIPQLREQCGLELSIDRFRLRKKTWKNPGTVFLDYHIYEEDINISSNWEVFLEVLDGCFRSNSTINLNG

SEQ ID NO: 769390 - protein, 1355 aa, Homo sapiens
MVPGEENQLVPKEIENAAEEPRVLCIIQDTTNSKTVNERITLNLPASTPVRKLFEDVANKVGYINGTFDLVWGNGINTADMAPLDHTSDKSLLDANFEPGKKNFLHLTDKDGEQPQILLEDSSAGEDSVHDRFIGPLPREGSVGSTSDYVSQSYSYSSILNKSETGYVGLVNQAMTCYLNSLLQTLFMTPEFRNALYKWEFEESEEDPVTSIPYQLQRLFVLLQTSKKRAIETTDVTRSFGWDSSEAWQQHDVQELCRVMFDALEQKWKQTEQADLINELYQGKLKDYVRCLECGYEGWRIDTYLDIPLVIRPYGSSQAFASVEEALHAFIQPEILDGPNQYFCERCKKKCDARKGLRFLHFPYLLTLQLKRFDFDYTTMHRIKLNDRMTFPEELDMSTFIDVEDEKSPQTESCTDSGAENEGSCHSDQMSNDFSNDDGVDEGICLETNSGTEKISKSGLEKNSLIYELFSVMAHSGSAAGGHYYACIKSFSDEQWYSFDDQHVSRITQEDIKKTHGGSSGSRGYYSSAFASSTNAYMLIYRLKDPARNAKFLEVGEYPEHIKNLVQKERELEEQEKRQREIERNTCKIKLFCLHPTKQVMMENKLEVHKDKTLKEAVEMAYKMMDLEEVIPLDCCRLVKYDEFHDYLERSYEGEEDTPMGLLLGGVKSTYMFDLLLETRKPDQVFQSYKPGEVMVKVHVVDLKAESVAAPITVRAYLNQTVTEFKQLISKAIHLPAETMRIVLERCYNDLRLLSVSSKTLKAEGFFRSNKVFVESSETLDYQMAFADSHLWKLLDRHANTIRLFVLLPEQSPVSYSKRTAYQKAGGDSGNVDDDCERVKGPVGSLKSVEAILEESTEKLKSLSLQQQQDGDNGDSSKSTETSDFENIESPLNERDSSASVDNRELEQHIQTSDPENFQSEERSDSDVNNDRSTSSVDSDILSSSHSSDTLCNADNAQIPLANGLDSHSITSSRRTKANEGKKETWDTAEEDSGTDSEYDESGKSRGEMQYMYFKAEPYAADEGSGEGHKWLMVHVDKRITLAAFKQHLEPFVGVLSSHFKVFRVYASNQEFESVRLNETLSSFSDDNKITIRLGRALKKGEYRVKVYQLLVNEQEPCKFLLDAVFAKGMTVRQSKEELIPQLREQCGLELSIDRFRLRKKTWKNPGTVFLDYHIYEEDINISSNWEVFLEVLDGVEKMKSMSQLAVLSRRWKPSEMKLDPFQEVVLESSSVDELREKLSEISGIPLDDIEFAKGRGTFPCDISVLDIHQDLDWNPKVSTLNVWPLYICDDGAVIFYRDKTEELMELTDEQRNELMKKESSRLQKTGHRVTYSPRKEKALKIYLDGAPNKDLTQD

SEQ ID NO: 769391 - protein, 281 aa, Homo sapiens
VYDDNSVMLHTPECAVGKPTWRALKKGEYRVKVYQLLVNEQEPCKFLLDAVFAKGMTVRQSKEELIPQLREQCGLELSIDRFRLRKKTWKNPGTVFLDYHIYEEDINISSNWEVFLEVLDGVEKMKSMSQLAVLSRRWKPSEMKLDPFQEVVLESSSVDELREKLSEISGIPLDDIEFAKGRGTFPCDISVLDIHQDLDWNPKVSTLNVWPLYICDDGAVIFYRDKTEELMELTDEQRNELMKKESSRLQKTGHRVTYSPRKEKALKIYLDGAPNKDLTQD

SEQ ID NO: 769392 - protein, 1355 aa, Homo sapiens; identical to SEQ ID NO: 769390

SEQ ID NO: 769393 - protein, 1355 aa, Homo sapiens; identical to SEQ ID NO: 769390

SEQ ID NO: 769394 - protein, 1297 aa, Homo sapiens
MVPGEENQLVPKEIENAAEEPRVLCIIQDTTNSKTVNERITLNLPASTPVRKLFEDVANKVGYINGTFDLVWGNGINTADMAPLDHTSDKSLLDANFEPGKKNFLHLTDKDGEQPQILLEDSSAGEDSVHDRFIGPLPREGSVGSTSDYVSQSYSYSSILNKSETGYVGLVNQAMTCYLNSLLQTLFMTPEFRNALYKWEFEESEEDPVTSIPYQLQRLFVLLQTSKKRAIETTDVTRSFGWDSSEAWQQHDVQELCRVMFDALEQKWKQTEQADLINELYQGKLKDYVRCLECGYEGWRIDTYLDIPLVIRPYGSSQAFASVEEALHAFIQPEILDGPNQYFCERCKKKCDARKGLRFLHFPYLLTLQLKRFDFDYTTMHRIKLNDRMTFPEELDMSTFIDVEDEKSPQTESCTDSGAENEGSCHSDQMSNDFSNDDGVDEGICLETNSGTEKISKSGLEKNSLIYELFSVMAHSGSAAGGHYYACIKSFSDEQWYSFDDQHVSRITQEDIKKTHGGSSGSRGYYSSAFASSTNAYMLIYRLKDPARNAKFLEVGEYPEHIKNLVQKERELEEQEKRQREIERNTCKIKLFCLHPTKQVMMENKLEVHKDKTLKEAVEMAYKMMDLEEVIPLDCCRLVKYDEFHDYLERSYEGEEDTPMGLLLGGVKSTYMFDLLLETRKPDQVFQSYKPGEVMVKVHVVDLKAESVAAPITVRAYLNQTVTEFKQLISKAIHLPAETMRIVLERCYNDLRLLSVSSKTLKAEGFFRSNKVFVESSETLDYQMAFADSHLWKLLDRHANTIRLFVLLPEQSPVSYSKRTAYQKAGGDSGNVDDDCERVKGPVGSLKSVEAILEESTEKLKSLSLQQQQDGDNGDSSKSTETSDFENIESPLNERDSSASVDNRELEQHIQTSDPENFQSEERSDSDVNNDRSTSSVDSDILSSSHSSDTLCNADNAQIPLANGLDSHSITSSRRTKANEGKKETWDTAEEDSGTDSEYDESGKSRGEMQYMYFKAEPYAADEGSGEGHKWLMVHVDKRITLAAFKQHLEPFVGVLSSHFKVFRVYASNQEFESVRLNETLSSFSDDNKITIRLGRALKKGEYRVKVYQLLVNEQEPCKFLLDAVFAKGMTVRQSKEELIPQLREQCGLELSIDRFRLRKKTWKNPGTVFLDYHIYEEDINISSNWEVFLEVLDGVEKMKSMSQLAVLSRRWKPSEMKLDPFQEVVLESSSVDELREKLSEISGIPLDDIEFAKGRGTFPCDISVLDIHQDLDWNPKVSTLNVWPLYICDDGIKQKN

SEQ ID NO: 769395 - protein, 1355 aa, Homo sapiens; identical to SEQ ID NO: 769390

SEQ ID NO: 769396 - protein, 1355 aa, Homo sapiens; identical to SEQ ID NO: 769390

SEQ ID NO: 769397 - protein, 1355 aa, Homo sapiens; identical to SEQ ID NO: 769390

SEQ ID NO: 769398 - protein, 1355 aa, Homo sapiens; identical to SEQ ID NO: 769390

SEQ ID NO: 769399 - protein, 1355 aa, Homo sapiens; identical to SEQ ID NO: 769390

SEQ ID NO: 769400 - protein, 1355 aa, Homo sapiens; identical to SEQ ID NO: 769390

SEQ ID NO: 769401 - protein, 1355 aa, Homo sapiens; identical to SEQ ID NO: 769390

SEQ ID NO: 769402 - protein, 163 aa, Homo sapiens
MARRGKKPVVRTLEDLTLDSGYGGAADSVRSSNLSLCCSDSHPASPYGGSCWPPLADSMHSRHNSFDTVNTALVEDSEGLDCAGQHCSRLLPDLDEVPWTLQELEALLLRSRDPRAGPAVPGGLPKDALAKLSTLVSRALVRIAKEAQRLSLRFAKCTKYEIQ

SEQ ID NO: 769403 - protein, 206 aa, Homo sapiens
LPVPVAASHARYQAQIMAGSRLETVGSIFSRTRDLVRAGVLKEKPLWFDVYDAFPPLREPVFQRPRVRYGKAKAPIQDIWYHEDRIRAKFYSVYGSGQRAFDLFNPNFKSTCQRFVEKYTELQKLGETDEEKLFVETGKALLAEGVILRRVGEARTQHGGSHVSRKSEHLSVRPQTALEENETQKEVPQDQHLEAPADQSKGLLPP

SEQ ID NO: 769404 - protein, 206 aa, Homo sapiens; identical to SEQ ID NO: 769403

SEQ ID NO: 769405 - protein, 206 aa, Homo sapiens; identical to SEQ ID NO: 769403

SEQ ID NO: 769406 - protein, 191 aa, Homo sapiens
MLSSIKCVLVGDSAVGKTSLLVRFTSETFPEAYKPTVYENTGVDVFMDGIQISLGLWDTAGNDAFRSIRPLSYQQADVVLMCYSVANHNSFLNLKNKWIGEIRSNLPCTPVLVVATQTDQREMGPHRASCVNAMEGKKLAQDVRAKGYLECSALSNRGVQQVFECAVRTAVNQARRRNRRRLFSINECKIF

SEQ ID NO: 769407 - protein, 162 aa, Homo sapiens
LRYLYTKRRNEGGPPQQGGFPCRSNCHGKGKRNWPRMSEPRATWSAQPLAIGEYSRCLSAPSELPSTRPGDETEGGSSPSMSARSSKPQETSHNTYVCTPKTNGEREGREARKAWCFLWVHPKQRLLLDTVIDEAWPLDVFTNYTLQVNSLPRPVRKSLGEL

SEQ ID NO: 769408 - protein, 191 aa, Homo sapiens; identical to SEQ ID NO: 769406

SEQ ID NO: 769409 - protein, 191 aa, Homo sapiens; identical to SEQ ID NO: 769406

SEQ ID NO: 769410 - protein, 191 aa, Homo sapiens; identical to SEQ ID NO: 769406

SEQ ID NO: 769411 - protein, 191 aa, Homo sapiens; identical to SEQ ID NO: 769406

SEQ ID NO: 769412 - protein, 86 aa, Homo sapiens
MSAGLEPVHQEVDAEVDQEQNIPESWQKLASGAAGMRVWALSVAEEQPPGRTKGCFVPSMLLLARVVFCLRPCTTCLFFLIFYLKE

SEQ ID NO: 769413 - protein, 714 aa, Homo sapiens
MPAAAGDGLLGEPAAPGGGGGAEDAARPAAACEGSFLPAWVSGVPRERLRDFQHHKRVGNYLIGSRKLGEGSFAKVREGLHVLTGEKVAIKVIDKKRAKKDTYVTKNLRREGQIQQMIRHPNITQLLDILETENSYYLVMELCPGGNLMHKIYEKKRLEESEARRYIRQLISAVEHLHRAGVVHRDLKIENLLLDEDNNIKLIDFGLSNCAGILGYSDPFSTQCGSPAYAAPELLARKKYGPKIDVWSIGVNMYAMLTGTLPFTVEPFSLRALYQKMVDKEMNPLPTQLSTGAISFLRSLLEPDPVKRPNIQQALANRWLNENYTGKVPCNVTYPNRISLEDLSPSVVLHMTEKLGYKNSDVINTVLSNRACHILAIYFLLNKKLERYLSGKSDIQDSLCYKTRLYQIEKYRAPKESYEASLDTWTRDLEFHAVQDKKPKEQEKRGDFLHRPFSKKLDKNLPSHKQPSGSLMTQIQNTKALLKDRKASKSSFPDKDSFGCRNIFRKTSDSNCVASSSMEFIPVPPPRTPRIVKKPEPHQPGPGSTGIPHKEDPLMLDMVRSFESVDRDDHVEVLSPSHHYRILNSPVSLARRNSSERTLSPGLPSGSMSPLHTPLHPTLVSFAHEDKNSPPKEEGLCCPPPVPSNGPMQPLGSPNCVKSRGRFPMMGIGQMLRKRHQSLQPSADRPLEASLPPLQPLAPVNLAFDMADGVKTQC

SEQ ID NO: 769414 - protein, 671 aa, Homo sapiens
MPAAAGDGLLGEPAAPGGGGGAEDAARPAAACEGSFLPAWVSGVPRERLRDFQHHKRVGNYLIGSRKLGEGSFAKVREGLHVLTGEKVAIKVIDKKRAKKDTYVTKNLRREGQIQQMIRHPNITQLLDILETENSYYLVMELCPGGNLMHKIYEKKRLEESEARRYIRQLISAVEHLHRAGVVHRDLKIENLLLDEDNNIKLIDFGLSNCAGILGYSDPFSTQCGSPAYAAPELLARKKYGPKIDVWSMCHQFPALSPGTGSCEEAKYSAGTGESLAYENYTGKVPCNVTYPNRISLEDLSPSVVLHMTEKLGYKNSDVINTVLSNRACHILAIYFLLNKKLERYLSGKSDIQDSLCYKTRLYQIEKYRAPKESYEASLDTWTRDLEFHAVQDKKPKEQEKRGDFLHRPFSKKLDKNLPSHKQPSGSLMTQIQNTKALLKDRKASKSSFPDKDSFGCRNIFRKTSDSNCVASSSMEFIPVPPPRTPRIVKKPEPHQPGPGSTGIPHKEDPLMLDMVRSFESVDRDDHVEVLSPSHHYRILNSPVSLARRNSSERTLSPGLPSGSMSPLHTPLHPTLVSFAHEDKNSPPKEEGLCCPPPVPSNGPMQPLGSPNCVKSRGRFPMMGIGQMLRKRHQSLQPSADRPLEASLPPLQPLAPVNLAFDMADGVKTQC

SEQ ID NO: 769415 - protein, 714 aa, Homo sapiens; identical to SEQ ID NO: 769413

SEQ ID NO: 769416 - protein, 714 aa, Homo sapiens; identical to SEQ ID NO: 769413

SEQ ID NO: 769417 - protein, 694 aa, Homo sapiens
MENKSLESSQTDLKLVAHPRAKSKVWKYFGFDTNAEGCILQWKKIYCRICMAQIAYSGNTSNLSYHLEKNHPEEFCEFVKSNTEQMREAFATAFSKLKPESSQQPGQDALAVKAGHGYDSKKQQELTAAVLGLICEGLYPASIVDEPTFKVLLKTADPRYELPSRKYISTKAIPEKYGAVREVILKELAEATWCGISTDMWRSENQNRAYVTLAAHFLGLGAPNCLSMGSRCLKTFEVPEENTAETITRVLYEVFIEWGISAKVFGATTNYGKDIVKACSLLDVAVHMPCLGHTFNAGIQQAFQLPKLGALLSRCRKLVEYFQQSAVAMYMLYEKQKQQNVAHCMLVSNRVSWWGSTLAMLQRLKEQQFVIAGVLVEDSNNHHLMLEASEWATIEGLVELLQPFKQVAEMLSASRYPTISMVKPLLHMLLNTTLNIKETDSKELSMAKEVIAKELSKTYQETPEIDMFLNVATFLDPRYKRLPFLSAFERQQVENRVVEEAKGLLDKVKDGGYRPAEDKIFPVPEEPPVKKLMRTSTPPPASVINNMLAEIFCQTGGVEDQEEWHAQVVEELSNFKSQKVLGLNEDPLKWWSDRLALFPLLPKVLQKYWCVTATRVAPERLFGSAANVVSAKRNRLAPAHVDEQVFLYENARSGAEAEPEDQDEGEWGLDQEQVFSLGDGVSGGFFGIRDSSFL

SEQ ID NO: 769418 - protein, 115 aa, Homo sapiens
GAESRGRRGSGGGAAGAAMSPLSAARAALRVYAVGAAVILAQLLRRCRGGFLEPVFPPRPDRVAIVTGGTDGIGYSTAKHLARLGMHVIIAGNNDSKAKQVVSKIKEETLNDKET

SEQ ID NO: 769419 - protein, 694 aa, Homo sapiens; identical to SEQ ID NO: 769417

SEQ ID NO: 769420 - protein, 265 aa, Homo sapiens
RYKKVARKVATLRNMSISGVSWEVLESSLAMTSLAMLSSLESVSFLDPRYKRLPFLSAFERQQVENRVVEEAKGLLDKVKDGGYRPAEDKIFPVPEEPPVKKLMRTSTPPPASVINNMLAEIFCQTGGVEDQEEWHAQVVEELSNFKSQKVLGLNEDPLKWWSDRLALFPLLPKVLQKYWCVTATRVAPERLFGSAANVVSAKRNRLAPAHVDEQVFLYENARSGAEAEPEDQDEGEWGLDQEQVFSLGDGVSGGFFGIRDSSFL

SEQ ID NO: 769421 - protein, 216 aa, Homo sapiens
PHTHPQHSTHIHRSHEPRVFNPDEGLLDKVKDGGYRPAEDKIFPVPEEPPVKKLMRTSTPPPASVINNMLAEIFCQTGGVEDQEEWHAQVVEELSNFKSQKVLGLNEDPLKWWSDRLALFPLLPKVLQKYWCVTATRVAPERLFGSAANVVSAKRNRLAPAHVDEQVFLYENARSGAEAEPEDQDEGEWGLDQEQVFSLGDGVSGGFFGIRDSSFL

SEQ ID NO: 769422 - protein, 317 aa, Homo sapiens
MSPLSAARAALRVYAVGAAVILAQLLRRCRGGFLEPVFPPRPDRVAIVTGGTDGIGYSTAKHLARLGMHVIIAGNNDSKAKQVVSKIKEETLNDKVEFLYCDLASMTSIRQFVQKFKMKKIPLHVLINNAGVMMVPQRKTRDGFEEHFGLNYLGHFLLTNLLLDTLKESGSPGHSARVVTVSSATHYVAELNMDDLQSSACYSPHAAYAQSKLALVLFTYHLQRLLAAEGSHVTANVVDPGVVNTDLYKHVFWATRLAKKLLGWLLFKTPDEGAWTSIYAAVTPELEGVGGRYLYNEKETKSLHVTYNQKLQQQLWF

SEQ ID NO: 769423 - protein, 294 aa, Homo sapiens
MSPLSAARAALRVYAVGAAVILAQLLRRCRGGFLEPVFPPRPDRVAIVTGGTDGIGYSTAKHLARLGMHVIIVEFLYCDLASMTSIRQFVQKFKMKKIPLHVLINNAGVMMVPQRKTRDGFEEHFGLNYLGHFLLTNLLLDTLKESGSPGHSARVVTVSSATHYVAELNMDDLQSSACYSPHAAYAQSKLALVLFTYHLQRLLAAEGSHVTANVVDPGVVNTDLYKHVFWATRLAKKLLGWLLFKTPDEGAWTSIYAAVTPELEGVGGRYLYNEKETKSLHVTYNQKLQQQLWV

SEQ ID NO: 769424 - protein, 694 aa, Homo sapiens; identical to SEQ ID NO: 769417

SEQ ID NO: 769425 - protein, 150 aa, Homo sapiens
PGPTLPSPRVWPPRLSRVGLQPSSPRAAAPPRTLTPPGHGRGPGGSHAPRPRHQAALPAACGRPVTARPRQAPEGRSGRPRDLDPYPPQVFPPRPDRVAIVTGGTDGIGYSTAKHLARLGMHVIIAGNNDSKAKQVVSKIKEETLNDKET

SEQ ID NO: 769426 - protein, 694 aa, Homo sapiens; identical to SEQ ID NO: 769417

SEQ ID NO: 769427 - protein, 75 aa, Homo sapiens
IPGPSMWDVQRVLCLREDKLGWGGRCLGGMTPLSSRQCSAETPRTRGVRGQRNYLPFTAADFSGLQAAQNVILTS

SEQ ID NO: 769428 - protein, 370 aa, Homo sapiens
PGPTLPSPRVWPPRLSRVGLQPSSPRAAAPPRTLTPPGHGRGPGGSHAPRPRHQAALPAACGRPVTARPRQAPEGRSGRPRDLDPYPPQVFPPRPDRVAIVTGGTDGIGYSTAKHLARLGMHVIIAGNNDSKAKQVVSKIKEETLNDKVEFLYCDLASMTSIRQFVQKFKMKKIPLHVLINNAGVMMVPQRKTRDGFEEHFGLNYLGHFLLTNLLLDTLKESGSPGHSARVVTVSSATHYVAELNMDDLQSSACYSPHAAYAQSKLALVLFTYHLQRLLAAEGSHVTANVVDPGVVNTDLYKHVFWATRLAKKLLGWLLFKTPDEGAWTSIYAAVTPELEGVGGRYLYNEKETKSLHVTYNQKLQQQLWV

SEQ ID NO: 769429 - protein, 128 aa, Homo sapiens
LKGVPALLSPELLYALARMGHGDEIGLGIPQLLEAVLKLLPLDTYVESPAAVMELVPSDKERGLQTPVWTEYESILRRAGCVRALAKIERFEFYERAKKAFAVVATGETALYGNLILRKGVLALNPLL

SEQ ID NO: 769430 - protein, 135 aa, Homo sapiens
SPRVWAAPEVLADLNFPASSICQCGPMEIRADGLGIPQLLEAVLKLLPLDTYVESPAAVMELVPSDKERGLQTPVWTEYESILRRAGCVRALAKIERFEFYERAKKAFAVVATGETALYGNLILRKGVLALNPLL

SEQ ID NO: 769431 - protein, 151 aa, Homo sapiens
LKGVPALLSPELLYALARMGHGDEIVLADLNFPASSICQCGPMEIRADGLGIPQLLEAVLKLLPLDTYVESPAAVMELVPSDKERGLQTPVWTEYESILRRAGCVRALAKIERFEFYERAKKAFAVVATGETALYGNLILRKGVLALNPLL

SEQ ID NO: 769432 - protein, 163 aa, Homo sapiens
RSCPHPHRGASGAAPTLFSASAWLRLDVPQSGETREEFRGGRAPICLSIKWVKVDRVCSVPQMLKQGLGTLALQPSSVLGLAPLQGDGPLRKPHPQEGGACPQPPAVGLVKTTWAGRGTGGTLSSSTTTHNRPPSGSSQTWALARALGAGSLGVGPANWDEYP

SEQ ID NO: 769433 - protein, 657 aa, Homo sapiens
MRLKIGFILRSLLVVGSFLGLVVLWSSLTPRPDDPSPLSRMREDRDVNDPMPNRGGNGLAPGEDRFKPVVPWPHVEGVEVDLESIRRINKAKNEQEHHAGGDSQKDIMQRQYLTFKPQTFTYHDPVLRPGILGNFEPKEPEPPGVVGGPGEKAKPLVLGPEFKQAIQASIKEFGFNMVASDMISLDRSVNDLRQEECKYWHYDENLLTSSVVIVFHNEGWSTLMRTVHSVIKRTPRKYLAEIVLIDDFSNKEHLKEKLDEYIKLWNGLVKVFRNERREGLIQARSIGAQKAKLGQVLIYLDAHCEVAVNWYAPLVAPISKDRTICTVPLIDVINGNTYEIIPQGGGDEDGYARGAWDWSMLWKRVPLTPQEKRLRKTKTEPYRSPAMAGGLFAIEREFFFELGLYDPGLQIWGGENFEISYKIWQCGGKLLFVPCSRVGHIYRLEGWQGNPPPIYVGSSPTLKNYVRVVEVWWDEYKDYFYASRPESQALPYGDISELKKFREDHNCKSFKWFMEEIAYDITSHYPLPPKNVDWGEIRGFETAYCIDSMGKTNGGFVELGPCHRMGGNQLFRINEANQLMQYDQCLTKGADGSKVMITHCNLNEFKEWQYFKNLHRFTHIPSGKCLDRSEVLHQVFISNCDSSKTTQKWEMNNIHSV

SEQ ID NO: 769434 - protein, 657 aa, Homo sapiens; identical to SEQ ID NO: 769433

SEQ ID NO: 769435 - protein, 255 aa, Homo sapiens
MRLKIGFILRSLLVVGSFLGLVVLWSSLTPRPDDPSPLSRMREDRDVNDPMPNRGGNGLAPGEDRFKPVVPWPHVEGVEVDLESIRRINKAKNEQEHHAGGDSQKDIMQRQYLTFKPQTFTYHDPVLRPGILGNFEPKEPEPPGVVGGPGEKAKPLVLGPEFKQAIQASIKEFGFNMVASDMISLDRSVNDLRQEECKYWHYDENLLTSSVVIVFHNEGWSTLMRTVHSVIKRTPRKYLAEIVLIDDFSNKGISK

SEQ ID NO: 769436 - protein, 657 aa, Homo sapiens; identical to SEQ ID NO: 769433

SEQ ID NO: 769437 - protein, 255 aa, Homo sapiens; identical to SEQ ID NO: 769435

SEQ ID NO: 769438 - protein, 345 aa, Homo sapiens
MRLKIGFILRSLLVVGSFLGLVVLWSSLTPRPDDPSPLSRMREDRDVNDPMPNRGGNGLAPGEDRFKPVVPWPHVEGVEVDLESIRRINKAKNEQEHHAGGDSQKDIMQRQYLTFKPQTFTYHDPVLRPGILGNFEPKEPEPPGVVGGPGEKAKPLVLGPEFKQAIQASIKEFGFNMVASDMISLDRSVNDLRQEECKYWHYDENLLTSSVVIVFHNEGWSTLMRTVHSVIKRTPRKYLAEIVLIDDFSNKEHLKEKLDEYIKLWNGLVKVFRNERREGLIQARSIGAQKAKLGQVLIYLDAHCEVAVNWYAPLVAPISKDSNFYDQNHEHTPAELQARTGITRR

SEQ ID NO: 769439 - protein, 325 aa, Homo sapiens
IEWPCEEVSRPETGERDGFARGAWDWSLLWKRIPLSHKEKAKRKHKTEPYRSPAMAGGLFAIEREFFFELGLYDPGLQIWGGENFEISYKIWQCGGKLLFVPCSRVGHIYRLEGWQGNPPPIYVGSSPTLKNYVRVVEVWWDEYKDYFYASRPESQALPYGDISELKKFREDHNCKSFKWFMEEIAYDITSHYPLPPKNVDWGEIRGFETAYCIDSMGKTNGGFVELGPCHRMGGNQLFRINEANQLMQYDQCLTKGADGSKVMITHCNLNEFKEWQYFKNLHRFTHIPSGKCLDRSEVLHQVFISNCDSSKTTQKWEMNNIHSV

SEQ ID NO: 769440 - protein, 255 aa, Homo sapiens; identical to SEQ ID NO: 769435

SEQ ID NO: 769441 - protein, 111 aa, Homo sapiens
MLTRNLASSTGCWGEKCWHLSLLALRRWLRALKRRMIPSWSRLTRGSSAPAVLSASPRPPALTPARLTAPLAAASHRELLPSASSRRRTPHPSRAQLSGHAHDAEILDFSG

SEQ ID NO: 769442 - protein, 136 aa, Homo sapiens
LICRYPQEDYESFSLPESVPLFCLPMGATIECWPSNSKYPLPVFSTFVLTGASAEKVYGAAIQFYEPYSEENLTEKQRLLLGLTSADGKSDSSKTIHTNKCICLLSHWPFFDAFRKFLTFLYRYSISGPHVLPIEK

SEQ ID NO: 769443 - protein, 745 aa, Homo sapiens
MACRQRGGSWSPSGWFNAGWSTYRSISLFFALVTSGNSIDVSQLVNPAFPGTVTCDEREITVEFPSSPGTKKWHASVVDPLGLDMPNCTYILDPEKLTLRATYDNCTRRVHGGHQMTIRVMNNSAALRHGAVMYQFFCPAMQVEETQGLSASTICQKDFMSFSLPRVFSGLADDSKGTKVQMGWSIEVGDGARAKTLTLPEAMKEGFSLLIDNHRMTFHVPFNATGVTHYVQGNSHLYMVSLKLTFISPGQKVIFSSQAICAPDPVTCNATHMTLTIPEFPGKLKSVSFENQNIDVSQLHDNGIDLEATNGMKLHFSKTLLKTKLSEKCLLHQFYLASLKLTFLLRPETVSMVIYPECLCESPVSIVTGELCTQDGFMDVEVYSYQTQPALDLGTLRVGNSSCQPVFEAQSQGLVRFHIPLNGCGTRYKFEDDKVVYENEIHALWTDFPPSKISRDSEFRMTVKCSYSRNDMLLNINVESLTPPVASVKLGPFTLILQSYPDNSYQQPYGENEYPLVRFLRQPIYMEVRVLNRDDPNIKLVLDDCWATSTMDPDSFPQWNVVVDGCAYDLDNYQTTFHPVGSSVTHPDHYQRFDMKAFAFVSEAHVLSSLVYFHCSALICNRLSPDSPLCSVTCPVSSRHRRATGATEAEKMTVSLPGPILLLSDDSSFRGVGSSDLKASGSSGEKSRSETGEEVGSRGAMDTKGHKTAGDVGSKAVAAVAAFAGVVATLGFIYYLYEKRTVSNH

SEQ ID NO: 769444 - protein, 219 aa, Homo sapiens
GCQWGLVSDILVSRLLVRGSPINKPGHRGPEIILEPEKKIPNSTLHFCEELVPNSGSLFGKNICCGKQCCICDLKSLLELDRDGEFQPERPKNSCPALLNAISRRTSIFPPPTSLLLPVTLASSQCCWATSGSAGGRGIAPTPGGQPCGSSRKSGSSCAWRWSPSGGSPWPCSRAGGAWRRLGTSLDTHPAGSRACRAVHQLAGESPTPRQARRPPFPT

SEQ ID NO: 769445 - protein, 402 aa, Homo sapiens
GCQWGLVSDILVSRLLVRGSPINKPGHRGPEIILEPEKKIPNSTLHFCEELVPNSGSLFGKNICCGKQCCICDLKSLLELDRDGEFQPERPKNSCPALLNAISRRTSIFPPPTSLLLPVTLASSQCCWATSGSAGGRGIAPTPGGQPCGSSRKSGSSCAWRWSPSGGSPWPCSRAGGAWRRLGTSLDTHPAGSRACRAVHQLQEKAQRLAKHEGLPSRLDEGRVAVEVAAHSDRAPAHVGTQGAVELQVCTSAQCTWIVHRHGAAIPLVVPVIITALAGLVATKELLRPRLQGIPTAWKSCAGCWKALCGGTSCGCSSSWKALRDGFKEAGSAPGRALKPLGGTMAMAQWVKARGSHGALGQSRVADHLHCRYKARVAEAMSPCESALDVLLTTQAQHFMFS

SEQ ID NO: 769446 - protein, 38 aa, Homo sapiens
MEMQDSWLSFQRGETRILSEWCPLQYPGSGARQDAPAG

SEQ ID NO: 769447 - protein, 1241 aa, Homo sapiens
MEKYVRLQKIGEGSFGKAILVKSTEDGRQYVIKEINISRMSSKEREESRREVAVLANMKHPNIVQYRESFEENGSLYIVMDYCEGGDLFKRINAQKGVLFQEDQILDWFVQICLALKHVHDRKILHRDIKSQNIFLTKDGTVQLGDFGIARVLNSTVELARTCIGTPYYLSPEICENKPYNNKSDIWALGCVLYELCTLKHAFEAGSMKNLVLKIISGSFPPVSLHYSYDLRSLVSQLFKRNPRDRPSVNSILEKGFIAKRIEKFLSPQLIAEEFCLKTFSKFGSQPIPAKRPASGQNSISVMPAQKITKPAAKYGIPLAYKKYGDKKLHEKKPLQKHKQAHQTPEKRVNTGEERRKISEEAARKRRLEFIEKEKKQKDQIISLMKAEQMKRQEKERLERINRAREQGWRNVLSAGGSGEVKAPFLGSGGTIAPSSFSSRGQYEHYHAIFDQMQQQRAEDNEAKWKREIYGRGLPERQKGQLAVERAKQVEEFLQRKREAMQNKARAEGHMGILQNLAAMYGGRPSSSRGGKPRNKEEEVYLARLRQIRLQNFNERQQIKAKLRGEKKEANHSEGQEGSEEADMRRKKIESLKAHANARAAVLKEQLERKRKEAYEREKKVWEEHLVAKGVKSSDVSPPLGQHETGGSPSKQQMRSVISVTSALKEVGVDSSLTDTRETSEEMQKTNNAISSKREILRRLNENLKAQEDEKGKQNLSDTFEINVHEDAKEHEKEKSVSSDRKKWEAGGQLVIPLDELTLDTSFSTTERHTVGEVIKLGPNGSPRRAWGKSPTDSVLKILGEAELQLQTELLENTTIRSEISPEGEKYKPLITGEKKVQCISHEINPSAIVDSPVETKSPEFSEASPQMSLKLEGNLEEPDDLETEILQEPSGTNKDESLPCTITDVWISEEKETKETQSADRITIQENEVSEDGVSSTVDQLSDIHIEPGTNDSQHSKCDVDKSVQPEPFFHKVVHSEHLNLVPQVQSVQCSPEESFAFRSHSHLPPKNKNKNSLLIGLSTGLFDANNPKMLRTCSLPDLSKLFRTLMDVPTVGDVRQDNLEIDEIEDENIKEGPSDSEDMFEETDTDLQELQASMEQLLREQPGEEYSEEEESVLKNSDVEPTANGTDVADEDDNPSSESALNEEWHSDNSDGEIASECECDSVFNHLEELRLHLEQEMGFEKFFEVYEKIKAIHEDEDENIEICSKIVQNILGNEHQHLYAKILHLVMADGAYQEDNDE

SEQ ID NO: 769448 - protein, 1257 aa, Homo sapiens
MEKYVRLQKIGEGSFGKAILVKSTEDGRQYVIKEINISRMSSKEREESRREVAVLANMKHPNIVQYRESFEENGSLYIVMDYCEGGDLFKRINAQKGVLFQEDQILDWFVQICLALKHVHDRKILHRDIKSQNIFLTKDGTVQLGDFGIARVLNSTVELARTCIGTPYYLSPEICENKPYNNKSDIWALGCVLYELCTLKHAFEAGSMKNLVLKIISGSFPPVSLHYSYDLRSLVSQLFKRNPRDRPSVNSILEKGFIAKRIEKFLSPQLIAEEFCLKTFSKFGSQPIPAKRPASGQNSISVMPAQKITKPAAKYGIPLAYKKYGDKKLHEKKPLQKHKQAHQTPEKRVNTGEERRKISEEAARKRRLEFIEKEKKQKDQIISLMKAEQMKRQEKERLERINRAREQGWRNVLSAGGSGEVKAPFLGSGGTIAPSSFSSRGQYEHYHAIFDQMQQQRAEDNEAKWKREIYGRGLPERGILPGVRPGFPYGAAGHHHFPDADDIRKTLKRLKAVSKQANANRQKGQLAVERAKQVEEFLQRKREAMQNKARAEGHMVYLARLRQIRLQNFNERQQIKAKLRGEKKEANHSEGQEGSEEADMRRKKIESLKAHANARAAVLKEQLERKRKEAYEREKKVWEEHLVAKGVKSSDVSPPLGQHETGGSPSKQQMRSVISVTSALKEVGVDSSLTDTRETSEEMQKTNNAISSKREILRRLNENLKAQEDEKGKQNLSDTFEINVHEDAKEHEKEKSVSSDRKKWEAGGQLVIPLDELTLDTSFSTTERHTVGEVIKLGPNGSPRRAWGKSPTDSVLKILGEAELQLQTELLENTTIRSEISPEGEKYKPLITGEKKVQCISHEINPSAIVDSPVETKSPEFSEASPQMSLKLEGNLEEPDDLETEILQEPSGTNKDESLPCTITDVWISEEKETKETQSADRITIQENEVSEDGVSSTVDQLSDIHIEPGTNDSQHSKCDVDKSVQPEPFFHKVVHSEHLNLVPQVQSVQCSPEESFAFRSHSHLPPKNKNKNSLLIGLSTGLFDANNPKMLRTCSLPDLSKLFRTLMDVPTVGDVRQDNLEIDEIEDENIKEGPSDSEDMFEETDTDLQELQASMEQLLREQPGEEYSEEEESVLKNSDVEPTANGTDVADEDDNPSSESALNEEWHSDNSDGEIASECECDSVFNHLEELRLHLEQEMGFEKFFEVYEKIKAIHEDEDENIEICSKIVQNILGNEHQHLYAKILHLVMADGAYQEDNDE

SEQ ID NO: 769449 - protein, 1213 aa, Homo sapiens
MEKYVRLQKIGEGSFGKAILVKSTEDGRQYVIKEINISRMSSKEREESRREVAVLANMKHPNIVQYRESFEENGSLYIVMDYCEGGDLFKRINAQKGVLFQEDQILDWFVQICLALKHVHDRKILHRDIKSQNIFLTKDGTVQLGDFGIARVLNSTVELARTCIGTPYYLSPEICENKPYNNKSDIWALGCVLYELCTLKHAFEAGSMKNLVLKIISGSFPPVSLHYSYDLRSLVSQLFKRNPRDRPSVNSILEKGFIAKRIEKFLSPQLIAEEFCLKTFSKFGSQPIPAKRPASGQNSISVMPAQKITKPAAKYGIPLAYKKYGDKKLHEKKPLQKHKQAHQTPEKRVNTGEERRKISEEAARKRRLEFIEKEKKQKDQIISLMKAEQMKRQEKERLERINRAREQGWRNVLSAGGSGEVKAPFLGSGGTIAPSSFSSRGQYEHYHAIFDQMQQQRAEDNEAKWKREIYGRGLPERQKGQLAVERAKQVEEFLQRKREAMQNKARAEGHMVYLARLRQIRLQNFNERQQIKAKLRGEKKEANHSEGQEGSEEADMRRKKIESLKAHANARAAVLKEQLERKRKEAYEREKKVWEEHLVAKGVKSSDVSPPLGQHETGGSPSKQQMRSVISVTSALKEVGVDSSLTDTRETSEEMQKTNNAISSKREILRRLNENLKAQEDEKGKQNLSDTFEINVHEDAKEHEKEKSVSSDRKKWEAGGQLVIPLDELTLDTSFSTTERHTVGEVIKLGPNGSPRRAWGKSPTDSVLKILGEAELQLQTELLENTTIRSEISPEGEKYKPLITGEKKVQCISHEINPSAIVDSPVETKSPEFSEASPQMSLKLEGNLEEPDDLETEILQEPSGTNKDESLPCTITDVWISEEKETKETQSADRITIQENEVSEDGVSSTVDQLSDIHIEPGTNDSQHSKCDVDKSVQPEPFFHKVVHSEHLNLVPQVQSVQCSPEESFAFRSHSHLPPKNKNKNSLLIGLSTGLFDANNPKMLRTCSLPDLSKLFRTLMDVPTVGDVRQDNLEIDEIEDENIKEGPSDSEDMFEETDTDLQELQASMEQLLREQPGEEYSEEEESVLKNSDVEPTANGTDVADEDDNPSSESALNEEWHSDNSDGEIASECECDSVFNHLEELRLHLEQEMGFEKFFEVYEKIKAIHEDEDENIEICSKIVQNILGNEHQHLYAKILHLVMADGAYQEDNDE

SEQ ID NO: 769450 - protein, 1213 aa, Homo sapiens; identical to SEQ ID NO: 769449

SEQ ID NO: 769451 - protein, 527 aa, Homo sapiens
MEKYVRLQKIGEGSFGKAILVKSTEDGRQYVIKEINISRMSSKEREESRREVAVLANMKHPNIVQYRESFEENGSLYIVMDYCEGGDLFKRINAQKGVLFQEDQILDWFVQICLALKHVHDRKILHRDIKSQNIFLTKDGTVQLGDFGIARVLNSTVELARTCIGTPYYLSPEICENKPYNNKSDIWALGCVLYELCTLKHAFEAGSMKNLVLKIISGSFPPVSLHYSYDLRSLVSQLFKRNPRDRPSVNSILEKGFIAKRIEKFLSPQLIAEEFCLKTFSKFGSQPIPAKRPASGQNSISVMPAQKITKPAAKYGIPLAYKKYGDKKLHEKKPLQKHKQAHQTPEKRVNTGEERRKISEEAARKRRLEFIEKEKKQKDQIISLMKAEQMKRQEKERLERINRAREQGWRNVLSAGGSGEVKAPFLGSGGTIAPSSFSSRGQYEHYHAIFDQMQQQRAEDNEAKWKREIYGRGLPERGILPGVRPGFPYGAAGHHHFPDADDIRKTLKRLKAVSKQANANRLDCDDP

SEQ ID NO: 769452 - protein, 382 aa, Homo sapiens
MEKYVRLQKIGEGSFGKAILVKSTEDGRQYVIKEINISRMSSKEREESRREVAVLANMKHPNIVQYRESFEENGSLYIVMDYCEGGDLFKRINAQKGVLFQEDQILDWFVQICLALKHVHDRKILHRDIKSQNIFLTKDGTVQLGDFGIARVLNSTVELARTCIGTPYYLSPEICENKPYNNKSDIWALGCVLYELCTLKHAFEAGSMKNLVLKIISGSFPPVSLHYSYDLRSLVSQLFKRNPRDRPSVNSILEKGFIAKRIEKFLSPQLIAEEFCLKTFSKFGSQPIPAKRPASGQNSISVMPAQKITKPAAKYGIPLAYKKYGDKKLHEKKPLQKHKQAHQTPEKRVNTGEERRKISEEAARKRRLEFIEKEKKQKDQII

SEQ ID NO: 769453 - protein, 113 aa, Homo sapiens
GHSRGGPVHLLALKKWVLSYGICDSQSPQSSRKGVSRWLFPRPSPPMDGFSVRVLSPFLPLYSIPRGTCELQGHLLNITFTQCPKEDSLFLEHCSILSPAVRIQFVLLRTSVA

SEQ ID NO: 769454 - protein, 216 aa, Homo sapiens
MGPLKAFLFSPFLLRSQSRGVRLVFLLLTLHLGNCVDKADDEDDEDLTVNKTWVLAPKIHEGDITQILNSLLQGYDNKLRPDIGVRPTVIETDVYVNSIGPVDPINMEYTIDIIFAQTWFDSRLKFNSTMKVLMLNSNMVGKIWIPDTFFRNSRKSDAHWITTPNRLLRIWNDGRVLYTLRLTINAECYLQLHNFPMDEHSCPLEFSSYGYPKNEI

SEQ ID NO: 769455 - protein, 477 aa, Homo sapiens
MSSSRKDHLGASSSEPLPVIIVGNGPSGICLSYLLSGYTPYTKPDAIHPHPLLQRKLTEAPGVSILDQDLDYLSEGLEGRSQSPVALLFDALLRPDTDFGGNMKSVLTWKHRKEHAIPHVVLGRNLPGGAWHSIEGSMVILSQGQWMGLPDLEVKDWMQKKRRGLRNSRATAGDIAHYYRDYVVKKGLGHNFVSGAVVTAVEWGTPDPSSCGAQDSSPLFQVSGFLTRNQAQQPFSLWARNVVLATGTFDSPARLGIPGEALPFIHHELSALEAATRVGAVTPASDPVLIIGAGLSAADAVLYARHYNIPVIHAFRRAVDDPGLVFNQLPKMLYPEYHKVHQMMREQSILSPSPYEGYRSLPRHQLLCFKEDCQAVFQDLEGVEKVFGVSLVLVLIGSHPDLSFLPGAGADFAVDPDQPLSAKRNPIDVDPFTYQSTRQEGLYAMGPLAGDNFVRFVQGGALAVASSLLRKETRKPP

SEQ ID NO: 769456 - protein, 348 aa, Homo sapiens
MSSSRKDHLGASSSEPLPVIIVGNGPSGICLSYLLSGYTPYTKPDAIHPHPLLQRKLTEAPGVSILDQDLDYLSEGLEGRSQSPVALLFDALLRPDTDFGGNMKSVLTWKHRKEHAIPHVVLGRNLPGGAWHSIEGSMVILSQGQWMGLPDLEVKDWMQKKRRGLRNSRATAGDIAHYYRDYVVKKGLGHNFVSGAVVTAVEWGTPDPSSCGAQDSSPLFQVSGFLTRNQAQQPFSLWARNVVLATGTFDSPARLGIPGEALPFIHHELSALEAATRVGAVTPASDPVLIIGAGLSAADAVLYARHYNIPVIHAFRRAVDDPGLVFNQQPTLLAFGVKRSRDPRLPWT

SEQ ID NO: 769457 - protein, 477 aa, Homo sapiens; identical to SEQ ID NO: 769455

SEQ ID NO: 769458 - protein, 477 aa, Homo sapiens; identical to SEQ ID NO: 769455

SEQ ID NO: 769459 - protein, 633 aa, Homo sapiens
GCPLGEGQPQCVHSSPAKLVTSVTSAAPGPFVVSIGLCLSQAFEEQLSNSVTDNHLTVYTFKTTGKPQTRHRGMGKWRLRGCCRGNMQCRQEVPATLTSSELFSTRNQPQPQPQPLLADAPVPWAVASRLCVTPGQGCGHQGQDEGPLPAPSPPPAMSSSRKDHLGASSSEPLPVIIVGNGPSGICLSYLLSGYTPYTKPDAIHPHPLLQRKLTEAPGVSILDQDLDYLSEGLEGRSQSPVALLFDALLRPDTDFGGNMKSVLTWKHRKEHAIPHVVLGRNLPGGAWHSIEGSMVILSQGQWMGLPDLEVKDWMQKKRRGLRNSRATAGDIAHYYRDYVVKKGLGHNFVSGAVVTAVEWGTPDPSSCGAQDSSPLFQVSGFLTRNQAQQPFSLWARNVVLATGTFDSPARLGIPGEALPFIHHELSALEAATRVGAVTPASDPVLIIGAGLSAADAVLYARHYNIPVIHAFRRAVDDPGLVFNQLPKMLYPEYHKVHQMMREQSILSPSPYEGYRSLPRHQLLCFKEDCQAVFQDLEGVEKVFGVSLVLVLIGSHPDLSFLPGAGADFAVDPDQPLSAKRNPIDVDPFTYQSTRQEGLYAMGPLAGDNFVRFVQGGALAVASSLLRKETRKPP

SEQ ID NO: 769460 - protein, 182 aa, Homo sapiens
GCPLGEGQPQCVHSSPAKLVTSVTSAAPGPFVVSIGLCLSQAFEEQLSNSVTDNHLTVYTFKTTGKPQTRHRGMGKWRLRGCCRGNMQCRQEVPATLTSSELFSTRNQPQPQPQPLLADAPVPWAVASRLCVTPGQGCGHQGQDEGEEGEASPQAQNFRGSKALPSPEYILCPCSVLTHQNS

SEQ ID NO: 769461 - protein, 272 aa, Homo sapiens
MSCHNCSDPQVLCSSGQLFLQPLWDHLRSWEALLQSPFFPVIFSITTYVGFCLPFVVLDILCSWVPALRRYKIHPDFSPSAQQLLPCLGQTLYQHVMFVFPVTLLHWARSPALLPHEAPELLLLLHHILFCLLLFDMEFFVWHLLHHKVPWLYRTFHKVHHQNSSSFALATQYMSVWELFSLGFFDMMNVTLLGCHPLTTLTFHVVNIWLSVEDHSGYNFPWSTHRLVPFGWYGGVVHHDLHHSHFNCNFAPYFTHWDKILGTLRTASVPAR

SEQ ID NO: 769462 - protein, 228 aa, Homo sapiens
MSCHNCSDPQVLCSSGQLFLQPLWDHLRSWEALLQSPFFPVIFSITTYVGFCLPFVVLDILCSWVPALRRYKIHPDFSPSAQQLLPCLGQTLYQHVMFVFPVTLLHWARSPALLPHEAPELLLLLHHILFCLLLFDMEFFVWHLLHHKVPWLYRTFHKVHHQNFGLLRHDERHTARVPPAHHPDLPRGQHLAFRGGPLRLQLPLVHSQTGALRVVRGCGAPRPASLSL

SEQ ID NO: 769463 - protein, 212 aa, Homo sapiens
KDEVKEVLQALEELAVNYDQKSQEVEEKSQQNQLLVDELSQKVATMLSLESELQRLQEVSGHQRKRIAEVLNGLMKDLSEFSVIVGNGEIKLPVEISGAIEEEFTVARLYISKIKSEVKSVVKRCRQLENLQVECHRKMEVTGRELSSCQLLISQHEAKIRSLTEYMQSVELKKRHLEESYDSLSDELAKLQAQETVHEVALKDKEPDTQDA

SEQ ID NO: 769464 - protein, 74 aa, Homo sapiens
LTSHQAPTKPPGSSIFPIQSHYPNLYPRIPQTPPTSPLPQTRSPPNFSLPSSALTTHSPSYLALSRAGPAGSPH

SEQ ID NO: 769465 - protein, 118 aa, Homo sapiens
QLLGRLRQENHLNLRGGGSSELRSHRCTPAWATEQDSLSKQTKQNKKQSKKLKPLLACGRYKNRWPSGFDPWVLVCPLTPGLAKVVIPGGTDGAGGLRNFQGSISGERGFVLFERYQP

SEQ ID NO: 769466 - protein, 200 aa, Homo sapiens
LLAEWRLVYSNPDMVVTFAPVNVTTEVKSVEMHHEALSEALPGDNVGFNVKNVSVKDVRRGNVAGDSKNDPPMEAAGFTAQVIILNHPGQISAGYAPVLDCHTAHIACKFAELKEKIDRRSGKKLEDGPKFLKSGDAAIVDMVPGKPMCVESFSDYPPLGRFAVRDMRQTVAVGVIKAVDKKAAGAGKVTKSAQKAQKAK

SEQ ID NO: 769467 - protein, 113 aa, Homo sapiens
  misc_feature (42)..(42): Xaa can be any naturally occurring amino acid
TRFHVEAQAAVSQEQFHGDSRGPGGCPGPRKCASWLGVKASXRSARNGVGVEEVRMGEKQGGTEPAGADVLNSRLQARVANSARDSICCVFKSFITGMRVFCVRKNSRLWRRG

SEQ ID NO: 769468 - protein, 70 aa, Homo sapiens
HPGHGQPPGCPPAPPSPRRVRITRQHLDSSRVGEAPWFLRRKDAGWGRQILPGLGAFPFHQEPARETRKH

SEQ ID NO: 769469 - protein, 123 aa, Homo sapiens
AFWQFLGAANAPPRGSAAGNAGFGALGAAAFPCFPPSPRRHGQVGPGEPPLDRGGAGGRDQREQLALARLAAASFRDLGRAGPREPGLPWGLCGAAGPGGQGAAPPQLLDAGLGLRLSARESP

SEQ ID NO: 769470 - protein, 123 aa, Homo sapiens; identical to SEQ ID NO: 769469

SEQ ID NO: 769471 - protein, 149 aa, Homo sapiens
MKALCSATTPRSLALPGLLQPTQPAASLAAQQSLNERSPDTGPGVHGGPSRHLLPCLGRVCAAEEPRLQSTPTGPFHPLARPSRTYTDPCILVSAAPGGVGSLGPDSGSSLPQTRVDVQTAQKDLLALAEAQSERRVELHAQEAVGVAV

SEQ ID NO: 769472 - protein, 72 aa, Homo sapiens
QDALRAKSRGVLSGGPAVLPQGRGFSFTTAKTHRTLLHPRAKDTRKEGQSEEVSECFRSHSDILLDGFRNPS

SEQ ID NO: 769473 - protein, 127 aa, Homo sapiens
MLILKGLERPVEEGQSVEMPGNSLIFLEAKGSKILLWKLSYYISAFKKWLQDYEVLQCCPPSPVYIAVKTPRHGGHHWHCSSQQLFGCEVPHSCKTQPEGACLHDPPAQSPHLSVTAVKSAPVVFRN

SEQ ID NO: 769474 - protein, 505 aa, Homo sapiens
MSNICQRLWEYLEPYLPCLSTEADKSTVIENPGALCSPQSQRHGHYFVALFDYQARTAEDLSFRAGDKLQVLDTLHEGWWFARHLEKRRDGSSQQLQGYIPSNYVAEDRSLQAEPWFFGAIGRSDAEKQLLYSENKTGSFLIRESESQKGEFSLSVLDGAVVKHYRIKRLDEGGFFLTRRRIFSTLNEFVSHYTKTSDGLCVKLGKPCLKIQVPAPFDLSYKTVDQWEIDRNSIQLLKRLGSGQFGEVWEGLWNNTTPVAVKTLKPGSMDPNDFLREAQIMKNLRHPKLIQLYAVCTLEDPIYIITELMRHGSLQEYLQNDTGSKIHLTQQVDMAAQVASGMAYLESRNYIHRDLAARNVLVGEHNIYKVADFGLARVFKVDNEDIYESRHEIKLPVKWTAPEAIRSNKFSIKSDVWSFGILLYEIITYGKMPYSGMTGAQVIQMLAQNYRLPQPSNCPQQFYNIMLECWNAEPKERPTFETLRWKLEDYFETDSSYSDANNFIR

SEQ ID NO: 769475 - protein, 505 aa, Homo sapiens; identical to SEQ ID NO: 769474

SEQ ID NO: 769476 - protein, 505 aa, Homo sapiens; identical to SEQ ID NO: 769474

SEQ ID NO: 769477 - protein, 343 aa, Homo sapiens
NRPAPALSPQVSCRHSISGGPGRWQEFLMAEESLPGTLLKLAAQGLGMQAACTLTRLCWAWELSDLHLLQSLMAQSCSSALRTSVPHGALVEAACAFCFHLTLLHLRHSPPAYKRARCGSVGHRHGLHGRALHVCLLQPCPGRLCDLCLLGTHLTGVRAGVLAGPSDRMVLAVLLHQWAAFPNFSRGTLFYRPEEQVPSTPREAGPASGDTQTLQKGVSVREPGRSGVEGATFQLSGLALCEPRAEAPGLVAGTLGNLLVAKERNSLGPHVPPRKRPVGANVKPKYRNEERTAAQQQQQHTWRGPALKTYTRDEGGARNSIAGHAQALVCPTLAVHTHDTGQR

SEQ ID NO: 769478 - protein, 442 aa, Homo sapiens
NRPAPALSPQVSCRHSISGGPGRWQEFLMAEESLPGTLLKLAAQGLGMQAACTLTRLCWAWELSDLHLLQSLMAQSCSSALRTSVPHGALVEAACAFCFHLTLLHLRHSPPAYKRARCGSVGHRHGLHGRALHVCLLQPCPGRLCDLCLLGTHLTGVRAGVLAGPSDSLSGMCRVLGSIRSASGTPSCPPLPRQHCPLLGTAPCWPLCPTHWALQGFSETLQVQGAASGNRKTGLCPSISPFIHKFRYHAGALEELQGLQPGAPEPGMVLAVLLHQWAAFPNFSRGTLFYGQKNKYRAPRGNAGPASGDTQTLQKGVSVREPGRSGVEGATFQLSGLALCEPRAEGPWLVAGTLGNLLVAKERNSLGPHVPPRKRPVGANVKPKYRNEERTAAQQQQQTHMAGARPKTYTRDEGGARNSIAGHAQALVCPTLAVHTHDTGQR

SEQ ID NO: 769479 - protein, 263 aa, Homo sapiens
NRPAPALSPQVSCRHSISGGPGRWQEFLMAEESLPGTLLKLAAQGLGMQAACTLTRLCWAWELSDLHLLQSLMAQSCSSALRTSVPHGALVEAACAFCFHLTLLHLRHSPPAYSGPAVALLVTVTAYTAGPFTSAFFNPALAASVTFACSGHTLLEYVQVYWLGPLTEEQHGEVMEPPLGPRSGDSGPWLQRPRWSPHLLLHLLSDTRLHLTEVPEGQLGSYGILEAFFSFCWLYTVDGLRGNASASPWGAPTGAVGLSGPGP

SEQ ID NO: 769480 - protein, 318 aa, Homo sapiens
AARRASKALLPVGAYEVFAREAVGAVQLGACFLEMRTLVELGPWAGDFGPDLLLTLLFLLFLAHGVTLDGASANPTVSLQEFLMAEESLPGTLLKLAAQGLGMQAACTLTRLCWAWELSDLHLLQSLMAQSCSSALRTSVPHGALVEAACAFCFHLTLLHLRHSPPAYSGPAVALLVTVTAYTAGPFTSAFFNPALAASVTFACSGHTLLEYVQVYWLGPLTEEQHGEVMEPPLGPRSGDSGPWLQRPRWSPHLLLHLLSDTRLHLTEVPEGQLGSYGILEAFFSFCWLYTVDGLRGNASASPWGAPTGAVGLSGPGP

SEQ ID NO: 769481 - protein, 181 aa, Homo sapiens
MELAKNFSDETGKGGNPEGFTLHLAQVERIQGQLLAILNSRLRLKGSFTRAAKERRSCQDRLHRCRSPALRAYTRAHTRVHTRAHTCMHTHACTHMYAHTCMHTRTHMHTCMHTCTHARTRVHAHACTQTRTRTHMHAHTHTHAHTRTHACTHTHACTHVHLGYLLLMSALCPKLDLKTCR

SEQ ID NO: 769482 - protein, 141 aa, Homo sapiens
MELAKNFSDETGKGGNPEGFTLHLAQVERIQGQLLAILNSRLRLKGSFTRAAKERRSCQDRLHRCRSPALRAYTRAHTRVHTRAHTCMHTHACTHMYAHTCMHTHAHAHTCMHTRTHMHTHAHTHAHTHMHAHTCILDISC

SEQ ID NO: 769483 - protein, 384 aa, Homo sapiens
MLSRQKTKNEVSKPAEVQGKYVKKETSPLLRNLMPSFIQHGPKIPGRTDICLPDSSPNAFSTSGDGVVSRNQSFLRTPIQRTPHKIMRRESNRLSAPSYLARSLADVPREYGSSQSFVTEVSFAVENGDSGSRYYYSDNFVDGQRKRPLGDRAHEDYRYYEYNHDLFQRMPQNQGRHASGIGRVAATSLGNLTNHGSEDLPLPPGWSVDWTMRGRKYYIDHNTNTTHWSHPLEREGLPPGWERVESSEFGTYYVDHTNKKAQYRHPCAPSVPRYDQPPPVTYQPQQTERNQSLLVPANPYHTAEIPDWLQVYARAPVKYDHILKWELFQLADLDTYQGMLKLLFMKELEQIVKMYEAYRQALLTELENRKQRQQWYAQQHGKNF

SEQ ID NO: 769484 - protein, 283 aa, Homo sapiens
RARGFGGGGRGRGRGGGDGKDRGGGGQRRGGVAKSKSRRRKGAMVVSVEPARHEGVFIYRGAEDALVTLNMVPGQSVYGERRITVTEGGVIARRYRTWNPFRSKLAAAILGGVDQIHIKPKSKVLYLGAASGTTVSHVSDIIGPDGLVYAVEFSHRAGRDLVNVAKKRTNIIPVLEDARHPLKYRMLIGMVDVIFADVAQPDQSRIVALNAHTFLRNGGHFLISIKANCIDSTASAEAVFASEVRKLQQENLKPQEQLTLEPYERDHAVVVGVYRPLPKSSSK

SEQ ID NO: 769485 - protein, 147 aa, Homo sapiens
AAMKGRRLGGVALRSAADGAFVSGEFCGGKLLRWCLVTDFPPDSCTTCSYSRRSTPGCSPGGSRGLSEGEGSSVSLQRSRVLSAMKHVLNLYLLGVVLTLLSIFVRVMESLEGLLESPSPGTSWTTRSQLANTEPTKGLPDHPSRSM

SEQ ID NO: 769486 - protein, 313 aa, Homo sapiens
MPVDYEINAHKYWNDFYKIHENGFFKDRHWLFTEFPELAPSQNQNHLKDWFLENKSEVCECRNNEDGPGLIMEEQHKCSSKSLEHKTQTPPVEENVTQKISDLEICADEFPGSSATYRILEVGCGVGNTVFPILQTNNDPGLFVYCCDFSSTAIELVQTNSEYDPSRCFAFVHDLCDEEKSYPVPKGSLDIIILIFVLSAIVPDKMQKAINRLSRLLKPGGMVLLRDYGRYDMAQLRFKKGQCLSGNFYVRGDGTRVYFFTQEELDTLFTTAGLEKVQNLVDRRLQVNRGKQLTMYRVWIQCKYCKPLLSSTS

SEQ ID NO: 769487 - protein, 380 aa, Homo sapiens
GVMAGSYPEGAPAILADKRQQFGSRFLSDPARVFHHNAWDNVEWSEEQAAAAERKVQENSIQRVCQEKQVDYEINAHKYWNDFYKIHENGFFKDRHWLFTEFPELAPSQNQNHLKDWFLENKSEVCECRNNEDGPGLIMEEQHKCSSKSLEHKTQTPPVEENVTQKISDLEICADEFPGSSATYRILEVGCGVGNTVFPILQTNNDPGLFVYCCDFSSTAIELVQTNSEYDPSRCFAFVHDLCDEEKSYPVPKGSLDIIILIFVLSAIVPDKMQKAINRLSRLLKPGGMVLLRDYGRYDMAQLRFKKGQCLSGNFYVRGDGTRVYFFTQEELDTLFTTAGLEKVQNLVDRRLQVNRGKQLTMYRVWIQCKYCKPLLSSTS

SEQ ID NO: 769488 - protein, 104 aa, Homo sapiens
MPVILALWEAEVGGSPEVRSSRPASPTWRNPISTKNTKVSWVWWQRPVIPAPWEAEAGELLEPGDGGCSEPRSHCCTQPGPQCKTPSQHNQKKPGTLSRAGDKG

SEQ ID NO: 769489 - protein, 239 aa, Homo sapiens
MPGNHPAPSPGLSLAVCPAASEHSEKPLTAGTSQAALPEALSKGRETPRPATHPARSQDVKPLSCPFDFLRDNVEWSEEQAAAAERKVQENSIQRVCQEKQVDYEINAHKYWNDFYKIHENGFFKDRHWLFTEFPELAPSQNQNHLKDWFLENKSEVCECRNNEDGPGLIMEEQHKCSSKSLEHKTQTPPVEENVTQKISDLEICADEFPGSSATYRILEVTFYCLGSGICEAIIFVHM

SEQ ID NO: 769490 - protein, 132 aa, Homo sapiens
MKSMDPASGYSNNILTIDQMLKKKQTCIVADATTIKQHVKRATDTYNLGIALEHRKEMLNLWQKIRGDLIGIDSRNEAFYDTFSTYTWSWNVCQELLSPKDLRLYDAYVNRNSSHNCRSSSSSDTSECDTDS

SEQ ID NO: 769491 - protein, 147 aa, Homo sapiens; identical to SEQ ID NO: 769485

SEQ ID NO: 769492 - protein, 147 aa, Homo sapiens; identical to SEQ ID NO: 769485

SEQ ID NO: 769493 - protein, 147 aa, Homo sapiens; identical to SEQ ID NO: 769485

SEQ ID NO: 769494 - protein, 153 aa, Homo sapiens
YAEQPLTRLAITYGSVRGVFTTSVATQCCEQFCGGKLLRWCLVTDFPPDSCTTCSYSRRSTPGCSPGGSRGLSEGEGSSVSLQRSRVLSAMKHVLNLYLLGVVLTLLSIFVRVMESLEGLLESPSPGTSWTTRSQLANTEPTKGLPDHPSRSM

SEQ ID NO: 769495 - protein, 110 aa, Homo sapiens
AAIRGGGWAALLCALRLTALLSPVRSRGLSEGEGSSVSLQRSRVLSAMKHVLNLYLLGVVLTLLSIFVRVMESLEGLLESPSPGTSWTTRSQLANTEPTKGLPDHPSRSM

SEQ ID NO: 769496 - protein, 85 aa, Homo sapiens
VNRLSSTRRSGDPTPGVPGSDGVPRGLTREPIAWDLLDHQKPTSQHRAHQGPSRPSIQKHVIRPPSILAIFWNTDLDMSRWESHS

SEQ ID NO: 769497 - protein, 171 aa, Homo sapiens
YAEQPLTRLAITYGSVRGVFTTSVATQCCEQFCGGKLLRWCLVTDFPPDSCTTCSYSRRSTPGCSPGGERPCGLPRLPTPIARVLAALAASRSRAGGAPPGSSLIAHAPSGVPIQPSALFCPKVVLTRIHVAHPTPTGAELGIPAMPSQSTFTISLLSQHLACCVLTTLCL

SEQ ID NO: 769498 - protein, 372 aa, Homo sapiens
AAMKGRRLGGVALRSAADGAFVSGEFCGGKLLRWCLVTDFPPDSCTTCSYSRRSTPGCSPGVDYEINAHKYWNDFYKIHENGFFKDRHWLFTEFPELAPSQNQNHLKDWFLENKSEVCECRNNEDGPGLIMEEQHKCSSKSLEHKTQTPPVEENVTQKISDLEICADEFPGSSATYRILEVGCGVGNTVFPILQTNNDPGLFVYCCDFSSTAIELVQTNSEYDPSRCFAFVHDLCDEEKSYPVPKGSLDIIILIFVLSAIVPDKMQKAINRLSRLLKPGGMVLLRDYGRYDMAQLRFKKGQCLSGNFYVRGDGTRVYFFTQEELDTLFTTAGLEKVQNLVDRRLQVNRGKQLTMYRVWIQCKYCKPLLSSTS

SEQ ID NO: 769499 - protein, 239 aa, Homo sapiens
GVMAGSYPEGAPAILADKRQQFGSRFLSDPARVFHHNAWDNVEWSEEQAAAAERKVQENSIQRVCQEKQVDYEINAHKYWNDFYKIHENGFFKDRHWLFTEFPELAPSQNQNHLKDWFLENKSEVCECRNNEDGPGLIMEEQHKCSSKSLEHKTQTPPVEENVTQKISDLEICADEFPGSSATYRILEVGCGVGNTVFPILQTNNDPGLFVYCCDFSSTAIELVQVSTMGNYLLVISTD

SEQ ID NO: 769500 - protein, 171 aa, Homo sapiens; identical to SEQ ID NO: 769497

SEQ ID NO: 769501 - protein, 171 aa, Homo sapiens; identical to SEQ ID NO: 769497

SEQ ID NO: 769502 - protein, 285 aa, Homo sapiens
GVMAGSYPEGAPAILADKRQQFGSRFLSDPARVFHHNAWDNVEWSEEQAAAAERKVQENSIQRVCQEKQVDYEINAHKYWNDFYKIHENGFFKDRHWLFTEFPELAPSQNQNHLKDWFLENKSEVCECRNNEDGPGLIMEEQHKCSSKSLEHKTQTPPVEENVTQKISDLEICADEFPGSSATYRILEVGCGVGNTVFPILQTNNDPGLFVYCCDFSSTAIELVQFTLSHCTDVISVHILKVCGNPASSKPTSAVSPPPYAHLVSVCHALVILRIFQTFLLLCML

SEQ ID NO: 769503 - protein, 207 aa, Homo sapiens
GVMAGSYPEGAPAILADKRQQFGSRFLSDPARVFHHNAWDNVEWSEEQAAAAERKVQENSIQRVCQEKQVDYEINAHKYWNDFYKIHENGFFKDRHWLFTEFPELAPSQNQNHLKDWFLENKSEVCECRNNEDGPGLIMEEQHKCSSKSLEHKTQTPPVEENVTQKISDLEICADEFPGSSATYRILEVGCGVGNTVFPILQTNKNF

SEQ ID NO: 769504 - protein, 115 aa, Homo sapiens
YAEQPLTRLAITYGSVRGVFTTSVATQCCEQFCGGKLLRWCLVTDFPPDSCTTCSYSRRSTPGCSPGGSRGLSEGEGSSVSLQRSRVLSAMKHVLNLYLLGSKYEVYGPCLRLFK

SEQ ID NO: 769505 - protein, 132 aa, Homo sapiens
YAEQPLTRLAITYGSVRGVFTTSVATQCCEQFCGGKLLRWCLVTDFPPDSCTTCSYSRRSTPGCSPGVDYEINAHKYWNDFYKIHENGFFKDRHWLFTEFPELAPSQNQNHLKDWFLENKSEPVSTQNTKKN

SEQ ID NO: 769506 - protein, 91 aa, Homo sapiens
GTRGRGAHAQSGKPKAWRGFREQGLEFLCQAGGWHQTPGRGRRRGPSKDSPQPLCLRLLRLLCADRVLCCVGNAASPPHPLAAFNPTFLIV

SEQ ID NO: 769507 - protein, 92 aa, Homo sapiens
GTRGRGAHAQSGKPKAWRGFREQGLEFLCQAGGWHQTPGRGRRRGPSKDSPQPLCLRLLRLLCADRVLCCVGNAASLLGTWIPFPSSSPGYF

SEQ ID NO: 769508 - protein, 49 aa, Homo sapiens
MQNGAVNLASSAASEKLNLHLPYDPAISFLSIYGRQTKIYGQHKNLYLH

SEQ ID NO: 769509 - protein, 125 aa, Homo sapiens
MGPGGPLLSPSRGFLLCKTGWHSNRLLGDCGPHTPVSTALSFIAVGMAAPSMKERQVCWGARDEYWKCLDENLEDASQCKKLRSSFESSCPQQWIKYFDKRRDYLKFKEKFEAGQFEPSETTAKS

SEQ ID NO: 769510 - protein, 114 aa, Homo sapiens
KRPPKRGFWPLKPKNWGTRGPPHTCFLQGFFIAVGMAAPSMKERQVCWGARDEYWKCLDENLEDASQCKKLRSSFESSCPQQWIKYFDKRRDYLKFKEKFEAGQFEPSETTAKS

SEQ ID NO: 769511 - protein, 169 aa, Homo sapiens
FFLEPCAPLLAEPLLERDEAEGVGGADAGPALLYGLVGDGELAQVVANHLGLDLHLVEGLAVVDAHHAAHHLGQDDHVPQVRLHHFRLLHGRRLLLGLAQALQQVVPLPPQAPVQPPPLARTVQLHQLFVGHVQQLVQVHAAVGELAEGPLLLLLYFCHLAGSSERAIC

SEQ ID NO: 769512 - protein, 164 aa, Homo sapiens
FFLEPCAPLLAEPLLERDEAEGVGGADAGPALLYGLVGDGELAQVVANHLGLDLHLVEGLAVVDAHHAAHHLGQDDHVPQVRLHHFRLLHGRRLLLGLAQALQQVVPLPPQAPVQPPPLARTVQLHQLFVGHVQQLVQVHAALHRSRNGSPIYEGKTGLLGGPG

SEQ ID NO: 769513 - protein, 155 aa, Homo sapiens [sequence omitted]

SEQ ID NO: 769514 - protein, 137 aa, Homo sapiens
MVARKGQKSPRFRRVTCFLRLGRSTLLELEPAGRPCSGRTRHRALHRRLVACVTVSSRRHRKEAGRGRAESFIAVGMAAPSMKERQVCWGARDEYWKCLDENLEDASQCKKLRSSFESSCPQQWTVSLCCPGWSAVV

SEQ ID NO: 769515 - protein, 125 aa, Homo sapiens; identical to SEQ ID NO: 769509

SEQ ID NO: 769516 - protein, 155 aa, Homo sapiens [sequence omitted]

SEQ ID NO: 769517 - protein, 155 aa, Homo sapiens [sequence omitted]

SEQ ID NO: 769518 - protein, 518 aa, Homo sapiens
GKLQTRQAEEAGLRGRDVIGAPEARGAWEFEANRQRATMAVARAALGPLVTGLYDVQAFKFGDFVLKSGLSSPIYIDLRGIVSRPRLLSQVADILFQTAQNAGISFDTVCGVPYTALPLATVICSTNQIPMLIRRKETKDYGTKRLVEGTINPGETCLIIEDVVTSGSSVLETVEVLQKEGLKVTDAIVLLDREQGGKDKLQAHGIRLHSVCTLSKMLEILEQQKKVDAETVGRVKRFIQENVFVAANHNGSPLSIKEAPKELSFGARAELPRIHPVASKLLRLMQKKETNLCLSADVSLARELLQLADALGPSICMLKTHVDILNDFTLDVMKELITLAKCHEFLIFEDRKFADIGNTVKKQYEGGIFKIASWADLVNAHVVPGSGVVKGLQEVGLPLHRGCLLIAEMSSTGSLATGDYTRAAVRMAEEHSEFVVGFISGSRVSMKPEFLHLTPGVQLEAGGDNLGQQYNSPQEVIGKRGSDIIIVGRGIISAADRLEAAEMYRKAAWEAYLSRLGV

SEQ ID NO: 769519 - protein, 518 aa, Homo sapiens; identical to SEQ ID NO: 769518

SEQ ID NO: 769520 - protein, 490 aa, Homo sapiens
MGEANRQRATMAVARAALGPLVTGLYDVQAFKFGDFVLKSGLSSPIYIDLRGIVSRPRLLSQVADILFQTAQNAGISFDTVCGVPYTALPLATVICSTNQIPMLIRRKETKDYGTKRLVEGTINPGETCLIIEDVVTSGSSVLETVEVLQKEGLKVTDAIVLLDREQGGKDKLQAHGIRLHSVCTLSKMLEILEQQKKVDAETVGRVKRFIQENVFVAANHNGSPLSIKEAPKELSFGARAELPRIHPVASKLLRLMQKKETNLCLSADVSLARELLQLADALGPSICMLKTHVDILNDFTLDVMKELITLAKCHEFLIFEDRKFADIGNTVKKQYEGGIFKIASWADLVNAHVVPGSGVVKGLQEVGLPLHRGCLLIAEMSSTGSLATGDYTRAAVRMAEEHSEFVVGFISGSRVSMKPEFLHLTPGVQLEAGGDNLGQQYNSPQEVIGKRGSDIIIVGRGIISAADRLEAAEMYRKAAWEAYLSRLGV

SEQ ID NO: 769521 - protein, 496 aa, Homo sapiens
GKLQTRQAEEAGLRGRDVIGAPEARGAWEFEANRQRATMAVARAALGPLVTGLYDVQAFKFGDFVLKSGLSSPIYIDLRGIVSRPRLLSQVADILFQTAQNAGISFDTVCGVPYTALPLATVICSTNQIPMLIRRKETKDYGTKRLVEGTINPGETCLIIEDVVTSGSSVLETVEVLQKEGLKVTDAIVLLDREQGGKDKLQAHGIRLHSVCTLSKMLEILEQQKKVDAETVGRVKRFIQENVFVAANHNGSPLSIKEAPKELSFGARAELPRIHPVASKLLRLMQKKETNLCLSADVSLARELLQLADALGPSICMLKTHVDILNDFTLDVMKELITLAKCHEFLIFEDRKFADIGNTVKKQYEVVKGLQEVGLPLHRGCLLIAEMSSTGSLATGDYTRAAVRMAEEHSEFVVGFISGSRVSMKPEFLHLTPGVQLEAGGDNLGQQYNSPQEVIGKRGSDIIIVGRGIISAADRLEAAEMYRKAAWEAYLSRLGV

SEQ ID NO: 769522 - protein, 502 aa, Homo sapiens
GKLQTRQAEEAGLRGRDVIGAPEARGAWEFEANRQRATMAVARAALGPLVTGLYDVQAFKFGDFVLKSGLSSPIYIDLRGIVSRPRLLSQVADILFQTAQNAGISFDTVCGVPYTALPLATVICSTNQIPMLIRRKETKDYGTKRLVEGTINPGETCLIIEDVVTSGSSVLETVEVLQKEGLKVTDAIVLLDREQGGKDKLQAHGIRLHSVCTLSKMLEILEQQKKVDAETVGRVKRFIQENVFVAANHNGSPLSIKEAPKELSFGARAELPRIHPVASKLLRLMQKKETNLCLSADVSLARELLQLADALGPSICMLKTHVDILNDFTLDVMKELITLAKCHEFLIFEDRKFADIGNTVKKQYEGGIFKIASWADLVNAHVVPGSGVVKGLQEVGLPLHRGCLLIAEMSSTGSLATGDYTRAAVRMAEEHSEFVVGFISGSRVSMKPEFLHLTPGVQLEAGGKSGHWSWLFQKCFFTHGRQNKTLHIIIHLLKKSLLSLEQ

SEQ ID NO: 769523 - protein, 480 aa, Homo sapiens
GKLQTRQAEEAGLRGRDVIGAPEARGAWEFEANRQRATMAVARAALGPLVTGLYDVQAFKFGDFVLKSGLSSPIYIDLRGIVSRPRLLSQVADILFQTAQNAGISFDTVCGVPYTALPLATVICSTNQIPMLIRRKETKDYGTKRLVEGTINPGETCLIIEDVVTSGSSVLETVEVLQKEGLKVTDAIVLLDREQGGKDKLQAHGIRLHSVCTLSKMLEILEQQKKVDAETVGRVKRFIQENVFVAANHNGSPLSIKEAPKELSFGARAELPRIHPVASKLLRLMQKKETNLCLSADVSLARELLQLADALGPSICMLKTHVDILNDFTLDVMKELITLAKCHEFLIFEDRKFADIGNTVKKQYEVVKGLQEVGLPLHRGCLLIAEMSSTGSLATGDYTRAAVRMAEEHSEFVVGFISGSRVSMKPEFLHLTPGVQLEAGGKSGHWSWLFQKCFFTHGRQNKTLHIIIHLLKKSLLSLEQ

SEQ ID NO: 769524 - protein, 446 aa, Homo sapiens
  misc_feature (1)..(1): Xaa can be any naturally occurring amino acid
  misc_feature (4)..(5): Xaa can be any naturally occurring amino acid
XTFXXPTDGGSKQAARDNGGRSCSFGAIGDGSVRRAGFQVWGLRAEERAFLPHLHRSAGHRVSTASSESGTKRLVEGTINPGETCLIIEDVVTSGSSVLETVEVLQKEGLKVTDAIVLLDREQGGKDKLQAHGIRLHSVCTLSKMLEILEQQKKVDAETVGRVKRFIQENVFVAANHNGSPLSIKEAPKELSFGARAELPRIHPVASKLLRLMQKKETNLCLSADVSLARELLQLADALGPSICMLKTHVDILNDFTLDVMKELITLAKCHEFLIFEDRKFADIGNTVKKQYEGGIFKIASWADLVNAHVVPGSGVVKGLQEVGLPLHRGCLLIAEMSSTGSLATGDYTRAAVRMAEEHSEFVVGFISGSRVSMKPEFLHLTPGVQLEAGGDNLGQQYNSPQEVIGKRGSDIIIVGRGIISAADRLEAAEMYRKAAWEAYLSRLGV

SEQ ID NO: 769525 - protein, 386 aa, Homo sapiens
GVQDQPRQHRTKRLVEGTINPGETCLIIEDVVTSGSSVLETVEVLQKEGLKVTDAIVLLDREQGGKDKLQAHGIRLHSVCTLSKMLEILEQQKKVDAETVGRVKRFIQENVFVAANHNGSPLSIKEAPKELSFGARAELPRIHPVASKLLRLMQKKETNLCLSADVSLARELLQLADALGPSICMLKTHVDILNDFTLDVMKELITLAKCHEFLIFEDRKFADIGNTVKKQYEGGIFKIASWADLVNAHVVPGSGVVKGLQEVGLPLHRGCLLIAEMSSTGSLATGDYTRAAVRMAEEHSEFVVGFISGSRVSMKPEFLHLTPGVQLEAGGDNLGQQYNSPQEVIGKRGSDIIIVGRGIISAADRLEAAEMYRKAAWEAYLSRLGV

SEQ ID NO: 769526 - protein, 110 aa, Homo sapiens [sequence omitted]

SEQ ID NO: 769527 - protein, 139 aa, Homo sapiens
GKLQTRQAEEAGLRGRDVIGAPEARGAWEFEANRQRATMAVARAALGPLVTGLYDVQAFKFGDFVLKSGLSSPIYIDLRGIVSRPRLLSQVADILFQTAQNAGISFDTVCGVPYTALPLATVICSTRLSRFKKEDQEGA

SEQ ID NO: 769528 - protein, 482 aa, Homo sapiens
  misc_feature (480)..(480): Xaa can be any naturally occurring amino acid
GKLQTRQAEEAGLRGRDVIGAPEARGAWEFEANRQRATMAVARAALGPLVTGLYDVQAFKFGDFVLKSGLSSPIYIDLRGIVSRPRLLSQVADILFQTAQNAGISFDTVCGVPYTALPLATVICSTNQIPMLIRRKETKDYGTKRLVEGTINPGETCLIIEDVVTSGSSVLETVEVLQKEGLKVTDAIVLLDREQGGKDKLQAHGIRLHSVCTLSKMLEILEQQKKVDAETVGRVKRFIQENVFVAANHNGSPLSIKEAPKELSFGARAELPRIHPVASKLLRLMQKKETNLCLSADVSLARELLQLADALGPSICMLKTHVDILNDFTLDVMKELITLAKCHEFLIFEDRKFADIGNTVKKQYEGGIFKIASWADLVNAHVVPGSGVVKGLQEVGLPLHRGCLLIAEMSSTGSLATGDYTRAAVRMAEEHSEFVVGFISGSRVSMKPEFLHLTPGVQLEAGGDNLAHTIAHRSYWRGRXHM

SEQ ID NO: 769529 - protein, 530 aa, Homo sapiens
  misc_feature (1)..(1): Xaa can be any naturally occurring amino acid
  misc_feature (4)..(5): Xaa can be any naturally occurring amino acid
XTFXXPTDGGSKQAARDNGGRSCSFGAIGDGSVRRAGFQVWGLRAEERAFLPHLHRSAGHRVSTASSESDGISLTSPRLECSSVIIAHCSLELLGLRDLLAWVADILFQTAQNAGISFDTVCGVPYTALPLATVICSTNQIPMLIRRKETKDYGTKRLVEGTINPGETCLIIEDVVTSGSSVLETVEVLQKEGLKVTDAIVLLDREQGGKDKLQAHGIRLHSVCTLSKMLEILEQQKKVDAETVGRVKRFIQENVFVAANHNGSPLSIKEAPKELSFGARAELPRIHPVASKLLRLMQKKETNLCLSADVSLARELLQLADALGPSICMLKTHVDILNDFTLDVMKELITLAKCHEFLIFEDRKFADIGNTVKKQYEGGIFKIASWADLVNAHVVPGSGVVKGLQEVGLPLHRGCLLIAEMSSTGSLATGDYTRAAVRMAEEHSEFVVGFISGSRVSMKPEFLHLTPGVQLEAGGDNLGQQYNSPQEVIGKRGSDIIIVGRGIISAADRLEAAEMYRKAAWEAYLSRLGV

SEQ ID NO: 769530 - protein, 384 aa, Homo sapiens
RTRGSTHGTKRLVEGTINPGETCLIIEDVVTSGSSVLETVEVLQKEGLKVTDAIVLLDREQGGKDKLQAHGIRLHSVCTLSKMLEILEQQKKVDAETVGRVKRFIQENVFVAANHNGSPLSIKEAPKELSFGARAELPRIHPVASKLLRLMQKKETNLCLSADVSLARELLQLADALGPSICMLKTHVDILNDFTLDVMKELITLAKCHEFLIFEDRKFADIGNTVKKQYEGGIFKIASWADLVNAHVVPGSGVVKGLQEVGLPLHRGCLLIAEMSSTGSLATGDYTRAAVRMAEEHSEFVVGFISGSRVSMKPEFLHLTPGVQLEAGGDNLGQQYNSPQEVIGKRGSDIIIVGRGIISAADRLEAAEMYRKAAWEAYLSRLGV

SEQ ID NO: 769531 - protein, 147 aa, Homo sapiens
GKLQTRQAEEAGLRGRDVIGAPEARGAWEFEANRQRATMAVARAALGPLVTGLYDVQAFKFGDFVLKSGLSSPIYIDLRGIVSRPRLLSQVADILFQTAQNAGISFDTVCGVPYTALPLATVICSTNQIPMLIRRKETKDYGKIKVT

SEQ ID NO: 769532 - protein, 201 aa, Homo sapiens
MGGCFSKPKPVELKIEVVLPEKERGKEELSASGKGSPRAYQGNGTARHFHTEERLSTPHPYPSPQDCVEAAVCHVKDLENGQRSVPWSGALPLARRLLQHQHWGPGGLPWPGQSTQVPGGDGSDPPPSWHPQALQLQRRTKVMAKCISPSAGYSSSTNVLIVGAGAAGLVCAETLRQEGFSDRIVLCTLDRHLPYDRPKLS

SEQ ID NO: 769533 - protein, 241 aa, Homo sapiens
MGGCFSKPKPVELKIEVVLPEKERGKEELSASGKGSPRAYQGNGTARHFHTEERLSTPHPYPSPQDCVEAAVCHVKDLENGQMREVELGWGKVLLVKDNGEFHALGHKCPHYGAPLVKGVLSRGRVRCPWHGACFNISTGDLEDFPGLDSLHKFQVGVKIEKEKVYVRASKQALQLQRRTKVMAKCISPSAGYSSSTNVLIVGAGAAGLVCAETLRQEGFSDRIVLCTLDRHLPYDRPKLS

SEQ ID NO: 769534 - protein, 116 aa, Homo sapiens
MVWPASPPAASVAAPTRMTHRSAQQCPHPNTLHNQVWCLHSSQAGACPPVPHAHAHTGAPTSPHPILLSTYLRRKLEGCGPVRVSCFPLHPAAVESHGPPPAPITKQHNNRLSEFR

SEQ ID NO: 769535 - protein, 170 aa, Homo sapiens
MDTRNKAQLLVLLTLLSVLFSQTSAWPLYRAPSALRLGDRIPFEGANEPDQVSLKEDIDMLQNALAENDTPYYDVSRNARHADGVFTSDFSKLLGQLSAKKYLESLMGKRVSSNISEDPVPVKRHSDAVFTDNYTRLRKQMAVKKYLNSILNGKRSSEGESPDFPEELEK

SEQ ID NO: 769536 - protein, 170 aa, Homo sapiens; identical to SEQ ID NO: 769535

SEQ ID NO: 769537 - protein, 164 aa, Homo sapiens
CIPRSVRIPHFTRVLPALLLAPWPAGLFLAMGRSRRTGAHRAHSLARQMKAKRRRPDLDEIHRELRPQGSARPQPDPNAEFDPDLPGGGLHRCLACARYFIDSTNLKTHFRSKDHKKRLKQLSVEPYSQEEAERAAGMGSYVPPRRLAVPTEVSTEVPEMDTST

SEQ ID NO: 769538 - protein, 134 aa, Homo sapiens
MGRSRRTGAHRAHSLARQMKAKRRRPDLDEIHRELRPQGSARPQPDPNAEFDPDLPGGGLHRCLACARYFIDSTNLKTHFRSKDHKKRLKQLSVEPYSQEEAERAAGMGSYVPPRRLAVPTEVSTEVPEMDTST

SEQ ID NO: 769539 - protein, 134 aa, Homo sapiens; identical to SEQ ID NO: 769538

SEQ ID NO: 769540 - protein, 134 aa, Homo sapiens; identical to SEQ ID NO: 769538

SEQ ID NO: 769541 - protein, 74 aa, Homo sapiens
MDTYKELIERIPELNKVARAAAEVAGQFVIKLTHDVELNLDYERYNSQLLSFVRDLNQYRADIKVSTDSNYVFI

SEQ ID NO: 769542 - protein, 52 aa, Homo sapiens
AVGRRGEEDPCNLLVAQVSLLSVDEMYQNLPPAEKDQYWDEDQPQPPYTVAT

SEQ ID NO: 769543 - protein, 118 aa, Homo sapiens
PFFRSEHWATGVVWEGPLTSLPLKVSSHKIWCAQANAGTYYGKSFSFRSLLFLSSTSDMTNAQQWRQEDSPPSVRAYSPAHVSLSLRCIANSCQAFWNDFLTRKAPYFNGPIQTTDIC

SEQ ID NO: 769544 - protein, 146 aa, Homo sapiens
RIALARTSSTMLKRSGESRLFVLFQFQRECFHLFPIQYYVGCGSVIDGFYYIKTQLRTPGLRTTSHCHVNPFPGQCVLGLEPNLLDSLGPSIFGVVGNLVAIVVLCKSRKEQKETTFYTVMRLVATDLLFTLLVSQVTIAMYMKGG

SEQ ID NO: 769545 - protein, 68 aa, Homo sapiens
LGERQTPGVRLPPAETRQGPREGDVGGEGYGWRSRRAWAGSGATRTHSGFPSFSVRWLSYPSLHNQRV

SEQ ID NO: 769546 - protein, 104 aa, Homo sapiens
KPPTPAVHFSVRTEVTLGDSKFDFLPTLAANGSSRSSSGTKTWQHQNAQSHVRLLEWTPKPPGTQRASCLPAPATPAPAKGNPAPGYGCLHKHTRCLYWHLAPL

SEQ ID NO: 769547 - protein, 115 aa, Homo sapiens
GISTDRNFHRARTVLFMGSCLPQMASITVGNVFIVKKFCYLHAPSSYKITCLIVNVPHLHPTFSIPTPQSLPYHHLADSCTFHSCQLCNLPFPVQGTFLIMAHCLRSVPLLRLSH

SEQ ID NO: 769548 - protein, 416 aa, Homo sapiens
MLEGQLEAGEPKEGTHPEDPCPGAGAAMEKTPAAAEVPREDSNAGEMPSLQQQITSLHQELGRQQSLWADIHRKLQSHMDALRKQNRELREELRGLQRQQWEAGKKPAASPHAGRESHTLALEPAFGKISPLSADEETTPKYAGRKSQSATLLGQRWSSNHLAPPKPMSLKTERINSGKTPPQEDREKSPPGRRQDRSPAPTGRPTPGAERREVSEDGKIMHPSSRSPQNSGGRKSPVQASQATTLQEQTAAARGADRSSSVLGSSEGGFLSRVQADEFASSSPDSAERQEKFYPNGSKEIVFPDGTVEHLKDGQEETLFPDGTIVRVERNGDKTIVLSNGQKEIHTARFKRREYPDGTVKTVYCSGCQETKYASGRVKIKDEAGNVVLDEKQMSPQHAASHGKCQLQIFAKTDKN

SEQ ID NO: 769549 - protein, 235 aa, Homo sapiens
PFKTESPLEPSAALWSLEMRREDLGTAVGTRPRCSGPSRSDWRGPGEVMRSVSGAEGRGLPQTEGVTSLGPRTLGYPLGGAGKKKLSQGCEDRGPLPTSTETVPIPAGKEQPGIRLLALEPAFGKISPLSADEETTPKYAGRKSQSATLLGQRWSSNHLAPPKPMSLKTERINSGKTPPQEDREKSPPGRRQDRSPAPTGRPTPGAERREVSEDGKVTSETWVTLHWQHGKFRFR

SEQ ID NO: 769550 - protein, 238 aa, Homo sapiens
MLEGQLEAGEPKEGTHPEDPCPGAGAAMEKTPAAAEVPREDSNAGEMPSLQQQITSLHQELGRQQSLWADIHRKLQSHMDALRKQNRELREELRGLQRQQWEAGKKPAASPHAGRESHTLALEPAFGKISPLSADEETTPKYAGRKSQSATLLGQRWSSNHLAPPKPMSLKTERINSGKTPPQEDREKSPPGRRQDRSPAPTGRPTPGAERREVSEDGKVTSETWVTLHWQHGKFRFR

SEQ ID NO: 769551 - protein, 174 aa, Homo sapiens
MLEGQLEAGEPKEGTHPEDPCPGAGAAMEKTPAAAEVPREDSNAGEMPSLQQQITSLHQELGRQQSLWADIHRKLQSHMDALRKQNRELREELRGLQRQQWEAGKKPAASPHAGRESHTLALEPAFGKISPLSADEETTPKYAGRKSQSATLLGQRWSSNHLAPPKVTLRAYRL

SEQ ID NO: 769552 - protein, 134 aa, Homo sapiens
MLEGQLEAGEPKEGTHPEDPCPGAGAAMEKTPAAAEVPREDSNAGEMPSLQQQITSLHQELGRQQSLWADIHRKLQSHMDALRKQNRELREELRGLQRQQWEAGKKPAASPHAGRESHTLVPKAHLCFCIICVV

SEQ ID NO: 769553 - protein, 72 aa, Homo sapiens
MTSPLEKDPEPNGALSPGPGDTNSWGFGRDPAPSPRDSLAPEDLEMFVLDFEDGDLWESIRGQLGPMAGPPT

SEQ ID NO: 769554 - protein, 134 aa, Homo sapiens; identical to SEQ ID NO: 769538

SEQ ID NO: 769555 - protein, 118 aa, Homo sapiens
MGRSRRTGAHRAHSLARQMKAKRRRPDLDEIHRELRPQGSARPQPDPNAEFDPDLPGGGLHRCLACARYFIDSTNLKTHFRSKDHKKRAAGMGSYVPPRRLAVPTEVSTEVPEMDTST

SEQ ID NO: 769556 - protein, 134 aa, Homo sapiens; identical to SEQ ID NO: 769538

SEQ ID NO: 769557 - protein, 400 aa, Homo sapiens
INLQLFKQFIDGRLAKLNAGRGFSDVFEEEITSGGFCGGNPRSYQQWVHTVKKGGALFNTAMTKATPAVRTAYKFAKNHAKLGLKEVKSKLKHKENEEDYGTCSSSVQYTPVYKLHNEKGGNSEKRKLAQARLKRPLKSLDGALYDDEDDDDIERASKLSSEDGEEASAYLYESDDSVETRVKTPYSGEMDLLGEILDTLSTHSSDQGKLAAAKSLDFFRSMDDIDYKPTNKSNAPSENNLAFLCGGSGDQAEWNLGQDDSALHGKHLPPSPRKRVSSSGLTDSLFILKEENSNKHLGADNVSDPTSGLDFQLTSPEVSQTDKGKTEKRETLSQISDDLLIPGLGRHSSTFVPWEKEGKEAKETSEDIGLLHEVVSLCHMTSDFQQSLNISDKNTNGNQT

SEQ ID NO: 769558 - protein, 458 aa, Homo sapiens
QSTATGDGVARAFLRAQAALFGSYRDALRYKPGEPITFCEESFVKHRSSVMKQFLETAINLQLFKQFIDGRLAKLNAGRGFSDVFEEEITSGGFCGGNPRSYQQWVHTVKKGGALFNTAMTKATPAVRTAYKFAKNHAKLGLKEVKSKLKHKENEEDYGTCSSSVQYTPVYKLHNEKGGNSEKRKLAQARLKRPLKSLDGALYDDEDDDDIERASKLSSEDGEEASAYLYESDDSVETRVKTPYSGEMDLLGEILDTLSTHSSDQGKLAAAKSLDFFRSMDDIDYKPTNKSNAPSENNLAFLCGGSGDQAEWNLGQDDSALHGKHLPPSPRKRVSSSGLTDSLFILKEENSNKHLGADNVSDPTSGLDFQLTSPEVSQTDKGKTEKRETLSQISDDLLIPGLGRHSSTFVPWEKEGKEAKETSEDIGLLHEVVSLCHMTSDFQQSLNISDKNTNGNQT

SEQ ID NO: 769559 - protein, 109 aa, Homo sapiens
QSTATGDGVARAFLRAQAALFGSYRDALRYKPGEPITFCEESFVKHRSSVMKQFLETAINLQLFKQFIDGRLAKLNAGRGFSDVFEEEITSGGFCGGKDKLQYDYPFSQ

SEQ ID NO: 769560 - protein, 139 aa, Homo sapiens
QSTATGDGVARAFLRAQAALFGSYRDALRYKPGEPITFCEESFVKHRSSVMKQFLETAINLQLFKQFIDGRLAKLNAGRGFSDVFEEEITSGGFCGGNPRSYQQWVHTVKKGGALFNTAMTKATPAVRTAYKFVSFFDI

SEQ ID NO: 769561 - protein, 243 aa, Homo sapiens
LPPASRSHFLLEPGAAAAAPSSPASGRAPGHCSQRGPEERGGTASTTATAPTMQSIKCVVVGDGAVGKTCLLICYTTNAFPKEYIPTVFDNYSAQSAVDGRTVNLNLWDTAGQEEYDRLRTLSYPQTNVFVICFSIASPPSYENVRHKWHPEVCHHCPDVPILLVGTKKDLRAQPDTLRRLKEQGQAPITPQQGQALAKQIHAVRYLECSALQQDGVKEVFAEAVRAVLNPTPIKRGRSCILL

SEQ ID NO: 769562 - protein, 243 aa, Homo sapiens; identical to SEQ ID NO: 769561

SEQ ID NO: 769563 - protein, 243 aa, Homo sapiens; identical to SEQ ID NO: 769561

SEQ ID NO: 769564 - protein, 191 aa, Homo sapiens
MQSIKCVVVGDGAVGKTCLLICYTTNAFPKEYIPTVFDNYSAQSAVDGRTVNLNLWDTAGQEEYDRLRTLSYPQTNVFVICFSIASPPSYENVRHKWHPEVCHHCPDVPILLVGTKKDLRAQPDTLRRLKEQGQAPITPQQGQALAKQIHAVRYLECSALQQDGVKEVFAEAVRAVLNPTPIKRGRSCILL

SEQ ID NO: 769565 - protein, 69 aa, Homo sapiens
  misc_feature (31)..(31): Xaa can be any naturally occurring amino acid
RERERERERERERFAEAVAGLSIRGSAHVDXLGQCLALQQDGVKEVFAEAVRAVLNPTPIKRGRSCILL

SEQ ID NO: 769566 - protein, 243 aa, Homo sapiens; identical to SEQ ID NO: 769561

SEQ ID NO: 769567 - protein, 69 aa, Homo sapiens; identical to SEQ ID NO: 769565
  misc_feature (31)..(31): Xaa can be any naturally occurring amino acid

SEQ ID NO: 769568 - protein, 103 aa, Homo sapiens
ASQRRRLCVGQTSGPRPGIQGQPLTRFLIPDGWRRLTPKVKGLLGKETIVKSSWAKLALQTGGARSWPNSGSGTIPEHPIPGIMFWKPPRRAQFSGVALVSSH

SEQ ID NO: 769569 - protein, 407 aa, Homo sapiens
EPFFSGLGIPASARGYAAGVWAATVGKVTSAAAPKRVSRAGAMEGQSVEELLAKAEQDEAEKLQRITVHKELELQFDLGNLLASDRNPPTGLRCAGPTPEAELQALARDNTQLLINQLWQLPTERVEEAIVARLPEPTTRLPREKPLPRPRPLTRWQQFARLKGIRPKKKTNLVWDEVSGQWRRRWGYQRARDDTKEWLIEVPGNADPLEDQFAKRIQAKKERVAKNELNRLRNLARAHKMQLPSAAGLHPTGHQSKEELGRAMQVAKVSTASVGRFQERLPKEKVPRGSGKKRKFQPLFGDFAAEKKNQLELLRVMNSKKPQLDVTRATNKQMREEDQEEAAKRRKMSQKGKRKGGRQGPGGKRKGGPPSQGGKRKGGLGGKMNSGPPGLGGKRKGGQRPGGKRRK

SEQ ID NO: 769570 - protein, 407 aa, Homo sapiens; identical to SEQ ID NO: 769569

SEQ ID NO: 769571 - protein, 48 aa, Homo sapiens
LASQVRTRGIRETQLSSFTPANTHELIQYLLTTHYILDLTGLMKGEEE

SEQ ID NO: 769572 - protein, 266 aa, Homo sapiens
TISGALNQFPQSCSNMPAKPGHLGHPQQTEVAPDPTTMGNRHRELGVPDSALAGVPPPHPVQSYPQQSHHLAASMSQEGYHQVPSLLPARQPGFMEPQTGPDGGGYSSFGLVQPRPPLEPSPTGRHRGVRAVSRAGLRRHRPCHGCHAVQSGNSRGCAKGAMGNMGSVPPQPPPQDAGGAPDHSMLYYYGQIHMYEQDGGLENLGSCQVMRSQPPQPQACQDSIQPQPLPSPGVNQVSSTVDSQLLEAPQIDFDAIMDDGDHSSLF

SEQ ID NO: 769573 - protein, 115 aa, Homo sapiens [sequence omitted]

SEQ ID NO: 769574 - protein, 504 aa, Homo sapiens
MEAAATPAAAGAARREELDMDVMRPLINEQNFDGTSDEEHEQELLPVQKHYQLDDQEGISFVQTLMHLLKGNIGTGLLGLPLAIKNAGIVLGPISLVFIGIISVHCMHILVRCSHFLCLRFKKSTLGYSDTVSFAMEVSPWSCLQKQAAWGRSVVDFFLVITQLGFCSVYIVFLAENVKQVHEGFLESKVFISNSTNSSNPCERRSVDLRIYMLCFLPFIILLVFIRELKNLFVLSFLANVSMAVSLVIIYQYVVRNMPDPHNLPIVAGWKKYPLFFGTAVFAFEGIGVVLPLENQMKESKRFPQALNIGMGIVTTLYVTLATLGYMCFHDEIKGSITLNLPQDVWLYQSVKILYSFGIFVTYSIQFYVPAEIIIPGITSKFHTKWKQICEFGIRSFLVSITCAGAILIPRLDIVISFVGAVSSSTLALILPPLVEILTFSKEHYNIWMVLKNISIAFTGVVGFLLGTYITVEEIIYPTPKVVAGTPQSPFLNLNSTCLTSGLK

SEQ ID NO: 769575 - protein, 359 aa, Homo sapiens
MEAAATPAAAGAARREELDMDVMRPLINEQNFDGTSDEEHEQELLPVQKHYQLDDQEGISFVQTLMHLLKGNIGTGLLGLPLAIKNAGIVLGPISLVFIGIISVHCMHILVRCSHFLCLRFKKSTLGYSDTVSFAMEVSPWSCLQKQAAWGRSVVDFFLVITQLGFCSVYIVFLAENVKQVHEGFLESKVFISNSTNSSNPCERRSVDLRIYMLCFLPFIILLVFIRELKNLFVLSFLANVSMAVSLVIIYQYVVRNMPDPHNLPIVAGWKKYPLFFGTAVFAFEGIGVVLPLENQMKESKRFPQALNIGMGIVTTLYVTLATLGYMCFHDEIKGSITLNLPQDVCRDHYPWDHIQISY

SEQ ID NO: 769576 - protein, 108 aa, Homo sapiens [sequence omitted]

SEQ ID NO: 769577 - protein, 102 aa, Homo sapiens
MEAAATPAAAGAARREELDMDVMRPLINEQNFDGTSDEEHEQELLPVQKHYQLDDQEGISVSVMVYKSPFLLIQYVFCNLLLQARHSITLQDTNIRHSLHLQ

SEQ ID NO: 769578 - protein, 504 aa, Homo sapiens; identical to SEQ ID NO: 769574

SEQ ID NO: 769579 - protein, 504 aa, Homo sapiens; identical to SEQ ID NO: 769574

SEQ ID NO: 769580 - protein, 564 aa, Homo sapiens
DKSKFKTKIRRLYDIANVLSSLDLIKKVHVTEERGRKPAFKWTGPEISPNTSGSSPVIHFTPSDLEVRRSSKENCAKNLFSTRGKPNFTRHPSLIKLVKSIESDRRKINSAPSSPIKTNKAESSQNSAPFPSKMAQLAAICKMQLEEQSSESRQKVKVQLARSGPCKPVAPLDPPVNAEMELTAPSLIQPLGMVPLIPSPLSSAVPLILPQAPSGPSYAIYLQPTQAHQSVTPPQGLSPTVCTTHSSKATGSKDSTDATTEKAANDTSKASASTRPGSLLPAPERQGAKSRTREPAGERGSKRASMLEDSGSKKKFKEDLKGLENVSATLFPSGYLIPLTQCSSLGAESILSGKENSSALSPNHRIYSSPIAGVIPVTSSELTAVNFPSFHVTPLKLMVSPTSVAAVPVGNSPALASSHPVPIQNPSSAIVNFTLQHLGLISPNVQLSASPGSGIVPVSPRIESVNVAPENAGTQQGRATNYDSPVPGQSQPNGQSVAVTGAQQPVPVTPKGSQLVAESFFRTPGGPTKPTSSSCMDFEGANKTSLGTLFVPQRKLEVSTEDVH

SEQ ID NO: 769581 - protein, 167 aa, Homo sapiens [sequence omitted]

SEQ ID NO: 769582 - protein, 177 aa, Homo sapiens
CHDIPQGAGARWPRVSPVVEPCSPRLILLAVLLLLLCGVTAGCVRFCCLRKQAQAQPHLPPARQPCDVAVIPMDSDSPVHSTVTSYSSVQYPLGMRLPLPFGELDLDSMAPPAYSLYTPEPPPSYDEAVKMAKPREEGPALSQKPSPLLGASGLETTPVPQESGPNTQLPPCSPGAP

SEQ ID NO: 769583 - protein, 208 aa, Homo sapiens
ARGPLAARGLRLLLPLLPLLPLLPLPQVALGFADGSCDPSDQCPPQARWSSLWHVGLILLAVLLLLLCGVTAGCVRFCCLRKQAQAQPHLPPARQPCDVAVIPMDSDSPVHSTVTSYSSVQYPLGMRLPLPFGELDLDSMAPPAYSLYTPEPPPSYDEAVKMAKPREEGPALSQKPSPLLGASGLETTPVPQESGPNTQLPPCSPGAP

SEQ ID NO: 769584 - protein, 131 aa, Homo sapiens
MAPSLWKGLVGIGLFALAHAAFSAAQHRSYMRLTEKEDESLPIDIVLQTLLAFAVTCYGIVHIAGEFKDMDATSELKNKTFDTLRNHPSFYVFNHRGRVLFRPSDTANSSNQDALSSNTSLKLRKLESLRR

SEQ ID NO: 769585 - protein, 109 aa, Homo sapiens
MAPSLWKGLVGIGLFALAHAAFSAAQHRSYMRLAEERHNRLEERKRQRKEERRITYYREKEEEEQRRAEEQMLKEREERERAERAKREEELREYQEGVKKLEEVGREKT

SEQ ID NO: 769586 - protein, 733 aa, Homo sapiens
SKQLPAGPGRGRRREGGAARAVGAPRAGPASVCPRRQPAPDAPPGRSKKRPKFAAAVSWSSRRAAAPGAPGASLASRYCLQTLLLSAAAPNSADAGRGEPSRGRCAQRSGQAGRAWAGARAGVESRGQQQPVPGSGGAEGRGAPREDTSNASMQRPGPRLWLVLQVMGSCAAISSMDMERPGDGKCQPIEIPMCKDIGYNMTRMPNLMGHENQREAAIQLHEFAPLVEYGCHGHLRFFLCSLYAPMCTEQVSTPIPACRVMCEQARLKCSPIMEQFNFKWPDSLDCRKLPNKNDPNYLCMEAPNNGSDEPTRGSGLFPPLFRPQRPHSAQEHPLKDGGPGRGGCDNPGKFHHVEKSASCAPLCTPGVDVYWSREDKRFAVVWLAIWAVLCFFSSAFTVLTFLIDPARFRYPERPIIFLSMCYCVYSVGYLIRLFAGAESIACDRDSGQLYVIQEGLESTGCTLVFLVLYYFGMASSLWWVVLTLTWFLAAGKKWGHEAIEANSSYFHLAAWAIPAVKTILILVMRRVAGDELTGVCYVGSMDVNALTGFVLIPLACYLVIGTSFILSGFVALFHIRRVMKTGGENTDKLEKLMVRIGLFSVLYTVPATCVIACYFYERLNMDYWKILAAQHKCKMNNQTKTLDCLMAASIPAVEIFMVKIFMLLVVGITSGMWIWTSKTLQSWQQVCSRRLKKKSRRKPASVITSGGIYKKAQHPQKTHHGKYEIPAQSPTCV

SEQ ID NO: 769587 - protein, 439 aa, Homo sapiens
MADPDVLTEVPAALKRLAKYVIRGFYGIEHALALDILIRNSCVKEEDMLELLKFDRKQLRSVLNNLKGDKFIKCRMRVETAADGKTTRHNYYFINYRTLVNVVKYKLDHMRRRIETDERDSTNRASFKCPVCSSTFTDLEANQLFDPMTGTFRCTFCHTEVEEDESAMPKKDARTLLARFNEQIEPIYALLRETEDVNLAYEILEPEPTEIPALKQSKDHAATTAGAASLAGGHHREAWATKGPSYEDLYTQNVVINMDDQEDLHRASLEGKSAKERPIWLRESTVQGAYGSEDMKEGGIDMDAFQEREEGHAGPDDNEEVMRALLIHEKKTSSAMAGSVGAAAPVTAANGSDSESETSESDDDSPPRPAAVAVHKREEDEEEDDEFEEVADDPIVMVAGRPFSYSEVSQRPELVAQMTPEEKEAYIAMGQRMFEDLFE

SEQ ID NO: 769588 - protein, 150 aa, Homo sapiens
MADPDVLTEVPAALKRLAKYVIRGFYGIEHALALDILIRNSCVKEEDMLELLKFDRKQLRSVLNNLKGDKFIKCRMRVETAADGKTTRHNYYFINYRTLVNVVKYKLDHMRRRIETDERDSTNRASFKCPVCSSTFTDLEANQLFDPMTG

SEQ ID NO: 769589 - protein, 177 aa, Homo sapiens
SCRAKLFEDPPRYIKSGVRKLYHERNHDVLIEVAYHRCGEPGDVTPGIEWILNVLLTLDTVCTHRTSSCVKEEDMLELLKFDRKQLRSVLNNLKGDKFIKCRMRVETAADGKTTRHNYYFINYRTLVNVVKYKLDHMRRRIETDERDSTNRASFKCPVCSSTFTDLEANQLFDPMTG

SEQ ID NO: 769590 - protein, 439 aa, Homo sapiens; identical to SEQ ID NO: 769587

SEQ ID NO: 769591 - protein, 198 aa, Homo sapiens
MADPDVLTEVPAALKRLAKYVIRGFYGIEHALALDILIRNSCVKEEDMLELLKFDRKQLRSVLNNLKGDKFIKCRMRVETAADGKTTRHNYYFINYRTLVNVVKYKLDHMRRRIETDERDSTNRASFKCPVCSSTFTDLEANQLFDPMTGTFRCTFCHTEVEEDESAMPKKDARTLLARFNEQIEPIYALLRVHPVYH

SEQ ID NO: 769592 - protein, 233 aa, Homo sapiens
MADPDVLTEVPAALKRLAKYVIRGFYGIEHALALDILIRNSCVKEEDMLELLKFDRKQLRSVLNNLKGDKFIKCRMRVETAADGKTTRHNYYFINYRTLVNVVKYKLDHMRRRIETDERDSTNRASFKCPVCSSTFTDLEANQLFDPMTGTFRCTFCHTEVEEDESAMPKKDARTLLARFNEQIEPIYALLRETEDVNLAYEILEPEPTEIPALKQSKDLWWPMLPGGAHLLG

SEQ ID NO: 769593 - protein, 68 aa, Homo sapiens
  misc_feature (17)..(18): Xaa can be any naturally occurring amino acid
CAAYQAGQGHQGPGQDXXSGTVHAGRVEFMDDTSRSIIRNVKGPVREGDVLTLLESEREARRLRSACL

SEQ ID NO: 769594 - protein, 72 aa, Homo sapiens
  misc_feature (11)..(11): Xaa can be any naturally occurring amino acid
  misc_feature (22)..(22): Xaa can be any naturally occurring amino acid
TSVSAIAGQGXTQRVPCGSDRXSSGNQCARQGCRVEFMDDTSRSIIRNVKGPVREGDVLTLLESEREARRLR

SEQ ID NO: 769595 - protein, 194 aa, Homo sapiens
LIYIFINSVRGFSVFCTLASIRFFLSFDKNHFNWGPSAEGPQRNTRLGWIQGKQVTVLGSPVPVNVFLGVPFAAPPLGSLRFTNPQPASPWDNLREATSYPNLCLQNSEWLLLDQHMLKVHYPKFGVSEDCLYLNIYAPAHADTGSKLPVLVWFPGGAFKTGSASIFDGSALAAYEDVLVVVVQYRLGIFGFFT

SEQ ID NO: 769596 - protein, 136 aa, Homo sapiens
MSSYFVNSLFSKYKTGESLRPNYYDCGFAQDLGGRPTVVYGPSSGGSFQHPSQIQEFYHGPSSLSTAPYQQNPCAVACHGDPGNFYGYDPLQRQSLFGAQDPDLDSRPTWIRDRPGFATDLDSRPTWIRDRPGFAT

SEQ ID NO: 769597 - protein, 243 aa, Homo sapiens
MSSYFVNSLFSKYKTGESLRPNYYDCGFAQDLGGRPTVVYGPSSGGSFQHPSQIQEFYHGPSSLSTAPYQQNPCAVACHGDPGNFYGYDPLQRQSLFGAQDPDLVQYADCKLAAASGLGEEAEGSEQSPSPTQLFPWMRPQAAAGRRRGRQTYSRYQTLELEKEFLFNPYLTRKRRIEVSHALGLTERQVKIWFQNRRMKWKKENNKDKFPSSKCEQEELEKQKLERAPEAADEGDAQKGDKK

SEQ ID NO: 769598 - protein, 112 aa, Homo sapiens
MDANDHEKTVQKYETTHLQGSKSPKTVYELASLFLFNPYLTRKRRIEVSHALGLTERQVKIWFQNRRMKWKKENNKDKFPSSKCEQEELEKQKLERAPEAADEGDAQKGDKK

SEQ ID NO: 769599 - protein, 279 aa, Homo sapiens
MSSYFVNSLFSKYKTGESLRPNYYDCGFAQDLGGRPTVVYGPSSGGSFQHPSQIQEFYHGPSSLSTAPYQQNPCAVACHGDPGNFYGYDPLQRQSLFGAQDPDLVQYADCKLAAASGLGEEAEGSEQSPSPTQLFPWMRPQAAAGRRRGRQTYSRYQTLELEKEFLFNPYLTRKRRIEVSHALGLTERQVKIWFQNRRMKWKKENNKDKFPSSKCEQEELEKQKLERAPEAADEGDAQKGDKKNGSVQGPWAGSCALGAPRKTCSISARISGAPRETES

SEQ ID NO: 769600 - protein, 241 aa, Homo sapiens
MSSYFVNSLFSKYKTGESLRPNYYDCGFAQDLGGRPTVVYGPSSGGSFQHPSQIQEFYHGPSSLSTAPYQQNPCAVACHGDPGNFYGYDPLQRQSLFGAQDPDLVQYADCKLAAASGLGEEAEGSEQSPSPTQLFPWMRPQAAAGRRRGRQTYSRYQTLELEKEFLFNPYLTRKRRIEVSHALGLTERQVKIWFQNRRMKWKKENNKDNFPSQSSLPSATPQLAGFLSGFSLFLLHPPPLV

SEQ ID NO: 769601 - protein, 126 aa, Homo sapiens
  misc_feature (124)..(124): Xaa can be any naturally occurring amino acid
  misc_feature (126)..(126): Xaa can be any naturally occurring amino acid
AQDIPKSPNFNGSPDSQPLLTPERRSASFRYYAGREVEKFNRRSQAISARCKTVRRISPAETNKVKVSAEPNRPSPSRPYILRYVDRTREPSASGTGKKQVHLTLKLFNTPPRKKPTLKPQITXKX

SEQ ID NO: 769602 - protein, 114 aa, Homo sapiens
MVKAISTVQDVFTPECKFKESVFENYYVIYSSTLYRQQESGRAWFLGLNKEGQIMKGNRVKKTKPSSHFVPKPIEVCMYREPSLHEIGEKQGRSRKSSGTPTMNGGKVVNQDST

SEQ ID NO: 769603 - protein, 152 aa, Homo sapiens
MAAAIASSLIRQKRQARESNSDRVSASKRRSSPSKDGRSLCERHVLGVFSKVRFCSGRKRPVRRRPEPQLKGIVTRLFSQQGYFLQMHPDGTIDGTKDENSDYTLFNLIPVGLRVVAIQGVKASLYVAMNGEGYLYSSGCFHSRMQIQGICV

SEQ ID NO: 769604 - protein, 114 aa, Homo sapiens; identical to SEQ ID NO: 769602

SEQ ID NO: 769605 - protein, 114 aa, Homo sapiens; identical to SEQ ID NO: 769602

SEQ ID NO: 769606 - protein, 114 aa, Homo sapiens; identical to SEQ ID NO: 769602

SEQ ID NO: 769607 - protein, 119 aa, Homo sapiens
RFSMKILELSLKKGVHMLQCLCGRSLRSSDTPSEPQLKGIVTRLFSQQGYFLQMHPDGTIDGTKDENSDYTLFNLIPVGLRVVAIQGVKASLYVAMNGEGYLYSSGCFHSRMQIQGICV

SEQ ID NO: 769608 - protein, 121 aa, Homo sapiens
PPPPPPPPRKSRLALTDVFTPECKFKESVFENYYVIYSSTLYRQQESGRAWFLGLNKEGQIMKGNRVKKTKPSSHFVPKPIEVCMYREPSLHEIGEKQGRSRKSSGTPTMNGGKVVNQDST

SEQ ID NO: 769609 - protein, 488 aa, Homo sapiens
MAAGSEATTPVIVAAGAGGEEGEHVKPFKPEKAKEIIMSLQQPAIFCNMVFDWPARHWNAKYLSQVLHGKQIRFRMGMKSMSTVPQFETTCNYVEATLEEFLTWNCDQSSISGPFRDYDHSKFWAYADYKYFVSLFEDKTDLFQDVKWSDFGFPGRNGQESTLWIGSLGAHTPCHLDSYGCNLVFQVQGRKRWHLFPPEDTPFLYPTRIPYEESSVFSKINVVNPDLKRFPQFRKAQRHAVTLSPGQVLFVPRHWWHYVESIDPVTVSINSWIELEEDHLARVEEAITRMLVCALKTAENPQNTRAWLNPTEVEETSHAVNCCYLNAAVSAFFDRCRTSEVVEIQALRTDGEHMKKEELNVCNHMEVGQTGSQNLTTGTDKPEAASPFGPDLVPVAQRSEEPPSERGGIFGSDGKDFVDKDGEHFGKLHCAKRQQIMSNSENAIEEQIASNTTTTPQTFISTDDLLDCLVNPQVTRIVAQLLIQGRSL

SEQ ID NO: 769610 - protein, 451 aa, Homo sapiens
MSLQQPAIFCNMVFDWPARHWNAKYLSQVLHGKQIRFRMGMKSMSTVPQFETTCNYVEATLEEFLTWNCDQSSISGPFRDYDHSKFWAYADYKYFVSLFEDKTDLFQDVKWSDFGFPGRNGQESTLWIGSLGAHTPCHLDSYGCNLVFQVQGRKRWHLFPPEDTPFLYPTRIPYEESSVFSKINVVNPDLKRFPQFRKAQRHAVTLSPGQVLFVPRHWWHYVESIDPVTVSINSWIELEEDHLARVEEAITRMLVCALKTAENPQNTRAWLNPTEVEETSHAVNCCYLNAAVSAFFDRCRTSEVVEIQALRTDGEHMKKEELNVCNHMEVGQTGSQNLTTGTDKPEAASPFGPDLVPVAQRSEEPPSERGGIFGSDGKDFVDKDGEHFGKLHCAKRQQIMSNSENAIEEQIASNTTTTPQTFISTDDLLDCLVNPQVTRIVAQLLIQGRSL

SEQ ID NO: 769611 - protein, 488 aa, Homo sapiens; identical to SEQ ID NO: 769609

SEQ ID NO: 769612 - protein, 455 aa, Homo sapiens
MRISCCEQQPAIFCNMVFDWPARHWNAKYLSQVLHGKQIRFRMGMKSMSTVPQFETTCNYVEATLEEFLTWNCDQSSISGPFRDYDHSKFWAYADYKYFVSLFEDKTDLFQDVKWSDFGFPGRNGQESTLWIGSLGAHTPCHLDSYGCNLVFQVQGRKRWHLFPPEDTPFLYPTRIPYEESSVFSKINVVNPDLKRFPQFRKAQRHAVTLSPGQVLFVPRHWWHYVESIDPVTVSINSWIELEEDHLARVEEAITRMLVCALKTAENPQNTRAWLNPTEVEETSHAVNCCYLNAAVSAFFDRCRTSEVVEIQALRTDGEHMKKEELNVCNHMEVGQTGSQNLTTGTDKPEAASPFGPDLVPVAQRSEEPPSERGGIFGSDGKDFVDKDGEHFGKLHCAKRQQIMSNSENAIEEQIASNTTTTPQTFISTDDLLDCLVNPQVTRIVAQLLIQGRSL

SEQ ID NO: 769613 - protein, 66 aa, Homo sapiens
VGAGRESPGLLPVVQLRVSEFGPYSDPTPAPLRLGFRQNPPCGSHGSRLRGDHSCDRCGWGWRGGR

SEQ ID NO: 769614 - protein, 68 aa, Homo sapiens
KRIEDLGPRSLRGPRRQPHRGGESGGLYGERGELKTKRRKKGKKKAHGREGGRGRKEKQERGLSSSEW

SEQ ID NO: 769615 - protein, 711 aa, Homo sapiens
TICFWKQDSRGRVPATADQAPRRTQASTEQAETDDNMDTKSILEELLLKRSQQKKKMSPNNYKERLFVLTKTNLSYYEYDKMKRGSRKGSIEIKKIRCVEKVNLEEQTPVERQYPFQIVYKDGLLYVYASNEESRSQWLKALQKEIRGNPHLLVKYHSGFFVDGKFLCCQQSCKAAPGCTLWEAYANLHTAVNEEKHRVPTFPDRVLKIPRAVPVLKMDAPSSSTTLAQYDNESKKNYGSQPPSSSTSLAQYDSNSKKIYGSQPNFNMQYIPREDFPDWWQVRKLKSSSSSEDVASSNQKERNVNHTTSKISWEFPESSSSEEEENLDDYDWFAGNISRSQSEQLLRQKGKEGAFMVRNSSQVGMYTVSLFSKAVNDKKGTVKHYHVHTNAENKLYLAENYCFDSIPKLIHYHQHNSAGMITRLRHPVSTKANKVPDSVSLGNGIWELKREEITLLKELGSGQFGVVQLGKWKGQYDVAVKMIKEGSMSEDEFFQEAQTMMKLSHPKLVKFYGVCSKEYPIYIVTEYISNGCLLNYLRSHGKGLEPSQLLEMCYDVCEGMAFLESHQFIHRDLAARNCLVDRDLCVKVSDFGMTRYVLDDQYVSSVGTKFPVKWSAPEVFHYFKYSSKSDVWAFGILMWEVFSLGKQPYDLYDNSQVVLKVSQGHRLYRPHLASDTIYQIMYSCWHELPEKRPTFQQLLSSIEPLREKDKH

SEQ ID NO: 769616 - protein, 675 aa, Homo sapiens
MDTKSILEELLLKRSQQKKKMSPNNYKERLFVLTKTNLSYYEYDKMKRGSRKGSIEIKKIRCVEKVNLEEQTPVERQYPFQIVYKDGLLYVYASNEESRSQWLKALQKEIRGNPHLLVKYHSGFFVDGKFLCCQQSCKAAPGCTLWEAYANLHTAVNEEKHRVPTFPDRVLKIPRAVPVLKMDAPSSSTTLAQYDNESKKNYGSQPPSSSTSLAQYDSNSKKIYGSQPNFNMQYIPREDFPDWWQVRKLKSSSSSEDVASSNQKERNVNHTTSKISWEFPESSSSEEEENLDDYDWFAGNISRSQSEQLLRQKGKEGAFMVRNSSQVGMYTVSLFSKAVNDKKGTVKHYHVHTNAENKLYLAENYCFDSIPKLIHYHQHNSAGMITRLRHPVSTKANKVPDSVSLGNGIWELKREEITLLKELGSGQFGVVQLGKWKGQYDVAVKMIKEGSMSEDEFFQEAQTMMKLSHPKLVKFYGVCSKEYPIYIVTEYISNGCLLNYLRSHGKGLEPSQLLEMCYDVCEGMAFLESHQFIHRDLAARNCLVDRDLCVKVSDFGMTRYVLDDQYVSSVGTKFPVKWSAPEVFHYFKYSSKSDVWAFGILMWEVFSLGKQPYDLYDNSQVVLKVSQGHRLYRPHLASDTIYQIMYSCWHELPEKRPTFQQLLSSIEPLREKDKH

SEQ ID NO: 769617 - protein, 675 aa, Homo sapiens; identical to SEQ ID NO: 769616

SEQ ID NO: 769618 - protein, 655 aa, Homo sapiens [sequence omitted]

SEQ ID NO: 769619 - protein, 632 aa, Homo sapiens
MDTKSILEELLLKRSQQKKKMSPNNYKERLFVLTKTNLSYYEYDKMKRGSRKGSIEIKKIRCVEKVNLEEQTPVERQYPFQIVYKDGLLYVYASNEESRSQWLKALQKEIRGNPHLLVKYHSGFFVDGKFLCCQQSCKAAPGCTLWEAYANLHTAVNEEKHRVPTFPDRVLKIPRAVPVLKMDAPSSSTTLAQYDNESKKNYGSQPPSSSTSLAQYDSNSKKIYGSQPNFNMQYIPREDFPDWWQVRKLKSSSSSEDVASSNQKERNVNHTTSKISWEFPESSSSEEEENLDDYDWFAGNISRSQSEQLLRQKGKEGAFMVRNSSQVGMYTVSLFSKAVKHDHTARHPVSTKANKVPDSVSLGNGIWELKREEITLLKELGSGQFGVVQLGKWKGQYDVAVKMIKEGSMSEDEFFQEAQTMMKLSHPKLVKFYGVCSKEYPIYIVTEYISNGCLLNYLRSHGKGLEPSQLLEMCYDVCEGMAFLESHQFIHRDLAARNCLVDRDLCVKVSDFGMTRYVLDDQYVSSVGTKFPVKWSAPEVFHYFKYSSKSDVWAFGILMWEVFSLGKQPYDLYDNSQVVLKVSQGHRLYRPHLASDTIYQIMYSCWHELPEKRPTFQQLLSSIEPLREKDKH

SEQ ID NO: 769620 - protein, 160 aa, Homo sapiens
MCYDVCEGMAFLESHQFIHRDLAARNCLVDRDLCVKVSDFGMTRYVLDDQYVSSVGTKFPVKWSAPEVFHYFKYSSKSDVWAFGILMWEVFSLGKQPYDLYDNSQVVLKVSQGHRLYRPHLASDTIYQIMYSCWHELPEKRPTFQQLLSSIEPLREKDKH

SEQ ID NO: 769621 - protein, 542 aa, Homo sapiens
MDTKSILEELLLKRSQQKKKMSPNNYKERLFVLTKTNLSYYEYDKMKRGSRKGSIEIKKIRCVEKVNLEEQTPVERQYPFQIVYKDGLLYVYASNEESRSQWLKALQKEIRGNPHLLVKYHSGFFVDGKFLCCQQSCKAAPGCTLWEAYANLHTAVNEEKHRVPTFPDRVLKIPRAVPVLKMDAPSSSTTLAQYDNESKKNYGSQPPSSSTSLAQYDSNSKKIYGSQPNFNMQYIPREDFPDWWQVRKLKSSSSSEDVASSNQKERNVNHTTSKISWEFPESSSSEEEENLDDYDWFAGNISRSQSEQLLRQKGKEGAFMVRNSSQVGMYTVSLFSKAVNDKKGTVKHYHVHTNAENKLYLAENYCFDSIPKLIHYHQHNSAGMITRLRHPVSTKANKVPDSVSLGNGIWELKREEITLLKELGSGQFGVVQLGKWKGQYDVAVKMIKEGSMSEDEFFQEAQTMMKLSHPKLVKFYGVCSKEYPIYIVTEYISNGCLLNYLRSHGKGLEPSQLLEMCYDVCEGMAFLESHQFIHRDLLLYLK

SEQ ID NO: 769622 - protein, 498 aa, Homo sapiens
PGHVVRAAGASEEPALLLAHSAPGEESGRTPGAGPVRAARQADEAQRQRGGRGAARRRRRGRGLCLAAPLASDPRAQGSTVERDAAEPPAAMEPAPSAGAELQPPLFANASDAYPSAFPSAGANASGPPGARSASSLALAIAITALYSAVCAVGLLGNVLVMFGIVRYTKMKTATNIYIFNLALADALATSTLPFQSAKYLMETWPFGELLCKAVLSIDYYNMFTSIFTLTMMSVDRYIAVCHPVKALDFRTPAKAKLINICIWVLASGVGVPIMVMAVTRPRDGAVVCMLQFPSPSWYWDTVTKICVFLFAFVVPILIITVCYGLMLLRLRSVRLLSGSKEKDRSLRRITRMVLVVVGAFVVCWAPIHIFVIVWTLVDIDRRDPLVVAALHLCIALGYANSSLNPVLYAFLDENFKRCFRQLCRKPCGRPDPSSFSRAREATARERVTACTPSDGPGGGRCRLTRPSGPQTPLPSCTRRPHESQWEARAMMWSGASR

SEQ ID NO: 769623 - protein, 79 aa, Homo sapiens
TPPSIGPSMVELKQLISTLTPPLGLQGCGYPCPGAATFPSRQHAWSGHRPSMELALVSVFGVVSQSPHLLIHVLPPARG

SEQ ID NO: 769624 - protein, 236 aa, Homo sapiens
MFREPYLHRSPWGAPDWQPCSWPLLLIVIDLSDSAGIGFRHLPHWNTRCPLASHTDDSFTGSSAYIPCRTWWALFSTKPWCVRVWHCSRCLCQHLLSGGSGLQRGLFHLLVQKSKKSSTFKFYRRHKMPAPAQRKLLPRRHLSEKSHHISIPSPDISHKGLRSKRTQPSDPETWESLPRLDSQRHGGPEFSFDLLPEARAIRVTISSGPEVSVRLCHQWALECEELSSPYDVQVWC

SEQ ID NO: 769625 - protein, 114 aa, Homo sapiens
AKVCSFTPEASETTNPPGETNNSRRITLRTVTLTAKVCNFTPEPPRPRTHRKEETPNTSEHQKEQTPDTPPLRTVTLTARVRGLFLRSVRPRTHQFWTHHLALLLFTGTKVSNS

SEQ ID NO: 769626 - protein, 88 aa, Homo sapiens
SGRVSSIRFENMNVICGTAGRRNRWLIAVTDFQTRSRLLRSGLSPRGLAHQIVRHDDLLLGDYRLHLRRSLVRRRMLEALGAEPNEEA

SEQ ID NO: 769627 - protein, 35 aa, Homo sapiens
MVRWTRACKRLQGPGRDSSTIKARAETTCEFLFRP

SEQ ID NO: 769628 - protein, 306 aa, Homo sapiens
MSEEQFGGDGAAAAATAAVGGSAGEQEGAMVAATQGAAAAAGSGAGTGGGTASGGTEGGSAESEGAKIDASKNEEDEGHSNSSPRHSEAATAQREEWKMFIGGLSWDTTKKDLKDYFSKFGEVVDCTLKLDPITGRSRGFGFVLFKESESVDKVMDQKEHKLNGKVIDPKRAKAMKTKEPVKKIFVGGLSPDTPEEKIREYFGGFGEVESIELPMDNKTNKRRGFCFITFKEEEPVKKIMEKKYHNVGLSKCEIKVAMSKEQYQQQQQWGSRGGFAGRARGRGGDQQSGYGKVSRRGGHQNSYKPY

SEQ ID NO: 769629 - protein, 294 aa, Homo sapiens
IRGSGYHGGSAGEQEGAMVAATQGAAAAAGSGAGTGGGTASGGTEGGSAESEGAKIDASKNEEDEGHSNSSPRHSEAATAQREEWKMFIGGLSWDTTKKDLKDYFSKFGEVVDCTLKLDPITGRSRGFGFVLFKESESVDKVMDQKEHKLNGKVIDPKRAKAMKTKEPVKKIFVGGLSPDTPEEKIREYFGGFGEVESIELPMDNKTNKRRGFCFITFKEEEPVKKIMEKKYHNVGLSKCEIKVAMSKEQYQQQQQWGSRGGFAGRARGRGGDQQSGYGKVSRRGGHQNSYKPY

SEQ ID NO: 769630 - protein, 186 aa, Homo sapiens
MFIGGLSWDTTKKDLKDYFSKFGEVVDCTLKLDPITGRSRGFGFVLFKESESVDKVMDQKEHKLNGKVIDPKRAKAMKTKEPVKKIFVGGLSPDTPEEKIREYFGGFGEVESIELPMDNKTNKRRGFCFITFKEEEPVKKIMEKKYHNVGLSKCEIKVAMSKEQYQQQQQWGSRGGFAGRARGRGG

SEQ ID NO: 769631 - protein, 238 aa, Homo sapiens
ARHLMLYTSRSAESEGAKIDASKNEEDEGKMFIGGLSWDTTKKDLKDYFSKFGEVVDCTLKLDPITGRSRGFGFVLFKESESVDKVMDQKEHKLNGKVIDPKRAKAMKTKEPVKKIFVGGLSPDTPEEKIREYFGGFGEVESIELPMDNKTNKRRGFCFITFKEEEPVKKIMEKKYHNVGLSKCEIKVAMSKEQYQQQQQWGSRGGFAGRARGRGGDQQSGYGKVSRRGGHQNSYKPY

SEQ ID NO: 769632 - protein, 287 aa, Homo sapiens
ARHLMLYTSRSAESEGAKIDASKNEEDEGKMFIGGLSWDTTKKDLKDYFSKFGEVVDCTLKLDPITGRSRGFGFVLFKESESVDKVMDQKEHKLNGKVIDPKRAKAMKTKEPVKKIFVGGLSPDTPEEKIREYFGGFGEVESIELPMDNKTNKRRGFCFITFKEEEPVKKIMEKKYHNVGLSKCEIKVAMSKEQYQQQQQWGSRGGFAGRARGRGGGPSQNWNQGYSNYWNQGYGNYGYNSQGYGGYGGYDYTGYNNYYGYGDYSNQQSGYGKVSRRGGHQNSYKPY

SEQ ID NO: 769633 - protein, 306 aa, Homo sapiens
ARHLMLYTSRSAESEGAKIDASKNEEDEGHSNSSPRHSEAATAQREEWKMFIGGLSWDTTKKDLKDYFSKFGEVVDCTLKLDPITGRSRGFGFVLFKESESVDKVMDQKEHKLNGKVIDPKRAKAMKTKEPVKKIFVGGLSPDTPEEKIREYFGGFGEVESIELPMDNKTNKRRGFCFITFKEEEPVKKIMEKKYHNVGLSKCEIKVAMSKEQYQQQQQWGSRGGFAGRARGRGGGPSQNWNQGYSNYWNQGYGNYGYNSQGYGGYGGYDYTGYNNYYGYGDYSNQQSGYGKVSRRGGHQNSYKPY

SEQ ID NO: 769634 - protein, 201 aa, Homo sapiens
MDQKEHKLNGKVIDPKRAKAMKTKEPVKKIFVGGLSPDTPEEKIREYFGGFGEVESIELPMDNKTNKRRGFCFITFKEEEPVKKIMEKKYHNVGLSKCEIKVAMSKEQYQQQQQWGSRGGFAGRARGRGGGPSQNWNQGYSNYWNQGYGNYGYNSQGYGGYGGYDYTGYNNYYGYGDYSNQQSGYGKVSRRGGHQNSYKPY

SEQ ID NO: 769635 - protein, 306 aa, Homo sapiens; identical to SEQ ID NO: 769633

SEQ ID NO: 769636 - protein, 306 aa, Homo sapiens; identical to SEQ ID NO: 769633

SEQ ID NO: 769637 - protein, 306 aa, Homo sapiens; identical to SEQ ID NO: 769633

SEQ ID NO: 769638 - protein, 294 aa, Homo sapiens
ARHLMLYTSRSAESEGAKIDASKNEEDEGHSNSSPRHSEAATAQREEWKMFIGGLSWDTTKKDLKDYFSKFGEVVDCTLKLDPITGRSRGFGFVLFKESESVDKVMDQKEHKLNGKVIDPKRAKAMKTKEPVKKIFVGGLSPDTPEEKIREYFGGFGEVESIELPMDNKTNKRRGFCFITFKEEEPVKKIMEKKYHNVGLSKCEIKVAMSKEQYQQQQQWGLTIGIKAMATMDITAKVTVVMEDMTTLVTTTTMDMVIIATSRVVMGRYPGEVVIKIATNHTKLFHLQLIPNRW

SEQ ID NO: 769639 - protein, 257 aa, Homo sapiens
ARHLMLYTSRSAESEGAKIDASKNEEDEGHSNSSPRHSEAATAQREEWKMFIGGLSWDTTKKDLKDYFSKFGEVVDCTLKLDPITGRSRGFGFVLFKESESVDKVMDQKEHKLNGKVIDPKRAKAMKTKEPVKKIFVGGLSPDTPEEKIREYFGGFGEVESIELPMDNKTNKRRGFCFITFKEEEPVKKIMEKKYHNVGLSKCEIKVAMSKEQYQQQQQWGSRGGFAGRARGRGGDQQSGYGKVSRRGGHQNSYKPY

SEQ ID NO: 769640 - protein, 306 aa, Homo sapiens; identical to SEQ ID NO: 769633

SEQ ID NO: 769641 - protein, 210 aa, Homo sapiens
ARHLMLYTSRSAESEGAKIDASKNEEDEGHSNSSPRHSEAATAQREEWKMFIGGLSWDTTKKDLKDYFSKFGEVVDCTLKLDPITGRSRGFGFVLFKESESVDKVMDQKEHKLNGKVIDPKRAKAMKTKEPVKKIFVGGLSPDTPEEKIREYFGGFGEVESIELPMDNKTNKRRGFCFITFKEEEPVKKIMEKKYHNVGLSKFNNVIFLF

SEQ ID NO: 769642 - protein, 306 aa, Homo sapiens; identical to SEQ ID NO: 769633

SEQ ID NO: 769643 - protein, 306 aa, Homo sapiens; identical to SEQ ID NO: 769633

SEQ ID NO: 769644 - protein, 306 aa, Homo sapiens; identical to SEQ ID NO: 769633

SEQ ID NO: 769645 - protein, 257 aa, Homo sapiens; identical to SEQ ID NO: 769639

SEQ ID NO: 769646 - protein, 306 aa, Homo sapiens; identical to SEQ ID NO: 769633

SEQ ID NO: 769647 - protein, 257 aa, Homo sapiens; identical to SEQ ID NO: 769639

SEQ ID NO: 769648 - protein, 207 aa, Homo sapiens
ARHLMLYTSRSAESEGAKIDASKNEEDEGHSNSSPRHSEAATAQREEWKMFIGGLSWDTTKKDLKDYFSKFGEVVDCTLKLDPITGRSRGFGFVLFKESESVDKVMDQKEHKLNGKVIDPKRAKAMKTKEPVKKIFVGGLSPDTPEEKIREYFGGFGEVESIELPMDNKTNKRRGFCFITFKEEEPVKKIMGIYRNPWKPLRNGKSG

SEQ ID NO: 769649 - protein, 87 aa, Homo sapiens
WSAAAPLKRGGGESGRRWCLFFFSAAGESGSVRRARVGGEGGRPGRGAGAFAATRAPSLSCVLREVERARGSAGITLLLVSVRGRRV

SEQ ID NO: 769650 - protein, 355 aa, Homo sapiens
MSEEQFGGDGAAAAATAAVGGSAGEQEGAMVAATQGAAAAAGSGAGTGGGTASGGTEGGSAESEGAKIDASKNEEDEGHSNSSPRHSEAATAQREEWKMFIGGLSWDTTKKDLKDYFSKFGEVVDCTLKLDPITGRSRGFGFVLFKESESVDKVMDQKEHKLNGKVIDPKRAKAMKTKEPVKKIFVGGLSPDTPEEKIREYFGGFGEVESIELPMDNKTNKRRGFCFITFKEEEPVKKIMEKKYHNVGLSKCEIKVAMSKEQYQQQQQWGSRGGFAGRARGRGGGPSQNWNQGYSNYWNQGYGNYGYNSQGYGGYGGYDYTGYNNYYGYGDYSNQQSGYGKVSRRGGHQNSYKPY

SEQ ID NO: 769651 - protein, 99 aa, Homo sapiens
TLVRGWVRDTETNKRRGFCFITFKEEEPVKKIMEKKYHNVGLSKCEIKVAMSKEQYQQQQQWGSRGGFAGRARGRGGDQQSGYGKVSRRGGHQNSYKPY

SEQ ID NO: 769652 - protein, 257 aa, Homo sapiens; identical to SEQ ID NO: 769639

SEQ ID NO: 769653 - protein, 306 aa, Homo sapiens; identical to SEQ ID NO: 769633

SEQ ID NO: 769654 - protein, 257 aa, Homo sapiens; identical to SEQ ID NO: 769639

SEQ ID NO: 769655 - protein, 306 aa, Homo sapiens; identical to SEQ ID NO: 769633

SEQ ID NO: 769656 - protein, 306 aa, Homo sapiens; identical to SEQ ID NO: 769633

SEQ ID NO: 769657 - protein, 308 aa, Homo sapiens
ARHLMLYTSRSAESEGAKIDASKNEEDEGHSNSSPRHSEAATAQREEWKMFIGGLSWDTTKKDLKDYFSKFGEVVDCTLKLDPITGRSRGFGFVLFKESESVDKVMDQKEHKLNGKVIDPKRAKAMKTKEPVKKIFVGGLSPDTPEEKIREYFGGFGEVESIELPMDNKTNKRRGFCFITFKEEEPVKKIMEKKYHNVGLSKCEIKVAMSKEQYQQQQQWGSRGGFAGRARGRGGVTIGIKAMATMDITAKVTVVMEDMTTLVTTTTMDMVIIATSRVVMGRYPGEVVIKIATNHTKLFHLQLIPNRW

SEQ ID NO: 769658 - protein, 257 aa, Homo sapiens; identical to SEQ ID NO: 769639

SEQ ID NO: 769659 - protein, 257 aa, Homo sapiens; identical to SEQ ID NO: 769639

SEQ ID NO: 769660 - protein, 306 aa, Homo sapiens; identical to SEQ ID NO: 769633

SEQ ID NO: 769661 - protein, 306 aa, Homo sapiens; identical to SEQ ID NO: 769633

SEQ ID NO: 769662 - protein, 257 aa, Homo sapiens; identical to SEQ ID NO: 769639

SEQ ID NO: 769663 - protein, 306 aa, Homo sapiens; identical to SEQ ID NO: 769633

SEQ ID NO: 769664 - protein, 257 aa, Homo sapiens; identical to SEQ ID NO: 769639

SEQ ID NO: 769665 - protein, 124 aa, Homo sapiens
ARHLMLYTSRSAESEGAKIDASKNEEDEGHSNSSPRHSEAATAQREEWKMFIGGLSWDTTKKDPKEQYQQQQQWGSRGGFAGRARGRGGDQQSGYGKVSRRGGHRGEAVFSNLKIHLKVAPATC

SEQ ID NO: 769666 - protein, 160 aa, Homo sapiens
ENTTHNHPPEADSAGTAFNLGPTIKQTETKWEYNNVGTDLSPEPKSFNYPLFSSPGDQFEIQLTQQPRSLIPNNNVRRLISHVIRTLKMDCSETHVQLTCAKLISRTGLLMKLLSEQQEVKVSKAEWDTDQWKTENYINDSTEAQNEQKEQKSSELTKEV

SEQ ID NO: 769667 - protein, 562 aa, Homo sapiens
MDAMKRGLCCVLLLCGAVFVSPSQEIHARFRRGARSYQVICRDEKTQMIYQQHQSWLRPVLRSNRVEYCWCNSGRAQCHSVPVKSCSEPRCFNGGTCQQALYFSDFVCQCPEGFAGKCCEIDTRATCYEDQGISYRGTWSTAESGAECTNWNSSALAQKPYSGRRPDAIRLGLGNHNYCRNPDRDSKPWCYVFKAGKYSSEFCSTPACSEGNSDCYFGNGSAYRGTHSLTESGASCLPWNSMILIGKVYTAQNPSAQALGLGKHNYCRNPDGDAKPWCHVLKNRRLTWEYCDVPSCSTCGLRQYSQPQFRIKGGLFADIASHPWQAAIFAKHRRSPGERFLCGGILISSCWILSAAHCFQERFPPHHLTVILGRTYRVVPGEEEQKFEVEKYIVHKEFDDDTYDNDIALLQLKSDSSRCAQESSVVRTVCLPPADLQLPDWTECELSGYGKHEALSPFYSERLKEAHVRLYPSSRCTSQHLLNRTVTDNMLCAGDTRSGGPQANLHDACQGDSGGPLVCLNDGRMTLVGIISWGLGCGQKDVPGVYTKVTNYLDWIRDNMRP

SEQ ID NO: 769668 - protein, 516 aa, Homo sapiens
MDAMKRGLCCVLLLCGAVFVSPSQEIHARFRRGARSYQGCSEPRCFNGGTCQQALYFSDFVCQCPEGFAGKCCEIDTRATCYEDQGISYRGTWSTAESGAECTNWNSSALAQKPYSGRRPDAIRLGLGNHNYCRNPDRDSKPWCYVFKAGKYSSEFCSTPACSEGNSDCYFGNGSAYRGTHSLTESGASCLPWNSMILIGKVYTAQNPSAQALGLGKHNYCRNPDGDAKPWCHVLKNRRLTWEYCDVPSCSTCGLRQYSQPQFRIKGGLFADIASHPWQAAIFAKHRRSPGERFLCGGILISSCWILSAAHCFQERFPPHHLTVILGRTYRVVPGEEEQKFEVEKYIVHKEFDDDTYDNDIALLQLKSDSSRCAQESSVVRTVCLPPADLQLPDWTECELSGYGKHEALSPFYSERLKEAHVRLYPSSRCTSQHLLNRTVTDNMLCAGDTRSGGPQANLHDACQGDSGGPLVCLNDGRMTLVGIISWGLGCGQKDVPGVYTKVTNYLDWIRDNMRP

SEQ ID NO: 769669 - protein, 293 aa, Homo sapiens
MDAMKRGLCCVLLLCGAVFVSPSQEIHARFRRGARSYQVICRDEKTQMIYQQHQSWLRPVLRSNRVEYCWCNSGRAQCHSVPVKSCSEPRCFNGGTCQQALYFSDFVCQCPEGFAGKCCEIDTRATCYEDQGISYRGTWSTAESGAECTNWNSSALAQKPYSGRRPDAIRLGLGNHNYCRNPDRDSKPWCYVFKAGKYSSEFCSTPACSEGNSDCYFGNGSAYRGTHSLTESGASCLPWNSMILIGKVYTAQNPSAQALGLGKHNYCRCRTGRSVSSPATASMRPCLLSIRSG

SEQ ID NO: 769670 - protein, 562 aa, Homo sapiens; identical to SEQ ID NO: 769667

SEQ ID NO: 769671 - protein, 552 aa, Homo sapiens
SGNDGPVMFPVALRRENLCEEREGASREFKGRCEAIMDAMKRGLCCVLLLCGAVFVSPSQEIHARFRRGARSYQGCSEPRCFNGGTCQQALYFSDFVCQCPEGFAGKCCEIDTRATCYEDQGISYRGTWSTAESGAECTNWNSSALAQKPYSGRRPDAIRLGLGNHNYCRNPDRDSKPWCYVFKAGKYSSEFCSTPACSEGNSDCYFGNGSAYRGTHSLTESGASCLPWNSMILIGKVYTAQNPSAQALGLGKHNYCRNPDGDAKPWCHVLKNRRLTWEYCDVPSCSTCGLRQYSQPQFRIKGGLFADIASHPWQAAIFAKHRRSPGERFLCGGILISSCWILSAAHCFQERFPPHHLTVILGRTYRVVPGEEEQKFEVEKYIVHKEFDDDTYDNDIALLQLKSDSSRCAQESSVVRTVCLPPADLQLPDWTECELSGYGKHEALSPFYSERLKEAHVRLYPSSRCTSQHLLNRTVTDNMLCAGDTRSGGPQANLHDACQGDSGGPLVCLNDGRMTLVGIISWGLGCGQKDVPGVYTKVTNYLDWIRDNMRP

SEQ ID NO: 769672 - protein, 436 aa, Homo sapiens
MDAMKRGLCCVLLLCGAVFVSPSQEIHARFRRGARSYQVICRDEKTQMIYQQHQSWLRPVLRSNRVEYCWCNSGRAQCHSVPVKRNSDCYFGNGSAYRGTHSLTESGASCLPWNSMILIGKVYTAQNPSAQALGLGKHNYCRNPDGDAKPWCHVLKNRRLTWEYCDVPSCSTCGLRQYSQPQFRIKGGLFADIASHPWQAAIFAKHRRSPGERFLCGGILISSCWILSAAHCFQERFPPHHLTVILGRTYRVVPGEEEQKFEVEKYIVHKEFDDDTYDNDIALLQLKSDSSRCAQESSVVRTVCLPPADLQLPDWTECELSGYGKHEALSPFYSERLKEAHVRLYPSSRCTSQHLLNRTVTDNMLCAGDTRSGGPQANLHDACQGDSGGPLVCLNDGRMTLVGIISWGLGCGQKDVPGVYTKVTNYLDWIRDNMRP

SEQ ID NO: 769673 - protein, 455 aa, Homo sapiens
YSDEAGLSFLIVICRDEKTQMIYQQHHYRGTWSTAESGAECTNWNSSALAQKPYSGRRPDAIRLGLGNHNYCRNPDRDSKPWCYVFKAGKYSSEFCSTPACSEGNSDCYFGNGSAYRGTHSLTESGASCLPWNSMILIGKVYTAQNPSAQALGLGKHNYCRNPDGDAKPWCHVLKNRRLTWEYCDVPSCSTCGLRQYSQPQFRIKGGLFADIASHPWQAAIFAKHRRSPGERFLCGGILISSCWILSAAHCFQERFPPHHLTVILGRTYRVVPGEEEQKFEVEKYIVHKEFDDDTYDNDIALLQLKSDSSRCAQESSVVRTVCLPPADLQLPDWTECELSGYGKHEALSPFYSERLKEAHVRLYPSSRCTSQHLLNRTVTDNMLCAGDTRSGGPQANLHDACQGDSGGPLVCLNDGRMTLVGIISWGLGCGQKDVPGVYTKVTNYLDWIRDNMRP

SEQ ID NO: 769674 - protein, 116 aa, Homo sapiens
MDAMKRGLCCVLLLCGAVFVSPSQEIHARFRRGARSYQVICRDEKTQMIYQQHQSWLRPVLRSNRVEYCWCNSGRAQCHSVPVKSCSEPRCFNGGTCQQAPLVPRAEEPQADVGVL

SEQ ID NO: 769675 - protein, 280 aa, Homo sapiens
MDAMKRGLCCVLLLCGAVFVSPSQEIHARFRRGARSYQVICRDEKTQMIYQQHQSWLRPVLRSNRVEYCWCNSGRAQCHSVPVKSCSEPRCFNGGTCQQALYFSDFVCQCPEGFAGKCCEIDTRATCYEDQGISYRGTWSTAESGAECTNWNSSALAQKPYSGRRPDAIRLGLGNHNYCRNPDRDSKPWCYVFKAGKYSSEFCSTPACSEGNSDCYFGNGSAYRGTPTTRLWARGVALRGTVGVPAFVQGVPKHLLGQRRLSANGDARHSPELGVRLRAH

SEQ ID NO: 769676 - protein, 66 aa, Homo sapiens
SGNDGPVMFPVALRRENLCEEREGASREFKGRCEAIMDAMKRGLCCVLLLCGAVFVSPSQETGPQK

SEQ ID NO: 769677 - protein, 348 aa, Homo sapiens
MDIGWVRAGGIGTEAQMIYQQHQSWLRPVLRSNRVEYCWCNSGRAQCHSVPVKSCSEPRCFNGGTCQQALYFSDFVCQCPEGFAGKCCEIDTRATCYEDQGISYRGTWSTAESGAECTNWNSSALAQKPYSGRRPDAIRLGLGNHNYCRNPDRDSKPWCYVFKAGKYSSEFCSTPACSEGNSDCYFGNGSAYRGTHSLTESGASCLPWNSMILIGKVYTAQNPSAQALGLGKHNYCRNPDGDAKPWCHVLKNRRLTWEYCDVPSCSTWGLRQDSKLSSPSRRVFADRFHLGVASCRKGVPGRSGGVPQAGFSWPRSGVSHLRFGHRAGGEFPFPMWDRGFSEVTPAGV

SEQ ID NO: 769678 - protein, 562 aa, Homo sapiens; identical to SEQ ID NO: 769667

SEQ ID NO: 769679 - protein, 562 aa, Homo sapiens; identical to SEQ ID NO: 769667

SEQ ID NO: 769680 - protein, 392 aa, Homo sapiens
MDAMKRGLCCVLLLCGAVFVSPSQEIHARFRRGARSYQVICRDEKTQMIYQQHQSWLRPVLRSNRVEYCWCNNGKTPSLQKLKNKKIKRKPETLLSFRNPDGDAKPWCHVLKNRRLTWEYCDVPSCSTCGLRQYSQPQFRIKGGLFADIASHPWQAAIFAKHRRSPGERFLCGGILISSCWILSAAHCFQERFPPHHLTVILGRTYRVVPGEEEQKFEVEKYIVHKEFDDDTYDNDIALLQLKSDSSRCAQESSVVRTVCLPPADLQLPDWTECELSGYGKHEALSPFYSERLKEAHVRLYPSSRCTSQHLLNRTVTDNMLCAGDTRSGGPQANLHDACQGDSGGPLVCLNDGRMTLVGIISWGLGCGQKDVPGVYTKVTNYLDWIRDNMRP

SEQ ID NO: 769681 - protein, 141 aa, Homo sapiens
MDAMKRGLCCVLLLCGAVFVSPSQEIHARFRRGARSYQVICRDEKTQMIYQQHQSWLRPVLRSNRVEYCWCNSGRAQCHSVPVKSCSEPRCFNGGTCQQAPGVSERWPHDFGGHHQLGPGLWTEGCPGCVHQGYQLPRLDS

SEQ ID NO: 769682 - protein, 1540 aa, Homo sapiens
MGNSYAGQLKSARFEEALHNSIEASLRCSSVVPRPIFSQLYLDPDQHPFSSADVKPKVEDLDKDLVNRYTQNGSLDFSNNLTVNEMEDDEDDEEMSDSNSPPIPYSQKPAPEGSCTTDGFCQAGKDLRLVSLCMEQIDIPAGFLLVGAKSPNLPEHILVCAVDKRFLPDDHGKNALLGFSGNCIGCGERGFRYFTEFSNHINLKLTTQPKKQKHLKYYLVRSSQGVLSKGPLICWKECRSRQSSASCHSIKPSSSVSSTVTPENGTTNGYKSGFTQTDAANGNSSHGGKGSASSSTPAHTGNYSLSPRPSYASGDQATMFISGPPKKRHRGWYPGSPLPQPGLVVPVPTVRPLSRTEPLLSAPVPQTPLTGILQPRPIPAGETVIVPENLLSNSGVRPVILIGYGTLPYFYGNVGDIVVSPLLVNCYKIPQLENKDLEKLGLTGSQFLSVENMILLTIQYLVRLGPDQVPLREEFEQIMLKAMQEFTLRERALQIGAQCVPVSPGQLPWLARLIASVSQDLVHVVVTQNSLAEGISETLRTLSEMRHYQRLPDYVVVICASKIRGNEFCVVVLGQHQSRALAESMLTTSEFLKEISYELITGKVSFLASHFKTTSLGDDLDKLLEKMQQRRGDSVVTPFDGDLNECVSPQEAAAMIPTQNLDLDNETFHIYQPQLTVARKLLSQVCAIADSGSQSLDLGHFSKVDFIIIVPRSEVLVQQTLQRIRQSVSFQALCHIANPVMGSADRVINCREVLEAFNLLVLQVSSFPYTLQTQQSRISSSNEVHWIQLDTGEDVGCEEKLYFGLSEYSKSLQWGITSPLLRCDETFEKMVNTLLERYPRLHSMVVRCYLLIQQYSEALMALTTMASLRDHSTPETLSIMDDLISSPGKNKSGRGHMLIIRVPSVQLAMLAKERLQEVRDKLGLQYRFEIILGNPATELSVATHFVARLKSWRGNEPEEWIPRTYQDLDGLPCIVILTGKDPLGETFPRSLKYCDLRLIDSSYLTRTALEQEVGLACCYVSKEVIRGPTVALDLSGKEQERAAVSENDSDELLIDLERPQSNSSAVTGTSGSIMENGVSSSSTADKSQKQSLTPSFQSPATSLGLDEGVSASSAGAGAGETLKQECDSLGPQMASSTTSKPSSSSSGPRTLPWPGQPIRGCRGPQAALPPVVILSKAAYSLLGSQKSGKLPSSSSLLPHADVAWVSSLRPLLNKDMSSEEQSLYYRQWTLARQHHADYSNQLDPASGTRNFHPRRLLLTGPPQVGKTGSYLQFLRILFRMLIRLLEVDVYDEEEINTDHNESSEVSQSEGEPWPDIESFSKMPFDVSVHDPKYSLMSLVYTEKLAGVKQEVIKESKVEEPRKRETVSIMLTKYAAYNTFHHCEQCRQYMDFTSASQMSDSTLHAFTFSSSMLGEEVQLYFIIPKSKESHFVFSKQGKHLESMRLPLVSDKNLNAVKSPIFTPSSGRHEHGLLNLFHAMEGISHLHLLVVKEYEMPLYRKYWPNHIMLVLPGMFNNAGVGKGPPWDGEKGFEDKLSSIPLA

SEQ ID NO: 769683 - protein, 751 aa, Homo sapiens
MGNSYAGQLKSARFEEALHNSIEASLRCSSVVPRPIFSQLYLDPDQHPFSSADVKPKVEDLDKDLVNRYTQNGSLDFSNNLTVNEMEDDEDDEEMSDSNSPPIPYSQKPAPEGSCTTDGFCQAGKDLRLVSLCMEQIDIPAGFLLVGAKSPNLPEHILVCAVDKRFLPDDHGKNALLGFSGNCIGCGERGFRYFTEFSNHINLKLTTQPKKQKHLKYYLVRSSQGVLSKGPLICWKECRSRQSSASCHSIKPSSSVSSTVTPENGTTNGYKSGFTQTDAANGNSSHGGKGSASSSTPAHTGNYSLSPRPSYASGDQATMFISGPPKKRHRGWYPGSPLPQPGLVVPVPTVRPLSRTEPLLSAPVPQTPLTGILQPRPIPAGETVIVPENLLSNSGVRPVILIGYGTLPYFYGNVGDIVVSPLLVNCYKIPQLENKDLEKLGLTGSQFLSVENMILLTIQYLVRLGPDQVPLREEFEQIMLKAMQEFTLRERALQIGAQCVPVSPGQLPWLARLIASVSQDLVHVVVTQNSLAEGISETLRTLSEMRHYQRLPDYVVVICASKIRGNEFCVVVLGQHQSRALAESMLTTSEFLKEISYELITGKVSFLASHFKTTSLGDDLDKLLEKMQQRRGDSVVTPFDGDLNECVSPQEAAAMIPTQNLDLDNETFHIYQPQLTVARKLLSQVCAIADSGSQSLDLGHFSKVDFIIIVPRSEVLVQQTLQRIRQSGKSELSKRSPPRSSFRSPLPLSFA

SEQ ID NO: 769684 - protein, 617 aa, Homo sapiens
MGNSYAGQLKSARFEEALHNSIEASLRCSSVVPRPIFSQLYLDPDQHPFSSADVKPKVEDLDKDLVNRYTQNGSLDFSNNLTVNEMEDDEDDEEMSDSNSPPIPYSQKPAPEGSCTTDGFCQAGKDLRLVSLCMEQIDIPAGFLLVGAKSPNLPEHILVCAVDKRFLPDDHGKNALLGFSGNCIGCGERGFRYFTEFSNHINLKLTTQPKKQKHLKYYLVRSSQGVLSKGPLICWKECRSRQSSASCHSIKPSSSVSSTVTPENGTTNGYKSGFTQTDAANGNSSHGGKGSASSSTPAHTGNYSLSPRPSYASGDQATMFISGPPKKRHRGWYPGSPLPQPGLVVPVPTVRPLSRTEPLLSAPVPQTPLTGILQPRPIPAGETVIVPENLLSNSGVRPVILIGYGTLPYFYGNVGDIVVSPLLVNCYKIPQLENKDLEKLGLTGSQFLSVENMILLTIQYLVRLGPDQVPLREEFEQIMLKAMQEFTLRERALQIGAQCVPVSPGQLPWLARLIASVSQDLVHVVVTQNSLAEGISETLRTLSEMRHYQRLPDYVVVICASKIRGNEFCVVVLGQHQSRALAESMLTTSEFLKEISYELYHRKGQFPGITFQNHIIR

SEQ ID NO: 769685 - protein, 112 aa, Homo sapiens
MHRYVHCSTTRNSKDLEPTEMSINDRVDKENVAHIHHGILCSHKKDEFMSFAGTWMKLETIILSKLSQTIVGTENQTPHVLTYKWELNKNTWTQGRELTHPGLLGGGGLRKG

SEQ ID NO: 769686 - protein, 112 aa, Homo sapiens; identical to SEQ ID NO: 769685

SEQ ID NO: 769687 - protein, 131 aa, Homo sapiens
MTPLLTLILVVLMGLPLAQALDCHVCAYNGDNCFNPMRCPAMVAYCMTTRTSAAEAIWCHQCTGFGGCSHGSRCLRDSTHCVTTATRVLSNTEDLPLVTKMCHIGCPDIPSLGLGPYVSIACCQTSLCNHD

SEQ ID NO: 769688 - protein, 116 aa, Homo sapiens
MTPLLTLILVVLMGLPLAQALDCHVCAYNGDNCFNPMRCPAMVAYCMTTRTYYTPTRMKVSKSCVPRCFETVYDGYSKHASTTSCCQYDLCNGTGLATPDTLALAPILLATLWGLL

SEQ ID NO: 769689 - protein, 105 aa, Homo sapiens
MCASFTYFAIFAFSHSSMSAVGESPEAALGMVVTAVTTRTYYTPTRMKVSKSCVPRCFETVYDGYSKHASTTSCCQYDLCNGTGLATPDTLALAPILLATLWGLL

SEQ ID NO: 769690 - protein, 90 aa, Homo sapiens
TGLLLAAVLSLQLAAAEAIWCHQCTGFGGCSHGSRCLRDSTHCVTTATRPRTLSPHSPHSLAPGLTAAPPSRLASPPLPASAATVQHRLS

SEQ ID NO: 769691 - protein, 116 aa, Homo sapiens; identical to SEQ ID NO: 769688

SEQ ID NO: 769692 - protein, 116 aa, Homo sapiens; identical to SEQ ID NO: 769688

SEQ ID NO: 769693 - protein, 93 aa, Homo sapiens
TGLLLAAVLSLQLAAAEAIWCHQCTGFGGCSHGSRCLRDSTHCVTTATRVLSNTEDLPLVTKMCHIGCPDIPSLGLGPYVSIACCQTSLCNHD

SEQ ID NO: 769694 - protein, 155 aa, Homo sapiens
MRHGCCGTHRHAYDETQAGTYRRAAAGDSQARRYLTVVKVTAQALDCHVCAYNGDNCFNPMRCPAMVAYCMTTRTSAAEAIWCHQCTGFGGCSHGSRCLRDSTHCVTTATRVLSNTEDLPLVTKMCHIGCPDIPSLGLGPYVSIACCQTSLCNHD

SEQ ID NO: 769695 - protein, 69 aa, Homo sapiens
VRSVFLLLTREDTGSHLEKTDVEQGEVTPESSHFTLAWVMTCVTLALSRHQHLPHTWEESNELPPGLTS

SEQ ID NO: 769696 - protein, 79 aa, Homo sapiens
DEIQFLRTDDEVVLQCTATIHKEQQKLCLAAEGFGNRLCFLESTSNSKNVPPDLSICTFVLEQSLSVRALQEMLANTVE

SEQ ID NO: 769697 - protein, 48 aa, Homo sapiens
MESSGHAAAMEPEACGAGRARGVLALLLRGAGEGPVSPGWAGARMTEH

SEQ ID NO: 769698 - protein, 46 aa, Homo sapiens
MSGSGELGAAGLESDEYRQQQEATVTTNLHTLTTVISYCPKISSQC

SEQ ID NO: 769699 - protein, 159 aa, Homo sapiens
MYPQNNLKLDLLEANSYKLSSMLAELEQRPQPSHPCSNSIFRWREKEHTHSYVKISRPFLMKRLENIVSKASSGGQSNPGSSTPAPGAAQLSSRLCKALYSFQARQDDELNLEKGDIVIIHEKKEGGWWFGSLNGKKGHFPAAYVEELPSNAGNTATKA

SEQ ID NO: 769700 - protein, 111 aa, Homo sapiens
LARSLPLGEAKQWFVVSIIIVVLLSHCYFLPCGHGQACAPTSFYCCLLGKHQAHGSTPLARRQCTSMFTFSTKYTDRAGCSWLMSVIPALWEAEVGGSPEVRSSIPAWPTW

SEQ ID NO: 769701 - protein, 472 aa, Homo sapiens
MNKMKNFKRRFSLSVPRTETIEESLAEFTEQFNQLHNRRNENLQLGPLGRDPPQECSTFSPTDSGEEPGQLSPGVQFQRRQNQRRFSMEDVSKRLSLPMDIRLPQEFLQKLQMESPDLPKPLSRMSRRASLSDIGFGKLETYVKLDKLGEGTYATVFKGRSKLTENLVALKEIRLEHEEGAPCTAIREVSLLKNLKHANIVTLHDLIHTDRSLTLVFEYLDSDLKQYLDHCGNLMSMHNVKIFMFQLLRGLAYCHHRKILHRDLKPQNLLINERGELKLADFGLARAKSVPTKTYSNEVVTLWYRPPDVLLGSTEYSTPIDMWGVGCIHYEMATGRPLFPGSTVKEELHLIFRLLGTPTEETWPGVTAFSEFRTYSFPCYLPQPLINHAPRLDTDGIHLLSSLLLYESKSRMSAEAALSHSYFRSLGERVHQLEDTASIFSLKEIQLQKDPGYRGLAFQQPGRGKNRRQSIF

SEQ ID NO: 769702 - protein, 113 aa, Homo sapiens
MSPERQGGELTLSLLDLQLGPLGRDPPQECSTFSPTDSGEEPGQLSPGVQFQRRQNQRRFSMEDVSKRLSLPMDIRLPQEFLQKLQMESPDLPKPLSRMSRRASLVSPKRVRG

SEQ ID NO: 769703 - protein, 550 aa, Homo sapiens
SGFLPPPPPPPPPSSSPPSSTPSLPLPFYLLLGQLRLQLLWGTAHLSGAGEAAPCPGGSGRTAAPRTRADPAAQSLMIMNKMKNFKRRFSLSVPRTETIEESLAEFTEQFNQLHNRRNENLQLGPLGRDPPQECSTFSPTDSGEEPGQLSPGVQFQRRQNQRRFSMEDVSKRLSLPMDIRLPQEFLQKLQMESPDLPKPLSRMSRRASLSDIGFGKLETYVKLDKLGEGTYATVFKGRSKLTENLVALKEIRLEHEEGAPCTAIREVSLLKNLKHANIVTLHDLIHTDRSLTLVFEYLDSDLKQYLDHCGNLMSMHNVKIFMFQLLRGLAYCHHRKILHRDLKPQNLLINERGELKLADFGLARAKSVPTKTYSNEVVTLWYRPPDVLLGSTEYSTPIDMWGVGCIHYEMATGRPLFPGSTVKEELHLIFRLLGTPTEETWPGVTAFSEFRTYSFPCYLPQPLINHAPRLDTDGIHLLSSLLLYESKSRMSAEAALSHSYFRSLGERVHQLEDTASIFSLKEIQLQKDPGYRGLAFQQPGRGKNRRQSIF

SEQ ID NO: 769704 - protein, 502 aa, Homo sapiens
MNKMKNFKRRFSLSVPRTETIEESLAEFTEQFNQLHNRRNENLQLGPLGRDPPQECSTFSPTDSGEEPGQLSPGVQFQRRQNQRRFSMEVRASGALPRQVAGCTHKGVHRRAAALQPDFDVSKRLSLPMDIRLPQEFLQKLQMESPDLPKPLSRMSRRASLSDIGFGKLETYVKLDKLGEGTYATVFKGRSKLTENLVALKEIRLEHEEGAPCTAIREVSLLKNLKHANIVTLHDLIHTDRSLTLVFEYLDSDLKQYLDHCGNLMSMHNVKIFMFQLLRGLAYCHHRKILHRDLKPQNLLINERGELKLADFGLARAKSVPTKTYSNEVVTLWYRPPDVLLGSTEYSTPIDMWGVGCIHYEMATGRPLFPGSTVKEELHLIFRLLGTPTEETWPGVTAFSEFRTYSFPCYLPQPLINHAPRLDTDGIHLLSSLLLYESKSRMSAEAALSHSYFRSLGERVHQLEDTASIFSLKEIQLQKDPGYRGLAFQQPGRGKNRRQSIF

SEQ ID NO: 769705 - protein, 499 aa, Homo sapiens
RLSSSSSSSSSSLLFPTFLHSLPSPPLLPPPRPAQVAASLGNCSPFRSRGSCPVPGRERAHRGPQDTRYLQLGPLGRDPPQECSTFSPTDSGEEPGQLSPGVQFQRRQNQRRFSMEDVSKRLSLPMDIRLPQEFLQKLQMESPDLPKPLSRMSRRASLSDIGFGKLETYVKLDKLGEGTYATVFKGRSKLTENLVALKEIRLEHEEGAPCTAIREVSLLKNLKHANIVTLHDLIHTDRSLTLVFEYLDSDLKQYLDHCGNLMSMHNVKIFMFQLLRGLAYCHHRKILHRDLKPQNLLINERGELKLADFGLARAKSVPTKTYSNEVVTLWYRPPDVLLGSTEYSTPIDMWGVGCIHYEMATGRPLFPGSTVKEELHLIFRLLGTPTEETWPGVTAFSEFRTYSFPCYLPQPLINHAPRLDTDGIHLLSSLLLYESKSRMSAEAALSHSYFRSLGERVHQLEDTASIFSLKEIQLQKDPGYRGLAFQQPGRGKNRRQSIF

SEQ ID NO: 769706 - protein, 429 aa, Homo sapiens
SGFLPPPPPPPPPSSSPPSSTPSLPLPFYLLLGQLRLQLLWGTAHLSGAGEAAPCPGGSGRTAAPRTRADPAAQSLMIMNKMKNFKRRFSLSVPRTETIEESLAEFTEQFNQLHNRRNENLQLGPLGRDPPQECSTFSPTDSGEEPGQLSPGVQFQRRQNQRRFSMEDVSKRLSLPMDIRLPQEFLQKLQMESPDLPKPLSRMSRRASLSDIGFGKLETYVKLDKLGEGTYATVFKGRSKLTENLVALKEIRLEHEEGAPCTAIREVSLLKNLKHANIVTLHDLIHTDRSLTLVFEYLDSDLKQYLDHCGNLMSMHNVKVRPQGQGPPILAATCPEAQCGDPLSPPGIRLLRWLRPSHVGKRERAMPSTSPGTGLSALPQEQTHTVCHCLAVGIKPTLNSEHQFPSLSNGSVSYLPKCREASGEARGYE

SEQ ID NO: 769707 - protein, 429 aa, Homo sapiens; identical to SEQ ID NO: 769706

SEQ ID NO: 769708 - protein, 550 aa, Homo sapiens; identical to SEQ ID NO: 769703

SEQ ID NO: 769709 - protein, 550 aa, Homo sapiens; identical to SEQ ID NO: 769703

SEQ ID NO: 769710 - protein, 429 aa, Homo sapiens; identical to SEQ ID NO: 769706

SEQ ID NO: 769711 - protein, 429 aa, Homo sapiens; identical to SEQ ID NO: 769706

SEQ ID NO: 769712 - protein, 550 aa, Homo sapiens; identical to SEQ ID NO: 769703

SEQ ID NO: 769713 - protein, 550 aa, Homo sapiens; identical to SEQ ID NO: 769703

SEQ ID NO: 769714 - protein, 550 aa, Homo sapiens; identical to SEQ ID NO: 769703

SEQ ID NO: 769715 - protein, 157 aa, Homo sapiens [sequence omitted]

SEQ ID NO: 769716 - protein, 157 aa, Homo sapiens [sequence omitted]

SEQ ID NO: 769717 - protein, 429 aa, Homo sapiens; identical to SEQ ID NO: 769706

SEQ ID NO: 769718 - protein, 125 aa, Homo sapiens
AVVGETHRKCVTTPPTARTELAVVAAPRRCRSSLLPHTRSHAAAGALDREVGAIHPPRARAQSLLPRQVWNPPSPLWSEEVYSTAPYYTSWARGPRCPPELCAPPLKRKEQTEPTPSVRFFPSPL

SEQ ID NO: 769719 - protein, 151 aa, Homo sapiens
GRPPHKGAPRLGRGVGALVPAPRAGSHPPAGVCASVHRNAVGAGGPARAGQPGLDGTGRRGARAGGERPEGRAPKVWNPPSPLWSEEVYSTAPYYTSWARGPRCPPELCAPPLKRKEQTEPTPSVRHPTMMRYLVEQTNSATENDESCLKK

SEQ ID NO: 769720 - protein, 143 aa, Homo sapiens
GRPPHKGAPRLGRGVGALVPAPRAGSHPPAGVCASVHRNAVGAGGPARAGQPGLDGTGRRGARAGGERPEGRAPKVWNPPSPLWSEEVYSTAPYYTSWARGPRCPPELCAPPLKRKEQTEPTPSVSTIHNSQEVEAAQMFINR

SEQ ID NO: 769721 - protein, 104 aa, Homo sapiens
MSLFPPPASADRGPPARPRRPPHPRPSLLLRFPFSPVLGSDIRGRRGRQPKQPAASAAERCAPAPAPAPAPAPPKSWTQSEERLRLCWNQKRQQGARRGQEKDK

SEQ ID NO: 769722 - protein, 134 aa, Homo sapiens
EPGGKTFIVGDQISFADYNLLDLLPWLLVSVIHACVFFKTYDRPLILQLQLLWNVFLLHISCDALITGHSIVGFAMYYFTYDPWIGKLLYLEDFFVMSDYRGFGIGSEILKNLSQVAMRVSLQQHALSVVARME

SEQ ID NO: 769723 - protein, 74 aa, Homo sapiens
  misc_feature (45)..(45): Xaa can be any naturally occurring amino acid
  misc_feature (63)..(63): Xaa can be any naturally occurring amino acid
MINEGHSIVGFAMYYFTYDPWIGKLLYLEDFFVMSDYRVRHRIKXFLKESYARFAMKCRLQAXIQLPSGWQNLD

SEQ ID NO: 769724 - protein, 94 aa, Homo sapiens
MVLGEHPFYHCLVAEVPKEHWTPEGNPSPFPEARETKCYVRSSVGCVEPLTTQAEVTENLDRKNSQQVFKLLRKKKKVDAAANLVVVVAAVGGR

SEQ ID NO: 769725 - protein, 192 aa, Homo sapiens [sequence omitted]

SEQ ID NO: 769726 - protein, 208 aa, Homo sapiens
MAPLGEVGNYFGVQDAVPFGNVPVLPVDSPVLLSDHLGQSEAGGLPRGPAVTDLDHLKGILRRRQLYCRTGFHLEIFPNGTIQGTRKDHSRFGILEFISIAVGLVSIRGVDSGLYLGMNEKGELYGSEKLTQECVFREQFEENWYNTYSSNLYKHVDTGRRYYVALNKDGTPREGTRTKRHQKFTHFLPRPVDPDKVPELYKDILSQS

SEQ ID NO: 769727 - protein, 244 aa, Homo sapiens
MAPLGEVGNYFGVQDAVPFGNVPVLPVDSPVLLSDHLGQSEAGGLPRGPAVTDLDHLKGILRRRQLYCRTGFHLEIFPNGTIQGTRKDHSRFGILEFISIAVGLVSIRGVDSGLYLGMNEKGELYGSVSTGGTSSSFISMFDLNSCLFSGLKRARNATESVWKEKLTQECVFREQFEENWYNTYSSNLYKHVDTGRRYYVALNKDGTPREGTRTKRHQKFTHFLPRPVDPDKVPELYKDILSQS

SEQ ID NO: 769728 - protein, 149 aa, Homo sapiens
MGWDLGTRLFQRQEQRSRLSRIWLEKTRVFLEGSTRTPALPHCLFWLLQVPSTQDPLFPGYGPQCPVDLAGPPCLRPLFGGLGGYWRALQRGREGRTMTSRASELSPGRSVTAGIIIVGDEILKGHTQDTNTFFLCRTLRSLGVQVCRV

SEQ ID NO: 769729 - protein, 58 aa, Homo sapiens
GTCVRARPLPARCPAEQPRLNGAGLAGRSTPVLHPPSPLTRTQLLPARGHMKTSDKWG

SEQ ID NO: 769730 - protein, 161 aa, Homo sapiens
MNQFGPSALINLSNFSSIKPEPASTPPQGSMANSTAVVKIPGTPGAGGRLSPENNQVLTKKKLQDLVREVDPNEQLDEDVEEMLLQIADDFIESVVTAACQLARHRKSSTLEVKDVQLHLERQWNMWIPGFGSEEIRPYKKACTTEAHKQRMALIRKTTKK

SEQ ID NO: 769731 - protein, 161 aa, Homo sapiens; identical to SEQ ID NO: 769730

SEQ ID NO: 769732 - protein, 161 aa, Homo sapiens; identical to SEQ ID NO: 769730

SEQ ID NO: 769733 - protein, 161 aa, Homo sapiens; identical to SEQ ID NO: 769730

SEQ ID NO: 769734 - protein, 163 aa, Homo sapiens
MNQFGPSALINLSNFSSIKPEPASTPPQGSMANSTAVVKIPGTPGAGGRLSPENNQVLTKKKLQDLVREVDPNEQLDEDVEEMLLQIADDFIESVVTAACQLARHRKSSTLEVKDVQLHLERQWNMWIPGFGSEEIRPYKKACTTEAHKQVRKWHDPWGQPGL

SEQ ID NO: 769735 - protein, 255 aa, Homo sapiens
MAASHFTGLTAVADVIKDLDTQIALIGLGPHSSKKKQDLDKLYELKSKARQIMNQFGPSALINLSNFSSIKPEPASTPPQGSMANSTAVVKIPGTPGAGGRLSPENNQVLTKKKLQDLVREVDPNEQLDEDVEEMLLQIADDFIESVVTAACQLARHRKSSTLEVKDVQLHLERQWTCGVQDWFENRAKKVAKKYNRDALSEQPITGAGWARLELGKPTPGFGSQAILGDMGGETQSQRKNFQTGESRVLTSGRS

SEQ ID NO: 769736 - protein, 212 aa, Homo sapiens
FYSQDSSFITGSSRANSCAFLLQLIGLGPHSSKKKQDLDKLYELKSKARQIMNQFGPSALINLSNFSSIKPEPASTPPQGSMANSTAVVKIPGTPGAGGRLSPENNQVLTKKKLQDLVREVDPNEQLDEDVEEMLLQIADDFIESVVTAACQLARHRKSSTLEVKDVQLHLERQWNMWIPGFGSEEIRPYKKACTTEAHKQRMALIRKTTKK

SEQ ID NO: 769737 - protein, 147 aa, Homo sapiens
MNQFGPSALINLSNFSSIKPEPASTPPQGSMANSTAVVKIPGTPGAGGRLSPENNQVLTKKKLQDLVREVDPNEQLDEDVEEMLLQIADDFIESVVTAACQLARHRKSSTLEVKDVQLHLERQWNMWIPRNNTRKGQGMDSNVFGDT

SEQ ID NO: 769738 - protein, 194 aa, Homo sapiens
MNQFGPSALINLSNFSSIKPEPASTPPQGSMANSTAVVKIPGTPGAGGRLSPENNQVLTKKKLQDLVREVDPNEQLDEDVEEMLLQIADDFIESVVTAACQLARHRKSSTLEVKDVQLHLERQWNMWIPGFGSEEIRPYKKACTTEAHKQMLLLWAGIMCLPLTAVKSRCQLTSAMTSATDSLCNLGPNLRDHP

SEQ ID NO: 769739 - protein, 161 aa, Homo sapiens; identical to SEQ ID NO: 769730

SEQ ID NO: 769740 - protein, 204 aa, Homo sapiens
  misc_feature (11)..(11): Xaa can be any naturally occurring amino acid
VKGQSRVDAEXQEKLLIGLGPHSSKKKQDLDKLYELKSKARQIMNQFGPSALINLSNFSSIKPEPASTPPQGSMANSTAVVKIPGTPGAGGRLSPENNQVLTKKKLQDLVREVDPNEQLDEDVEEMLLQIADDFIESVVTAACQLARHRKSSTLEVKDVQLHLERQWNMWIPGFGSEEIRPYKKACTTEAHKQRMALIRKTTKK

SEQ ID NO: 769741 - protein, 75 aa, Homo sapiens
MCRQVMSTLPRGGVTFLTNLERKWQHLEQNNFAMKEFIATKSQESDYQPIKKNVTKQIAEYNKTIVDALHSTSGN

SEQ ID NO: 769742 - protein, 853 aa, Homo sapiens [sequence omitted]

SEQ ID NO: 769743 - protein, 86 aa, Homo sapiens
IVIFEFYVLACMDRKICKIQWLAQDDIVFDESGVKLLQLSAAAVDKGCSVGEVLQSVLRYEKERQLNEAVGNVTPLQLLDWLMVNL

SEQ ID NO: 769744 - protein, 335 aa, Homo sapiens
TTPVKPTEPCTPSKSRSASSEEASESPTARQIPPEARRLIVNKNAGETLLQRAARLGYKDVVLYCLQKDSEDVNHRDNAGYTALHEACSRGWTDILNILLEHGANVNCSAQDGTRPVHDAVVNDNLETIWLLLSYGADPTLATYSGQTAMKLASSDTMKRFLSDHLSDLQGRAEGDPGVSWDFYSSSVLEEKDGFACDLLHNPPGSSDQEGDDPMEEDDFMFELSDKPLLPCYNLQVSVSRGPCNWFLFSDVLKRLKLSSRIFQARFPHFEITTMPKAEFYRQVASSQLLTPAERPGGLDDRSPPGSSETVELVRYEPDLLRLLGSEVEFQSCNS

SEQ ID NO: 769745 - protein, 726 aa, Homo sapiens
MLVAGHGGSHLYIPALWEAEAGGSFDVQEFETNLANMVKPHLYYNTKISQAWSWVPVIPATQEAETGELLEPEEVEVAVSRDCATALQPRDSVLEKEKKEKKTVMVTEDPVRVGGGAEELTLGKGKPVRRLTRQSPGQKWQRLELGQWNSEEGKPCELGPLMWGGSVSSRISQCKRLARDRPLQHPSQLSPGCHPVGCAQQSQTPLSECELWPCRNDGAAAGEKTCLMHSRAKEKCLLDYPQFRPFSTAPPLLGKILESKEAREARVRTGEGKAARVGRGGSRRKDWSQQMANAKVTGAQAKSPRSLLRVLGSRMPLCLLFVLFWKRWSLIACSPFELKAGPGIAGDRRRHLPQLYPRSLWFSRGRGSQTGSEFIMGDIDGRAAFVGFAECSGSVPPPLPPASFNNSHPCLCRPCNWFLFSDVLKRLKLSSRIFQARFPHFEITTMPKAEFYRQVASSQLLTPAERPGGLDDRSPPGSSETVELVRYEPDLLRLLGSEVEFQSCNSDRENSPSSSFSFRVRPSPTSLSFPDRAPDCRMRQEYGPTRSRLINASISDWTVFVFLVTISSHLPVVVIVIVVADGGGKLNSMSEDKRSREVVGGGAGVPWTGLLVHDQDQTWALDGLGLSRGEMRKSQISERPPTPFPCVLLSSVVFILLVFNLYVFHWFLISLYHCDDLRQLVVLRDFLYLLFFFFVDELLTKLFPGVFFPHWGGGEVEWGGGTWTCD

SEQ ID NO: 769746 - protein, 213 aa, Homo sapiens
  misc_feature (9)..(9): Xaa can be any naturally occurring amino acid
  misc_feature (47)..(48): Xaa can be any naturally occurring amino acid
SITALAPSXRLPPITSTVSSLGYSRENRAGELDVAKVHCPPWRQKPXXKTSPACPPLAAVPGGKRQRSGAGCPVLAMRPQQAPVSGKVFIQRDYSSGTRCQFQTKFPAELENRIDRQQFEETVRTLNNLYAEAEKLGGQSYLEGCLACLTAYTIFLCMETHYEKVLKKVSKYIQEQNEKIYAPQGLLLTDPIERGLRVIEITIYEDRGMSSGR

SEQ ID NO: 769747 - protein, 137 aa, Homo sapiens
MRPQQAPVSGKVFIQRDYSSGTRCQFQTKFPAELENRIDRQQFEETVRTLNNLYAEAEKLGGQSYLEGCLACLTAYTIFLCMETHYEKVLKKVSKYIQEQNEKIYAPQGLLLTDPIERGLRVIEITIYEDRGMSSGR

SEQ ID NO: 769748 - protein, 137 aa, Homo sapiens; identical to SEQ ID NO: 769747

SEQ ID NO: 769749 - protein, 137 aa, Homo sapiens; identical to SEQ ID NO: 769747

SEQ ID NO: 769750 - protein, 137 aa, Homo sapiens; identical to SEQ ID NO: 769747

SEQ ID NO: 769751 - protein, 290 aa, Homo sapiens
AEGGVGPGPAHIISLPRPSPTARSFGRVALRPEERVGPRPEVGGRAEGRGRGFLRQDVSDGEGGATAAGGQRRRVCVSRAEPGCGGRGAWARRQLRPAVTAWVKGSGAEEALGCFRRRVGARGWRVRVPGPGRGSDSRLVFPRPRSAGCPVLAMRPQQAPVSGKVFIQRDYSSGTRCQFQTKFPAELENRIDRQQFEETVRTLNNLYAEAEKLGGQSYLEGCLACLTAYTIFLCMETHYEKVLKKVSKYIQEQNEKIYAPQGLLLTDPIERGLRVIEITIYEDRGMSSGR

SEQ ID NO: 769752 - protein, 137 aa, Homo sapiens; identical to SEQ ID NO: 769747

SEQ ID NO: 769753 - protein, 290 aa, Homo sapiens; identical to SEQ ID NO: 769751

SEQ ID NO: 769754 - protein, 213 aa, Homo sapiens; identical to SEQ ID NO: 769746
  misc_feature (9)..(9): Xaa can be any naturally occurring amino acid
  misc_feature (47)..(48): Xaa can be any naturally occurring amino acid

SEQ ID NO: 769755 - protein, 104 aa, Homo sapiens
AEGGVGPGPAHIISLPRPSPTARSFGRVALRPEERVGPRPEVGGRAEGRGRGFLRQDVSDGEGGATASVPTSSPEHHSFLSAARATVPFTPRTHFLKFHTWSDL

SEQ ID NO: 769756 - protein, 137 aa, Homo sapiens; identical to SEQ ID NO: 769747

SEQ ID NO: 769757 - protein, 144 aa, Homo sapiens
APPRCARPRLRAKQQAGLGGDVRGRGNWSFFSVYFGIQFLFFFVLTQEKISIAFSIWKATLLLPEPQSCVVGGCCGWHLGRPRPPRREDVRPCLLPPLPGESSRARPSLALRPLGVLPCCFKSGSCLKNPKKKSSQMTLCPTLR

SEQ ID NO: 769758 - protein, 119 aa, Homo sapiens
GPSAPCTFNAVGLPAALEGQSYPDATVVSRQPWEGQSYPDATVVSRQPWEGQSYPDATAELPFPPCCPQGRLLVSSDAGRRNPPAPESLARTRPGGAGAKTQRMWPPSLVTDGYQGGFG

SEQ ID NO: 769759 - protein, 119 aa, Homo sapiens; identical to SEQ ID NO: 769758

SEQ ID NO: 769760 - protein, 119 aa, Homo sapiens; identical to SEQ ID NO: 769758

SEQ ID NO: 769761 - protein, 198 aa, Homo sapiens
  misc_feature (89)..(89): Xaa can be any naturally occurring amino acid
  misc_feature (97)..(98): Xaa can be any naturally occurring amino acid
  misc_feature (104)..(104): Xaa can be any naturally occurring amino acid
  misc_feature (111)..(111): Xaa can be any naturally occurring amino acid
  misc_feature (116)..(116): Xaa can be any naturally occurring amino acid
  misc_feature (123)..(123): Xaa can be any naturally occurring amino acid
  misc_feature (126)..(126): Xaa can be any naturally occurring amino acid
  misc_feature (141)..(141): Xaa can be any naturally occurring amino acid
  misc_feature (144)..(144): Xaa can be any naturally occurring amino acid
  misc_feature (152)..(152): Xaa can be any naturally occurring amino acid
  misc_feature (154)..(154): Xaa can be any naturally occurring amino acid
  misc_feature (159)..(160): Xaa can be any naturally occurring amino acid
  misc_feature (162)..(162): Xaa can be any naturally occurring amino acid
  misc_feature (172)..(172): Xaa can be any naturally occurring amino acid
  misc_feature (188)..(188): Xaa can be any naturally occurring amino acid
MSTESMIRDVELAEEALPKKTGGPQGSRRCLFLSLFSFLIVAGATTLFCLLHFGVIGPQREEFPRDLSLISPLAQAVSIIFSQNRSCTXQCYNSAVXXKKTSQXCSAREPXQLRPXTRTRATXANXTCAHSAPPAQTCSSXKHXRARALHTXQXHCYTXXYXTALIFKRAQXRATLHNTAAYSTQHTXSTTHRTLIPK

SEQ ID NO: 769762 - protein, 211 aa, Homo sapiens
MNGERKPDTSGLRAQARQAASCSSFKGDSLDVNHSPSPQQFPRDLSLISPLAQAVRSSSRTPSDKPVAHVVANPQAEGQLQWLNRRANALLANGVELRDNQLVVPSEGLYLIYSQVLFKGQGCPSTHVLLTHTISRIAVSYQTKVNLLSAIKSPCQRETPEGAEAKPWYEPIYLGGVFQLEKGDRLSAEINRPDYLDFAESGQVYFGIIAL

SEQ ID NO: 769763 - protein, 233 aa, Homo sapiens
MSTESMIRDVELAEEALPKKTGGPQGSRRCLFLSLFSFLIVAGATTLFCLLHFGVIGPQREEFPRDLSLISPLAQAVRSSSRTPSDKPVAHVVANPQAEGQLQWLNRRANALLANGVELRDNQLVVPSEGLYLIYSQVLFKGQGCPSTHVLLTHTISRIAVSYQTKVNLLSAIKSPCQRETPEGAEAKPWYEPIYLGGVFQLEKGDRLSAEINRPDYLDFAESGQVYFGIIAL

SEQ ID NO: 769764 - protein, 179 aa, Homo sapiens [sequence omitted]

SEQ ID NO: 769765 - protein, 178 aa, Homo sapiens
RLTLFCNFLFMSLEATKWWEIRDSNIWWPCDVSKLLDFSQFPFPIKWVVLGIRGSNSAGNRGRNRQLRPRTSPKPRAATGTTVRGASVKRTGGPAPAQPSPPGPLPPTPHGPHARAETGASPGSPVRQPLPGPAPQREAAWGRRRVERAAEDKEEVAVENKKELSAVCPDAGRRWGQA

SEQ ID NO: 769766 - protein, 681 aa, Homo sapiens
PGEPARRRPRARARAAMYRRSYVFQTRKEQYEHADEASRAAEPERPADEGWAGATSLAALQGLGERVAAHVQRARALEQRHAGLRRQLDAFQRLGELAGPEDALARQVESNRQRVRDLEAERARLERQGTEAQRALDEFRSKYENECECQLLLKEMLERLNKEADEALLHNLRLQLEAQFLQDDISAAKDRHKKNLLEVQTYISILQQIIHTTPPASIVTSGMREEKLLTEREVAALRSQLEEGREVLSHLQAQRVELQAQTTTLEQAIKSAHECYDDEIQLYNEQIETLRKEIEETERVLEKSSYDCRQLAVAQQTLKNELDRYHRIIEIEGNRLTSAFIETPIPLFTQSHGVSLSTGSGGKDLTRALQDITAAKPRQKALPKNVPRRKEIITKDKTNGALEDAPLKGLEDTKLVQVVLKEESESKFESESKEVSPLTQEGAPEDVPDGGQISKGFGKLYRKVKEKVRSPKEPETPTELYTKERHVLVTGDANYVDPRFYVSSITAKGGVAVSVAEDSVLYDGQVEPSPESPKPPLENGQVGLQEKEDGQPIDQQPIDKEIEPDGAELEGPEEKREGEERDEESRRPCAMVTPGAEEPSIPEPPKPAADQDGAEVLGTRSRSLPEKGPPKALAYKTVEVVESIEKISTESIQTYEETAVIVETMIGKTKSDKKKSGEKSS

SEQ ID NO: 769767 - protein, 540 aa, Homo sapiens
MYENECECQLLLKEMLERLNKEADEALLHNLRLQLEAQFLQDDISAAKDRHKKNLLEVQTYISILQQIIHTTPPASIVTSGMREEKLLTEREVAALRSQLEEGREVLSHLQAQRVELQAQTTTLEQAIKSAHECYDDEIQLYNEQIETLRKEIEETERVLEKSSYDCRQLAVAQQTLKNELDRYHRIIEIEGNRLTSAFIETPIPLFTQSHGVSLSTGSGGKDLTRALQDITAAKPRQKALPKNVPRRKEIITKDKTNGALEDAPLKGLEDTKLVQVVLKEESESKFESESKEVSPLTQEGAPEDVPDGGQISKGFGKLYRKVKEKVRSPKEPETPTELYTKERHVLVTGDANYVDPRFYVSSITAKGGVAVSVAEDSVLYDGQVEPSPESPKPPLENGQVGLQEKEDGQPIDQQPIDKEIEPDGAELEGPEEKREGEERDEESRRPCAMVTPGAEEPSIPEPPKPAADQDGAEVLGTRSRSLPEKGPPKALAYKTVEVVESIEKISTESIQTYEETAVIVETMIGKTKSDKKKSGEKSS

SEQ ID NO: 769768 - protein, 681 aa, Homo sapiens; identical to SEQ ID NO: 769766

SEQ ID NO: 769769 - protein, 536 aa, Homo sapiens
PGEPARRRPRARARAAMYRRSYVFQTRKEQYEHADEASRAAEPERPADEGWAGATSLAALQGLGERVAAHVQRARALEQRHAGLRRQLDAFQRLGELAGPEDALARQVESNRQRVRDLEAERARLERQGTEAQRALDEFRSKYENECECQLLLKEMLERLNKEADEALLHNLRLQLEAQFLQDDISAAKDRHKKNLLEVQTYISILQQIIHTTPPASIVTSGMREEKLLTEREVAALRSQLEEGREVLSHLQAQRVELQAQTTTLEQAIKSAHECYDDEIQLYNEQIETLRKEIEETERVLEKSSYDCRQLAVAQQTLKNELDRYHRIIEIEGNRLTSAFIETPIPLFTQSHGVSLSTGSGGKDLTRALQDITAAKPRQKALPKNVPRRKEIITKDKTNGALEDAQPIDQQPIDKEIEPDGAELEGPEEKREGEERDEESRRPCAMVTPGAEEPSIPEPPKPAADQDGAEVLGTRSRSLPEKGPPKALAYKTVEVVESIEKISTESIQTYEETAVIVETMIGKTKSDKKKSGEKSS

SEQ ID NO: 769770 - protein, 299 aa, Homo sapiens
MSAKPEVSLVREASRQIVAGGSAGLVEICLMHPLDVVKTRFQIQRCATDPNSYKSLVDSFRMIFQMEGLFGFYKGILPPILAETPKRAVKFFTFEQYKKLLGYVSLSPALTFAIAGLGSGLTEAIVVNPFEVVKVGLQANRNTFAEQPSTVGYARQIIKKEGWGLQGLNKGLTATLGRHGVFNMVYFGFYYNVKNMIPVNKDPILEFWRKFGIGLLSGTIASVINIPFDVAKSRIQGPQPVPGEIKYRTCFKTMATVYQEEGILALYKGLLPKIMRLGPGGAVMLLVYEYTYSWLQENW

SEQ ID NO: 769771 - protein, 272 aa, Homo sapiens
MHMGVRTWPAPSCLCPTCAHELDPDREYGSTLVRTCHVPRGLVEICVMNPREMCGEYTRVIVIKREVNAWHVFMVETRKEQLKTFAIAGLGSGLTEAIVVNPFEVVKVGLQANRNTFAEQPSTVGYARQIIKKEGWGLQGLNKGLTATLGRHGVFNMVYFGFYYNVKNMIPVNKDPILEFWRKFGIGLLSGTIASVINIPFDVAKSRIQGPQPVPGEIKYRTCFKTMATVYQEEGILALYKGLLPKIMRLGPGGAVMLLVYEYTYSWLQENW

SEQ ID NO: 769772 - protein, 299 aa, Homo sapiens; identical to SEQ ID NO: 769770

SEQ ID NO: 769773 - protein, 112 aa, Homo sapiens
VQAGMSHSTRQRCQDTNTTRERGLCNCTCVNSGTIYHQYKTEKHNCGEYPGDAKGSDSSQWILLECFLFFFSEAGLALLPRLHLNFRAQLNLPSSRDYRCVPLHPALCIVYC

SEQ ID NO: 769774 - protein, 112 aa, Homo sapiens; identical to SEQ ID NO: 769773

SEQ ID NO: 769775 - protein, 99 aa, Homo sapiens
REPVAPSLEKESGRGEWLSGRGEWLSGSISSEEEAAAAAAFTERKNSLKIPFETLKKHHLFSFGKWHMDGTGSHYPQQTNTGTKKPNTTFSHLQMGAEQ

SEQ ID NO: 769776 - protein, 241 aa, Homo sapiens
MFYSGLLTEGGRKETDMREAASLRQQRRMKQAVQFIHKDSADLLPLDGLKKLGSSKDMQPHNILQRRLMETNLSKLRSGPRVPWASKTNKLNQAKSEGLKKSEEDDMILVSCQCAGKDVKALVDTGCLYNLISLACVDRLGLKEHVKSHKHEGEKLSLPRHLKVVGQIEHLVITLGSLRLDCPAAVVDDNEKNLSLGLQTLRSLKCIINLDKHRLIMGKTDKEEIPFVETVSLNEDNTSEA

SEQ ID NO: 769777 - protein, 213 aa, Homo sapiens
MFYSGLLTEGGRKETDMREAASLRQQRRMKQAVQFIHKDSADLLPLDGLKKLGSSKDMQPHNILQRRLMETNLSKLRSGPRVPWASKTNKLNQAKSEGLKKSEEDDMILVSCQCAGKDVKALVDTGCLYNLISLACVDRLGLKEHVKSHKHEGEKLSLPRHLKVVGQIEHLVITLGSLRLDCPAAVVDDNEKNLSLGLQTLRSLKVRLTPLTP

SEQ ID NO: 769778 - protein, 249 aa, Homo sapiens
MFYSGLLTEGGRKETDMREAASLRQQRRMKQAVQFIHKDSADLLPLDGLKKLGSSKDMQPHNILQRRLMETNLSKLRSGPRVPWASKTNKLNQAKSEGLKKSEEDDMILVSCQCAGKDVKALVDTGCLYNLISLACVDRLGLKEHVKSHKHEGEKLSLPRHLKVVGQIEHLVITLGSLRLDCPAAVVDDNEKNLSLGLQTLRSLKCIINLDKHRLIMGKTDKEEIPFVETVSLNEDKSREASELSKFIY

SEQ ID NO: 769779 - protein, 141 aa, Homo sapiens
MFYSGLLTEGGRKETDMREAASLRQQRRMKQAVQFIHKDSADLLPLDGLKKLGSSKDMQPHNILQRRLMETNLSKLRSGPRVPWASKTNKLNQAKSEGLKKSEEDDMILVSCQCAGKDVKALVDTGCLYNLISLACVDRLG

SEQ ID NO: 769780 - protein, 89 aa, Homo sapiens
AAARARARVGRLALYASPGICGLRAPPPPPALSWSPAPAAAARAGGCGAQERPRLRPGPAQGESGAVRSRVGSGPLPGGAWSGGGGGGR

SEQ ID NO: 769781 - protein, 223 aa, Homo sapiens
RPPGPGPASGAWLCTRARGSAAFVPPLPRPPSRGARRRRRLPGRGVAALRRGPGSAPGLPRGRAERSAAGSGRGPSREERGAAAAAAAAEMMEELHSLDPRRQELLEARFTGVGVSKGPLNSESSNQSLCSVGSLSDKEVETPEKKQNDQRNRKRKAEPYETSQGKGTPRGHKISDYFERRVEQPLYGLDGSAAKEATEEQSALPILTSVMLAKPRLDTEQLA

SEQ ID NO: 769782 - protein, 145 aa, Homo sapiens
MVSQPTFSFSAEMMEELHSLDPRRQELLEARFTGVGVSKGPLNSESSNQSLCSVGSLSDKEVETPEKKQNDQRNRKRKAEPYETSQGKGTPRGHKISDYFERRVEQPLYGLDGSAAKEATEEQSALPILTSVMLAKPRLDTEQLA

SEQ ID NO: 769783 - protein, 223 aa, Homo sapiens; identical to SEQ ID NO: 769781

SEQ ID NO: 769784 - protein, 175 aa, Homo sapiens
AAARARARVGRLALYASPGICGLRAPPPPPALSWSPAPAAAEMMEELHSLDPRRQELLEARFTGVGVSKGPLNSESSNQSLCSVGSLSDKEVETPEKKQNDQRNRKRKAEPYETSQGKGTPRGHKISDYFERRVEQPLYGLDGSAAKEATEEQSALPILTSVMLAKPRLDTEQLA

SEQ ID NO: 769785 - protein, 130 aa, Homo sapiens
ETPPFPPPEPAYITWKTRDQPATHTTQEPSGAPAHLAQCCHCQQPKKPPGGPGIGPRRQAIISAHKHCPWSLVLTHQVYHHLPLMVKDKTSWASPSSAKSSPQPPINNYSLGQVLVGFKAVNFPGIFEEG

SEQ ID NO: 769786 - protein, 392 aa, Homo sapiens
MSLAHTAAEYMLSDALLPDRRGPRLKGLRLELPLDRIVKFVAVGSPLLLMSLAFAQEFSSGSPISCFSPSNFSIRQAAYVDSSCWDSLLHHKQDGPGQDKMKSLWPHKALPYSLLALALLMYLPVLLWQYAAVPALSSDLLFIISELDKSYNRSIRLVQHMLKIRQKSSDPYVFWNELEKARKERYFEFPLLERYLACKQRSHSLVATYLLRNSLLLIFTSATYLYLGHFHLDVFFQEEFSCSIKTGLLSDETHVPNLITCRLTSLSIFQIVSLSSVAIYTILVPVIIYNLTRLCRWDKRLLSVYEMLPAFDLLSRKMLGCPINDLNVILLFLRANISELISFSWLSVLCVLKDTTTQKHNIDTVVDFMTLLAGLEPSKPKHLTNSACDEHP

SEQ ID NO: 769787 - protein, 261 aa, Homo sapiens
MSDEEVEQVEEQYEEEEEAQEEAAEVHEEVHEPGGRSEEEKPRPKLTAPKIPEGEKVDFDDIQKKRQNKDLMELQALIDSHFEARKKEEEELVALKERIEKRRAERAEQQRIRAEKERERQNRLAEEKARREEEDAKRRAEDDLKKKKALSSMGANYSSYLAKADQKRGKKQTAREMKKKILAERRKPLNIDHLGEDKLRDKAKELWETLHQLEIDKFEFGEKLKRQKYDITTLRSRIDQAQKHSKKAGTPAKGKVGGRWK

SEQ ID NO: 769788 - protein, 69 aa, Homo sapiens
  misc_feature (7)..(7): Xaa can be any naturally occurring amino acid
VTAFVKXVDKAKELWETLHQLEIDKFEFGEKLKRQKYDIMNVRARVQMLAKFSKKAGTPAKGKVGGRWK

SEQ ID NO: 769789 - protein, 154 aa, Homo sapiens
MSDEEVEQVEEQYEEEEEAQEEAAEVHEEVHEPEDDLKKKKALSSMGANYSSYLAKADQKRGKKQTAREMKKKILAERRKPLNIDHLGEDKLRDKAKELWETPQSCQGLPDSPGGGEAIPGRPPRLCPCCLHPLGPVNKAAEPPTKKQTTTHTK

SEQ ID NO: 769790 - protein, 335 aa, Homo sapiens
GLAEMRMSPSFTLQGAQASFPAAGSCLAAEYILITVSVPCSLKPASPAPGSPALQYEEEEEAQEEAAEVHEEVHEPGGRRRGETETQPHWLFSCMCACAFCHLEDTAEEDAEEEKPRPKLTAPKIPEGEKVDFDDIQKKRQNKDLMELQALIDSHFEARKKEEEELVALKERIEKRRAERAEQQRIRAEKERERQNRLAEEKARREEEDAKRRAEDDLKKKKALSSMGANYSSYLAKADQKRGKKQTAREMKKKILAERRKPLNIDHLGEDKLRDKAKELWETLHQLEIDKFEFGEKLKRQKYDITTLRSRIDQAQKHSKKAGTPAKGKVGGRWK

SEQ ID NO: 769791 - protein, 261 aa, Homo sapiens; identical to SEQ ID NO: 769787

SEQ ID NO: 769792 - protein, 261 aa, Homo sapiens
MSDEEVEQVEEQYEEEEEAQEEAAEVHEEVHEPGGRSEEEKPRPKLTAPKIPEGEKVDFDDIQKKRQNKDLMELQALIDSHFEARKKEEEELVALKERIEKRRAERAEQQRIRAEKERERQNRLAEEKARREEEDAKRRAEDDLKKKKALSSMGANYSSYLAKADQKRGKKQTAREMKKKILAERRKPLNIDHLGEDKLRDKAKELWETLHQLEIDKFEFGEKLKRQKYDIMNVRARVQMLAKFSKKAGTPAKGKVGGRWK

SEQ ID NO: 769793 - protein, 254 aa, Homo sapiens
MSDEEVEQVEEQYEEEEEAQEEAAEVHEEVHEPGGRSEEEKPRPKLTAPKIPEGEKVDFDDIQKKRQNKDLMELQALIDSHFEARKKEEEELVALKERIEKRRAERAEQQRIRAEKERERQNRLAEEKARREEEDAKRRAEDDLKKKKALSSMGANYSSYLAKADQKRGKKQTAREMKKKILAERRKPLNIDHLGEDKLRDKAKELWETLHQLEIDKFEFGEKLKRQKYDASPPPGLSEEPLTGLWGLEDVESH

SEQ ID NO: 769794 - protein, 216 aa, Homo sapiens
SACSRCCPQGAPALLTLDPQKPPTFTMSDEEVEQVEEEAQEEEEVQEEEKPRPKLTAPKIPEGEKVDFDDIQKKRQNKDLMELQALIDSHFEARKKEEEELVALKERIEKRRAERAEQQRIRAEKERERQNRLAEEKARREEEDAKRRAEDDLKKKKALSSMGANYSSYLAKADQKRGKKQTAREMKKKILAERRKPRAARGTPHPPAPTILSGAP

SEQ ID NO: 769795 - protein, 270 aa, Homo sapiens
SACSRCCPQGAPALLTLDPQKPPTFTMSDEEVEQVEEEAQEEEEVQEEEKPRPKLTAPKIPEGEKVDFDDIQKKRQNKDLMELQALIDSHFEARKKEEEELVALKERIEKRRAERAEQQRIRAEKERERQNRLAEEKARREEEDAKRRAEDDLKKKKALSSMGANYSSYLAKADQKRGKKQTAREMKKKILAERRKPLNIDHLGEDKLRDKAKELWETLHQLEIDKFEFGEKLKRQKYDITTLRSRIDQAQKHSKKAGTPAKGKVGGRWK

SEQ ID NO: 769796 - protein, 109 aa, Homo sapiens
MGANYSSYLAKADQKRGKKQTAREMKKKILAERRKPLNIDHLGEDKLRDKAKELWETLHQLEIDKFEFGEKLKRQKYDITTLRSRIDQAQKHSKKAGTPAKGKVGGRWK

SEQ ID NO: 769797 - protein, 249 aa, Homo sapiens
MSDEEVEQVEEQYEEEEEAQEEAAEVHEEVHEPGGRSEEEKPRPKLTAPKIPEGEKVDFDDIQKKRQNKDLMELQALIDSHFEARKKEEEELVALKERIEKRRAERAEQQRIRAEKERERQNRLAEEKARREEEDAKRRAEDDLKKKKALSSMGANYSSYLAKADQKRGKKQTAREMKKKILAERRKPLNIDHLGEDKLRDKAKELWETLHQLEIDKFEFGEKLKRQKYDRAARGTPHPPAPTILSGAP

SEQ ID NO: 769798 - protein, 144 aa, Homo sapiens
SACSRCCPQGAPALLTLDPQKPPTFTMSDEEVEQVEEEAQEEEEVQEEEKPRPKLTAPKIPEGEKVDFDDIQKKRQNKDLMELQALIDSHFEARKKEEEELVALKERIEKRRAERAEQQRIRAEKERERQNRLARTRLHIFCSY

SEQ ID NO: 769799 - protein, 341 aa, Homo sapiens
MPKRKVTFQGVGDEEDEDEIIVPKKKLVDPVAGSGGPGSRFKGKHSLDSDEEEDDDDGGSSKYDILASEDVEGQEAATLPSEGGVRITPFNLQEEMEEGHFDADGNYFLNRDAQIRDSWLDNIDWVKIRERPPGQRQASDSEEEDSLGQTSMSAQALLEGLLELLLPRETVAGALRRLGARGGGKGRKGPGQPSSPQRPDRLSGLADQMVARGNLGVYQETRERLAMRLKGLGCQTLGPHNPTPPPSLDMFAEELAEEELETPTPTQRGEAESRGDGLVDVMWEYKWENTGDAELYGPFTSAQMQTWVSEGYFPDGVYCRKLDPPGGQFYNSKRIDFDLYT

SEQ ID NO: 769800 - protein, 341 aa, Homo sapiens; identical to SEQ ID NO: 769799

SEQ ID NO: 769801 - protein, 88 aa, Homo sapiens
RAAGEGFRAQPPSPGSAEAGAVGGSFPRSSDHSKDHGLDMSGSGSWELLAWSLDEYRQQPKATVTTNLHTLTTVISYCPKISSQCKKT

SEQ ID NO: 769802 - protein, 795 aa, Homo sapiens
MENGGAGTLQIRQVLLFFVLLGMSQAGSETGNFLVMEELQSGSFVGNLAKTLGLEVSELSSRGARVVSNDNKECLQLDTNTGDLLLREMLDREELCGSNEPCVLYFQVLMKNPTQFLQIELQVRDINDHSPVFLEKEMLLEIPENSPVGAVFLLESAKDLDVGINAVKSYTINPNSHFHVKIRVNPDNRKYPELVLDKALDYEERPELSFILTALDGGSPPRSGTALVRVVVVDINDNSPEFEQAFYEVKILENSILGSLVVTVSAWDLDSGTNSELSYTFSHASEDIRKTFEINQKSGDITLTAPLDFEAIESYSIIIQATDGGGLFGKSTVRIQVMDVNDNAPEITVSSITSPIPENTPETVVMVFRIRDRDSGDNGKMVCSIPEDIPFVLKSSVNNYYTLETERPLDRESRAEYNITITVTDLGTPRLKTEHNITVLVSDVNDNAPAFTQTSYALFVRENNSPALHIGSISATDRDSGTNAQVNYSLLPSQDPHLPLASLVSINADNGHLFALRSLDYEALQGFQFRVGATDHGSPALSSEALVRVLVLDANDNSPFVLYPLQNGSAPCTELVPWAAEPGYLVTKVVAVDGDSGQNAWLSYQLLKATEPGLFGVWAHNGEVRTARLLSERDAAKHRLVVLVKDNGEPPRSATATLHVLLVDGFSQPYLPLPEAAPAQAQADSLTVYLVVALASVSSLFLFSVLLFVAVRLCRRSRAAPVGRCSVPEGPFPGHLVDVSGTGTLSQSYHYEVCVTGGSRSNKFKFLKPIIPNFLPQSTGSEVEENPPFQNNLGF

SEQ ID NO: 769803 - protein, 1158 aa, Homo sapiens
MESGHLLWALLFMQSLWPQLTDGATRVYYLGIRDVQWNYAPKGRNVITNQPLDSDIVASSFLKSDKNRIGGTYKKTIYKEYKDDSYTDEVAQPAWLGFLGPVLQAEVGDVILIHLKNFATRPYTIHPHGVFYEKDSEGSLYPDGSSGPLKADDSVPPGGSHIYNWTIPEGHAPTDADPACLTWIYHSHVDAPRDIATGLIGPLITCKRGALDGNSPPQRQDVDHDFFLLFSVVDENLSWHLNENIATYCSDPASVDKEDETFQESNRMHAINGFVFGNLPELNMCAQKRVAWHLFGMGNEIDVHTAFFHGQMLTTRGHHTDVANIFPATFVTAEMVPWEPGTWLISCQVNSHFRDGMQALYKVKSCSMAPPVDLLTGKVRQYFIEAHEIQWDYGPMGHDGSTGKNLREPGSISDKFFQKSSSRIGGTYWKVRYEAFQDETFQEKMHLEEDRHLGILGPVIRAEVGDTIQVVFYNRASQPFSMQPHGVFYEKDYEGTVYNDGSSYPGLVAKPFEKVTYRWTVPPHAGPTAQDPACLTWMYFSAADPIRDTNSGLVGPLLVCRAGALGADGKQKGVDKEFFLLFTVLDENKSWYSNANQAAAMLDFRLLSEDIEGFQDSNRMHAINGFLFSNLPRLDMCKGDTVAWHLLGLGTETDVHGVMFQGNTVQLQGMRKGAAMLFPHTFVMAIMQPDNLGTFEIYCQAGSHREAGMRAIYNVSQCPGHQATPRQRYQAARIYYIMAEEVEWDYCPDRSWEREWHNQSEKDSYGYIFLSNKDGLLGSRYKKAVFREYTDGTFRIPRPRTGPEEHLGILGPLIKGEVGDILTVVFKNNASRPYSVHAHGVLESTTVWPLAAEPGEVVTYQWNIPERSGPGPNDSACVSWIYYSAVDPIKDMYSGLVGPLAICQKGILEPHGGRSDMDREFALLFLIFDENKSWYLEENVATHGSQDPGSINLQDETFLESNKMHAINGKLYANLRGLTMYQGERVAWYMLAMGQDVDLHTIHFHAESFLYRNGENYRADVVDLFPGTFEVVEMVASNPGTWLMHCHVTDHVHAGMETLFTVFSRTEHLSPLTVITKETEKAVPPRDIEEGNVKMLGMQIPIKNVEMLASVLVAISVTLLLVVLALGGVVWYQHRQRKLRRNRRSILDDSFKLLSFKQ

SEQ ID NO: 769804 - protein, 1105 aa, Homo sapiens
MQRVASSFLKSDKNRIGGTYKKTIYKEYKDDSYTDEVAQPAWLGFLGPVLQAEVGDVILIHLKNFATRPYTIHPHGVFYEKDSEGSLYPDGSSGPLKADDSVPPGGSHIYNWTIPEGHAPTDADPACLTWIYHSHVDAPRDIATGLIGPLITCKRGALDGNSPPQRQDVDHDFFLLFSVVDENLSWHLNENIATYCSDPASVDKEDETFQESNRMHAINGFVFGNLPELNMCAQKRVAWHLFGMGNEIDVHTAFFHGQMLTTRGHHTDVANIFPATFVTAEMVPWEPGTWLISCQVNSHFRDGMQALYKVKSCSMAPPVDLLTGKVRQYFIEAHEIQWDYGPMGHDGSTGKNLREPGSISDKFFQKSSSRIGGTYWKVRYEAFQDETFQEKMHLEEDRHLGILGPVIRAEVGDTIQVVFYNRASQPFSMQPHGVFYEKDYEGTVYNDGSSYPGLVAKPFEKVTYRWTVPPHAGPTAQDPACLTWMYFSAADPIRDTNSGLVGPLLVCRAGALGADGKQKGVDKEFFLLFTVLDENKSWYSNANQAAAMLDFRLLSEDIEGFQDSNRMHAINGFLFSNLPRLDMCKGDTVAWHLLGLGTETDVHGVMFQGNTVQLQGMRKGAAMLFPHTFVMAIMQPDNLGTFEIYCQAGSHREAGMRAIYNVSQCPGHQATPRQRYQAARIYYIMAEEVEWDYCPDRSWEREWHNQSEKDSYGYIFLSNKDGLLGSRYKKAVFREYTDGTFRIPRPRTGPEEHLGILGPLIKGEVGDILTVVFKNNASRPYSVHAHGVLESTTVWPLAAEPGEVVTYQWNIPERSGPGPNDSACVSWIYYSAVDPIKDMYSGLVGPLAICQKGILEPHGGRSDMDREFALLFLIFDENKSWYLEENVATHGSQDPGSINLQDETFLESNKMHAINGKLYANLRGLTMYQGERVAWYMLAMGQDVDLHTIHFHAESFLYRNGENYRADVVDLFPGTFEVVEMVASNPGTWLMHCHVTDHVHAGMETLFTVFSRTEHLSPLTVITKETEKAVPPRDIEEGNVKMLGMQIPIKNVEMLASVLVAISVTLLLVVLALGGVVWYQHRQRKLRRNRRSILDDSFKLLSFKQ

SEQ ID NO: 769805 - protein, 1144 aa, Homo sapiens
MESGHLLWALLFMQSLWPQLTDGATRVYYLGIRDVQWNYAPKGRNVITNQPLDSDIVASSFLKSDKNRIGGTYKKTIYKEYKDDSYTDEVAQPAWLGFLGPVLQAEVGDVILIHLKNFATRPYTIHPHGVFYEKDSEGSLYPDGSSGPLKADDSVPPGGSHIYNWTIPEGHAPTDADPACLTWIYHSHVDAPRDIATGLIGPLITCKRDHDFFLLFSVVDENLSWHLNENIATYCSDPASVDKEDETFQESNRMHAINGFVFGNLPELNMCAQKRVAWHLFGMGNEIDVHTAFFHGQMLTTRGHHTDVANIFPATFVTAEMVPWEPGTWLISCQVNSHFRDGMQALYKVKSCSMAPPVDLLTGKVRQYFIEAHEIQWDYGPMGHDGSTGKNLREPGSISDKFFQKSSSRIGGTYWKVRYEAFQDETFQEKMHLEEDRHLGILGPVIRAEVGDTIQVVFYNRASQPFSMQPHGVFYEKDYEGTVYNDGSSYPGLVAKPFEKVTYRWTVPPHAGPTAQDPACLTWMYFSAADPIRDTNSGLVGPLLVCRAGALGADGKQKGVDKEFFLLFTVLDENKSWYSNANQAAAMLDFRLLSEDIEGFQDSNRMHAINGFLFSNLPRLDMCKGDTVAWHLLGLGTETDVHGVMFQGNTVQLQGMRKGAAMLFPHTFVMAIMQPDNLGTFEIYCQAGSHREAGMRAIYNVSQCPGHQATPRQRYQAARIYYIMAEEVEWDYCPDRSWEREWHNQSEKDSYGYIFLSNKDGLLGSRYKKAVFREYTDGTFRIPRPRTGPEEHLGILGPLIKGEVGDILTVVFKNNASRPYSVHAHGVLESTTVWPLAAEPGEVVTYQWNIPERSGPGPNDSACVSWIYYSAVDPIKDMYSGLVGPLAICQKGILEPHGGRSDMDREFALLFLIFDENKSWYLEENVATHGSQDPGSINLQDETFLESNKMHAINGKLYANLRGLTMYQGERVAWYMLAMGQDVDLHTIHFHAESFLYRNGENYRADVVDLFPGTFEVVEMVASNPGTWLMHCHVTDHVHAGMETLFTVFSRTEHLSPLTVITKETEKAVPPRDIEEGNVKMLGMQIPIKNVEMLASVLVAISVTLLLVVLALGGVVWYQHRQRKLRRNRRSILDDSFKLLSFKQ

SEQ ID NO: 769806 - protein, 1158 aa, Homo sapiens; identical to SEQ ID NO: 769803

SEQ ID NO: 769807 - protein, 1158 aa, Homo sapiens; identical to SEQ ID NO: 769803

SEQ ID NO: 769808 - protein, 100 aa, Homo sapiens
SCLFSPQPEHLSPLTVITKETEKAVPPRDIEEGNVKMLGMQIPIKNVEMLASVLVAISVTLLLVVLALGGVVWYQHRQRKLRRNRRSILDDSFKLLSFKQ

SEQ ID NO: 769809 - protein, 610 aa, Homo sapiens
GRHCPAFGESGGPFGWSASLVWGSPQALSFTGRSSMDPEDEGVAGVMSVGPPAARLQEPVTFRDVAVDFTQEEWGQLDPTQRILYRDVMLETFGHLLSIGPELPKPEVISQLEQGTELWVAERGTTQGCHPAWEPRSESQASRKEEGLPEEEPSHVTGREGFPTDAPYPTTLGKDRECQSQSLALKEQNNLKQLEFGLKEAPVQDQGYKTLRLRENCVLSSSPNPFPEISRGEYLYTYDSQITDSEHNSSLVSQQTGSPGKQPGENSDCHRDSSQAIPITELTKSQVQDKPYKCTDCGKSFNHNAHLTVHKRIHTGERPYMCKECGKAFSQNSSLVQHERIHTGDKPYKCAECGKSFCHSTHLTVHRRIHTGEKPYECQDCGRAFNQNSSLGRHKRTHTGEKPYTCSVCGKSFSRTTCLFLHLRTHTEERPYECNHCGKGFRHSSSLAQHQRKHAGEKPFECRQRLIFEQTPALTKHEWTEALGCDPPLSQDERTHRSDRPFKCNQCGKCFIQSSHLIRHQITHTREEQPHGRSRRREQSSSRNSHLVQHQHPNSRKSSAGGAKAGQPESRALALFDIQKIMQEKNPVHVIGVEEPSVGASMLFDIREST

SEQ ID NO: 769810 - protein, 172 aa, Homo sapiens
GRHCPAFGESGGPFGWSASLVWGSPQALSFTGRSSMDPEDEGVAGVMSVGPPAARLQVTITTITTAAGSGQASPAQTDPFTSRRDESGTAVNALDTWGNSDAGRGVVTVLAGQRGGRDSNQAPGPRMRMLHAALSSPGLGSVIPERIEQAHLLRSAPPRRHPCPFQEGLSSC

SEQ ID NO: 769811 - protein, 559 aa, Homo sapiens
MCVMFQEPVTFRDVAVDFTQEEWGQLDPTQRILYRDVMLETFGHLLSIGPELPKPEVISQLEQGTELWVAERGTTQGCHPAWEPRSESQASRKEEGLPEEEPSHVTGREGFPTDAPYPTTLGKDRECQSQSLALKEQNNLKQLEFGLKEAPVQDQGYKTLRLRENCVLSSSPNPFPEISRGEYLYTYDSQITDSEHNSSLVSQQTGSPGKQPGENSDCHRDSSQAIPITELTKSQVQDKPYKCTDCGKSFNHNAHLTVHKRIHTGERPYMCKECGKAFSQNSSLVQHERIHTGDKPYKCAECGKSFCHSTHLTVHRRIHTGEKPYECQDCGRAFNQNSSLGRHKRTHTGEKPYTCSVCGKSFSRTTCLFLHLRTHTEERPYECNHCGKGFRHSSSLAQHQRKHAGEKPFECRQRLIFEQTPALTKHEWTEALGCDPPLSQDERTHRSDRPFKCNQCGKCFIQSSHLIRHQITHTREEQPHGRSRRREQSSSRNSHLVQHQHPNSRKSSAGGAKAGQPESRALALFDIQKIMQEKNPVHVIGVEEPSVGASMLFDIREST

SEQ ID NO: 769812 - protein, 160 aa, Homo sapiens
LCCNLGALGSVFRPLGVRPLLCWGIRSAPKLPGKHSGGVASKNSGWAAEAAQCTHSCRNNQTGALGGAACRGSRRTYAPQSRRKDRPALSWLTGKLRSDGEPWGIGAYSHLPLQLPCTQNPLGSLQPGALSLPTPWADPPANSTVCGGHRISYSWDPRNT

SEQ ID NO: 769813 - protein, 693 aa, Homo sapiens
MAALGVQSINWQKAFNRQAHHTDKFSSQELILRRGQNFQVLMIMNKGLGSNERLEFIVSTGPYPSESAMTKAVFPLSNGSSGGWSAVLQASNGNTLTISISSPASAPIGRYTMALQIFSQGGISSVKLGTFILLFNPWLNVDSVFMGNHAEREEYVQEDAGIIFVGSTNRIGMIGWNFGQFEEDILSICLSILDRSLNFRRDAATDVASRNDPKYVGRVLSAMINSNDDNGVLAGNWSGTYTGGRDPRSWDGSVEILKNWKKSGFSPVRYGQCWVFAGTLNTALRSLGIPSRVITNFNSAHDTDRNLSVDVYYDPMGNPLDKGSDSVWNFHVWNEGWFVRSDLGPSYGGWQVLDATPQERSQGVFQCGPASVIGVREGDVQLNFDMPFIFAEVNADRITWLYDNTTGKQWKNSVNSHTIGRYISTKAVGSNARMDVTDKYKYPEGSDQERQVFQKALGKLKPNTPFAATSSMGLETEEQEPSIIGKLKVAGMLAVGKEVNLVLLLKNLSRDTKTVTVNMTAWTIIYNGTLVHEVWKDSATMSLDPEEEAEHPIKISYAQYEKYLKSDNMIRITAVCKVPDESEVVVERDIILDNPTLTLEVLNEARVRKPVNVQMLFSNPLDEPVRDCVLMVEGSGLLLGNLKIDVPTLGPKERSRVRFDILPSRSGTKQLLADFSCNKFPAIKAMLSIDVAE

SEQ ID NO: 769814 - protein, 693 aa, Homo sapiens; identical to SEQ ID NO: 769813

SEQ ID NO: 769815 - protein, 76 aa, Homo sapiens
ALANDSRSVRPGGGGALMATAGLSTLRTGLGSGPVARNPPRPCRAERAPRFSYPPLVNPAQRETKARAPGPARPGQ

SEQ ID NO: 769816 - protein, 388 aa, Homo sapiens
MSILKIHARELFDSRGNPTVEVDLFTSEGLFRAAVPSGASTGIYEVLELQDNDKTRYMGKGVSKPVEPINKTIAPVLVSKKLNVTEQEKIDKLMIEMDGTENKSKFGANAILGVSLAACKASAVEKGVPLYHHIADLSGNSKVILPVPVFNVINGSSHAVTKLAMQEFMVLPVGAANFREAMPIGAEVYHSLKNVIKEKYGKDATGVGDGGAFAPNILENKEGLELLKTAIGKAGYTDKVIVSMDVEASEFFRSGKYDLEFKFLDDPTRYISPDCLADLYKSFIKNYPVVSTEDPFDQDDWGAWQKFTASAGIQVVEDDLRVTNPKRTASAVNEKKCNCLLLKVNQIRSVTESLQACKLAQANGWCVMVPHHSGETENTFITDLVVGL

SEQ ID NO: 769817 - protein, 118 aa, Homo sapiens
MSPANSTEALRPANCHDLPMPGHRKSSGRGRCMSKDKEWDTDCYIIKEKDCQIKSLAVNQAWWQIPVIPAIREAEAGDIACTREAEVAVELRPRHGLLPDDKRRIYVSTNNNTLGHWY

SEQ ID NO: 769818 - protein, 271 aa, Homo sapiens
AAAAAAGAFAGRRAACGAVLLTELLERAAFYGITSNLVLFLNGAPFCWEGAQASEALLLFMGLTYLGSPFGGWLADARLGRARAILLSLALYLLGMLAFPLLAAPATRAALCGSARLLNCTAPGPDAAARCCSPATFAGLVLVGLGVATVKANITPFGADQVKDRGPEATRRFFNWFYWSINLGAILSLGGIAYIQQNVSFVTGYAIPTVCVGLAFVVFLCGQSVFITKPPDGSAFTDMFKILTYSCCSQKRSGERQSNGCRQHMFYRVFI

SEQ ID NO: 769819 - protein, 147 aa, Homo sapiens
AAAAAAGAFAGRRAACGAVLLTELLERAAFYGITSNLVLFLNGAPFCWEGAQASEALLLFMGLTYLGSPFGGWLADARLGRARAILLSLALYLLGMLAFPLLAAPATRAALCGSARLLNCTAPGPDVVKQLLITGGILACIMPCCYC

SEQ ID NO: 769820 - protein, 556 aa, Homo sapiens
AAAAAAGAFAGRRAACGAVLLTELLERAAFYGITSNLVLFLNGAPFCWEGAQASEALLLFMGLTYLGSPFGGWLADARLGRARAILLSLALYLLGMLAFPLLAAPATRAALCGSARLLNCTAPGPDAAARCCSPATFAGLVLVGLGVATVKANITPFGADQVKDRGPEATRRFFNWFYWSINLGAILSLGGIAYIQQNVSFVTGYAIPTVCVGLAFVVFLCGQSVFITKPPDGSAFTDMFKILTYSCCSQKRSGERQSNGEGIGVFQQSSKQSLFDSCKMSHGGPFTEEKVEDVKALVKIVPVFLALIPYWTVYFQMQTTYVLQSLHLRIPEISNITTTPHTLPAAWLTMFDAVLILLLIPLKDKLVDPILRRHGLLPSSLKRIAVGMFFVMCSAFAAGILESKRLNLVKEKTINQTIGNVVYHAADLSLWWQVPQYLLIGISEIFASIAGLEFAYSAAPKSMQSAIMGLFFFFSGVGSFVGSGLLALVSIKAIGWMSSHTDFGNINGCYLNYYFFLLAAIQGATLLLFLIISVKYDHHRDHQRSRANGVPTSRRA

SEQ ID NO: 769821 - protein, 537 aa, Homo sapiens
AAAAAAGAFAGRRAACGAVLLTELLERAAFYGITSNLVLFLNGAPFCWEGAQASEALLLFMGLTYLGSPFGGWLADARLGRARAILLSLALYLLGMLAFPLLAAPATRAALCGSARLLNCTAPGPDAAARCCSPATFAGLVLVGLGVATVKANITPFGADQVKDRGPEATRRFFNWFYWSINLGAILSLGGIAYIQQNVSFVTGYAIPTVCVGLAFVVFLCGQSVFITKPPDGSAFTDMFKILTYSCCSQKRSGERQSNGLSHGGPFTEEKVEDVKALVKIVPVFLALIPYWTVYFQMQTTYVLQSLHLRIPEISNITTTPHTLPAAWLTMFDAVLILLLIPLKDKLVDPILRRHGLLPSSLKRIAVGMFFVMCSAFAAGILESKRLNLVKEKTINQTIGNVVYHAADLSLWWQVPQYLLIGISEIFASIAGLEFAYSAAPKSMQSAIMGLFFFFSGVGSFVGSGLLALVSIKAIGWMSSHTDFGNINGCYLNYYFFLLAAIQGATLLLFLIISVKYDHHRDHQRSRANGVPTSRRA

SEQ ID NO: 769822 - protein, 500 aa, Homo sapiens
AAAAAAGAFAGRRAACGAVLLTELLERAAFYGITSNLVLFLNGAPFCWEGAQASEALLLFMGLTYLGSPFGGWLADARLGRARAILLSLALYLLGMLAFPLLAAPATRAALCGSARLLNCTAPGPDAAARCCSPATFAGLVLVGLGVATVKANITPFGADQVKDRGPEATRRFFNWFYWSINLGAILSLGGIAYIQQNVSFVTGYAIPTVCVGLAFVVFLCGQSVFITKPPDGSAFTDMFKILTYSCCSQKRSGERQSNEMQTTYVLQSLHLRIPEISNITTTPHTLPAAWLTMFDAVLILLLIPLKDKLVDPILRRHGLLPSSLKRIAVGMFFVMCSAFAAGILESKRLNLVKEKTINQTIGNVVYHAADLSLWWQVPQYLLIGISEIFASIAGLEFAYSAAPKSMQSAIMGLFFFFSGVGSFVGSGLLALVSIKAIGWMSSHTDFGNINGCYLNYYFFLLAAIQGATLLLFLIISVKYDHHRDHQRSRANGVPTSRRA

SEQ ID NO: 769823 - protein, 512 aa, Homo sapiens
AAAAAAGAFAGRRAACGAVLLTELLERAAFYGITSNLVLFLNGAPFCWEGAQASEALLLFMGLTYLGSPFGGWLADARLGRARAILLSLALYLLGMLAFPLLAAPATRAALCGSARLLNCTAPGPDAAARCCSPATFAGLVLVGLGVATVKANITPFGADQVKDRGPEATRRFFNWFYWSINLGAILSLGGIAYIQQNVSFVTGYAIPTVCVGLAFVVFLCGQSVFITKPPDGSAFTDMFKILTYSCCSQKRSGERQSNGEGIGVFQQSSKQSLFDSCKMSHGGPFTEEKVEDVKALVKIVPVFLALIPYWTVYFQMQTTYVLQSLHLRIPEISNITTTPHTLPAAWLTMFDAVLILLLIPLKDKLVDPILRRHGLLPSSLKRIAVGMFFVMCSAFAAGILESKRLNLVKEKTINQTIGNVVYHAADLSLWWQVPQYLLIGISEIFASIAGLEFAYSAAPKSMQSAIMGLFFFFSGVGSFVGSGLLALVSIKAIGWMSSHTDFGKSQHPVPF

SEQ ID NO: 769824 - protein, 556 aa, Homo sapiens; identical to SEQ ID NO: 769820

SEQ ID NO: 769825 - protein, 240 aa, Homo sapiens
MQTTYVLQSLHLRIPEISNITTTPHTLPAAWLTMFDAVLILLLIPLKDKLVDPILRRHGLLPSSLKRIAVGMFFVMCSAFAAGILESKRLNLVKEKTINQTIGNVVYHAADLSLWWQVPQYLLIGISEIFASIAGLEFAYSAAPKSMQSAIMGLFFFFSGVGSFVGSGLLALVSIKAIGWMSSHTDFGNINGCYLNYYFFLLAAIQGATLLLFLIISVKYDHHRDHQRSRANGVPTSRRA

SEQ ID NO: 769826 - protein, 556 aa, Homo sapiens; identical to SEQ ID NO: 769820

SEQ ID NO: 769827 - protein, 556 aa, Homo sapiens; identical to SEQ ID NO: 769820

SEQ ID NO: 769828 - protein, 512 aa, Homo sapiens; identical to SEQ ID NO: 769823

SEQ ID NO: 769829 - protein, 564 aa, Homo sapiens
AAAAAAGAFAGRRAACGAVLLTELLERAAFYGITSNLVLFLNGAPFCWEGAQASEALLLFMGLTYLGSPFGGWLADARLGRARAILLSLALYLLGMLAFPLLAAPATRAALCGSARLLNCTAPGPDAAARCCSPATFAGLVLVGLGVATVKANITPFGADQVKDRGPEATRRFFNWFYWSINLGAILSLGGIAYIQQNVSFVTGYAIPTVCVGLAFVVFLCGQSVFITKPPDGSAFTDMFKILTYSCCSQKRSGERQSNGEGIGVFQQSSKQSLFDSCKMSHGGPFTEEKVEDVKALVKIVPVFLALIPYWTVYFQMQTTYVLQSLHLRIPEISNITTTPHTLPAAWLTMFDAVLILLLIPLKDKLVDPILRRHGLLPSSLKRIAVGMFFVMCSAFAAGILESKRLNLVKEKTINQTIGNVVYHAADLSLWWQVPQYLLIGISEIFASIAGLEFAYSAAPKSMQSAIMGLFFFFSGVGSFVGSGLLALVSIKAIGWMSSHTDFGDKQASLLIPGAKPALATAQRAAAAATAPYGDVLDRQAPSPRPSSSVFVRQLNLYPKLPFL

SEQ ID NO: 769830 - protein, 60 aa, Homo sapiens
KVARVLPFPHGPPQSLLQRHGGLPPGQGSENWAVNQCSQSQSVSPPSIPGPPGPNTWLLS

SEQ ID NO: 769831 - protein, 210 aa, Homo sapiens
LLGRFISPRARSAFLEAGRTRPGHRTGFAPLAPQSGPRGRATGHCCLLKRHKAPSFLRPRRPNALALADSEHPLRVRTHCSAPGHAPQSAQRPPGRGTARGRPESPAVPVSAAGGRDFPAGPRPLPGPLLYAGPRAGTAVLDRPQPTVLRRPRVGRQQPPSPEAAVPSAGAPRAPRPACAPALRLGTMVQAGGVTGRDATGGTGPSTRTS

SEQ ID NO: 769832 - protein, 70 aa, Homo sapiens
TVRLETSSPQFQGRCRLRAVRGSRADWDSGDVPPTPPPFTLSLQGREQNKDGYIFHLTSEPRLGKRCSPD

SEQ ID NO: 769833 - protein, 62 aa, Homo sapiens
ALWGGPGVSPQTPVGARAAPSDLQDVECGGHPGGGDGTLLFAGARPPVRLAAGDHRDLAWCR

SEQ ID NO: 769834 - protein, 134 aa, Homo sapiens [sequence omitted]

SEQ ID NO: 769835 - protein, 227 aa, Homo sapiens
MSVVPPNRSQTGWPRGVTQFGNKYIQQTKPLTLERTINLYPLTNYTFGTKEPLYEKDSSVAARFQRMREEFDKIGMRRTVEGVLIVHEHRLPHVLLLQLGTTFFKLPGGELNPGEDEVEGLKRLMTEILGRQDGVLQDWVIDDCIGNWWRPNFEPPQYPYIPAHITKPKEHKKLFLVQLQEKALFAVPKNYKLVAAPLFELYDNAPGYGPIISSLPQLLSRFNFIYN

SEQ ID NO: 769836 - protein, 227 aa, Homo sapiens; identical to SEQ ID NO: 769835

SEQ ID NO: 769837 - protein, 227 aa, Homo sapiens; identical to SEQ ID NO: 769835

SEQ ID NO: 769838 - protein, 183 aa, Homo sapiens
  misc_feature (148)..(149): Xaa can be any naturally occurring amino acid
  misc_feature (152)..(153): Xaa can be any naturally occurring amino acid
  misc_feature (158)..(158): Xaa can be any naturally occurring amino acid
  misc_feature (173)..(173): Xaa can be any naturally occurring amino acid
MSVVPPNRSQTGWPRGVTQFGNKYIQQTKPLTLERTINLYPLTNYTFGTKEPLYEKDSSVAARFQRMREEFDKIGMRRTVEGVLIVHEHRLPHVLLLQLGTTFFKLPGGELNPGEDEVEGLKRLMTEILGRQDGVLQDWVIDDCIWVXXVGXXQNFLXPFLQVIPIIIPWEPXFPKRPLREPI

SEQ ID NO: 769839 - protein, 227 aa, Homo sapiens; identical to SEQ ID NO: 769835

SEQ ID NO: 769840 - protein, 227 aa, Homo sapiens; identical to SEQ ID NO: 769835

SEQ ID NO: 769841 - protein, 227 aa, Homo sapiens; identical to SEQ ID NO: 769835

SEQ ID NO: 769842 - protein, 227 aa, Homo sapiens; identical to SEQ ID NO: 769835

SEQ ID NO: 769843 - protein, 86 aa, Homo sapiens
VTLRITLPGPSPHSSVYLIIPAHITKPKEHKKLFLVQLQEKALFAVPKNYKLVAAPLFELYDNAPGYGPIISSLPQLLSRFNFIYN

SEQ ID NO: 769844 - protein, 227 aa, Homo sapiens; identical to SEQ ID NO: 769835

SEQ ID NO: 769845 - protein, 227 aa, Homo sapiens; identical to SEQ ID NO: 769835

SEQ ID NO: 769846 - protein, 227 aa, Homo sapiens; identical to SEQ ID NO: 769835

SEQ ID NO: 769847 - protein, 388 aa, Homo sapiens
TSCPRPLQEGTPGSRAAHALSRRGHRVHELPTSSPGGDTGFMSCPRPFQEGTPGSRAAHVLSRKGPRVHELPTSSPGRDPGSTSCPRPLQEGTRVHELPTSSPGRDPGFTSCPRPLQEGTPGSRAAHALSRKGPRVHELPTSSPGRDPGHELPTPSPGGDPGPRAAHVVSRKGPGSTSCPRPLQEGTRVHELPTRSPGGDTGFTSCPRPLQEGTPGSRAAHVLSRRGHRVHELPTSSPGGDTGFTSCPRPLQEGTPGSRAAHVLSRKGPGSTSCPRPLQEGTPGSRAAHALSRKGPRVQVSCRPTSCLCVNQKKDEEQALLSLQAGFGGGAGSPAAPSLAGHPVLEPQNCRRPAEKGSMMAPRCAALDLPPWTWRQGFSSLARLVSNS

SEQ ID NO: 769848 - protein, 144 aa, Homo sapiens
MTVLEITLAVILTLLGLAILAILLTRWARRKQSEMHISRYSSEQSARLLDYEDGRGSRHAYSTQSDTSCDNRERSKRDYTPSTNSLVSMASKFSLGQTELILLLMCFILALSRSSIGSIKCLQTTEELPSRTAGAMMQFTAPIP

SEQ ID NO: 769849 - protein, 114 aa, Homo sapiens
WRRGSHWCGPGRERRGWFIGSVTVTGTLQLRGSPPASASCVGGTPGPCHCTQLMMLVLEMGVAIPRVECLWGSWGMVVGVINSTEVFIFIKWILIPKQITDVLLLDRRWYGKTG

SEQ ID NO: 769850 - protein, 1279 aa, Homo sapiens
AEPQALPEPRALERLSARWQAGARSPGLGRAERSAGTRRSGPRGSAGAGRQVCRRRAARAQAAPGRGPRSEGRREASEDPRPQSSLCAPVLAWRGAGPAPATRSLVRRRVGGPARRHGLRMPVRRGHVAPQNTFLDTIIRKFEGQSRKFIIANARVENCAVIYCNDGFCELCGYSRAEVMQRPCTCDFLHGPRTQRRAAAQIAQALLGAEERKVEIAFYRKDGSCFLCLVDVVPVKNEDGAVIMFILNFEVVMEKDMVGSPAHDTNHRGPPTSWLAPGRAKTFRLKLPALLALTARESSVRSGGAGGAGAPGAVVVDVDLTPAAPSSESLALDEVTAMDNHVAGLGPAEERRALVGPGSPPRSAPGQLPSPRAHSLNPDASGSSCSLARTRSRESCASVRRASSADDIEAMRAGVLPPPPRHASTGAMHPLRSGLLNSTSDSDLVRYRTISKIPQITLNFVDLKGDPFLASPTSDREIIAPKIKERTHNVTEKVTQVLSLGADVLPEYKLQAPRIHRWTILHYSPFKAVWDWLILLLVIYTAVFTPYSAAFLLKETEEGPPATECGYACQPLAVVDLIVDIMFIVDILINFRTTYVNANEEVVSHPGRIAVHYFKGWFLIDMVAAIPFDLLIFGSGSEELIGLLKTARLLRLVRVARKLDRYSEYGAAVLFLLMCTFALIAHWLACIWYAIGNMEQPHMDSRIGWLHNLGDQIGKPYNSSGLGGPSIKDKYVTALYFTFSSLTSVGFGNVSPNTNSEKIFSICVMLIGSLMYASIFGNVSAIIQRLYSGTARYHTQMLRVREFIRFHQIPNPLRQRLEEYFQHAWSYTNGIDMNAVLKGFPECLQADICLHLNRSLLQHCKPFRGATKGCLRALAMKFKTTHAPPGDTLVHAGDLLTALYFISRGSIEILRGDVVVAILGKNDIFGEPLNLYARPGKSNGDVRALTYCDLHKIHRDDLLEVLDMYPEFSDHFWSSLEITFNLRDTNMIPGSPGSTELEGGFSRQRKRKLSFRRRTDKDTEQPGEVSALGPGRAGAGPSSRGRPGGPWGESPSSGPSSPESSEDEGPGRSSSPLRLVPFSSPRPPGEPPGGEPLMEDCEKSSDTCNPLSGAFSGVSNIFSFWGDSRGRQYQELPRCPAPTPSLLNIPLSSPGRRPRGDVESRLDALQRQLNRLETRLSADMATVLQLLQRQMTLVPPAYSAVTTPGPGPTSTSPLLPVSPLPTLTLDSLSQVSQFMACEELPPGAPELPQEGPTRRLSLPGQLGALTSQPLHRHGSDPGS

SEQ ID NO: 769851 - protein, 1008 aa, Homo sapiens
AEPQALPEPRALERLSARWQAGARSPGLGRAERSAGTRRSGPRGSAGAGRQVCRRRAARAQAAPAAAGGPEGRREASEDPRPQSSLCAPVLAWRGAGPAPATRSLVRRRVGGPARRHGLRMPVRRGHVAPQNTFLDTIIRKFEGQSRKFIIANARVENCAVIYCNDGFCELCGYSRAEVMQRPCTCDFLHGPRTQRRAAAQIAQALLGAEERKVEIAFYRKDGSCFLCLVDVVPVKNEDGAVIMFILNFEVVMEKDMVGSPAHDTNHRGPPTSWLAPGRAKTFRLKLPALLALTARESSVRSGGAGGAGAPGAVVVDVDLTPAAPSSESLALDEVTAMDNHVAGLGPAEERRALVGPGSPPRSAPGQLPSPRAHSLNPDASGSSCSLARTRSRESCASVRRASSADDIEAMRAGVLPPPPRHASTGAMHPLRSGLLNSTSDSDLVRYRTISKIPQITLNFVDLKGDPFLASPTSDREIIAPKIKERTHNVTEKVTQVLSLGADVLPEYKLQAPRIHRWTILHYSPFKAVWDWLILLLVIYTAVFTPYSAAFLLKETEEGPPATECGYACQPLAVVDLIVDIMFIVDILINFRTTYVNANEEVVSHPGRIAVHYFKGWFLIDMVAAIPFDLLIFGSGSEELIGLLKTARLLRLVRVARKLDRYSEYGAAVLFLLMCTFALIAHWLACIWYAIGNMEQPHMDSRIGWLHNLGDQIGKPYNSSGLGGPSIKDKYVTALYFTFSSLTSVGFGNVSPNTNSEKIFSICVMLIGSLMYASIFGNVSAIIQRLYSGTARYHTQMLRVREFIRFHQIPNPLRQRLEEYFQHAWSYTNGIDMNAVLKGFPECLQADICLHLNRSLLQHCKPFRGATKGCLRALAMKFKTTHAPPGDTLVHAGDLLTALYFISRGSIEILRGDVVVAILGMGWGAGTGLEMPSAASRGASLLNMQSLGLWTWDCLQGHWAPLIHLNSGPPSGAMERSPTWGEAAELWGSHILLPFRIRHKQTLFASLK

SEQ ID NO: 769852 - protein, 951 aa, Homo sapiens
AEPQALPEPRALERLSARWQAGARSPGLGRAERSAGTRRSGPRGSAGAGRQVCRRRAARAQAAPAAAGGPEGRREASEDPRPQSSLCAPVLAWRGAGPAPATRSLVRRRVGGPARRHGLRMPVRRGHVAPQNTFLDTIIRKFEGQSRKFIIANARVENCAVIYCNDGFCELCGYSRAEVMQRPCTCDFLHGPRTQRRAAAQIAQALLGAEERKVEIAFYRKDGSCFLCLVDVVPVKNEDGAVIMFILNFEVVMEKDMVVDVDLTPAAPSSESLALDEVTAMDNHVAGLGPAEERRALVGPGSPPRSAPGQLPSPRAHSLNPDASGSSCSLARTRSRESCASVRRASSADDIEAMRAGVLPPPPRHASTGAMHPLRSGLLNSTSDSDLVRYRTISKIPQITLNFVDLKGDPFLASPTSDREIIAPKIKERTHNVTEKVTQVLSLGADVLPEYKLQAPRIHRWTILHYSPFKAVWDWLILLLVIYTAVFTPYSAAFLLKETEEGPPATECGYACQPLAVVDLIVDIMFIVDILINFRTTYVNANEEVVSHPGRIAVHYFKGWFLIDMVAAIPFDLLIFGSGSEELIGLLKTARLLRLVRVARKLDRYSEYGAAVLFLLMCTFALIAHWLACIWYAIGNMEQPHMDSRIGWLHNLGDQIGKPYNSSGLGGPSIKDKYVTALYFTFSSLTSVGFGNVSPNTNSEKIFSICVMLIGSLMYASIFGNVSAIIQRLYSGTARYHTQMLRVREFIRFHQIPNPLRQRLEEYFQHAWSYTNGIDMNAVLKGFPECLQADICLHLNRSLLQHCKPFRGATKGCLRALAMKFKTTHAPPGDTLVHAGDLLTALYFISRGSIEILRGDVVVAILGMGWGAGTGLEMPSAASRGASLLNMQSLGLWTWDCLQGHWAPLIHLNSGPPSGAMERSPTWGEAAELWGSHILLPFRIRHKQTLFASLK

SEQ ID NO: 769853 - protein, 420 aa, Homo sapiens
MAAPAGKASRTGALRPRAQKGRVRRAVRISSLVAQEVLSLGADVLPEYKLQAPRIHRWTILHYSPFKAVWDWLILLLVIYTAVFTPYSAAFLLKETEEGPPATECGYACQPLAVVDLIVDIMFIVDILINFRTTYVNANEEVVSHPGRIAVHYFKGWFLIDMVAAIPFDLLIFGSGSEELIGLLKTARLLRLVRVARKLDRYSEYGAAVLFLLMCTFALIAHWLACIWYAIGNMEQPHMDSRIGWLHNLGDQIGKPYNSSGLGGPSIKDKYVTALYFTFSSLTSVGFGNVSPNTNSEKIFSICVMLIGSLMYASIFGNVSAIIQRLYSGTARYHTQMLRVREFIRFHQIPNPLRQRLEEYFQHAWSYTNGIDMNAVLKGFPECLQADICLHLNRSLLQHCKPFRGATLCCAKLYYCMFFQ

SEQ ID NO: 769854 - protein, 390 aa, Homo sapiens
AEPQALPEPRALERLSARWQAGARSPGLGRAERSAGTRRSGPRGSAGAGRQVCRRRAARAQAAPAAAGGPEGRREASEDPRPQSSLCAPVLAWRGAGPAPATRSLVRRRVGGPARRHGLRMPVRRGHVAPQNTFLDTIIRKFEGQSRKFIIANARVENCAVIYCNDGFCELCGYSRAEVMQRPCTCDFLHGPRTQRRAAAQIAQALLGAEERKVEIAFYRKDGSCFLCLVDVVPVKNEDGAVIMFILNFEVVMEKDMVVDVDLTDPTENQTEKSTWTLRQKLTDQMDKTQWTGTYEDTSKKEADEIDRHGWGNTRGNITENTNIHDRHTETKTTTNEPQRDDTKTSKPQERHISEKYKTGKHMNTTGILYDITQRIKELTTSTDESTEER

SEQ ID NO: 769855 - protein, 58 aa, Homo sapiens
MCPFPVPQLIGLLKTARLLRLVRVARKLDRYSEYGAAVLFLLMCTFALIAHWLACIWY

SEQ ID NO: 769856 - protein, 284 aa, Homo sapiens
AEPQALPEPRALERLSARWQAGARSPGLGRAERSAGTRRSGPRGSAGAGRQVCRRRAARAQAAPAAAGGPEGRREASEDPRPQSSLCAPVLAWRGAGPAPATRSLVRRRVGGPARRHGLRMPVRRGHVAPQNTFLDTIIRKFEGQSRKFIIANARVENCAVIYCNDGFCELCGYSRAEVMQRPCTCDFLHGPRTQRRAAAQIAQALLGAEERKVEIAFYRKDGSCFLCLVDVVPVKNEDGAVIMFILNFEVVMEKDMVGSPAHDTNHRGPPTSWLAPGKCTCFR

SEQ ID NO: 769857 - protein, 819 aa, Homo sapiens
MAAPAGKASRTGALRPRAQKGRVRRAVRISSLVAQEVLSLGADVLPEYKLQAPRIHRWTILHYSPFKAVWDWLILLLVIYTAVFTPYSAAFLLKETEEGPPATECGYACQPLAVVDLIVDIMFIVDILINFRTTYVNANEEVVSHPGRIAVHYFKGWFLIDMVAAIPFDLLIFGSGSEELIGLLKTARLLRLVRVARKLDRYSEYGAAVLFLLMCTFALIAHWLACIWYAIGNMEQPHMDSRIGWLHNLGDQIGKPYNSSGLGGPSIKDKYVTALYFTFSSLTSVGFGNVSPNTNSEKIFSICVMLIGSLMYASIFGNVSAIIQRLYSGTARYHTQMLRVREFIRFHQIPNPLRQRLEEYFQHAWSYTNGIDMNAVLKGFPECLQADICLHLNRSLLQHCKPFRGATKGCLRALAMKFKTTHAPPGDTLVHAGDLLTALYFISRGSIEILRGDVVVAILGKNDIFGEPLNLYARPGKSNGDVRALTYCDLHKIHRDDLLEVLDMYPEFSDHFWSSLEITFNLRDTNMIPGSPGSTELEGGFSRQRKRKLSFRRRTDKDTEQPGEVSALGPGRAGAGPSSRGRPGGPWGESPSSGPSSPESSEDEGPGRSSSPLRLVPFSSPRPPGEPPGGEPLMEDCEKSSDTCNPLSGAFSGVSNIFSFWGDSRGRQYQELPRCPAPTPSLLNIPLSSPGRRPRGDVESRLDALQRQLNRLETRLSADMATVLQLLQRQMTLVPPAYSAVTTPGPGPTSTSPLLPVSPLPTLTLDSLSQVSQFMACEELPPGAPELPQEGPTRRLSLPGQLGALTSQPLHRHGSDPGS

SEQ ID NO: 769858 - protein, 367 aa, Homo sapiens
MAAPAGKASRTGALRPRAQKGRVRRAVRISSLVAQEVLSLGADVLPEYKLQAPRIHRWTILHYSPFKAVWDWLILLLVIYTAVFTPYSAAFLLKETEEGPPATECGYACQPLAVVDLIVDIMFIVDILINFRTTYVNANEEVVSHPGRIAVHYFKGWFLIDMVAAIPFDLLIFGSGSEELIGLLKTARLLRLVRVARKLDRYSEYGAAVLFLLMCTFALIAHWLACIWYAIGNMEQPHMDSRIGWLHNLGDQIGKPYNSSGLGGPSIKDKYVTALYFTFSSLTSVGFGNVSPNTNSEKIFSICVMLIGSLMYASIFGNVSAIIQRLYSGTARYHTQMLRVREFIRFHQPHLPASPSPASTQHSSNTS

SEQ ID NO: 769859 - protein, 69 aa, Homo sapiens
LKLGLEPLFDNGEKCSSVYRVWAILRGTDSNCMAFIVLICLWETGIFSRKNRPDLELFQLEILGNRRIT

SEQ ID NO: 769860 - protein, 260 aa, Homo sapiens
VIGEGLWEGGGRQGGGGAREGKVEPEGRRRDLRRGDFYRKLLPVLDPSGDYYYWWLNTMVFPVMYNLIILVCRACFPDLQHGYLVAWLVLDYTSDLLYLLDMVVRFHTGFLEQGILVVDKGRISSRYVRTWSFFLDLASLMPTDVVYVRLGPHTPTLRLNRFLRAPRLFEAFDRTETRTAYPNAFRIAKLMLYIFVVIHWNSCLYFALSRYLGFGRDAWVYPDPAQPGFERLRRQYLYSFYFSTLILTTVGDTPPPAREE

SEQ ID NO: 769861 - protein, 152 aa, Homo sapiens [sequence omitted]

SEQ ID NO: 769862 - protein, 85 aa, Homo sapiens
QRGARVLWTPKEFNSDWPAEGRDRKGVSMQACRFYKMASSLVKTAQKACLRNRPAADTPRSEGTGDHGKASKMTSLAGGTRQSSR

SEQ ID NO: 769863 - protein, 496 aa, Homo sapiens
MVEADHPGKLFIGGLNRETNEKMLKAVFGKHGPISEVLLIKDRTSKSRGFAFITFENPADAKNAAKDMNGKSLHGKAIKVEQAKKPSFQSGGRRRPPASSRNRSPSGSLRSARGSRGGTRGWLPSHEGHLDDGGYTPDLKMSYSRGLIPVKRGPSSRSGGPPPKKSAPSAVARSNSWMGSQGPMSQRRENYGVPPRRATISSWRNDRMSTRHDGYATNDGNHPSCQETRDYAPPSRGYAYRDNGHSNRDEHSSRGYRNHRSSRETRDYAPPSRGHAYRDYGHSRRDESYSRGYRNRRSSRETREYAPPSRGHGYRDYGHSRRHESYSRGYRNHPSSRETRDYAPPHRDYAYRDYGHSSWDEHSSRGYSYHDGYGEALGRDHSEHLSGSSYRDALQRYGTSHGAPPARGPRMSYGGSTCHAYSNTRDRYGRSWESYSSCGDFHYCDREHVCRKDQRNPPSLGRVLPDPREACGSSSYVASIVDGGESRSEKGDSSRY

SEQ ID NO: 769864 - protein, 760 aa, Homo sapiens
MMDQARSAFSNLFGGEPLSYTRFSLARQVDGDNSHVEMKLAVDEEENADNNTKANVTKPKRCSGSICYGTIAVIVFFLIGFMIGYLGYCKGVEPKTECERLAGTESPVREEPGEDFPAARRLYWDDLKRKLSEKLDSTDFTSTIKLLNENSYVPREAGSQKDENLALYVENQFREFKLSKVWRDQHFVKIQVKDSAQNSVIIVDKNGRLVYLVENPGGYVAYSKAATVTGKLVHANFGTKKDFEDLYTPVNGSIVIVRAGKITFAEKVANAESLNAIGVLIYMDQTKFPIVNAELSFFGHAHLGTGDPYTPGFPSFNHTQFPPSRSSGLPNIPVQTISRAAAEKLFGNMEGDCPSDWKTDSTCRMVTSESKNVKLTVSNVLKEIKILNIFGVIKGFVEPDHYVVVGAQRDAWGPGAAKSGVGTALLLKLAQMFSDMVLKDGFQPSRSIIFASWSAGDFGSVGATEWLEGYLSSLHLKAFTYINLDKAVLGTSNFKVSASPLLYTLIEKTMQNVKHPVTGQFLYQDSNWASKVEKLTLDNAAFPFLAYSGIPAVSFCFCEDTDYPYLGTTMDTYKELIERIPELNKVARAAAEVAGQFVIKLTHDVELNLDYERYNSQLLSFVRDLNQYRADIKEMGLSLQWLYSARGDFFRATSRLTTDFGNAEKTDRFVMKKLNDRVMRVEYHFLSPYVSPKESPFRHVFWGSGSHTLPALLENLKLRKQNNGAFNETLFRNQLALATWTIQGAANALSGDVWDIDNEF

SEQ ID NO: 769865 - protein, 760 aa, Homo sapiens; identical to SEQ ID NO: 769864

SEQ ID NO: 769866 - protein, 760 aa, Homo sapiens; identical to SEQ ID NO: 769864

SEQ ID NO: 769867 - protein, 760 aa, Homo sapiens; identical to SEQ ID NO: 769864

SEQ ID NO: 769868 - protein, 760 aa, Homo sapiens; identical to SEQ ID NO: 769864

SEQ ID NO: 769869 - protein, 760 aa, Homo sapiens; identical to SEQ ID NO: 769864

SEQ ID NO: 769870 - protein, 760 aa, Homo sapiens; identical to SEQ ID NO: 769864

SEQ ID NO: 769871 - protein, 760 aa, Homo sapiens; identical to SEQ ID NO: 769864

SEQ ID NO: 769872 - protein, 760 aa, Homo sapiens; identical to SEQ ID NO: 769864

SEQ ID NO: 769873 - protein, 760 aa, Homo sapiens; identical to SEQ ID NO: 769864

SEQ ID NO: 769874 - protein, 760 aa, Homo sapiens; identical to SEQ ID NO: 769864

SEQ ID NO: 769875 - protein, 691 aa, Homo sapiens
MMDQARSAFSNLFGGEPLSYTRFSLARQVDGDNSHVEMKLAVDEEENADNNTKANVTKPKRCSGSICYGTIAVIVFFLIGFMIGYLGYCKGVEPKTECERLAGTESPVREEPGEDFPAARRLYWDDLKRKLSEKLDSTDFTSTIKLLNENSYVPREAGSQKDENLALYVENQFREFKLSKVWRDQHFVKIQVKDSAQNSVIIVDKNGRLVYLVENPGGYVAYSKAATVTGKLVHANFGTKKDFEDLYTPVNGSIVIVRAGKITFAEKVANAESLNAIGVLIYMDQTKFPIVNAELSFFGHAHLGTGDPYTPGFPSFNHTQFPPSRSSGLPNIPVQTISRAAAEKLFGNMEGDCPSDWKTDSTCRMVTSESKNVKLTVSNVLKEIKILNIFGVIKGFVEPDHYVVVGAQRDAWGPGAAKSGVGTALLLKLAQMFSDMVLKDGFQPSRSIIFASWSAGDFGSVGATEWLEGYLSSLHLKAFTYINLDKAVLGTSNFKVSASPLLYTLIEKTMQNVKHPVTGQFLYQDSNWASKVEKLTLDNAAFPFLAYSGIPAVSFCFCEDTDYPYLGTTMDTYKELIERIPELNKVARAAAEVAGQFVIKLTHDVELNLDYERYNSQLLSFVRDLNQYRADIKEMGLSLQWLYSARGDFFRATSRLTTDFGNAEKTDRFVMKKLNDRVMRVGDGENWRVIV

SEQ ID NO: 769876 - protein, 479 aa, Homo sapiens
MMDQARSAFSNLFGGEPLSYTRFSLARQVDGDNSHVEMKLAVDEEENADNNTKANVTKPKRCSGSICYGTIAVIVFFLIGFMIGYLGYCKGVEPKTECERLAGTESPVREEPGEDFPAARRLYWDDLKRKLSEKLDSTDFTSTIKLLNENSYVPREAGSQKDENLALYVENQFREFKLSKVWRDQHFVKIQVKDSAQNSVIIVDKNGRLVYLVENPGGYVAYSKAATVTGKLVHANFGTKKDFEDLYTPVNGSIVIVRAGKITFAEKVANAESLNAIGVLIYMDQTKFPIVNAELSFFGHAHLGTGDPYTPGFPSFNHTQFPPSRSSGLPNIPVQTISRAAAEKLFGNMEGDCPSDWKTDSTCRMVTSESKNVKLTVSNVLKEIKILNIFGVIKGFVEPDHYVVVGAQRDAWGPGAAKSGVGTALLLKLAQMFSDMVLKGRVQILILLNIGALHTVLDVILCFAHFACIPVVLMLDSSS

SEQ ID NO: 769877 - protein, 564 aa, Homo sapiens
MMDQARSAFSNLFGGEPLSYTRFSLARQVDGDNSHVEMKLAVDEEENADNNTKANVTKPKRCSGSICYGTIAVIVFFLIGFMIGYLGYCKGVEPKTECERLAGTESPVREEPGEDFPAARRLYWDDLKRKLSEKLDSTDFTSTIKLLNENSYVPREAGSQKDENLALYVENQFREFKLSKVWRDQHFVKIQVKDSAQNSVIIVDKNGRLVYLVENPGGYVAYSKAATVTGKLVHANFGTKKDFEDLYTPVNGSIVIVRAGKITFAEKVANAESLNAIGVLIYMDQTKFPIVNAELSFFGHAHLGTGDPYTPGFPSFNHTQFPPSRSSGLPNIPVQTISRAAAEKLFGNMEGDCPSDWKTDSTCRMVTSESKNVKLTVSNVLKEIKILNIFGVIKGFVEPDHYVVVGAQRDAWGPGAAKSGVGTALLLKLAQMFSDMVLKDGFQPSRSIIFASWSAGDFGSVGATEWLEGYLSSLHLKAFTYINLDKAVLGTSNFKVSASPLLYTLIEKTMQNVKHPVTGQFLYQDSNWASKVEKLTLDNAAFPFLAYSGIPAVSFCFCEVSLFI

SEQ ID NO: 769878 - protein, 347 aa, Homo sapiens
MMDQARSAFSNLFGGEPLSYTRFSLARQVDGDNSHVEMKLAVDEEENADNNTKANVTKPKRCSGSICYGTIAVIVFFLIGFMIGYLGYCKGVEPKTECERLAGTESPVREEPGEDFPAARRLYWDDLKRKLSEKLDSTDFTSTIKLLNENSYVPREAGSQKDENLALYVENQFREFKLSKVWRDQHFVKIQVKDSAQNSVIIVDKNGRLVYLVENPGGYVAYSKAATVTGKLVHANFGTKKDFEDLYTPVNGSIVIVRAGKITFAEKVANAESLNAIGVLIYMDQTKFPIVNAELSFFGHAHLGTGDPYTPGFPSFNHTQFPPSRSSGLPNIPVQTISRAAAEKLFG

SEQ ID NO: 769879 - protein, 145 aa, Homo sapiens
MMDQARSAFSNLFGGEPLSYTRFSLARQVDGDNSHVEMKLAVDEEENADNNTKANVTKPKRCSGSICYGTIAVIVFFLIGFMIGYLGYCKGVEPKTECERLAGTESPVREEPGEDFPAARRLYWDDLKRKLSEKLDSTDFTSTIK

SEQ ID NO: 769880 - protein, 760 aa, Homo sapiens; identical to SEQ ID NO: 769864

SEQ ID NO: 769881 - protein, 760 aa, Homo sapiens; identical to SEQ ID NO: 769864

SEQ ID NO: 769882 - protein, 760 aa, Homo sapiens; identical to SEQ ID NO: 769864

SEQ ID NO: 769883 - protein, 744 aa, Homo sapiens
LVLACGSCLARQVDGDNSHVEMKLAVDEEENADNNTKANVTKPKRCSGSICYGTIAVIVFFLIGFMIGYLGYCKGVEPKTECERLAGTESPVREEPGEDFPAARRLYWDDLKRKLSEKLDSTDFTSTIKLLNENSYVPREAGSQKDENLALYVENQFREFKLSKVWRDQHFVKIQVKDSAQNSVIIVDKNGRLVYLVENPGGYVAYSKAATVTGKLVHANFGTKKDFEDLYTPVNGSIVIVRAGKITFAEKVANAESLNAIGVLIYMDQTKFPIVNAELSFFGHAHLGTGDPYTPGFPSFNHTQFPPSRSSGLPNIPVQTISRAAAEKLFGNMEGDCPSDWKTDSTCRMVTSESKNVKLTVSNVLKEIKILNIFGVIKGFVEPDHYVVVGAQRDAWGPGAAKSGVGTALLLKLAQMFSDMVLKDGFQPSRSIIFASWSAGDFGSVGATEWLEGYLSSLHLKAFTYINLDKAVLGTSNFKVSASPLLYTLIEKTMQNVKHPVTGQFLYQDSNWASKVEKLTLDNAAFPFLAYSGIPAVSFCFCEDTDYPYLGTTMDTYKELIERIPELNKVARAAAEVAGQFVIKLTHDVELNLDYERYNSQLLSFVRDLNQYRADIKEMGLSLQWLYSARGDFFRATSRLTTDFGNAEKTDRFVMKKLNDRVMRVEYHFLSPYVSPKESPFRHVFWGSGSHTLPALLENLKLRKQNNGAFNETLFRNQLALATWTIQGAANALSGDVWDIDNEF

SEQ ID NO: 769884 - protein, 98 aa, Homo sapiens
RTRDQTDGHEETQWSVMRVEYHFLSPYVSPKESPFRHVFWGSGSHTLPALLENLKLRKQNNGAFNETLFRNQLALATWTIQGAANALSGDVWDIDNEF

SEQ ID NO: 769885 - protein, 760 aa, Homo sapiens; identical to SEQ ID NO: 769864

SEQ ID NO: 769886 - protein, 760 aa, Homo sapiens; identical to SEQ ID NO: 769864

SEQ ID NO: 769887 - protein, 760 aa, Homo sapiens; identical to SEQ ID NO: 769864

SEQ ID NO: 769888 - protein, 760 aa, Homo sapiens; identical to SEQ ID NO: 769864

SEQ ID NO: 769889 - protein, 760 aa, Homo sapiens; identical to SEQ ID NO: 769864

SEQ ID NO: 769890 - protein, 684 aa, Homo sapiens
MMDQARSAFSNLFGGEPLSYTRFSLARQVDGDNSHVEMKLAVDEEENADNNTKANVTKPKRCSGSICYGTIAVIVFFLIGFMIGYLGYCKGVEPKTECERLAGTESPVREEPGEDFPAARRLYWDDLKRKLSEKLDSTDFTSTIKLLNENSYVPREAGSQKDENLALYVENQFREFKLSKVWRDQHFVKIQVKDSAQNSVIIVDKNGRLVYLVENPGGYVAYSKAATVTGKLVHANFGTKKDFEDLYTPVNGSIVIVRAGKITFAEKVANAESLNAIGVLIYMDQTKFPIVNAELSFFGHAHLGTGDPYTPGFPSFNHTQFPPSRSSGLPNIPVQTISRAAAEKLFGNMEGDCPSDWKTDSTCRMVTSESKNVKLTVSNVLKEIKILNIFGVIKGFVEPDHYVVVGAQRDAWGPGAAKSGVGTALLLKLAQMFSDMVLKDGFQPSRSIIFASWSAGDFGSVGATEWLEGYLSSLHLKAFTYINLDKAVLGTSNFKVSASPLLYTLIEKTMQNVKHPVTGQFLYQDSNWASKVEKLTLDNAAFPFLAYSGIPAVSFCFCEDTDYPYLGTTMDTYKELIERIPELNKVARAAAEVAGQFVIKLTHDVELNLDYERYNSQLLSFVRDLNQYRADIKEMGLSLQWLYSARGDFFRATSRLTTDFGNAEKTDRFVMKKLNDRVMREGHR

SEQ ID NO: 769891 - protein, 652 aa, Homo sapiens
MMDQARSAFSNLFGGEPLSYTRFSLARQVDGDNSHVEMKLAVDEEENADNNTKANVTKPKRCSGSICYGTIAVIVFFLIGFMIGYLGYCKGVEPKTECERLAGTESPVREEPGEDFPAARRLYWDDLKRKLSEKLDSTDFTSTIKLLNENSYVPREAGSQKDENLALYVENQFREFKLSKVWRDQHFVKIQVKDSAQNSVIIVDKNGRLVYLVENPGGYVAYSKAATVTGKLVHANFGTKKDFEDLYTPVNGSIVIVRAGKITFAEKVANAESLNAIGVLIYMDQTKFPIVNAELSFFGHAHLGTGDPYTPGFPSFNHTQFPPSRSSGLPNIPVQTISRAAAEKLFGNMEGDCPSDWKTDSTCRMVTSESKNVKLTVSNVLKEIKILNIFGVIKGFVEPDHYVVVGAQRDAWGPGAAKSGVGTALLLKLAQMFSDMVLKDGFQPSRSIIFASWSAGDFGSVGATEWLEGYLSSLHLKAFTYINLDKAVLGTSNFKVSASPLLYTLIEKTMQNVKHPVTGQFLYQDSNWASKVEKLTLDNAAFPFLAYSGIPAVSFCFCEDTDYPYLGTTMDTYKELIERIPELNKVARAAAEVAGQFVIKLTHDVELNLDYERYNSQLLSFVRDLNQYRADIKVSTDSNYVFILLNVKYFEM

SEQ ID NO: 769892 - protein, 533 aa, Homo sapiens
MMDQARSAFSNLFGGEPLSYTRFSLARQVDGDNSHVEMKLAVDEEENADNNTKANVTKPKRCSGSICYGTIAVIVFFLIGFMIGYLGYCKGVEPKTECERLAGTESPVREEPGEDFPAARRLYWDDLKRKLSEKLDSTDFTSTIKLLNENSYVPREAGSQKDENLALYVENQFREFKLSKVWRDQHFVKIQVKDSAQNSVIIVDKNGRLVYLVENPGGYVAYSKAATVTGKLVHANFGTKKDFEDLYTPVNGSIVIVRAGKITFAEKVANAESLNAIGVLIYMDQTKFPIVNAELSFFGHAHLGTGDPYTPGFPSFNHTQFPPSRSSGLPNIPVQTISRAAAEKLFGNMEGDCPSDWKTDSTCRMVTSESKNVKLTVSNVLKEIKILNIFGVIKGFVEPDHYVVVGAQRDAWGPGAAKSGVGTALLLKLAQMFSDMVLKDGFQPSRSIIFASWSAGDFGSVGATEWLEGYLSSLHLKAFTYINLDKAVLGTSNFKVSASPLLYTLIEKTMQNVKHPVTGRRRGREFSSSSRRR

SEQ ID NO: 769893 - protein, 133 aa, Homo sapiens [sequence omitted]

SEQ ID NO: 769894 - protein, 1948 aa, Homo sapiens
SGRQRGAEWRLILLAGSEESNPPAPHSCPAPWLAQQGSSADSLSQPSPQGGGIGDTGKGKHWGGGAGESQIPREAMEPSSPQDEGLRKKQPKKPVPEILPRPPRALFCLTLENPLRKACISIVEWKPFETIILLTIFANCVALAVYLPMPEDDNNSLNLGLEKLEYFFLIVFSIEAAMKIIAYGFLFHQDAYLRSGWNVLDFTIVFLGVFTVILEQVNVIQSHTAPMSSKGAGLDVKALRAFRVLRPLRLVSGVPSLQVVLNSIFKAMLPLFHIALLVLFMVIIYAIIGLELFKGKMHKTCYFIGTDIVATVENEEPSPCARTGSGRRCTINGSECRGGCPGPNHGITHFDNFGFSMLTVYQCITMEGWTDVLYWVNDAIGNEWPWIYFVTLILLGSFFILNLVLGVLSGEFTKEREKAKSRGTFQKLREKQQLDEDLRGYMSWITQGEVMDVEDFREGKLSLDEGGSDTESLYEIAGLNKIIQFIRHWRQWNRIFRWKCHDIVKSKVFYWLVILIVALNTLSIASEHHNQPHWLTRLQDIANRVLLSLFTTEMLMKMYGLGLRQYFMSIFNRFDCFVVCSGILEILLVESGAMTPLGISVLRCIRLLRIFKITKYWTSLSNLVASLLNSIRSIASLLLLLFLFIVIFRLLGMQLFGGRYDFEDTEVRRSNFDNFPQALISVFQVLTGEDWTSMMYNGIMASSGPSYPGMLVCIYFIILFVCGNYILLNVFLAIAVDNLAEAESLTSAQKAKAEEKKRRKMSKGLPDKSEEEKSTMAKKLEQKPKGEGIPTTAKLKIDEFESNVNEVKDPYPSADFPGDDEEDEPEIPLSPRPRPLAELQLKEKAVPIPEASSFFIFSPTNKIRVLCHRIVNATWFTNFILLFILLSSAALAAEDPIRADSMRNQILKHFDIGFTSVFTVEIVLKMTTYGAFLHKGSFCRNYFNMLDLLVVAVSLISMGLESSAISVVKILRVLRVLRPLRAINRAKGLKHVARCMFVAISTIGNIVLVTTLLQFMFACIGVQLFKGKFFRCTDLSKMTEEECRGYYYVYKDGDPMQIELRHREWVHSDFHFDNVLSAMMSLFTVSTFEGWPQLLYKAIDSNAEDVGPIYNNRVEMAIFFIIYIILIAFFMMNIFVGFVIVTFQEQGETEYKNCELDKNQRQCVQYALKARPLRCYIPKNPYQYQVWYIVTSSYFEYLMFALIMLNTICLGMQHYNQSEQMNHISDILNVAFTIIFTLEMILKLMAFKARGYFGNPWNVFDFLIVIGSIIDVILSEIDTFLASSGGLYCLGGGCGNVDPDESARISSAFFRLFRVMRLIKLLSRAEGVRTLLWTFIKSFQALPYVALLIVMLFFIYAVIGMQMFGKIALVDGTQINRNNNFQTFPQAVLLLFRCATGEAWQEILLACSYGKLCDPESDYAPGEEYTCGTNFAYYYFISFYMLCAFLVINLFVAVIMDNFDYLTRDWSILGPHHLDEFKAIWAEYDPEAKGRIKHLDVVTLLRRIQPPLGFGKFCPHRVACKRLVGMNMPLNSDGTVTFNATLFALVRTALKIKTEGNFEQANEELRAIIKKIWKRTSMKLLDQVIPPIGDDEVTVGKFYATFLIQEHFRKFMKRQEEYYGYRPKKDIVQIQAGLRTIEEEAAPEICRTVSGDLAAEEELERAMVEAAMEEGIFRRTGGLFGQVDNFLERTNSLPPVMANQRPLQFAEIEMEEMESPVFLEDFPQDPRTNPLARANTNNANANVAYANSNHSNSHVFSSVHYEREFPEETETPATRGRALGQPCRSLGPHSKPCVEMLKGLLTQRAMPRGQAPPAPCQCPRVESSMPEDRKSSTPGSLHEETPHSRSTRENTSRCSAPATALLIQKALVRGGLGTLAADANFIMATGQALADACQMEPEEVEIMATELLKGREAPEGMASSLGCLNLGSSLGSLDQHQGSQETLIPPRL

SEQ ID NO: 769895 - protein, 906 aa, Homo sapiens
CCYYYQPCSSPHPMQIELRHREWVHSDFHFDNVLSAMMSLFTVSTFEGWPQLLYKAIDSNAEDVGPIYNNRVEMAIFFIIYIILIAFFMMNIFVGFVIVTFQEQGETEYKNCELDKNQRQCVQYALKARPLRCYIPKNPYQYQVWYIVTSSYFEYLMFALIMLNTICLGMQHYNQSEQMNHISDILNVAFTIIFTLEMILKLMAFKARGYFGNPWNVFDFLIVIGSIIDVILSEIDTFLASSGGLYCLGGGCGNVDPDESARISSAFFRLFRVMRLIKLLSRAEGVRTLLWTFIKSFQALPYVALLIVMLFFIYAVIGMQMFGKIALVDGTQINRNNNFQTFPQAVLLLFRCATGEAWQEILLACSYGKLCDPESDYAPGEEYTCGTNFAYYYFISFYMLCAFLVINLFVAVIMDNFDYLTRDWSILGPHHLDEFKAIWAEYDPEAKGRIKHLDVVTLLRRIQPPLGFGKFCPHRVACKRLVGMNMPLNSDGTVTFNATLFALVRTALKIKTEGNFEQANEELRAIIKKIWKRTSMKLLDQVIPPIGDDEVTVGKFYATFLIQEHFRKFMKRQEEYYGYRPKKDIVQIQAGLRTIEEEAAPEICRTVSGDLAAEEELERAMVEAAMEEGIFRRTGGLFGQVDNFLERTNSLPPVMANQRPLQFAEIEMEEMESPVFLEDFPQDPRTNPLARANTNNANANVAYANSNHSNSHVFSSVHYEREFPEETETPATRGRALGQPCRSLGPHSKPCVEMLKGLLTQRAMPRGQAPPAPCQCPRVESSMPEDRKSSTPGSLHEETPHSRSTRENTSRCSAPATALLIQKALVRGGLGTLAADANFIMATGQALADACQMEPEEVEIMATELLKGREAPEGMASSLGCLNLGSSLGSLDQHQGSQETLIPPRL

SEQ ID NO: 769896 - protein, 80 aa, Homo sapiens
DRGSLNGREEFVVLRRQNLLETSSPEFARYPLSKTAGGAFQGAGRGKLLAPRLLLCMAGNLVPGLPLTLFKSSTGSCMHC

SEQ ID NO: 769897 - protein, 109 aa, Homo sapiens
LDLARALVCHSLHHALLLPDTAPRGQVRLAQHFHLCSSHPAASPHRLHTCPAPEEVNLVMAYVKTVSRWFPPGIPALWEAKTGGSLEPTGLRPAWATWQNPVSIKNTKH

SEQ ID NO: 769898 - protein, 133 aa, Homo sapiens
MVVEVVVVMVVVVVIVVEMVVVMVEEVVVVMVAVAVVIVMEVTMVIVVVVVVVMVVEVVMVMVVVELVMVMVVVAVVIVIEVVMVMVAVAVVIVMEVAIVIVMMVVVVMVVEVVMVMVVVAVVIVMEVMMVMV

SEQ ID NO: 769899 - protein, 84 aa, Homo sapiens
KLSSVGGKRKTVESTEPWTVTQRMSTRSSLLCHSAQHDVNSTADRCSQEDRSPSTNSHQRKLFPRTQYVGPLTLHTAHDAEVQC

SEQ ID NO: 769900 - protein, 134 aa, Homo sapiens
WEVKGHSPVWRPFLLKLRLGTCGTCCSHEGRAAAWSAESSLQHSAVVTMSLPLNPKPFLNGLTGKPVMVKLKWGMEYKGYLVSVDGYMNMQLANTEEYIDGALSGHLGEVLIRCNNVLYIRGVEEEEEDGEMRE

SEQ ID NO: 769901 - protein, 130 aa, Homo sapiens
KKKTKKKIVLLKLRLGTCGTCCSHEGRAAAWSAESSLQHSAVVTMSLPLNPKPFLNGLTGKPVMVKLKWGMEYKGYLVSVDGYMNMQLANTEEYIDGALSGHLGEVLIRCNNVLYIRGVEEEEEDGEMRE

SEQ ID NO: 769902 - protein, 130 aa, Homo sapiens; identical to SEQ ID NO: 769901

SEQ ID NO: 769903 - protein, 130 aa, Homo sapiens; identical to SEQ ID NO: 769901

SEQ ID NO: 769904 - protein, 111 aa, Homo sapiens
KKKTKKKIVLLKLRLGTCGTCCSHEGRAAAWSAESSLQHSAVVTMSLPLNPKPFLNGLTGKPVMVKLKWGMEYKGYLVSVDGYMNMQIFIYILGILKQSKILLFQLSEDLK

SEQ ID NO: 769905 - protein, 134 aa, Homo sapiens; identical to SEQ ID NO: 769900

SEQ ID NO: 769906 - protein, 89 aa, Homo sapiens
ARYEAVVVPTQTFLNGLTGKPVMVKLKWGMEYKGYLVSVDGYMNMQLANTEEYIDGALSGHLGEVLIRCNNVLYIRGVEEEEEDGEMRE

SEQ ID NO: 769907 - protein, 130 aa, Homo sapiens; identical to SEQ ID NO: 769901

SEQ ID NO: 769908 - protein, 130 aa, Homo sapiens; identical to SEQ ID NO: 769901

SEQ ID NO: 769909 - protein, 171 aa, Homo sapiens
KKKTKKKIVLLKLRLGTCGTCCSHEGRAAAWSAESSLQHSAVVTMSLPLNPKPFLNGLTGKPVMVKLKWGMEYKGYLVSVDGYMNMQIFIYILGILKQNGVSLSSPRLECNGMISAHCNLCLPGSSDSPASASRVAGITARTSRTLTKRSGAVEILALFLILGGKHSVFYH

SEQ ID NO: 769910 - protein, 951 aa, Homo sapiens [sequence omitted]

SEQ ID NO: 769911 - protein, 951 aa, Homo sapiens [sequence omitted]

SEQ ID NO: 769912 - protein, 1005 aa, Homo sapiens
MYGASGGRAKPERKSGAKEEAGPGGAGGGGSRVELLVFGYACKLFRDDERALAQEQGQHLIPWMGDHKILIDRYDGRGHLHDLSEYDAEYSTWNRDYQLSEEEARIEALCDEERYLALHTDLLEEEARQEEEYKRLSEALAEDGSYNAVGFTYGSDYYDPSEPTEEEEPSKQREKNEAENLEENEEPFVAPLGLSVPSDVELPPTAKMHAIIERTASFVCRQGAQFEIMLKAKQARNSQFDFLRFDHYLNPYYKFIQKAMKEGRYTVLAENKSDEKKKSGVSSDNEDDDDEEDGNYLHPSLFASKKCNRLEELMKPLKVVDPDHPLAALVRKAQADSSTPTPHNADGAPVQPSQVEYTADSTVAAMYYSYYMLPDGTYCLAPPPPGIDVTTYYSTLPAGVTVSNSPGVTTTAPPPPGTTPPPPPTTAETSSGATSTTTTTSALAPVAAIIPPPPDVQPVIDKLAEYVARNGLKFETSVRAKNDQRFEFLQPWHQYNAYYEFKKQFFLQKEGGDSMQAVSAPEEAPTDSAPEKPSDAGEDGAPEDAAEVGARAGSGGKKEASSSKTVPDGKLVKASFAPISFAIKAKENDLLPLEKNRVKLDDDSDDDEESKEGQESSSSAANTNPAVAPPCVVVEEKKPQLTQEELEAKQAKQKLEDRLAAAAREKLAQASKESKEKQLQAERKRKAALFLQTLKNPLPEAEAGKIEESPFSVEESSTTPCPLLTGGRPLPTLEVKPPDRPSSKSKDPPREEEKEKKKKKHKKRSRTRSRSPKYHSSSKSRSRSHSKAKHSLPSAYRTVRRSRSVTASPGTLRAEPCQSSASVTAAAEPGSYQAASTTNRFDSRELYKRENLVKRQRSRSRSPRRRAHSPERRREERSVPTAYRVSRSPGASRKRTRSRSPHEKKKKRRSRSRTKSKARSQSVSPSKQAAPRPAAPAAHSAHSASVSPVESRGSSQERSRGVSQEKEAQISSAIVSSVQSKITQDLMAKVRAMLAASKNLQTSAS

SEQ ID NO: 769913 - protein, 783 aa, Homo sapiens
MYGASGGRAKPERKSGAKEEAGPGGAGGGGSRVELLVFGYACKLFRDDERALAQEQGQHLIPWMGDHKILIDRYDGRGHLHDLSEYDAEYSTWNRDYQLSEEEARIEALCDEERYLALHTDLLEEEARQEEEYKRLSEALAEDGSYNAVGFTYGSDYYDPSEPTEEEEPSKQREKNEAENLEENEEPFVAPLGLSVPSDVELPPTAKMHAIIERTASFVCRQGAQFEIMLKAKQARNSQFDFLRFDHYLNPYYKFIQKAMKEGRYTVLAENKSDEKKKSGVSSDNEDDDDEEDGNYLHPSLFASKKCNRLEELMKPLKVVDPDHPLAALVRKAQADSSTPTPHNADGAPVQPSQVEYTADSTVAAMYYSYYMLPDGTYCLAPPPPGIDVTTYYSTLPAGVTVSNSPGVTTTAPPPPGTTPPPPPTTAETSSGATSTTTTTSALAPVAAIIPPPPDVQPVIDKLAEYVARNGLKFETSVRAKNDQRFEFLQPWHQYNAYYEFKKQFFLQKEGGDSMQAVSAPEEAPTDSAPEKPSDAGEDGAPEDAAEVGARAGSGGKKEASSSKTVPDGKLVKASFAPISFAIKAKENDLLPLEKNRVKLDDDSDDDEESKEGQESSSSAANTNPAVAPPCVVVEEKKPQLTQEELEAKQAKQKLEDRLAAAAREKLAQASKESKEKQLQAERKRKAALFLQTLKNPLPEAEAGKIEESPFSVEESSTTPCPLLTGGRPLPTLEVKPPDRPSSKSKDPPREEEKEKKKKPGLLCRGGTGVLHGPGLVFRPFCP

SEQ ID NO: 769914 - protein, 951 aa, Homo sapiens [sequence omitted]

SEQ ID NO: 769915 - protein, 744 aa, Homo sapiens
MHAIIERTASFVCRQGAQFEIMLKAKQARNSQFDFLRFDHYLNPYYKFIQKAMKEGRYTVLAENKSDEKKKSGVSSDNEDDDDEEDGNYLHPSLFASKKCNRLEELMKPLKVVDPDHPLAALVRKAQADSSTPTPHNADGAPVQPSQVEYTADSTVAAMYYSYYMLPDGTYCLAPPPPGIDVTTYYSTLPAGVTVSNSPGVTTTAPPPPGTTPPPPPTTAETSSGATSTTTTTSALAPVAAIIPPPPDVQPVIDKLAEYVARNGLKFETSVRAKNDQRFEFLQPWHQYNAYYEFKKQFFLQKEGGDSMQAVSAPEEAPTDSAPEKPSDAGEDGAPEDAAEVGARAGSGGKKEASSSKTVPDGKLVKASFAPISFAIKAKENDLLPLEKNRVKLDDDSDDDEESKEGQESSSSAANTNPAVAPPCVVVEEKKPQLTQEELEAKQAKQKLEDRLAAAAREKLAQASKESKEKQLQAERKRKAALFLQTLKNPLPEAEAGKIEESPFSVEESSTTPCPLLTGGRPLPTLEVKPPDRPSSKSKDPPREEEKEKKKKKHKKRSRTRSRSPKYHSSSKSRSRSHSKAKHSLPSAYRTVRRSRSRSRSPRRRAHSPERRREERSVPTAYRVSRSPGASRKRTRSRSPHEKKKKRRSRSRTKSKARSQSVSPSKQAAPRPAAPAAHSAHSASVSPVESRGSSQERSRGVSQEKEAQISSAIVSSVQSKITQDLMAKVRAMLAASKNLQTSAS

SEQ ID NO: 769916 - protein, 744 aa, Homo sapiens; identical to SEQ ID NO: 769915

SEQ ID NO: 769917 - protein, 744 aa, Homo sapiens; identical to SEQ ID NO: 769915

SEQ ID NO: 769918 - protein, 825 aa, Homo sapiens
MKREEEYKRLSEALAEDGSYNAVGFTYGSDYYDPSEPTEEEEPSKQREKNEAENLEENEEPFVAPLGLSVPSDVELPPTAKMHAIIERTASFVCRQGAQFEIMLKAKQARNSQFDFLRFDHYLNPYYKFIQKAMKEGRYTVLAENKSDEKKKSGVSSDNEDDDDEEDGNYLHPSLFASKKCNRLEELMKPLKVVDPDHPLAALVRKAQADSSTPTPHNADGAPVQPSQVEYTADSTVAAMYYSYYMLPDGTYCLAPPPPGIDVTTYYSTLPAGVTVSNSPGVTTTAPPPPGTTPPPPPTTAETSSGATSTTTTTSALAPVAAIIPPPPDVQPVIDKLAEYVARNGLKFETSVRAKNDQRFEFLQPWHQYNAYYEFKKQFFLQKEGGDSMQAVSAPEEAPTDSAPEKPSDAGEDGAPEDAAEVGARAGSGGKKEASSSKTVPDGKLVKASFAPISFAIKAKENDLLPLEKNRVKLDDDSDDDEESKEGQESSSSAANTNPAVAPPCVVVEEKKPQLTQEELEAKQAKQKLEDRLAAAAREKLAQASKESKEKQLQAERKRKAALFLQTLKNPLPEAEAGKIEESPFSVEESSTTPCPLLTGGRPLPTLEVKPPDRPSSKSKDPPREEEKEKKKKKHKKRSRTRSRSPKYHSSSKSRSRSHSKAKHSLPSAYRTVRRSRSRSRSPRRRAHSPERRREERSVPTAYRVSRSPGASRKRTRSRSPHEKKKKRRSRSRTKSKARSQSVSPSKQAAPRPAAPAAHSAHSASVSPVESRGSSQERSRGVSQEKEAQISSAIVSSVQSKITQDLMAKVRAMLAASKNLQTSAS

SEQ ID NO: 769919 - protein, 744 aa, Homo sapiens; identical to SEQ ID NO: 769915

SEQ ID NO: 769920 - protein, 825 aa, Homo sapiens; identical to SEQ ID NO: 769918

SEQ ID NO: 769921 - protein, 874 aa, Homo sapiens
MYGASGGRAKPERKSGAKEEAGPGGAGGGGSRVELLVFGYACKLFRDDERALAQEQGQHLIPWMGDHKILIDRYDGRGHLHDLSEYDAEYSTWNRDYQLSEEEARIEALCDEERYLALHTDLLEEEARQEEEYKRLSEALAEDGSYNAVGFTYGSDYYDPSEPTEEEEPSKQREKNEAENLEENEEPFVAPLGLSVPSDVELPPTAKMHAIIERTASFVCRQGAQFEIMLKAKQARNSQFDFLRFDHYLNPYYKFIQKAMKEGRYTVLAENKSDEKKKSGVSSDNEDDDDEEDGNYLHPSLFASKKCNRLEELMKPLKVVDPDHPLAALVRKAQADSSTPTPHNADGAPVQPSQVEYTADSTVAAMYYSYYMLPDGTYCLAPPPPGIDVTTYYSTLPAGVTVSNSPGVTTTAPPPPGTTPPPPPTTAETSSGATSTTTTTSALAPVAAIIPPPPDVQPVIDKLAEYVARNGLKFETSVRAKNDQRFEFLQPWHQYNAYYEFKKQFFLQKEGGDSMQAVSAPEEAPTDSAPEKPSDAGEDGAPEDAAEVGARAGSGGKKEASSSKTVPDGKLVKAKQKLEDRLAAAAREKLAQASKESKEKQLQAERKRKAALFLQTLKNPLPEAEAGKIEESPFSVEESSTTPCPLLTGGRPLPTLEVKPPDRPSSKSKDPPREEEKEKKKKKHKKRSRTRSRSPKYHSSSKSRSRSHSKAKHSLPSAYRTVRRSRSRSRSPRRRAHSPERRREERSVPTAYRVSRSPGASRKRTRSRSPHEKKKKRRSRSRTKSKARSQSVSPSKQAAPRPAAPAAHSAHSASVSPVESRGSSQERSRGVSQEKEAQISSAIVSSVQSKITQDLMAKVRAMLAASKNLQTSAS

SEQ ID NO: 769922 - protein, 979 aa, Homo sapiens
VLGYCRPRLSSGRRAAQKRTSLDAGDAVMYGASGGRAKPERKSGAKEEAGPGGAGGGGSRVELLVFGYACKLFRDDERALAQEQGQHLIPWMGDHKILIDRYDGRGHLHDLSEYDAEYSTWNRDYQLSEEEARIEALCDEERYLALHTDLLEEEARQEEEYKRLSEALAEDGSYNAVGFTYGSDYYDPSEPTEEEEPSKQREKNEAENLEENEEPFVAPLGLSVPSDVELPPTAKMHAIIERTASFVCRQGAQFEIMLKAKQARNSQFDFLRFDHYLNPYYKFIQKAMKEGRYTVLAENKSDEKKKSGVSSDNEDDDDEEDGNYLHPSLFASKKCNRLEELMKPLKVVDPDHPLAALVRKAQADSSTPTPHNADGAPVQPSQVEYTADSTVAAMYYSYYMLPDGTYCLAPPPPGIDVTTYYSTLPAGVTVSNSPGVTTTAPPPPGTTPPPPPTTAETSSGATSTTTTTSALAPVAAIIPPPPDVQPVIDKLAEYVARNGLKFETSVRAKNDQRFEFLQPWHQYNAYYEFKKQFFLQKEGGDSMQAVSAPEEAPTDSAPEKPSDAGEDGAPEDAAEVGARAGSGGKKEASSSKTVPDGKLVKASFAPISFAIKAKENDLLPLEKNRVKLDDDSDDDEESKEGQESSSSAANTNPAVAPPCVVVEEKKPQLTQEELEAKQAKQKLEDRLAAAAREKLAQASKESKEKQLQAERKRKAALFLQTLKNPLPEAEAGKIEESPFSVEESSTTPCPLLTGGRPLPTLEVKPPDRPSSKSKDPPREEEKEKKKKKHKKRSRTRSRSPKYHSSSKSRSRSHSKAKHSLPSAYRTVRRSRSRSRSPRRRAHSPERRREERSVPTAYRVSRSPGASRKRTRSRSPHEKKKKRRSRSRTKSKARSQSVSPSKQAAPRPAAPAAHSAHSASVSPVESRGSSQERSRGVSQEKEAQISSAIVSSVQSKITQDLMAKVRAMLAASKNLQTSAS

SEQ ID NO: 769923 - protein, 750 aa, Homo sapiens
MYGASGGRAKPERKSGAKEEAGPGGAGGGGSRVELLVFGYACKLFRDDERALAQEQGQHLIPWMGDHKILIDRYDGRGHLHDLSEYDAEYSTWNRDYQLSEEEARIEALCDEERYLALHTDLLEEEARQEEEYKRLSEALAEDGSYNAVGFTYGSDYYDPSEPTEEEEPSKQREKNEAENLEENEEPFVAPLGLSVPSDVELPPTAKMHAIIERTASFVCRQGAQFEIMLKAKQARNSQFDFLRFDHYLNPYYKFIQKAMKEGRYTVLAENKSDEKKKSGVSSDNEDDDDEEDGNYLHPSLFASKKCNRLEELMKPLKVVDPDHPLAALVRKAQADSSTPTPHNADGAPVQPSQVEYTADSTVAAMYYSYYMLPDGTYCLAPPPPGIDVTTYYSTLPAGVTVSNSPGVTTTAPPPPGTTPPPPPTTAETSSGATSTTTTTSALAPVAAIIPPPPDVQPVIDKLAEYVARNGLKFETSVRAKNDQRFEFLQPWHQYNAYYEFKKQFFLQKEGGDSMQAVSAPEEAPTDSAPEKPSDAGEDGAPEDAAEVGARAGSGGKKEASSSKTVPDGKLVKAKQKLEDRLAAAAREKLAQASKESKEKQLQAERKRKAALFLQTLKNPLPEAEAGKIEESPFSVEESSTTPCPLLTGGRPLPTLEVKPPDRPSSKSKDPPREEEKEKKKKLGAIYAGGGKKGLRKWANGRNRRVPGSHKSLWCANKGGEHLRGGPANKGRGRKELREKSPGVTRGLKD

SEQ ID NO: 769924 - protein, 744 aa, Homo sapiens; identical to SEQ ID NO: 769915

SEQ ID NO: 769925 - protein, 683 aa, Homo sapiens
MYGASGGRAKPERKSGAKEEAGPGGAGGGGSRVELLVFGYACKLFRDDERALAQEQGQHLIPWMGDHKILIDRYDGRGHLHDLSEYDAEYSTWNRDYQLSEEEARIEALCDEERYLALHTDLLEEEARQEEEYKRLSEALAEDGSYNAVGFTYGSDYYDPSEPTEEEEPSKQREKNEAENLEENEEPFVAPLGLSVPSDVELPPTAKMHAIIERTASFVCRQGAQFEIMLKAKQARNSQFDFLRFDHYLNPYYKFIQKAMKEGRYTVLAENKSDEKKKSGVSSDNEDDDDEEDGNYLHPSLFASKKCNRLEELMKPLKVVDPDHPLAALVRKAQADSSTPTPHNADGAPVQPSQVEYTADSTVAAMYYSYYMLPDGTYCLAPPPPGIDVTTYYSTLPAGVTVSNSPGVTTTAPPPPGTTPPPPPTTAETSSGATSTTTTTSALAPVAAIIPPPPDVQPVIDKLAEYVARNGLKFETSVRAKNDQRFEFLQPWHQYNAYYEFKKQFFLQKEGGDSMQAVSAPEEAPTDSAPEKPSDAGEDGAPEDAAEVGARAGSGGKKEASSSKTVPDGKLVKASFAPISFAIKAKENDLLPLEKNRVKLDDDSDDDEESKEGQESSSSAANTNPAVAPPCVVVEEKKPQLTQEELEAKQGLLIAFKLLERKEIHKYKIYLLSQKISRLPTRI

SEQ ID NO: 769926 - protein, 574 aa, Homo sapiens
MYGASGGRAKPERKSGAKEEAGPGGAGGGGSRVELLVFGYACKLFRDDERALAQEQGQHLIPWMGDHKILIDRYDGRGHLHDLSEYDAEYSTWNRDYQLSEEEARIEALCDEERYLALHTDLLEEEARQEEEYKRLSEALAEDGSYNAVGFTYGSDYYDPSEPTEEEEPSKQREKNEAENLEENEEPFVAPLGLSVPSDVELPPTAKMHAIIERTASFVCRQGAQFEIMLKAKQARNSQFDFLRFDHYLNPYYKFIQKAMKEGRYTVLAENKSDEKKKSGVSSDNEDDDDEEDGNYLHPSLFASKKCNRLEELMKPLKVVDPDHPLAALVRKAQADSSTPTPHNADGAPVQPSQVEYTADSTVAAMYYSYYMLPDGTYCLAPPPPGIDVTTYYSTLPAGVTVSNSPGVTTTAPPPPGTTPPPPPTTAETSSGATSTTTTTSALAPVAAIIPPPPDVQPVIDKLAEYVARNGLKFETSVRAKNDQRFEFLQPWHQYNAYYEFKHVPPQKTGEPQWVDQEAQNCTEHGAAEPLNHRGNRSKGKDHITSGETAHVKQKYDRNDKGETLYTQSPNRTN

SEQ ID NO: 769927 - protein, 333 aa, Homo sapiens
MYGASGGRAKPERKSGAKEEAGPGGAGGGGSRVELLVFGYACKLFRDDERALAQEQGQHLIPWMGDHKILIDRYDGRGHLHDLSEYDAEYSTWNRDYQLSEEEARIEALCDEERYLALHTDLLEEEARQEEEYKRLSEALAEDGSYNAVGFTYGSDYYDPSEPTEEEEPSKQREKNEAENLEENEEPFVAPLGLSVPSDVELPPTAKMHAIIERTASFVCRQGAQFEIMLKAKQARNSQFDFLRFDHYLNPYYKFIQKAMKEGRYTVLAENKSDEKKKSGVSSDNEDDDDEEDGNYLHPSLFASKKCNRLEELMKPLKLVDPDHPHAVLSSNQ

SEQ ID NO: 769928 - protein, 328 aa, Homo sapiens
PELSRAAAARRSSSFCFAITSFPSATVLLDDASFFPPEPARAPTSAASKESKEKQLQAERKRKAALFLQTLKNPLPEAEAGKIEESPFSVEESSTTPCPLLTGGRPLPTLEVKPPDRPSSKSKDPPREEEKEKKKKKHKKRSRTRSRSPKYHSSSKSRSRSHSKAKHSLPSAYRTVRRSRSRSRSPRRRAHSPERRREERSVPTAYRVSRSPGASRKRTRSRSPHEKKKKRRSRSRTKSKARSQSVSPSKQAAPRPAAPAAHSAHSASVSPVESRGSSQERSRGVSQEKEAQISSAIVSSVQSKITQDLMAKVRAMLAASKNLQTSAS

SEQ ID NO: 769929 - protein, 121 aa, Homo sapiens
MYGASGGRAKPERKSGAKEEAGPGGAGGGGSRVELLVFGYACKLFRDDERALAQEQGQHLIPWMGDHKILIDRSVPLPTRRSFPSLTRLISSDVDLTARTAESFLEPAGIWGTPPPLSPPP

SEQ ID NO: 769930 - protein, 688 aa, Homo sapiens
MYGASGGRAKPERKSGAKEEAGPGGAGGGGSRVELLVFGYACKLFRDDERALAQEQGQHLIPWMGDHKILIDRYDGRGHLHDLSEYDAEYSTWNRDYQLSEEEARIEALCDEERYLALHTDLLEEEARQEEEYKRLSEALAEDGSYNAVGFTYGSDYYDPSEPTEEEEPSKQREKNEAENLEENEEPFVAPLGLSVPSDVELPPTAKMHAIIERTASFVCRQGAQFEIMLKAKQARNSQFDFLRFDHYLNPYYKFIQKAMKEGRYTVLAENKSDEKKKSGVSSDNEDDDDEEDGNYLHPSLFASKKCNRLEELMKPLKVVDPDHPLAALVRKAQADSSTPTPHNADGAPVQPSQVEYTADSTVAAMYYSYYMLPDGTYCLAPPPPGIDVTTYYSTLPAGVTVSNSPGVTTTAPPPPGTTPPPPPTTAETSSGATSTTTTTSALAPVAAIIPPPPDVQPVIDKLAEYVARNGLKFETSVRAKNDQRFEFLQPWHQYNAYYEFKKQFFLQKEGGDSMQAVSAPEEAPTDSAPEKPSDAGEDGAPEDAAEVGARAGSGGKKEASSSKTVPDGKLVKASFAPISFAIKAKENDLLPLEKNRVKLDDDSDDDEESKEGQESSSSAANTNPAVAPPCVVVEEKKPQLTQEELEAKQGLLIAFKLLERKEIHKYKIYLLSQKISQLGILKNTQRT

SEQ ID NO: 769931 - protein, 685 aa, Homo sapiens
MPAKNKSDEKKKSGVSSDNEDDDDEEDGNYLHPSLFASKKCNRLEELMKPLKVVDPDHPLAALVRKAQADSSTPTPHNADGAPVQPSQVEYTADSTVAAMYYSYYMLPDGTYCLAPPPPGIDVTTYYSTLPAGVTVSNSPGVTTTAPPPPGTTPPPPPTTAETSSGATSTTTTTSALAPVAAIIPPPPDVQPVIDKLAEYVARNGLKFETSVRAKNDQRFEFLQPWHQYNAYYEFKKQFFLQKEGGDSMQAVSAPEEAPTDSAPEKPSDAGEDGAPEDAAEVGARAGSGGKKEASSSKTVPDGKLVKASFAPISFAIKAKENDLLPLEKNRVKLDDDSDDDEESKEGQESSSSAANTNPAVAPPCVVVEEKKPQLTQEELEAKQAKQKLEDRLAAAAREKLAQASKESKEKQLQAERKRKAALFLQTLKNPLPEAEAGKIEESPFSVEESSTTPCPLLTGGRPLPTLEVKPPDRPSSKSKDPPREEEKEKKKKKHKKRSRTRSRSPKYHSSSKSRSRSHSKAKHSLPSAYRTVRRSRSRSRSPRRRAHSPERRREERSVPTAYRVSRSPGASRKRTRSRSPHEKKKKRRSRSRTKSKARSQSVSPSKQAAPRPAAPAAHSAHSASVSPVESRGSSQERSRGVSQEKEAQISSAIVSSVQSKITQDLMAKVRAMLAASKNLQTSAS

SEQ ID NO: 769932 - protein, 318 aa, Homo sapiens
QKRARYKLILSKFDLSKSKQKLEDRLAAAAREKLAQASKESKEKQLQAERKRKAALFLQTLKNPLPEAEAGKIEESPFSVEESSTTPCPLLTGGRPLPTLEVKPPDRPSSKSKDPPREEEKEKKKKKHKKRSRTRSRSPKYHSSSKSRSRSHSKAKHSLPSAYRTVRRSRSRSRSPRRRAHSPERRREERSVPTAYRVSRSPGASRKRTRSRSPHEKKKKRRSRSRTKSKARSQSVSPSKQAAPRPAAPAAHSAHSASVSPVESRGSSQERSRGVSQEKEAQISSAIVSSVQSKITQDLMAKVRAMLAASKNLQTSAS

SEQ ID NO: 769933 - protein, 1012 aa, Homo sapiens
MTKHPPNRRGISFEVGAQLEARDRLKNWYPAHIEDIDYEEGKVLIHFKRWNHRYDEWFCWDSPYLRPLEKIQLRKEGLHEEDGSSEFQINEQVLACWSDCRFYPAKVTAVNKDGTYTVKFYDGVVQTVKHIHVKAFSKDQNIVGNARPKETDHKSLSSSPDKREKFKEQRKATVNVKKDKEDKPLKTEKRPKQPDKEGKLICSEKGKVSEKSLPKNEKEDKENISENDREYSGDAQVDKKPENDIVKSPQENLREPKRKRGRPPSIAPTAVDSNSQTLQPITLELRRRKISKGCEVPLKRPRLDKNSSQEKSKNYSENTDKDLSRRRSSRLSTNGTHEILDPDLVVSDLVDTDPLQDTLSSTKESEEGQLKSALEAGQVSSALTCHSFGDGSGAAGLELNCPSMGENTMKTEPTSPLVELQEISTVEVTNTFKKTDDFGSSNAPAVDLDHKFRCKVVDCLKFFRKAKLLHYHMKYFHGMEKSLEPEESPGKRHVQTRGPSASDKPSQETLTRKRVSASSPTTKDKEKNKEKKFKEFVRVKPKKKKKKKKKTKPECPCSEEISDTSQEPSPPKAFAVTRCGSSHKPGVHMSPQLHGPESGHHKGKVKALEEDNLSESSSESFLWSDDEYGQDVDVTTNPDEELDGDDRYDFEVVRCICEVQEENDFMIQCEECQCWQHGVCMGLLEENVPEKYTCYVCQDPPGQRPGFKYWYDKEWLSRGHMHGLAFLEENYSHQNAKKIVATHQLLGDVQRVIEVLHGLQLKMSILQSREHPDLPLWCQPWKQHSGEGRSHFRNIPVTDTRSKEEAPSYRTLNGAVEKPRPLALPLPRSVEESYITSEHCYQKPRAYYPAVEQKLVVETRGSALDDAVNPLHENGDDSLSPRLGWPLDQDRSKGDSDPKPGSPKVKEYVSKKALPEEAPARKLLDRGGEGLLSSQHQWQFNLLTHVESLQDEVTHRMDSIEKELDVLESWLDYTGELEPPEPLARLPQLKHCIKQLLMDLGKVQQIALCCST

SEQ ID NO: 769934 - protein, 1012 aa, Homo sapiens; identical to SEQ ID NO: 769933

SEQ ID NO: 769935 - protein, 896 aa, Homo sapiens
MSRSLLAGLIVVFTRPKSLLLTRMNIVGNARPKETDHKSLSSSPDKREKFKEQRKATVNVKKDKEDKPLKTEKRPKQPDKEGKLICSEKGKVSEKSLPKNEKEDKENISENDREYSGDAQVDKKPENDIVKSPQENLREPKRKRGRPPSIAPTAVDSNSQTLQPITLELRRRKISKGCEVPLKRPRLDKNSSQEKSKNYSENTDKDLSRRRSSRLSTNGTHEILDPDLVVSDLVDTDPLQDTLSSTKESEEGQLKSALEAGQVSSALTCHSFGDGSGAAGLELNCPSMGENTMKTEPTSPLVELQEISTVEVTNTFKKTDDFGSSNAPAVDLDHKFRCKVVDCLKFFRKAKLLHYHMKYFHGMEKSLEPEESPGKRHVQTRGPSASDKPSQETLTRKRVSASSPTTKDKEKNKEKKFKEFVRVKPKKKKKKKKKTKPECPCSEEISDTSQEPSPPKAFAVTRCGSSHKPGVHMSPQLHGPESGHHKGKVKALEEDNLSESSSESFLWSDDEYGQDVDVTTNPDEELDGDDRYDFEVVRCICEVQEENDFMIQCEECQCWQHGVCMGLLEENVPEKYTCYVCQDPPGQRPGFKYWYDKEWLSRGHMHGLAFLEENYSHQNAKKIVATHQLLGDVQRVIEVLHGLQLKMSILQSREHPDLPLWCQPWKQHSGEGRSHFRNIPVTDTRSKEEAPSYRTLNGAVEKPRPLALPLPRSVEESYITSEHCYQKPRAYYPAVEQKLVVETRGSALDDAVNPLHENGDDSLSPRLGWPLDQDRSKGDSDPKPGSPKVKEYVSKKALPEEAPARKLLDRGGEGLLSSQHQWQFNLLTHVESLQDEVTHRMDSIEKELDVLESWLDYTGELEPPEPLARLPQLKHCIKQLLMDLGKVQQIALCCST

SEQ ID NO: 769936 - protein, 1012 aa, Homo sapiens
MAVCFILHHIGGHIKLGRPTVPCITWIRYPAHIEDIDYEEGKVLIHFKRWNHRYDEWFCWDSPYLRPLEKIQLRKEGLHEEDGSSEFQINEQVLACWSDCRFYPAKVTAVNKDGTYTVKFYDGVVQTVKHIHVKAFSKDQNIVGNARPKETDHKSLSSSPDKREKFKEQRKATVNVKKDKEDKPLKTEKRPKQPDKEGKLICSEKGKVSEKSLPKNEKEDKENISENDREYSGDAQVDKKPENDIVKSPQENLREPKRKRGRPPSIAPTAVDSNSQTLQPITLELRRRKISKGCEVPLKRPRLDKNSSQEKSKNYSENTDKDLSRRRSSRLSTNGTHEILDPDLVVSDLVDTDPLQDTLSSTKESEEGQLKSALEAGQVSSALTCHSFGDGSGAAGLELNCPSMGENTMKTEPTSPLVELQEISTVEVTNTFKKTDDFGSSNAPAVDLDHKFRCKVVDCLKFFRKAKLLHYHMKYFHGMEKSLEPEESPGKRHVQTRGPSASDKPSQETLTRKRVSASSPTTKDKEKNKEKKFKEFVRVKPKKKKKKKKKTKPECPCSEEISDTSQEPSPPKAFAVTRCGSSHKPGVHMSPQLHGPESGHHKGKVKALEEDNLSESSSESFLWSDDEYGQDVDVTTNPDEELDGDDRYDFEVVRCICEVQEENDFMIQCEECQCWQHGVCMGLLEENVPEKYTCYVCQDPPGQRPGFKYWYDKEWLSRGHMHGLAFLEENYSHQNAKKIVATHQLLGDVQRVIEVLHGLQLKMSILQSREHPDLPLWCQPWKQHSGEGRSHFRNIPVTDTRSKEEAPSYRTLNGAVEKPRPLALPLPRSVEESYITSEHCYQKPRAYYPAVEQKLVVETRGSALDDAVNPLHENGDDSLSPRLGWPLDQDRSKGDSDPKPGSPKVKEYVSKKALPEEAPARKLLDRGGEGLLSSQHQWQFNLLTHVESLQDEVTHRMDSIEKELDVLESWLDYTGELEPPEPLARLPQLKHCIKQLLMDLGKVQQIALCCST

SEQ ID NO: 769937 - protein, 923 aa, Homo sapiens
MSSQELLMLLLWDHTLKALVYSEAGTYTVKFYDGVVQTVKHIHVKAFSKDQNIVGNARPKETDHKSLSSSPDKREKFKEQRKATVNVKKDKEDKPLKTEKRPKQPDKEGKLICSEKGKVSEKSLPKNEKEDKENISENDREYSGDAQVDKKPENDIVKSPQENLREPKRKRGRPPSIAPTAVDSNSQTLQPITLELRRRKISKGCEVPLKRPRLDKNSSQEKSKNYSENTDKDLSRRRSSRLSTNGTHEILDPDLVVSDLVDTDPLQDTLSSTKESEEGQLKSALEAGQVSSALTCHSFGDGSGAAGLELNCPSMGENTMKTEPTSPLVELQEISTVEVTNTFKKTDDFGSSNAPAVDLDHKFRCKVVDCLKFFRKAKLLHYHMKYFHGMEKSLEPEESPGKRHVQTRGPSASDKPSQETLTRKRVSASSPTTKDKEKNKEKKFKEFVRVKPKKKKKKKKKTKPECPCSEEISDTSQEPSPPKAFAVTRCGSSHKPGVHMSPQLHGPESGHHKGKVKALEEDNLSESSSESFLWSDDEYGQDVDVTTNPDEELDGDDRYDFEVVRCICEVQEENDFMIQCEECQCWQHGVCMGLLEENVPEKYTCYVCQDPPGQRPGFKYWYDKEWLSRGHMHGLAFLEENYSHQNAKKIVATHQLLGDVQRVIEVLHGLQLKMSILQSREHPDLPLWCQPWKQHSGEGRSHFRNIPVTDTRSKEEAPSYRTLNGAVEKPRPLALPLPRSVEESYITSEHCYQKPRAYYPAVEQKLVVETRGSALDDAVNPLHENGDDSLSPRLGWPLDQDRSKGDSDPKPGSPKVKEYVSKKALPEEAPARKLLDRGGEGLLSSQHQWQFNLLTHVESLQDEVTHRMDSIEKELDVLESWLDYTGELEPPEPLARLPQLKHCIKQLLMDLGKVQQIALCCST

SEQ ID NO: 769938 - protein, 540 aa, Homo sapiens
MKYFHGMEKSLEPEESPGKRHVQTRGPSASDKPSQETLTRKRVSASSPTTKDKEKNKEKKFKEFVRVKPKKKKKKKKKTKPECPCSEEISDTSQEPSPPKAFAVTRCGSSHKPGVHMSPQLHGPESGHHKGKVKALEEDNLSESSSESFLWSDDEYGQDVDVTTNPDEELDGDDRYDFEVVRCICEVQEENDFMIQCEECQCWQHGVCMGLLEENVPEKYTCYVCQDPPGQRPGFKYWYDKEWLSRGHMHGLAFLEENYSHQNAKKIVATHQLLGDVQRVIEVLHGLQLKMSILQSREHPDLPLWCQPWKQHSGEGRSHFRNIPVTDTRSKEEAPSYRTLNGAVEKPRPLALPLPRSVEESYITSEHCYQKPRAYYPAVEQKLVVETRGSALDDAVNPLHENGDDSLSPRLGWPLDQDRSKGDSDPKPGSPKVKEYVSKKALPEEAPARKLLDRGGEGLLSSQHQWQFNLLTHVESLQDEVTHRMDSIEKELDVLESWLDYTGELEPPEPLARLPQLKHCIKQLLMDLGKVQQIALCCST

SEQ ID NO: 769939 - protein, 404 aa, Homo sapiens
MTKHPPNRRGISFEVGAQLEARDRLKNWYPAHIEDIDYEEGKVLIHFKRWNHRYDEWFCWDSPYLRPLEKIQLRKEGLHEEDGSSEFQINEQVLACWSDCRFYPAKVTAVNKDGTYTVKFYDGVVQTVKHIHVKAFSKDQNIVGNARPKETDHKSLSSSPDKREKFKEQRKATVNVKKDKEDKPLKTEKRPKQPDKEGKLICSEKGKVSEKSLPKNEKEDKENISENDREYSGDAQVDKKPENDIVKSPQENLREPKRKRGRPPSIAPTAVDSNSQTLQPITLELRRRKISKGCEVPLKRPRLDKNSSQEKSKNYSENTDKDLSRRRSSRLSTNGTHEILDPDLVVSDLVDTDPLQDTLSSTKESEEGQLKSALEAGQVSSALTCHSFGDGSGAAGLELNCPSI

SEQ ID NO: 769940 - protein, 150 aa, Homo sapiens
MTKHPPNRRGISFEVGAQLEARDRLKNWYPAHIEDIDYEEGKVLIHFKRWNHRYDEWFCWDSPYLRPLEKIQLRKEGLHEEDGSSEFQINEQVLACWSDCRFYPAKVTAVNKDGTYTVKFYDGVVQTVKHIHVKAFSKDQVRNVVLCFVL

SEQ ID NO: 769941 - protein, 108 aa, Homo sapiens
MTKHPPNRRGISFEVGAQLEARDRLKNWYPAHIEDIDYEEGKVLIHFKRWNHRYDEWFCWDSPYLRPLEKIQLRKEGLHEEDGSSVSNKSGKFCSMQGQPLGCLCFNL

SEQ ID NO: 769942 - protein, 1012 aa, Homo sapiens; identical to SEQ ID NO: 769933

SEQ ID NO: 769943 - protein, 765 aa, Homo sapiens
MTESILEMPKRKRGRPPSIAPTAVDSNSQTLQPITLELRRRKISKGCEVPLKRPRLDKNSSQEKSKNYSENTDKDLSRRRSSRLSTNGTHEILDPDLVVSDLVDTDPLQDTLSSTKESEEGQLKSALEAGQVSSALTCHSFGDGSGAAGLELNCPSMGENTMKTEPTSPLVELQEISTVEVTNTFKKTDDFGSSNAPAVDLDHKFRCKVVDCLKFFRKAKLLHYHMKYFHGMEKSLEPEESPGKRHVQTRGPSASDKPSQETLTRKRVSASSPTTKDKEKNKEKKFKEFVRVKPKKKKKKKKKTKPECPCSEEISDTSQEPSPPKAFAVTRCGSSHKPGVHMSPQLHGPESGHHKGKVKALEEDNLSESSSESFLWSDDEYGQDVDVTTNPDEELDGDDRYDFEVVRCICEVQEENDFMIQCEECQCWQHGVCMGLLEENVPEKYTCYVCQDPPGQRPGFKYWYDKEWLSRGHMHGLAFLEENYSHQNAKKIVATHQLLGDVQRVIEVLHGLQLKMSILQSREHPDLPLWCQPWKQHSGEGRSHFRNIPVTDTRSKEEAPSYRTLNGAVEKPRPLALPLPRSVEESYITSEHCYQKPRAYYPAVEQKLVVETRGSALDDAVNPLHENGDDSLSPRLGWPLDQDRSKGDSDPKPGSPKVKEYVSKKALPEEAPARKLLDRGGEGLLSSQHQWQFNLLTHVESLQDEVTHRMDSIEKELDVLESWLDYTGELEPPEPLARLPQLKHCIKQLLMDLGKVQQIALCCST

SEQ ID NO: 769944 - protein, 1049 aa, Homo sapiens
GGAYAGRVPGVTWCRARRVLLSVGPGAAQPEWGRELLKTIQFPFREANLGYLILLPEVAHAFKNRYPAHIEDIDYEEGKVLIHFKRWNHRYDEWFCWDSPYLRPLEKIQLRKEGLHEEDGSSEFQINEQVLACWSDCRFYPAKVTAVNKDGTYTVKFYDGVVQTVKHIHVKAFSKDQNIVGNARPKETDHKSLSSSPDKREKFKEQRKATVNVKKDKEDKPLKTEKRPKQPDKEGKLICSEKGKVSEKSLPKNEKEDKENISENDREYSGDAQVDKKPENDIVKSPQENLREPKRKRGRPPSIAPTAVDSNSQTLQPITLELRRRKISKGCEVPLKRPRLDKNSSQEKSKNYSENTDKDLSRRRSSRLSTNGTHEILDPDLVVSDLVDTDPLQDTLSSTKESEEGQLKSALEAGQVSSALTCHSFGDGSGAAGLELNCPSMGENTMKTEPTSPLVELQEISTVEVTNTFKKTDDFGSSNAPAVDLDHKFRCKVVDCLKFFRKAKLLHYHMKYFHGMEKSLEPEESPGKRHVQTRGPSASDKPSQETLTRKRVSASSPTTKDKEKNKEKKFKEFVRVKPKKKKKKKKKTKPECPCSEEISDTSQEPSPPKAFAVTRCGSSHKPGVHMSPQLHGPESGHHKGKVKALEEDNLSESSSESFLWSDDEYGQDVDVTTNPDEELDGDDRYDFEVVRCICEVQEENDFMIQCEECQCWQHGVCMGLLEENVPEKYTCYVCQDPPGQRPGFKYWYDKEWLSRGHMHGLAFLEENYSHQNAKKIVATHQLLGDVQRVIEVLHGLQLKMSILQSREHPDLPLWCQPWKQHSGEGRSHFRNIPVTDTRSKEEAPSYRTLNGAVEKPRPLALPLPRSVEESYITSEHCYQKPRAYYPAVEQKLVVETRGSALDDAVNPLHENGDDSLSPRLGWPLDQDRSKGDSDPKPGSPKVKEYVSKKALPEEAPARKLLDRGGEGLLSSQHQWQFNLLTHVESLQDEVTHRMDSIEKELDVLESWLDYTGELEPPEPLARLPQLKHCIKQLLMDLGKVQQIALCCST

SEQ ID NO: 769945 - protein, 906 aa, Homo sapiens
NRNPDLCCTYTVKFYDGVVQTVKHIHVKAFSKDQNIVGNARPKETDHKSLSSSPDKREKFKEQRKATVNVKKDKEDKPLKTEKRPKQPDKEGKLICSEKGKVSEKSLPKNEKEDKENISENDREYSGDAQVDKKPENDIVKSPQENLREPKRKRGRPPSIAPTAVDSNSQTLQPITLELRRRKISKGCEVPLKRPRLDKNSSQEKSKNYSENTDKDLSRRRSSRLSTNGTHEILDPDLVVSDLVDTDPLQDTLSSTKESEEGQLKSALEAGQVSSALTCHSFGDGSGAAGLELNCPSMGENTMKTEPTSPLVELQEISTVEVTNTFKKTDDFGSSNAPAVDLDHKFRCKVVDCLKFFRKAKLLHYHMKYFHGMEKSLEPEESPGKRHVQTRGPSASDKPSQETLTRKRVSASSPTTKDKEKNKEKKFKEFVRVKPKKKKKKKKKTKPECPCSEEISDTSQEPSPPKAFAVTRCGSSHKPGVHMSPQLHGPESGHHKGKVKALEEDNLSESSSESFLWSDDEYGQDVDVTTNPDEELDGDDRYDFEVVRCICEVQEENDFMIQCEECQCWQHGVCMGLLEENVPEKYTCYVCQDPPGQRPGFKYWYDKEWLSRGHMHGLAFLEENYSHQNAKKIVATHQLLGDVQRVIEVLHGLQLKMSILQSREHPDLPLWCQPWKQHSGEGRSHFRNIPVTDTRSKEEAPSYRTLNGAVEKPRPLALPLPRSVEESYITSEHCYQKPRAYYPAVEQKLVVETRGSALDDAVNPLHENGDDSLSPRLGWPLDQDRSKGDSDPKPGSPKVKEYVSKKALPEEAPARKLLDRGGEGLLSSQHQWQFNLLTHVESLQDEVTHRMDSIEKELDVLESWLDYTGELEPPEPLARLPQLKHCIKQLLMDLGKVQQIALCCST

SEQ ID NO: 769946 - protein, 434 aa, Homo sapiens
MTKHPPNRRGISFEVGAQLEARDRLKNWYPAHIEDIDYEEGKVLIHFKRWNHRYDEWFCWDSPYLRPLEKIQLRKEGLHEEDGSSEFQINEQVLACWSDCRFYPAKVTAVNKDGTYTVKFYDGVVQTVKHIHVKAFSKDQNIVGNARPKETDHKSLSSSPDKREKFKEQRKATVNVKKDKEDKPLKTEKRPKQPDKEGKLICSEKGKVSEKSLPKNEKEDKENISENDREYSGDAQVDKKPENDIVKSPQENLREPKRKRGRPPSIAPTAVDSNSQTLQPITLELRRRKISKGCEVPLKRPRLDKNSSQEKSKNYSENTDKDLSRRRSSRLSTNGTHEILDPDLVVSDLVDTDPLQDTLSSTKESEEGQLKSALEAGQVSSALTCHSFGDGSGAAGLELNCPSMGENTMKTEPTSPLVELQEISTVEGSYLELN

SEQ ID NO: 769947 - protein, 452 aa, Homo sapiens
MTKHPPNRRGISFEVGAQLEARDRLKNCIQLTISTAPLHSRRQGKSHSSHFKRWTPIGSCMQSVLPGHQYLHFHARFSSTTSPACRAHSRGLQCKAGMASYPAHIPTHTHIARQESHMAFALVLAIVRYINHPRGAKQVHLLGNQPKGIGSPFHQLWWHKSVVMAMGQVHFPKADGSEHTKSNIQWFTQQTFCIPQQHRKQHNLGSETHIASGAPIKSKDEGKSKHTTGSLPNSNRSPWQLTDGKPANSSSTQAPERANTAQRGGKMLPQPQGTQSNSHQHHTRSKPASQEETGRSHNRARHLAFQRQPAHTVTTYRVPGTTGGEQRWHTHRHTGLRTHRQQTAQGTGQHGDTQTMFSQGKQWTTGKRTIQGEDKLQPKQVDVHDQTHDTHVNTMRTERSQPQQTPCKGDTHKKTTREREQPHMHQQHTKQRGASTPAPHNKQTPHKCTRGT

SEQ ID NO: 769948 - protein, 221 aa, Homo sapiens
MAAARPSLGRVLPGSSVLFLCDMQEKFRHNIAYFPQIVSVAARMLKVARLLEVPVMLTEQYPQGLGPTVPELGTEGLRPLAKTCFSMVPALQQELDSRPQLRSVLLCGIEAQACILDPRSYPGLALTSLYPQNTTLDLLDRGLQVHVVVDACSSRSQVDRLVALARMRQSGAFLSTSEGLILQLVGDAVHPQFKEIQKLIKEPAPDSGLLGLFQGQNSLLH

SEQ ID NO: 769949 - protein, 135 aa, Homo sapiens
MAAARPSLGRVLPGSSVLFLCDMQEKFRHNIAYFPQIVSVAARMLKNTTLDLLDRGLQVHVVVDACSSRSQVDRLVALARMRQSGAFLSTSEGLILQLVGDAVHPQFKEIQKLIKEPAPDSGLLGLFQGQNSLLH

SEQ ID NO: 769950 - protein, 97 aa, Homo sapiens
RPSRLLGLGRGPAVRCWASSKARTPSSTELQPCLEGRPPSCHPDLSGSPFPPSLDPKSGAIHQECRPLVGGGRVLPSHWTAAPGNANETPGNWVGIG

SEQ ID NO: 769951 - protein, 184 aa, Homo sapiens
GPADCWALEEAQQSAAGPLPRPELPPPLNSNPALREDHPPVTRTSVEARSPHPWIPRVVRSTRSAAPLWGGAGCCLPIGQLLPEMQMRLLETGWELAEPRWRRGSAPGHFTGREGEGKKSLRLWDTDSQNKHICGKKKKNNNTQKKHRGPTKPGWAEKAGSERCTVGKTGPGHQHILAQGGTTR

SEQ ID NO: 769952 - protein, 205 aa, Homo sapiens
MAAARPSLGRVLPGSSVLFLCDMQEKFRHNIAYFPQIVSVAARMLKVARLLEVPVMLTEQYPQGLGPTVPELGTEGLRPLAKTCFSMVPALQQELDSRPQLRSVLLCGIEAQACILNTTLDLLDRGLQVHVVVDACSSRSQVDRLVALARMRQSGAFLSTSEGLILQLVGDAVHPQFKEIQKLIKEPAPDSGLLGLFQGQNSLLH

SEQ ID NO: 769953 - protein, 215 aa, Homo sapiens
MASVSSWSRKMAAARPSLGRVLPGSSVLFLCDMQEKFRHNIAYFPQIVSVAARMLKVARLLEVPVMLTEQYPQGLGPTVPELGTEGLRPLAKTCFSMVPALQQELDSRPQLRSVLLCGIEAQACILNTTLDLLDRGLQVHVVVDACSSRSQVDRLVALARMRQSGAFLSTSEGLILQLVGDAVHPQFKEIQKLIKEPAPDSGLLGLFQGQNSLLH

SEQ ID NO: 769954 - protein, 119 aa, Homo sapiens
MAAARPSLGRVLPGSSVLFLCDMQEKFRHNIAYFPQIVSVAARMLKVARLLEVPVMLTEQYPQGLGPTVPELGTEGLRPLAKTCFSMVPALQQELDSRPQLRSVLLCGIEAQACILVRC

SEQ ID NO: 769955 - protein, 72 aa, Homo sapiens
AVAPTLRAPSRSARPQPEQPGHDPGEPALPPHPALPGSRHPSLSWAHRGARQDLWPCNIPSILSSRSSPQWF

SEQ ID NO: 769956 - protein, 646 aa, Homo sapiens
MGLPRLVCAFLLAACCCCPRVAGVPGEAEQPAPELVEVEVGSTALLKCGLSQSQGNLSHVDWFSVHKEKRTLIFRVRQGQGQSEPGEYEQRLSLQDRGATLALTQVTPQDERIFLCQGKRPRSQEYRIQLRVYKAPEEPNIQVNPLGIPVNSKEPEEVATCVGRNGYPIPQVIWYKNGRPLKEEKNRVHIQSSQTVESSGLYTLQSILKAQLVKEDKDAQFYCELNYRLPSGNHMKESREVTVPVFYPTEKVWLEVEPVGMLKEGDRVEIRCLADGNPPPHFSISKQNPSTREAEEETTNDNGVLVLEPARKEHSGRYECQGLDLDTMISLLSEPQELLVNYVSDVRVSPAAPERQEGSSLTLTCEAESSQDLEFQWLREETGQVLERGPVLQLHDLKREAGGGYRCVASVPSIPGLNRTQLVNVAIFGPPWMAFKERKVWVKENMVLNLSCEASGHPRPTISWNVNGTASEQDQDPQRVLSTLNVLVTPELLETGVECTASNDLGKNTSILFLELVNLTTLTPDSNTTTGLSTSTASPHTRANSTSTERKLPEPESRGVVIVAVIVCILVLAVLGAVLYFLYKKGKLPCRRSGKQEITLPPSRKSELVVEVKSDKLPEEMGLLQGSSGDKRAPGDQGEKYIDLRH

SEQ ID NO: 769957 - protein, 144 aa, Homo sapiens
PSATWSHDLLPCPGLALEQGALIHSTSFTAGPSLPVALRYQPLTSLPPPSTLPPSRKSELVVEVKSDKLPEEMGLLQGSSGDKRAPGDQVGGGSCGQSLPHPQGPGAVGTNGSLYPSSLFVRDREQAPSCLLNTTHRWQGQASG

SEQ ID NO: 769958 - protein, 604 aa, Homo sapiens
MGLPRLVCAFLLAACCCCPRVAGVPGEAEQPAPELVEVEVGSTALLKCGLSQSQGNLSHVDWFSVHKEKRTLIFRVRQGQGQSEPGEYEQRLSLQDRGATLALTQVTPQDERIFLCQGKRPRSQEYRIQLRVYKAPEEPNIQVNPLGIPVNSKEPEEVATCVGRNGYPIPQVIWYKNGRPLKEEKNRVHIQSSQTVESSGLYTLQSILKAQLVKEDKDAQFYCELNYRLPSGNHMKESREVTVPVFYPTEKVWLEVEPVGMLKEGDRVEIRCLADGNPPPHFSISKQNPSTREAEEETTNDNGVLVLEPARKEHSGRYECQGLDLDTMISLLSEPQELLVNYVSDVRVSPAAPERQEGSSLTLTCEAESSQDLEFQWLREETGQVLERGPVLQLHDLKREAGGGYRCVASVPSIPGLNRTQLVNVAIFGPPWMAFKERKVWVKENMVLNLSCEASGHPRPTISWNVNGTASEQDQDPQRVLSTLNVLVTPELLETGVECTASNDLGKNTSILFLELVNLTTLTPDSNTTTGLSTSTASPHTRANSTSTERKLPEPESRGVVIVAVIVCILVLAVLGAVLYFLYKKGKLPCRRSGKQEMERNTSI

SEQ ID NO: 769959 - protein, 605 aa, Homo sapiens
  misc_feature (36)..(36): Xaa can be any naturally occurring amino acid
  misc_feature (38)..(38): Xaa can be any naturally occurring amino acid
  misc_feature (55)..(55): Xaa can be any naturally occurring amino acid
  misc_feature (77)..(77): Xaa can be any naturally occurring amino acid
RHELPEEMGLLQGSSGDKRAPGDQGEKYIDLRHYPXSXQLPSLPGPFPAPCSLFXQPKPPKGLERSLLLPSPAHPLXERPRSQEYRIQLRVYKAPEEPNIQVNPLGIPVNSKEPEEVATCVGRNGYPIPQVIWYKNGRPLKEEKNRVHIQSSQTVESSGLYTLQSILKAQLVKEDKDAQFYCELNYRLPSGNHMKESREVTVPVFYPTEKVWLEVEPVGMLKEGDRVEIRCLADGNPPPHFSISKQNPSTREAEEETTNDNGVLVLEPARKEHSGRYECQGLDLDTMISLLSEPQELLVNYVSDVRVSPAAPERQEGSSLTLTCEAESSQDLEFQWLREETGQVLERGPVLQLHDLKREAGGGYRCVASVPSIPGLNRTQLVNVAIFGPPWMAFKERKVWVKENMVLNLSCEASGHPRPTISWNVNGTASEQDQDPQRVLSTLNVLVTPELLETGVECTASNDLGKNTSILFLELVNLTTLTPDSNTTTGLSTSTASPHTRANSTSTERKLPEPESRGVVIVAVIVCILVLAVLGAVLYFLYKKGKLPCRRSGKQEITLPPSRKSELVVEVKSDKLPEEMGLLQGSSGDKRAPGDQGEKYIDLRH

SEQ ID NO: 769960 - protein, 349 aa, Homo sapiens
VVSSSAFLVLEPARKEHSGRYECQGLDLDTMISLLSEPQELLVNYVSDVRVSPAAPERQEGSSLTLTCEAESSQDLEFQWLREETGQVLERGPVLQLHDLKREAGGGYRCVASVPSIPGLNRTQLVNVAIFGPPWMAFKERKVWVKENMVLNLSCEASGHPRPTISWNVNGTASEQDQDPQRVLSTLNVLVTPELLETGVECTASNDLGKNTSILFLELVNLTTLTPDSNTTTGLSTSTASPHTRANSTSTERKLPEPESRGVVIVAVIVCILVLAVLGAVLYFLYKKGKLPCRRSGKQEITLPPSRKSELVVEVKSDKLPEEMGLLQGSSGDKRAPGDQGEKYIDLRH

SEQ ID NO: 769961 - protein, 97 aa, Homo sapiens
ALRIPERVMRLNLSCEASGHPRPTISWNVNGTASEQDQDPQRVLSTLNVLVTPELLETGVECTASNDLGKNTSILFLELGEGCIPAGDGRGRPRHGQ

SEQ ID NO: 769962 - protein, 110 aa, Homo sapiens
GRSGKQEITLPPSREDMVNLTTLTPDSNTTTGLSTSTASPHTRANSTSTERKLPEPESRGVVIVAVIVCILVLAVLGAVLYFLYKKGKLPCRAAAVTRGLRETRERNTSI

SEQ ID NO: 769963 - protein, 646 aa, Homo sapiens; identical to SEQ ID NO: 769956

SEQ ID NO: 769964 - protein, 646 aa, Homo sapiens; identical to SEQ ID NO: 769956

SEQ ID NO: 769965 - protein, 646 aa, Homo sapiens; identical to SEQ ID NO: 769956

SEQ ID NO: 769966 - protein, 646 aa, Homo sapiens; identical to SEQ ID NO: 769956

SEQ ID NO: 769967 - protein, 645 aa, Homo sapiens
MGLPRLVCAFLLAACCCCPRVAGVPGEAEQPAPELVEVEVGSTALLKCGLSQSQGNLSHVDWFSVHKEKRTLIFRVRQGQGQSEPGEYEQRLSLQDRGATLALTQVTPQDERIFLCQGKRPRSQEYRIQLRVYKAPEEPNIQVNPLGIPVNSKEPEEVATCVGRNGYPIPQVIWYKNGRPLKEEKNRVHIQSSQTVESSGLYTLQSILKAQLVKEDKDAQFYCELNYRLPSGNHMKESREVTVPVFYPTEKVWLEVEPVGMLKEGDRVEIRCLADGNPPPHFSISKQNPSTREAEEETTNDNGVLVLEPARKEHSGRYECQGLDLDTMISLLSEPQELLVNYVSDVRVSPAAPERQEGSSLTLTCEAESSQDLEFQWLREETGQVLERGPVLQLHDLKREAGGGYRCVASVPSIPGLNRTQLVNVAIFGPPWMAFKERKVWVKENMVLNLSCEASGHPRPTISWNVNGTASEQDQDPQRVLSTLNVLVTPELLETGVECTASNDLGKNTSILFLELVNLTTLTPDSNTTTGLSTSTASPHTRANSTSTERKLPEPESRGVVIVAVIVCILVLAVLGAVLYFLYKKGKLPCRRSGKQEITLPPSRKSELVVEVKSDKLPEEMGLLQGSSGDKRAPGDQGAGPILPS

SEQ ID NO: 769968 - protein, 188 aa, Homo sapiens
MGLPRLVCAFLLAACCCCPRVAGVPGEAEQPAPELVEVEVGSTALLKCGLSQSQGNLSHVDWFSVHKEKRTLIFRVRQGQGQSEPGEYEQRLSLQDRGATLALTQVTPQDERIFLCQGKRPRSQEYRIQLRVYKAPEEPNIQVNPLGIPVNSKEPEEVATCVGRNGYPIPQVIWYKNGRPLKEEKNRE

SEQ ID NO: 769969 - protein, 646 aa, Homo sapiens; identical to SEQ ID NO: 769956

SEQ ID NO: 769970 - protein, 646 aa, Homo sapiens; identical to SEQ ID NO: 769956

SEQ ID NO: 769971 - protein, 347 aa, Homo sapiens
  misc_feature (344)..(345): Xaa can be any naturally occurring amino acid
  misc_feature (347)..(347): Xaa can be any naturally occurring amino acid
MGLPRLVCAFLLAACCCCPRVAGVPGEAEQPAPELVEVEVGSTALLKCGLSQSQGNLSHVDWFSVHKEKRTLIFRVRQGQGQSEPGEYEQRLSLQDRGATLALTQVTPQDERIFLCQGKRPRSQEYRIQLRVYKAPEEPNIQVNPLGIPVNSKEPEEVATCVGRNGYPIPQVIWYKNGRPLKEEKNRVHIQSSQTVESSGLYTLQSILKAQLVKEDKDAQFYCELNYRLPSGNHMKESREVTVPVFYPTEKVWLEVEPVGMLKEGDRVEIRCLADGNPPPHFSISKQNPSTREAEEETTNDNGVLVLEPARKEHSGRYECQGLDLDTMISLLSEPQELLVNYVXXRX

SEQ ID NO: 769972 - protein, 295 aa, Homo sapiens
  misc_feature (2)..(2): Xaa can be any naturally occurring amino acid
TXRKVCKKSRWYGPEFPGCQDLEFQWLREETGQVLERGPVLQLHDLKREAGGGYRCVASVPSIPGLNRTQLVNVAIFGPPWMAFKERKVWVKENMVLNLSCEASGHPRPTISWNVNGTASEQDQDPQRVLSTLNVLVTPELLETGVECTASNDLGKNTSILFLELVNLTTLTPDSNTTTGLSTSTASPHTRANSTSTERKLPEPESRGVVIVAVIVCILVLAVLGAVLYFLYKKGKLPCRRSGKQEITLPPSRKSELVVEVKSDKLPEEMGLLQGSSGDKRAPGDQGEKYIDLRH

SEQ ID NO: 769973 - protein, 646 aa, Homo sapiens; identical to SEQ ID NO: 769956

SEQ ID NO: 769974 - protein, 646 aa, Homo sapiens; identical to SEQ ID NO: 769956

SEQ ID NO: 769975 - protein, 646 aa, Homo sapiens; identical to SEQ ID NO: 769956

SEQ ID NO: 769976 - protein, 646 aa, Homo sapiens; identical to SEQ ID NO: 769956

SEQ ID NO: 769977 - protein, 692 aa, Homo sapiens
MGLPRLVCAFLLAACCCCPRVAGVPGEAEQPAPELVEVEVGSTALLKCGLSQSQGNLSHVDWFSVHKEKRTLIFRVRQGQGQSEPGEYEQRLSLQDRGATLALTQVTPQDERIFLCQGKRPRSQEYRIQLRVYKAPEEPNIQVNPLGIPVNSKEPEEVATCVGRNGYPIPQVIWYKNGRPLKEEKNRVHIQSSQTVESSGLYTLQSILKAQLVKEDKDAQFYCELNYRLPSGNHMKESREVTVPVFYPTEKVWLEVEPVGMLKEGDRVEIRCLADGNPPPHFSISKQNPSTREAEEETTNDNGVLVLEPARKEHSGRYECQGLDLDTMISLLSEPQELLVNYVSDVRVSPAAPERQEGSSLTLTCEAESSQDLEFQWLREETGQVLERGPVLQLHDLKREAGGGYRCVASVPSIPGLNRTQLVNVAIFGPPWMAFKERKVWVKENMVLNLSCEASGHPRPTISWNVNGTASEQDQDPQRVLSTLNVLVTPELLETGVECTASNDLGKNTSILFLELVNLTTLTPDSNTTTGLSTSTASPHTRANSTSTERKLPEPESRGVVIVAVIVCILVLAVLGAVLYFLYKKGKLPCRRSGKQEITLPPSRKSELVVEVKSDKLPEEMGLLQGSSGDKRAPGDQVGGGSCGQSLPHPQGPGAVGTNGSLYPSSLFVRDREQAPSCLLNTTHRWQGQASG

SEQ ID NO: 769978 - protein, 1165 aa, Homo sapiens
MICQKFCVVLLHWEFIYVITAFNLSYPITPWRFKLSCMPPNSTYDYFLLPAGLSKNTSNSNGHYETAVEPKFNSSGTHFSNLSKTTFHCCFRSEQDRNCSLCADNIEGKTFVSTVNSLVFQQIDANWNIQCWLKGDLKLFICYVESLFKNLFRNYNYKVHLLYVLPEVLEDSPLVPQKGSFQMVHCNCSVHECCECLVPVPTAKLNDTLLMCLKITSGGVIFQSPLMSVQPINMVKPDPPLGLHMEITDDGNLKISWSSPPLVPFPLQYQVKYSENSTTVIREADKIVSATSLLVDSILPGSSYEVQVRGKRLDGPGIWSDWSTPRVFTTQDVIYFPPKILTSVGSNVSFHCIYKKENKIVPSKEIVWWMNLAEKIPQSQYDVVSDHVSKVTFFNLNETKPRGKFTYDAVYCCNEHECHHRYAELYVIDVNINISCETDGYLTKMTCRWSTSTIQSLAESTLQLRYHRSSLYCSDIPSIHPISEPKDCYLQSDGFYECIFQPIFLLSGYTMWIRINHSLGSLDSPPTCVLPDSVVKPLPPSSVKAEITINIGLLKISWEKPVFPENNLQFQIRYGLSGKEVQWKMYEVYDAKSKSVSLPVPDLCAVYAVQVRCKRLDGLGYWSNWSNPAYTVVMDIKVPMRGPEFWRIINGDTMKKEKNVTLLWKPLMKNDSLCSVQRYVINHHTSCNGTWSEDVGNHTKFTFLWTEQAHTVTVLAINSIGASVANFNLTFSWPMSKVNIVQSLSAYPLNSSCVIVSWILSPSDYKLMYFIIEWKNLNEDGEIKWLRISSSVKKYYIHDHFIPIEKYQFSLYPIFMEGVGKPKIINSFTQDDIEKHQSDAGLYVIVPVIISSSILLLGTLLISHQRMKKLFWEDVPNPKNCSWAQGLNFQKPETFEHLFIKHTASVTCGPLLLEPETISEDISVDTSWKNKDEMMPTTVVSLLSTTDLEKGSVCISDQFNSVNFSEAEGTEVTYEDESQRQPFVKYATLISNSKPSETGEEQGLINSSVTKCFSSKNSPLKDSFSNSSWEIEAQAFFILSDQHPNIISPHLTFSEGLDELLKLEGNFPEENNDKKSIYYLGVTSIKKRESGVLLTDKSRVSCPFPAPCLFTDIRVLQDSCSHFVENNINLGTSSKKTFASYMPQFQTCSTQTHKIMENKMCDLTV

SEQ ID NO: 769979 - protein, 906 aa, Homo sapiens
MICQKFCVVLLHWEFIYVITAFNLSYPITPWRFKLSCMPPNSTYDYFLLPAGLSKNTSNSNGHYETAVEPKFNSSGTHFSNLSKTTFHCCFRSEQDRNCSLCADNIEGKTFVSTVNSLVFQQIDANWNIQCWLKGDLKLFICYVESLFKNLFRNYNYKVHLLYVLPEVLEDSPLVPQKGSFQMVHCNCSVHECCECLVPVPTAKLNDTLLMCLKITSGGVIFQSPLMSVQPINMVKPDPPLGLHMEITDDGNLKISWSSPPLVPFPLQYQVKYSENSTTVIREADKIVSATSLLVDSILPGSSYEVQVRGKRLDGPGIWSDWSTPRVFTTQDVIYFPPKILTSVGSNVSFHCIYKKENKIVPSKEIVWWMNLAEKIPQSQYDVVSDHVSKVTFFNLNETKPRGKFTYDAVYCCNEHECHHRYAELYVIDVNINISCETDGYLTKMTCRWSTSTIQSLAESTLQLRYHRSSLYCSDIPSIHPISEPKDCYLQSDGFYECIFQPIFLLSGYTMWIRINHSLGSLDSPPTCVLPDSVVKPLPPSSVKAEITINIGLLKISWEKPVFPENNLQFQIRYGLSGKEVQWKMYEVYDAKSKSVSLPVPDLCAVYAVQVRCKRLDGLGYWSNWSNPAYTVVMDIKVPMRGPEFWRIINGDTMKKEKNVTLLWKPLMKNDSLCSVQRYVINHHTSCNGTWSEDVGNHTKFTFLWTEQAHTVTVLAINSIGASVANFNLTFSWPMSKVNIVQSLSAYPLNSSCVIVSWILSPSDYKLMYFIIEWKNLNEDGEIKWLRISSSVKKYYIHDHFIPIEKYQFSLYPIFMEGVGKPKIINSFTQDDIEKHQSDAGLYVIVPVIISSSILLLGTLLISHQRMKKLFWEDVPNPKNCSWAQGLNFQKKMPGTKELLGGGWLT

SEQ ID NO: 769980 - protein, 958 aa, Homo sapiens
MICQKFCVVLLHWEFIYVITAFNLSYPITPWRFKLSCMPPNSTYDYFLLPAGLSKNTSNSNGHYETAVEPKFNSSGTHFSNLSKTTFHCCFRSEQDRNCSLCADNIEGKTFVSTVNSLVFQQIDANWNIQCWLKGDLKLFICYVESLFKNLFRNYNYKVHLLYVLPEVLEDSPLVPQKGSFQMVHCNCSVHECCECLVPVPTAKLNDTLLMCLKITSGGVIFQSPLMSVQPINMVKPDPPLGLHMEITDDGNLKISWSSPPLVPFPLQYQVKYSENSTTVIREADKIVSATSLLVDSILPGSSYEVQVRGKRLDGPGIWSDWSTPRVFTTQDVIYFPPKILTSVGSNVSFHCIYKKENKIVPSKEIVWWMNLAEKIPQSQYDVVSDHVSKVTFFNLNETKPRGKFTYDAVYCCNEHECHHRYAELYVIDVNINISCETDGYLTKMTCRWSTSTIQSLAESTLQLRYHRSSLYCSDIPSIHPISEPKDCYLQSDGFYECIFQPIFLLSGYTMWIRINHSLGSLDSPPTCVLPDSVVKPLPPSSVKAEITINIGLLKISWEKPVFPENNLQFQIRYGLSGKEVQWKMYEVYDAKSKSVSLPVPDLCAVYAVQVRCKRLDGLGYWSNWSNPAYTVVMDIKVPMRGPEFWRIINGDTMKKEKNVTLLWKPLMKNDSLCSVQRYVINHHTSCNGTWSEDVGNHTKFTFLWTEQAHTVTVLAINSIGASVANFNLTFSWPMSKVNIVQSLSAYPLNSSCVIVSWILSPSDYKLMYFIIEWKNLNEDGEIKWLRISSSVKKYYIHDHFIPIEKYQFSLYPIFMEGVGKPKIINSFTQDDIEKHQSDAGLYVIVPVIISSSILLLGTLLISHQRMKKLFWEDVPNPKNCSWAQGLNFQKMLEGSMFVKSHHHSLISSTQGHKHCGRPQGPLHRKTRDLCSLVYLLTLPPLLSYDPAKSPSVRNTQE

SEQ ID NO: 769981 - protein, 178 aa, Homo sapiens
EFCTGGGGALRGRGGLGDPRGTSRSGLGRLPGPWQEAGSSRGPSSGDMAGVKALVALSFSGAIGLTFLMLGCALEDYGVYWPLFVLIFHAISPIPHFIAKRVTYDSDATSSACRELAYFFTTGIVVSAFGFPVILARVAVIKWGACGLVLAGNAVIFLTIQGFFLIFGRGDDFSWEQW

SEQ ID NO: 769982 - protein, 134 aa, Homo sapiens
SSLDMAGVTLVALSFSGAIGLTFLMLGCALEDYGVYWPLFVLIFHAISPIPHFIAKRVTYDSDATSSACRELAYFFTTGIVVSAFGFPVILARVAVIKWGACGLVLAGNAVIFLTIQGFFLIFGRGDDFSWEQW

SEQ ID NO: 769983 - protein, 140 aa, Homo sapiens
SSLDMAGVTLVALSFSGAIGLTFLMLGCALEDYGLGPTDSVYWPLFVLIFHAISPIPHFIAKRVTYDSDATSSACRELAYFFTTGIVVSAFGFPVILARVAVIKWGACGLVLAGNAVIFLTIQGFFLIFGRGDDFSWEQW

SEQ ID NO: 769984 - protein, 115 aa, Homo sapiens
ALQDSARALVALSFSGAIGLTFLMLGCALEDYGVYWPLFVLIFHAISPIPHFIAYFFTTGIVVSAFGFPVILARVAVIKWGACGLVLAGNAVIFLTIQGFFLIFGRGDDFSWEQW

SEQ ID NO: 769985 - protein, 178 aa, Homo sapiens; identical to SEQ ID NO: 769981

SEQ ID NO: 769986 - protein, 178 aa, Homo sapiens; identical to SEQ ID NO: 769981

SEQ ID NO: 769987 - protein, 896 aa, Homo sapiens
MICQKFCVVLLHWEFIYVITAFNLSYPITPWRFKLSCMPPNSTYDYFLLPAGLSKNTSNSNGHYETAVEPKFNSSGTHFSNLSKTTFHCCFRSEQDRNCSLCADNIEGKTFVSTVNSLVFQQIDANWNIQCWLKGDLKLFICYVESLFKNLFRNYNYKVHLLYVLPEVLEDSPLVPQKGSFQMVHCNCSVHECCECLVPVPTAKLNDTLLMCLKITSGGVIFQSPLMSVQPINMVKPDPPLGLHMEITDDGNLKISWSSPPLVPFPLQYQVKYSENSTTVIREADKIVSATSLLVDSILPGSSYEVQVRGKRLDGPGIWSDWSTPRVFTTQDVIYFPPKILTSVGSNVSFHCIYKKENKIVPSKEIVWWMNLAEKIPQSQYDVVSDHVSKVTFFNLNETKPRGKFTYDAVYCCNEHECHHRYAELYVIDVNINISCETDGYLTKMTCRWSTSTIQSLAESTLQLRYHRSSLYCSDIPSIHPISEPKDCYLQSDGFYECIFQPIFLLSGYTMWIRINHSLGSLDSPPTCVLPDSVVKPLPPSSVKAEITINIGLLKISWEKPVFPENNLQFQIRYGLSGKEVQWKMYEVYDAKSKSVSLPVPDLCAVYAVQVRCKRLDGLGYWSNWSNPAYTVVMDIKVPMRGPEFWRIINGDTMKKEKNVTLLWKPLMKNDSLCSVQRYVINHHTSCNGTWSEDVGNHTKFTFLWTEQAHTVTVLAINSIGASVANFNLTFSWPMSKVNIVQSLSAYPLNSSCVIVSWILSPSDYKLMYFIIEWKNLNEDGEIKWLRISSSVKKYYIHDHFIPIEKYQFSLYPIFMEGVGKPKIINSFTQDDIEKHQSDAGLYVIVPVIISSSILLLGTLLISHQRMKKLFWEDVPNPKNCSWAQGLNFQKRTDIL

SEQ ID NO: 769988 - protein, 896 aa, Homo sapiens; identical to SEQ ID NO: 769987

SEQ ID NO: 769989 - protein, 386 aa, Homo sapiens [sequence omitted]

SEQ ID NO: 769990 - protein, 190 aa, Homo sapiens
EFCTGGGGALRGRGGLGDPRGTSRSGLGRLPGPWQEAGSSRGPSSGDMAGVKALVALSFSGAIGLTFLMLGCALEDYGVYWPLFVLIFHAISPIPHFIAKRVTYDSDATSSACRELAYFFTTGIVVSAFGFPVILARVAVVSFIFYCFAQPLLSLLQRPVSGTSISCSLLRLYTQGRVFLVSLFLYFRPA

SEQ ID NO: 769991 - protein, 958 aa, Homo sapiens; identical to SEQ ID NO: 769980

SEQ ID NO: 769992 - protein, 204 aa, Homo sapiens
GTRLHTSDWEFIYVITAFNLSYPITPWRFKLSCMPPNSTYDYFLLPAGLSKNTSNSNGHYETAVEPKFNSSGTHFSNLSKTTFHCCFRSEQDRNCSLCADNIEGKTFVSTVNSLVFQQIDANWNIQCWLKGDLKLFICYVESLFKNLFRNYNYKVHLLYVLPEVCSPGISKNGQTREHALLAYTLCVKQSNCRCNKMVPLTTYS

SEQ ID NO: 769993 - protein, 110 aa, Homo sapiens
MLGCALEDYGVYWPLFVLIFHAISPIPHFIAKRVTYDSDATSSACRELAYFFTTGIVVSAFGFPVILARVAVIKWGACGLVLAGNAVIFLTIQGFFLIFGRGDDFSWEQW

SEQ ID NO: 769994 - protein, 120 aa, Homo sapiens
EFCTGGGGALRGRGGLGDPRGTSRSGLGRLPGPWQEAGSSRGPSSGDMAGVKALVALSFSGAIGLTFLMLGCALEDYGSNGEPAALCWQAMQSFSLQFKGFSLYLEEEMILAGSSGSTLF

SEQ ID NO: 769995 - protein, 178 aa, Homo sapiens; identical to SEQ ID NO: 769981

SEQ ID NO: 769996 - protein, 178 aa, Homo sapiens; identical to SEQ ID NO: 769981

SEQ ID NO: 769997 - protein, 896 aa, Homo sapiens; identical to SEQ ID NO: 769987

SEQ ID NO: 769998 - protein, 896 aa, Homo sapiens; identical to SEQ ID NO: 769987

SEQ ID NO: 769999 - protein, 152 aa, Homo sapiens
SSLDMAGVTLVALSFSGAIGLTFLMLGCALEDYGLGPTDSVYWPLFVLIFHAISPIPHFIAKRVTYDSDATSSACRELAYFFTTGIVVSAFGFPVILARVAVVSFIFYCFAQPLLSLLQRPVSGTSISCSLLRLYTQGRVFLVSLFLYFRPA

SEQ ID NO: 770000 - protein, 34 aa, Homo sapiens
MATVTALRRKVPPAVTGITFLSGGQSEEEASINL

SEQ ID NO: 770001 - protein, 295 aa, Homo sapiens
RWCQHQPPCRSQRTFSPPLSYSLSVSKISVNYLLDCIDAIEKAACSLKVMVLKAEHTRSPSATLPSNVPSCRSLSSSEDGPSGPSSLADGGLAHNLQDSVRHRILYLSEQLRVEKASRDGNTVSYLKLVSKADRHQVPHIQQAFEKVNQRASATIAQIEHRLHQCHQQLQELEEGCRPEGLLLMAESDPANCEPPSEKALLSEPPEPGGEDGPVNLPHASRPFILESRFQSLQQGTCLETEDVAQQQNLLLQKVKAELEEAKRFHISLQESYHSLKERSLTDLQLLLESLQEEKC

SEQ ID NO: 770002 - protein, 126 aa, Homo sapiens
MKSVAQLVYFFGLLLLNFVSPKSEYESFCVLSLLLFFREVKVVGVQPIFVYFFCSSYIYYYWWFLSGNFSFTLTLALPPSAFFSWLQLSTIICGFPEGEPWWSGGGGSPHSKSGVVGVPDRVLIQE

SEQ ID NO: 770003 - protein, 135 aa, Homo sapiens
MVLGTIDLCSCFSAGLPKTEANWVNVISDLKKIEDLIQSMHIDATLYTESDVHPSCKVTAMKCFLLELQVISLESGDASIHDTVENLIILANNSLSSNGNVTESGCKECEELEEKNIKEFLQSFVHIVQMFINTS

SEQ ID NO: 770004 - protein, 162 aa, Homo sapiens
MRISKPHLRSISIQCYLCLLLNSHFLTEAGIHVFILGCFSAGLPKTEANWVNVISDLKKIEDLIQSMHIDATLYTESDVHPSCKVTAMKCFLLELQVISLESGDASIHDTVENLIILANNSLSSNGNVTESGCKECEELEEKNIKEFLQSFVHIVQMFINTS

SEQ ID NO: 770005 - protein, 102 aa, Homo sapiens
SGWQAPGGIPADSLTAFEVRRPPGGNWVAAPSRLRWLSPPTLQPGLDGGTELGFFALGGEWWWLKGRWNFPRKPTPRAPPSSSVTLRSILLAELPRLLMGKT

SEQ ID NO: 770006 - protein, 135 aa, Homo sapiens; identical to SEQ ID NO: 770003

SEQ ID NO: 770007 - protein, 162 aa, Homo sapiens; identical to SEQ ID NO: 770004

SEQ ID NO: 770008 - protein, 162 aa, Homo sapiens; identical to SEQ ID NO: 770004

SEQ ID NO: 770009 - protein, 106 aa, Homo sapiens
SGWQAPGGIPADSLTAFEVRRPPGGNWVAAPSRLRWLSPPTLQPGLDGESIPIYGHVALWSNVPSCSMLLTSHGAQKSMLADSQPIQDRFQLVAPLCPELMGSWSH

SEQ ID NO: 770010 - protein, 162 aa, Homo sapiens; identical to SEQ ID NO: 770004

SEQ ID NO: 770011 - protein, 136 aa, Homo sapiens [sequence omitted]

SEQ ID NO: 770012 - protein, 34 aa, Homo sapiens
MLGTALPRQDLSVDSFQRSCLARRWPRLQPSQAL

SEQ ID NO: 770013 - protein, 155 aa, Homo sapiens
EPALLSPWAVNGARRCEAGGGACQGGSGGAGGSGGLLRHAGLQVPSPSRWEEAEAWQELERCAGRPEVLADPAHPPQLLAQVLSFSLPGASIVSCLLGMRGQPSPHPPGTRAGQRAPARGPGSTRASLSKPPGKQREPAPASASPERGFHSAAVS

SEQ ID NO: 770014 - protein, 110 aa, Homo sapiens [sequence omitted]

SEQ ID NO: 770015 - protein, 87 aa, Homo sapiens
RTRGSTHASARLREDDTRGGLALCSVFGFCHYRLPQLYCENSAAPLMCTWMMLLLHLHLLHVTHALPLPSAHSKFKERRKANLYPCP

SEQ ID NO: 770016 - protein, 384 aa, Homo sapiens
SKAKESQQYYHSLAVRQSLAVHFNIQQDCGHFLAEVPNRLLPWEDPDDPEKDEDDMEETEEDAKGETDGKNPKPCSEAASSQKENQGVMSKKQRSHVVVITREVPCLTVADFVRDSLAQHGKSPDLYERQVCLLLLQLCSGLEHLKPYHVTHCDLRLENLLLVHYQPGGTAQGFGPAEPSPTSSYPTRLIVSNFSQAKQKSHLVDPEILRDQSRLAPEIITATQYKKCDEFQTGILIYEMLHLPNPFDENPELKEREYTRADLPRIPFRSPYSRGLQQLASCLLNPNPSERILISDAKGILQCLLWGPREDLFQTFTACPSLVQRNTLLQNWLDIKRTLLMIKFAEKSLDREGGISLEDWLCAQYLAFATTDSLSCIVKILQHR

SEQ ID NO: 770017 - protein, 85 aa, Homo sapiens
VNTDLETWALACSAPWRIWAQMVWAPTCCLLRVPGWAHAGHHPSLGSVYHILLAFLGDHVDWLSRASQCQECSRFHPLFLLERFS

SEQ ID NO: 770018 - protein, 183 aa, Homo sapiens
MLARMARSPDLVICQPRAPKVLRLQDIAKDFPRGEESLETLEEQSAGVIRNTSPLGAEKITGELEEMRKVLEKLRALWEEEEERLRGLLRSRGAWEQQIKQLEAELSEFRMVLQRLAQEGLQPAAKAGTEDELVAHWRRYSATRAALASEEPRVDRLQAQLKELIVFPHNLKPLSDSVIATIQ

SEQ ID NO: 770019 - protein, 114 aa, Homo sapiens
MTLGKVLTFLTSAFPDLENRVKLPCLHASKALAHTQGCSPALPPRSSMTGKTEGERNTCKFGVSYDRGARTFSRRQAMASRAQSTVRVKEDDSTHNSCSVNIFSLLQPYSFHIA

SEQ ID NO: 770020 - protein, 113 aa, Homo sapiens
MATRTLNLSFFPRSHWPPGTCSLATAIMKDLTGLSTCAQATQVEVEGMGFKPRPSLALNIYLKQPPYQEGGCPAWSEECMEQSQPTQVGCVTWPRNPPMLLRATAPWGHVSPN

SEQ ID NO: 770021 - protein, 134 aa, Homo sapiens
PRSAVLLIHSSAEALAVCSSNTDAVSFAGDWKWRSEFHSGNVWPASRRGRASEGLVRCRAQHSEHTSCAPLFVGVSVRDPDAEAWLVGWCDMGFLRARVDHVSAYRAVALHVDRNACSDMLCGCVMPQIIPLTA

SEQ ID NO: 770022 - protein, 34 aa, Homo sapiens
SSSSSSSGSQLKCHLLGKASLIPPASNVTCTPSH

SEQ ID NO: 770023 - protein, 316 aa, Homo sapiens [sequence omitted]

SEQ ID NO: 770024 - protein, 284 aa, Homo sapiens
MVEFAPLFMPWERRLQTLAVLQFVFSFLALAEICTVGFIALLFTRFWLLTVLYAAWWYLDRDKPRQGGRHIQAIRCWTIWKYMKDYFPISLVKTAELDPSRNYIAGFHPHGVLAVGAFANLCTESTGFSSIFPGIRPHLMMLTLWFRAPFFRDYIMSAGLVTSEKESAAHILNRKGGGNLLGIIVGGAQEALDARPGSFTLLLRNRKGFVRLALTHGYQASGKSTLGSVGNWQGFYFGGKMAETNADSILVEIFSPFTIKIIFWCLMPKYLEKFPQRRLSDLRN

SEQ ID NO: 770025 - protein, 154 aa, Homo sapiens
ATMERPLEKPSCSLGIKTSNASLQDSTSQPPSITSLSVNNLIHQSSISHPLASCAGLSPTSEQTTVPATVNLTVSSSSYGSQPPGPSLMTEYSQEQLNTMTSTIPNSQIQEPLLKPSHESRKDSAKRAVQDDLLLSSAKRQKHCQPAPLRLESM

SEQ ID NO: 770026 - protein, 216 aa, Homo sapiens
TFLSSTVKRAGTCQARPNRTSGAMRLLPLLRTVLWAAFLGSPLRGGSSLRHVVYWNSSNPRLLRGDAVVELGLNDYLDIVCPHYEGPGPPEGPETFALYMVDWPGYESCQAEGPRAYKRWVCSLPFGHVQFSEKIQRFTPFSLGFEFLPGETYYYISVPTPESSGQCLRLQVSVCCKERNLPSHPKEPESSQDPLEEEGSLLPALGVPIQTDKMEH

SEQ ID NO: 770027 - protein, 224 aa, Homo sapiens
TFLSSTVKRAGTCQARPNRTSGAMRLLPLLRTVLWAAFLGSPLRGGSSLRHVVYWNSSNPRLLRGDAVVELGLNDYLDIVCPHYEGPGPPEGPETFALYMVDWPGYESCQAEGPRAYKRWVCSLPFGHVQFSEKIQRFTPFSLGFEFLPGETYYYISVPTPESSGQCLRLQVSVCCKERKSESAHPVGSPGESGTSGWRGGDTPSPLCLLLLLLLLILRLLRIL

SEQ ID NO: 770028 - protein, 224 aa, Homo sapiens; identical to SEQ ID NO: 770027

SEQ ID NO: 770029 - protein, 179 aa, Homo sapiens
MRLLPLLRTVLWAAFLGSPLRGGSSLRHVVYWNSSNPRLLRGDAVVELGLNDYLDIVCPHYEGPGPPEGPETFALYMVDWPGYESCQAEGPRAYKRWVCSLPFGHVQFSEKIQRFTPFSLGFEFLPGETYYYISVPTPESSGQCLRLQVSVCCKERSDSCRSLSPHHRLKKSSRQPWTL

SEQ ID NO: 770030 - protein, 110 aa, Homo sapiens
MPAAWILWAHSHSELHTVMETPLEKALTTMVTTFHKYSGREGSKLTLSRKELKELIKKELCLGEMKESSIDDLMKSLDKNSDQEIDFKEYSVFLTMLCMAYNDFFLEDNK

SEQ ID NO: 770031 - protein, 107 aa, Homo sapiens
MYIKEHKGTPKLHTVMETPLEKALTTMVTTFHKYSGREGSKLTLSRKELKELIKKELCLGEMKESSIDDLMKSLDKNSDQEIDFKEYSVFLTMLCMAYNDFFLEDNK

SEQ ID NO: 770032 - protein, 121 aa, Homo sapiens
SPLSALDSLFALSPTLIMGHSSISELHTVMETPLEKALTTMVTTFHKYSGREGSKLTLSRKELKELIKKELCLGEMKESSIDDLMKSLDKNSDQEIDFKEYSVFLTMLCMAYNDFFLEDNK

SEQ ID NO: 770033 - protein, 30 aa, Homo sapiens
LTPPLRPAAKSLSGVFNSANPGAAQPPGKK

SEQ ID NO: 770034 - protein, 456 aa, Homo sapiens
VRKQDKVGILGERAGTMRPHLSPPLQQLLLPVLLACAAHSTGALPRLCDVLQVLWEEQDQCLQELSREQTGDLGTEQPVPGCEGMWDNISCWPSSVPGRMVEVECPRFLRMLTSRNGSLFRNCTQDGWSETFPRPNLACGVNVNDSSNEKRHSYLLKLKVMYTVGYSSSLVMLLVALGILCAFRRLHCTRNYIHMHLFVSFILRALSNFIKDAVLFSSDDVTYCDAHRAGCKLVMVLFQYCIMANYSWLLVEGLYLHTLLAISFFSERKYLQGFVAFGWGSPAIFVALWAIARHFLEDVGCWDINANASIWWIIRGPVILSILINFILFINILRILMRKLRTQETRGNEVSHYKRLARSTLLLIPLFGIHYIVFAFSPEDAMEIQLFFELALGSFQGLVVAVLYCFLNGEVQLEVQKKWQQWHLREFPLHPVASFSNSTKASHLEQSQGTCRTSII

SEQ ID NO: 770035 - protein, 262 aa, Homo sapiens
MHLFVSFILRALSNFIKDAVLFSSDDVTYCDAHRAGCKLVMVLFQYCIMANYSWLLVEGLYLHTLLAISFFSERKYLQGFVAFGWGSPAIFVALWAIARHFLEDVGCWDINANASIWWIIRGPVILSILINFILFINILRILMRKLRTQETRGNEVSHYKRLARSTLLLIPLFGIHYIVFAFSPEDAMEIQLFFELALGSFQGLVVAVLYCFLNGEVQLEVQKKWQQWHLREFPLHPVASFSNSTKASHLEQSQGTCRTSII

SEQ ID NO: 770036 - protein, 440 aa, Homo sapiens
MRPHLSPPLQQLLLPVLLACAAHSTGALPRLCDVLQVLWEEQDQCLQELSREQTGDLGTEQPVPGCEGMWDNISCWPSSVPGRMVEVECPRFLRMLTSRNGSLFRNCTQDGWSETFPRPNLACGVNVNDSSNEKRHSYLLKLKVMYTVGYSSSLVMLLVALGILCAFRRLHCTRNYIHMHLFVSFILRALSNFIKDAVLFSSDDVTYCDAHRAGCKLVMVLFQYCIMANYSWLLVEGLYLHTLLAISFFSERKYLQGFVAFGWGSPAIFVALWAIARHFLEDVGCWDINANASIWWIIRGPVILSILINFILFINILRILMRKLRTQETRGNEVSHYKRLARSTLLLIPLFGIHYIVFAFSPEDAMEIQLFFELALGSFQGLVVAVLYCFLNGEVQLEVQKKWQQWHLREFPLHPVASFSNSTKASHLEQSQGTCRTSII

SEQ ID NO: 770037 - protein, 159 aa, Homo sapiens
MEAVPWLEVTSTRTAQGCPRLQNQLKINFILFINILRILMRKLRTQETRGNEVSHYKRLARSTLLLIPLFGIHYIVFAFSPEDAMEIQLFFELALGSFQGLVVAVLYCFLNGEVQLEVQKKWQQWHLREFPLHPVASFSNSTKASHLEQSQGTCRTSII

SEQ ID NO: 770038 - protein, 88 aa, Homo sapiens
MGQEAVGGQGPLGLAPTLTPTLSFFSHFPLLPRKPSFPFQWAWESIATDVRAVLQPSSPTPGHQALPMPSSFSQRQSRRKSTANLPEA

SEQ ID NO: 770039 - protein, 121 aa, Homo sapiens
GRGAANACLPGKSSHQERGVLVGCPSPALSARDALLRSSCELRGLRLRKAKLFQEAAAAPLALSGCGERAGGRGALQDSVVSEKLDFPGSEGQFGIVIEQNVGGIKCSEVEITLKTGPLAL

SEQ ID NO: 770040 - protein, 306 aa, Homo sapiens
MHTWLGVRVSAAPLGQGRWPHTHSFPSKLPMLTEGTSGVQARNEVRGILAGTNLLLLNPTGLCGLASGDRGVWFSAGGRPPWPVSGVLGSRVCGPLYSTSPAGPGRAASLPRKGAQLELEEMLVPRKMSVSPLESWLTARCFLPRLDTGTAGTVAPPQSYQCPPSQIGEGAEQGDEGVADAPQIQCKNVLKIRRRKMNHHKYRKLVKKTRFLRRKVQEGRLRRKQIKFEKDLRRIWLKAGLKEAPEGWQTPKIYLRGNESGAAFPPVAAVIENNLRIEEEKWDIMGEEVRKRRMDVVRNWDKREKG

SEQ ID NO: 770041 - protein, 247 aa, Homo sapiens
MLLGRLTSQLLRAVPWAGGRPPWPVSGVLGSRVCGPLYSTSPAGPGRAASLPRKGAQLELEEMLVPRKMSVSPLESWLTARCFLPRLDTGTAGTVAPPQSYQCPPSQIGEGAEQGDEGVADAPQIQCKNVLKIRRRKMNHHKYRKLVKKTRFLRRKVQEGRLRRKQIKFEKDLRRIWLKAGLKEAPEGWQTPKIYLRGNESGAAFPPVAAVIENNLRIEEEKWDIMGEEVRKRRMDVVRNWDKREKG

SEQ ID NO: 770042 - protein, 247 aa, Homo sapiens; identical to SEQ ID NO: 770041

SEQ ID NO: 770043 - protein, 638 aa, Homo sapiens
MSGDPDVLEYYKNDHSKKPLRIINLNFCEQVDAGLTFNKKELQDSFVFDIKTSERTFYLVAETEEDMNKWVQSICQICGFNQAEESTDSLRNVSSAGHGPRSSPAELSSSSQHLLRERKSSAPSHSSQPTLFTFEPPVSNHMQPTLSTSAPQEYLYLHQCISRRAENARSASFSQGTRASFLMRSDTAVQKLAQGNGHCVNGISGQVHGFYSLPKPSRHNTEFRDSTYDLPRSLASHGHTKGSLTGSETDNEDVYTFKTPSNTLCREFGDLLVDNMDVPATPLSAYQIPRTFTLDKNHNAMTVATPGDSAIAPPPRPPKPSQAETPRWGSPQQRPPISENSRSVAATIPRRNTLPAMDNSRLHRASSCETYEYPQRGGESAGRSAESMSDGVGSFLPGKMIVGRSDSTNSEDNYVPMNPGSSTLLAMERAGDNSQSVYIPMSPGAHHFDSLGYPSTTLPVHRGPSRGSEIQPPPVNRNLKPDRKAKPTPLDLRNNTVIDELPFKSPITKSWSRANHTFNSSSSQYCRPISTQSITSTDSGDSEENYVPMQNPVSASPVPSGTNSPAPKKSTGSVDYLALDFQPSSPSPHRKPSTSSVTSDEKVDYVQVDKEKTQALQNTMQEWTDVRQSSEPSKGAKL

SEQ ID NO: 770044 - protein, 158 aa, Homo sapiens
MHPNTGAPRFIKRVLRELQRDLDAHTIIMGDFNTPLSTLDRSMRQKVNYGYPGIELSSARNPRAWVPCRGSEIQPPPVNRNLKPDRKAKPTPLDLRNNTVIDELPFKSPITKSWSRANHTFNSSSSQYCRPISTQSITSTDSGDSEENYVPMVSPSGF

SEQ ID NO: 770045 - protein, 676 aa, Homo sapiens
MSGGGDVVCTGWLRKSPPEKKLRRYAWKKRWFILRSGRMSGDPDVLEYYKNDHSKKPLRIINLNFCEQVDAGLTFNKKELQDSFVFDIKTSERTFYLVAETEEDMNKWVQSICQICGFNQAEESTDSLRNVSSAGHGPRSSPAELSSSSQHLLRERKSSAPSHSSQPTLFTFEPPVSNHMQPTLSTSAPQEYLYLHQCISRRAENARSASFSQGTRASFLMRSDTAVQKLAQGNGHCVNGISGQVHGFYSLPKPSRHNTEFRDSTYDLPRSLASHGHTKGSLTGSETDNEDVYTFKTPSNTLCREFGDLLVDNMDVPATPLSAYQIPRTFTLDKNHNAMTVATPGDSAIAPPPRPPKPSQAETPRWGSPQQRPPISENSRSVAATIPRRNTLPAMDNSRLHRASSCETYEYPQRGGESAGRSAESMSDGVGSFLPGKMIVGRSDSTNSEDNYVPMNPGSSTLLAMERAGDNSQSVYIPMSPGAHHFDSLGYPSTTLPVHRGPSRGSEIQPPPVNRNLKPDRKAKPTPLDLRNNTVIDELPFKSPITKSWSRANHTFNSSSSQYCRPISTQSITSTDSGDSEENYVPMQNPVSASPVPSGTNSPAPKKSTGSVDYLALDFQPSSPSPHRKPSTSSVTSDEKVDYVQVDKEKTQALQNTMQEWTDVRQSSEPSKGAKL

SEQ ID NO: 770046 - protein, 676 aa, Homo sapiens; identical to SEQ ID NO: 770045

SEQ ID NO: 770047 - protein, 676 aa, Homo sapiens; identical to SEQ ID NO: 770045

SEQ ID NO: 770048 - protein, 320 aa, Homo sapiens
MSGGGDVVCTGWLRKSPPEKKLRRYAWKKRWFILRSGRMSGDPDVLEYYKNDHSKKPLRIINLNFCEQVDAGLTFNKKELQDSFVFDIKTSERTFYLVAETEEDMNKWVQSICQICGFNQAEESTDSLRNVSSAGHGPRSSPAELSSSSQHLLRERKSSAPSHSSQPTLFTFEPPVSNHMQPTLSTSAPQEYLYLHQCISRRAENARSASFSQGTRASFLMRSDTAVQKLAQGNGHCVNGISGQVHGFYSLPKPSRHNTEFRDSTYDLPRSLASHGHTKGSLTGSETDNEDVYTFKTPKFFLPHLGLHKMQGKPDWSQER

SEQ ID NO: 770049 - protein, 199 aa, Homo sapiens
MSGGGDVVCTGWLRKSPPEKKLRRYAWKKRWFILRSGRMSGDPDVLEYYKNDHSKKPLRIINLNFCEQVDAGLTFNKKELQDSFVFDIKTSERTFYLVAETEEDMNKWVQSICQICGFNQAEESTDSLRNVSSAGHGPRSSPAELSSSSQHLLRERKSSAPSHSSQPTLFTFEPPVSNHMQLAPELTTRPCINRSPLIT

SEQ ID NO: 770050 - protein, 676 aa, Homo sapiens; identical to SEQ ID NO: 770045

SEQ ID NO: 770051 - protein, 171 aa, Homo sapiens
MPLTPEPPSGRVEGPPAWEAAPWPSLPCGPCIPIMLVLATLAALFILTTAVLAERLFRRALRPDPSHRAPTLVWRPGGELWIEPMGTARERSEDWYGSAVPLLTDRAPEPPTQVGTLEARATAPPAPSAPNSAPSNLGPQTVLEVPARSTFWGPQPWEGRPPATGLVSWAE

SEQ ID NO: 770052 - protein, 75 aa, Homo sapiens
YNKNKAEVKKLLVASENKDMTYQNPWDTAKAVLRGKFIALNAHIKKLERSQFNNLISQLKGLENQEKTNPKTNRR

SEQ ID NO: 770053 - protein, 73 aa, Homo sapiens
SDCCASNQRDSLWVGPSEPGAAYNLVVRRFLSRSEKRSIRVGVTRFSRDGRRYLEKSGKSEEDTSKNRGRFSS

SEQ ID NO: 770054 - protein, 158 aa, Homo sapiens
RNQPVQKRNSEFLANVSTITSDYSTTSSAAYLTSLDSSRLSPEVQSAAESKGDEADDERSELISKGRPVETDSESEFPVFPTALTSERLFRGKLQEVTKSSRRNSEGSELSCTEGSLTSSLDSRRQLFSSHKLIECDTLSRKKSARFKSDSGSLGDAK

SEQ ID NO: 770055 - protein, 264 aa, Homo sapiens
EILTKLCKDNKLDGPYFHPGKIQIGNQVFSGKTIFTEEDTDETVESYEHLALKVLHSWEDIPEVGCRLVPEHIETRPLYHKDKPRMEQGRLQMWVDMFPKDMPQPGPPVDISPRRPKGYELRVTIWNTEDVILEDENIFTGQKSSDIYVKGWLKGLEDDKQETDVHYNSLTGEGNFNWRFLFPFQYLPAEKQMVITKRENIFSLEKMECKTPAVLVLQVWDFERLSSDDFLGTLEMNLNSFPRAAKSAKACDLAKFENASEETK

SEQ ID NO: 770056 - protein, 243 aa, Homo sapiens
MTVVGNPRSWSCQWLPILILLLGTGHGPGVEGVTHYKAGDPVILYVNKVGPYHNPQETYHYYQLPVCCPEKIRHKSLSLGEVLDGDRMAESLYEIRFRENVEKRILCHMQLSSAQVEQLRQAIEELYYFEFVVDDLPIRGFVGYMEESGFLPHSHKIGLWTHLDFHLEFHGDRIIFANVSVRDVKPHSLDGLRPDEILGLTHTYSVAQGLRLQWKRRSEKDAVVTMVVLSSNLGNPLVVHHQV

SEQ ID NO: 770057 - protein, 237 aa, Homo sapiens
AAAAVRRSNGQPRRSRSAGPLQPAATAPLWERPQQEPKGSYGGAKAAGAASASPSRALPVCCPEKIRHKSLSLGEVLDGDRMAESLYEIRFRENVEKRILCHMQLSSAQVEQLRQAIEELYYFEFVVDDLPIRGFVGYMEESGFLPHSHKIGLWTHLDFHLEFHGDRIIFANVSVRDVKPHSLDGLRPDEILGLTHTYSVAQGLRLQWKRTRVKRRRGDDGGSFLEPGKSIGCPSSS

SEQ ID NO: 770058 - protein, 240 aa, Homo sapiens
IYRILCPIPEGNRREKIYEEQNRGIYMFRINNEHVIDATLTGGPARYINHSCAPNCVAEVVTFDKEDKIIIISSRRIPKGEELTYDYQFDFEDDQHKIPCHCGAWNCRKWMNKEALRLPGRGVPLPTTSSLKGMRGKRGSSQSQDPGLGLPADPEPLEQEAGAEGPRPSPPWAPGTILFPTTGPQAGISAPSSRRGQTEAAIGHLRFEGDMGRELPRSIWEAAGWGKRMCGRASQPCCSH

SEQ ID NO: 770059 - protein, 220 aa, Homo sapiens
DLGLPGPSLQPSLASSACGTCSRLRLKMPVWGGGNKCGACGRTVYHAEEVQCDGRSFHRCCFLCMVCRKNLDSTTVAIHDEEIYCKSCYGKKYGPKGYGYGQGAGTLNMDRGERLGIKPESVQPHRPTTNPNTSKFAQKYGGAEKCSRCGDSVYAAEKIIGAGKPWHKNCFRCAKCGKSLESTTLTEKEGEIYCKGCYAKNFGPKGFGYGQGAGALVHAQ

SEQ ID NO: 770060 - protein, 132 aa, Homo sapiens
MVCRKNLDSTTVAIHDEEIYCKSCYGKKYGPKGYGYGQGAGTLNMDRGERLGIKPESVQPHRPTTNPNTSKFAQKYGGAEKCSRCGDSVYAAEKIIGAGKPWHKNCFRCAKCGKSLESTTLTEKEGEIYCKG

SEQ ID NO: 770061 - protein, 156 aa, Homo sapiens
MVCRKNLDSTTVAIHDEEIYCKSCYGKKYGPKGYGYGQGAGTLNMDRGERLGIKPESVQPHRPTTNPNTSKFAQKYGGAEKCSRCGDSVYAAEKIIGAGKPWHKNCFRCAKCGKSLESTTLTEKEGEIYCKGCYAKNFGPKGFGYGQGAGALVHAQ

SEQ ID NO: 770062 - protein, 125 aa, Homo sapiens
QENRNACPHLDPWAQNRGWSPREGPCPSLPSACLHTSVSVGSYSFSGDWSPSQGPCPFLPSTSLPPSISIESHFVAQAGVQWCDLGSLQPPLPGLKQSFRLSVPSSWDHRYEPPCLADFFIFSRD

SEQ ID NO: 770063 - protein, 1134 aa, Homo sapiens
MSRSVLQPSQQKLAEKLTILNDRGVGMLTRLYNIKKQGQVWKACGDPKAKPSYLIDKNLESAVKFIVRKFPAVETRNNNQQLAQLQKEKSEILKNLALYYFTFVDVMEFKDHVCELLNTIDVCQVFFDITVNFDLTKNYLDLIITYTTLMILLSRIEERKAIIGLYNYAHEMTHGASDREYPRLGQMIVDYENPLKKMMEEFVPHSKSLSDALISLQMVYPRRNLSADQWRNAQLLSLISAPSTMLNPAQSDTMPCEYLSLDAMEKWIIFGFILCHGILNTDATALNLWKLALQSSSCLSLFRDEVFHIHKAAEDLFVNIRGYNKRINDIRECKEAAVSHAGSMHRERRKFLRSALKELATVLSDQPGLLGPKALFVFMALSFARDEIIWLLRHADNMPKKSADDFIDKHIAELIFYMEELRAHVRKYGPVMQRYYVQYLSGFDAVVLNELVQNLSVCPEDESIIMSSFVNTMTSLSVKQVEDGEVFDFRGMRLDWFRLQAYTSVSKASLGLADHRELGKMMNTIIFHTKMVDSLVEMLVETSDLSIFCFYSRAFEKMFQQCLELPSQSRYSIAFPLLCTHFMSCTHELCPEERHHIGDRSLSLCNMFLDEMAKQARNLITDICTEQCTLSDQLLPKHCAKTISQAVNKKSKKQTGKKGEPEREKPGVESMRKNRLVVTNLDKLHTALSELCFSINYVPNMVVWEHTFTPREYLTSHLEIRFTKSIVGMTMYNQATQEIAKPSELLTSVRAYMTVLQSIENYVQIDITRVFNNVLLQQTQHLDSHGEPTITSLYTNWYLETLLRQVSNGHIAYFPAMKAFVNLPTENELTFNAEEYSDISEMRSLSELLGPYGMKFLSESLMWHISSQVAELKKLVVENVDVLTQMRTSFDKPDQMAALFKRLSSVDSVLKRMTIIGVILSFRSLAQEALRDVLSYHIPFLVSSIEDFKDHIPRETDMKVAMNVYELSSAAGLPCEIDPALVVALSSQKSENISPEEEYKIACLLMVFVAVSLPTLASNVMSQYSPAIEGHCNNIHCLAKAINQIAAALFTIHKGSIEDRLKEFLALASSSLLKIGQETDKTTTRNRESVYLLLDMIVQESPFLTMDLLESCFPYVLLRNAYHAVYKQSVTSSA

SEQ ID NO: 770064 - protein, 731 aa, Homo sapiens
MLWNLRHIAELIFYMEELRAHVRKYGPVMQRYYVQYLSGFDAVVLNELVQNLSVCPEDESIIMSSFVNTMTSLSVKQVEDGEVFDFRGMRLDWFRLQAYTSVSKASLGLADHRELGKMMNTIIFHTKMVDSLVEMLVETSDLSIFCFYSRAFEKMFQQCLELPSQSRYSIAFPLLCTHFMSCTHELCPEERHHIGDRSLSLCNMFLDEMAKQARNLITDICTEQCTLSDQLLPKHCAKTISQAVNKKSKKQTGKKGEPEREKPGVESMRKNRLVVTNLDKLHTALSELCFSINYVPNMVVWEHTFTPREYLTSHLEIRFTKSIVGMTMYNQATQEIAKPSELLTSVRAYMTVLQSIENYVQIDITRVFNNVLLQQTQHLDSHGEPTITSLYTNWYLETLLRQVSNGHIAYFPAMKAFVNLPTENELTFNAEEYSDISEMRSLSELLGPYGMKFLSESLMWHISSQVAELKKLVVENVDVLTQMRTSFDKPDQMAALFKRLSSVDSVLKRMTIIGVILSFRSLAQEALRDVLSYHIPFLVSSIEDFKDHIPRETDMKVAMNVYELSSAAGLPCEIDPALVVALSSQKSENISPEEEYKIACLLMVFVAVSLPTLASNVMSQYSPAIEGHCNNIHCLAKAINQIAAALFTIHKGSIEDRLKEFLALASSSLLKIGQETDKTTTRNRESVYLLLDMIVQESPFLTMDLLESCFPYVLLRNAYHAVYKQSVTSSA

SEQ ID NO: 770065 - protein, 998 aa, Homo sapiens
MSRSVLQPSQQKLAEKLTILNDRGVGMLTRLYNIKKACGDPKAKPSYLIDKNLESAVKFIVRKFPAVETRNNNQQLAQLQKEKSEILKNLALYYFTFVDVMEFKDHVCELLNTIDVCQVFFDITVNFDLTKNYLDLIITYTTLMILLSRIEERKAIIGLYNYAHEMTHGASDREYPRLGQMIVDYENPLKKMMEEFVPHSKSLSDALISLQMVYPRRNLSADQWRNAQLLSLISAPSTMLNPAQSDTMPCEYLSLDAMEKWIIFGFILCHGILNTDATALNLWKLALQSSSCLSLFRDEVFHIHKAAEDLFVNIRGYNKRINDIRECKEAAVSHAGSMHRERRKFLRSALKELATVLSDQPGLLGPKALFVFMALSFARDEIIWLLRHADNMPKKSADDFIDKHIAELIFYMEELRAHVRKYGPVMQRYYVQYLSGFDAVVLNELVQNLSVCPEDESIIMSSFVNTMTSLSVKQVEDGEVFDFRGMRLDWFRLQAYTSVSKASLGLADHRELGKMMNTIIFHTKMVDSLVEMLVETSDLSIFCFYSRAFEKMFQQCLELPSQSRYSIAFPLLCTHFMSCTHELCPEERHHIGDRSLSLCNMFLDEMAKQARNLITDILAKPKGKKTKKGGFWGAFKPPFSDQLLPKHCAKTISQAVNKKSKKQTGKKGEPEREKPGVESMRKNRLVVTNLDKLHTALSELCFSINYVPNMVVWEHTFTPREYLTSHLEIRFTKSIVGMTMYNQATQEIAKPSELLTSVRAYMTVLQSIENYVQIDITRVFNNVLLQQTQHLDSHGEPTITSLYTNWYLETLLRQVSNGHIAYFPAMKAFVNLPTENELTFNAEEYSDISEMRSLSELLGPYGMKFLSESLMWHISSQVAELKKLVVENVDVLTQMRTSFDKPDQMAALFKRLSSVDSVLKRMTIIGEFLALASSSLLKIGQETDKTTTRNRESVYLLLDMIVQESPFLTMDLLESCFPYVLLRNAYHAVYKQSVTSSA

SEQ ID NO: 770066 - protein, 1128 aa, Homo sapiens
MSRSVLQPSQQKLAEKLTILNDRGVGMLTRLYNIKKACGDPKAKPSYLIDKNLESAVKFIVRKFPAVETRNNNQQLAQLQKEKSEILKNLALYYFTFVDVMEFKDHVCELLNTIDVCQVFFDITVNFDLTKNYLDLIITYTTLMILLSRIEERKAIIGLYNYAHEMTHGASDREYPRLGQMIVDYENPLKKMMEEFVPHSKSLSDALISLQMVYPRRNLSADQWRNAQLLSLISAPSTMLNPAQSDTMPCEYLSLDAMEKWIIFGFILCHGILNTDATALNLWKLALQSSSCLSLFRDEVFHIHKAAEDLFVNIRGYNKRINDIRECKEAAVSHAGSMHRERRKFLRSALKELATVLSDQPGLLGPKALFVFMALSFARDEIIWLLRHADNMPKKSADDFIDKHIAELIFYMEELRAHVRKYGPVMQRYYVQYLSGFDAVVLNELVQNLSVCPEDESIIMSSFVNTMTSLSVKQVEDGEVFDFRGMRLDWFRLQAYTSVSKASLGLADHRELGKMMNTIIFHTKMVDSLVEMLVETSDLSIFCFYSRAFEKMFQQCLELPSQSRYSIAFPLLCTHFMSCTHELCPEERHHIGDRSLSLCNMFLDEMAKQARNLITDICTEQCTLSDQLLPKHCAKTISQAVNKKSKKQTGKKGEPEREKPGVESMRKNRLVVTNLDKLHTALSELCFSINYVPNMVVWEHTFTPREYLTSHLEIRFTKSIVGMTMYNQATQEIAKPSELLTSVRAYMTVLQSIENYVQIDITRVFNNVLLQQTQHLDSHGEPTITSLYTNWYLETLLRQVSNGHIAYFPAMKAFVNLPTENELTFNAEEYSDISEMRSLSELLGPYGMKFLSESLMWHISSQVAELKKLVVENVDVLTQMRTSFDKPDQMAALFKRLSSVDSVLKRMTIIGVILSFRSLAQEALRDVLSYHIPFLVSSIEDFKDHIPRETDMKVAMNVYELSSAAGLPCEIDPALVVALSSQKSENISPEEEYKIACLLMVFVAVSLPTLASNVMSQYSPAIEGHCNNIHCLAKAINQIAAALFTIHKGSIEDRLKEFLALASSSLLKIGQETDKTTTRNRESVYLLLDMIVQESPFLTMDLLESCFPYVLLRNAYHAVYKQSVTSSA

SEQ ID NO: 770067 - protein, 983 aa, Homo sapiens
MSRSVLQPSQQKLAEKLTILNDRGVGMLTRLYNIKKACGDPKAKPSYLIDKNLESAVKFIVRKFPAVETRNNNQQLAQLQKEKSEILKNLALYYFTFVDVMEFKDHVCELLNTIDVCQVFFDITVNFDLTKNYLDLIITYTTLMILLSRIEERKAIIGLYNYAHEMTHGASDREYPRLGQMIVDYENPLKKMMEEFVPHSKSLSDALISLQMVYPRRNLSADQWRNAQLLSLISAPSTMLNPAQSDTMPCEYLSLDAMEKWIIFGFILCHGILNTDATALNLWKLALQSSSCLSLFRDEVFHIHKAAEDLFVNIRGYNKRINDIRECKEAAVSHAGSMHRERRKFLRSALKELATVLSDQPGLLGPKALFVFMALSFARDEIIWLLRHADNMPKKSADDFIDKHIAELIFYMEELRAHVRKYGPVMQRYYVQYLSGFDAVVLNELVQNLSVCPEDESIIMSSFVNTMTSLSVKQVEDGEVFDFRGMRLDWFRLQAYTSVSKASLGLADHRELGKMMNTIIFHTKMVDSLVEMLVETSDLSIFCFYSRAFEKMFQQCLELPSQSRYSIAFPLLCTHFMSCTHELCPEERHHIGDRSLSLCNMFLDEMAKQARNLITDICTEQCTLSDQLLPKHCAKTISQAVNKKSKKQTGKKGEPEREKPGVESMRKNRLVVTNLDKLHTALSELCFSINYVPNMVVWEHTFTPREYLTSHLEIRFTKSIVGMTMYNQATQEIAKPSELLTSVRAYMTVLQSIENYVQIDITRVFNNVLLQQTQHLDSHGEPTITSLYTNWYLETLLRQVSNGHIAYFPAMKAFVNLPTENELTFNAEEYSDISEMRSLSELLGPYGMKFLSESLMWHISSQVAELKKLVVENVDVLTQMRTSFDKPDQMAALFKRLSSVDSVLKRMTIIGEFLALASSSLLKIGQETDKTTTRNRESVYLLLDMIVQESPFLTMDLLESCFPYVLLRNAYHAVYKQSVTSSA

SEQ ID NO: 770068 - protein, 390 aa, Homo sapiens
  misc_feature (4)..(5): Xaa can be any naturally occurring amino acid
RKKXXKGKRKYKIEKKRNLGTTYCKTSARPQLQKAQRQKVNSFMTLDHQIINPTLKWSQPAVPSGGPLVQHAHTTLDSDAGLTENPLTKLLAIGKEDDNAQWHMEDVIEDIIGMESSFKEEGADSPLLMQRTLSGSILDVYSGEQGISPINMGLTSASCPSSLPMKREITETDTRALAKERQKKDNHNLIERRRRYNINYRIKELGTLIPKSNDPDMRWNKGTILKASVEYIKWLQKEQQRARELEHRQKKLEQANRRLLLRIQELEIQARTHGLPTLASLGTVDLGAHVTKQQSHPEQNSVDYCQQLTVSQGPSPELCDQAIAFSDPLSYFTDLSFSAALKEEQRLDGMLLDDTISPFGTDPLLSATSPAVSKESSRRSSFSSDDGDEL

SEQ ID NO: 770069 - protein, 291 aa, Homo sapiens
LVIVCKFKEKKMMKEKEKTIAIVKVIDTSKLKLLSGSILDVYSGEQGISPINMGLTSASCPSSLPMKREITETDTRALAKERQKKDNHNLIERRRRYNINYRIKELGTLIPKSNDPDMRWNKGTILKASVEYIKWLQKEQQRARELEHRQKKLEQANRRLLLRIQELEIQARTHGLPTLASLGTVDLGAHVTKQQSHPEQNSVDYCQQLTVSQGPSPELCDQAIAFSDPLSYFTDLSFSAALKEEQRLDGMLLDDTISPFGTDPLLSATSPAVSKESSRRSSFSSDDGDEL

SEQ ID NO: 770070 - protein, 347 aa, Homo sapiens
MTLDHQIINPTLKWSQPAVPSGGPLVQHAHTTLDSDAGLTENPLTKLLAIGKEDDNAQWHMEDVIEDIIGMESSFKEEGADSPLLMQRTLSGSILDVYSGEQGISPINMGLTSASCPSSLPMKREITETDTRALAKERQKKDNHNLIERRRRYNINYRIKELGTLIPKSNDPDMRWNKGTILKASVEYIKWLQKEQQRARELEHRQKKLEQANRRLLLRIQELEIQARTHGLPTLASLGTVDLGAHVTKQQSHPEQNSVDYCQQLTVSQGPSPELCDQAIAFSDPLSYFTDLSFSAALKEEQRLDGMLLDDTISPFGTDPLLSATSPAVSKESSRRSSFSSDDGDEL

SEQ ID NO: 770071 - protein, 104 aa, Homo sapiens
ARPQLQKAQRQKVNSFMTLDHQIINPTLKWSQPAVPSGGPLVQHAHTTLDSDAGLTENPLTKLLAIGKEDDNAQWHVCLMAGYKNISSVFEKTSIKVIEVNILQ

SEQ ID NO: 770072 - protein, 347 aa, Homo sapiens; identical to SEQ ID NO: 770070

SEQ ID NO: 770073 - protein, 418 aa, Homo sapiens
ERRLQISQEISAHRTEFHMQFSYKPVLHRLVPARPQIYSSQLPSFTRVPAHLESSARPQLQKAQRQKVNSFMTLDHQIINPTLKWSQPAVPSGGPLVQHAHTTLDSDAGLTENPLTKLLAIGKEDDNAQWHMEDVIEDIIGMESSFKEEGADSPLLMQRTLSGSILDVYSGEQGISPINMGLTSASCPSSLPMKREITETDTRALAKERQKKDNHNLIERRRRYNINYRIKELGTLIPKSNDPDMRWNKGTILKASVEYIKWLQKEQQRARELEHRQKKLEQANRRLLLRIQELEIQARTHGLPTLASLGTVDLGAHVTKQQSHPEQNSVDYCQQLTVSQGPSPELCDQAIAFSDPLSYFTDLSFSAALKEEQRLDGMLLDDTISPFGTDPLLSATSPAVSKESSRRSSFSSDDGDEL

SEQ ID NO: 770074 - protein, 318 aa, Homo sapiens
MTLDHQIINPTLKWSQPAVPSGGPLVQHAHTTLDSDAGLTENPLTKLLAIGKEDDNAQWHLSGSILDVYSGEQGISPINMGLTSASCPSSLPMKREITETDTRALAKERQKKDNHNLIERRRRYNINYRIKELGTLIPKSNDPDMRWNKGTILKASVEYIKWLQKEQQRARELEHRQKKLEQANRRLLLRIQELEIQARTHGLPTLASLGTVDLGAHVTKQQSHPEQNSVDYCQQLTVSQGPSPELCDQAIAFSDPLSYFTDLSFSAALKEEQRLDGMLLDDTISPFGTDPLLSATSPAVSKESSRRSSFSSDDGDEL

SEQ ID NO: 770075 - protein, 823 aa, Homo sapiens
MALPRCTWPNYVWRAVMACLVHRGLGAPLTLCMLGCLLQAGHVLSQKLDDVDPLVATNFGKIRGIKKELNNEILGPVIQFLGVPYAAPPTGERRFQPPEPPSPWSDIRNATQFAPVCPQNIIDGRLPEVMLPVWFTNNLDVVSSYVQDQSEDCLYLNIYVPTEDDIRDSGGPKPVMVYIHGGSYMEGTGNLYDGSVLASYGNVIVITVNYRLGVLGFLSTGDQAAKGNYGLLDLIQALRWTSENIGFFGGDPLRITVFGSGAGGSCVNLLTLSHYSEGNRWSNSTKGLFQRAIAQSGTALSSWAVSFQPAKYARMLATKVGCNVSDTVELVECLQKKPYKELVDQDIQPARYHIAFGPVIDGDVIPDDPQILMEQGEFLNYDIMLGVNQGEGLKFVENIVDSDDGISASDFDFAVSNFVDNLYGYPEGKDVLRETIKFMYTDWADRHNPETRRKTLLALFTDHQWVAPAVATADLHSNFGSPTYFYAFYHHCQTDQVPAWADAAHGDEVPYVLGIPMIGPTELFPCNFSKNDVMLSAVVMTYWTNFAKTGDPNQPVPQDTKFIHTKPNRFEEVAWTRYSQKDQLYLHIGLKPRVKEHYRANKVNLWLELVPHLHNLNDISQYTSTTTKVPSTDITFRPTRKNSVPVTSAFPTAKQDDPKQQPSPFSVDQRDYSTELSVTIAVGASLLFLNILAFAALYYKKDKRRHDVHRRCSPQRTTTNDLTHAQEEEIMSLQMKHTDLDHECESIHPHEVVLRTACPPDYTLAMRRSPDDVPLMTPNTITMIPNTIPGIQPLHTFNTFTGGQNNTLPHPHPHPHSHSTTRV

SEQ ID NO: 770076 - protein, 509 aa, Homo sapiens
MLATKVGCNVSDTVELVECLQKKPYKELVDQDIQPARYHIAFGPVIDGDVIPDDPQILMEQGEFLNYDIMLGVNQGEGLKFVENIVDSDDGISASDFDFAVSNFVDNLYGYPEGKDVLRETIKFMYTDWADRHNPETRRKTLLALFTDHQWVAPAVATADLHSNFGSPTYFYAFYHHCQTDQVPAWADAAHGDEVPYVLGIPMIGPTELFPCNFSKNDVMLSAVVMTYWTNFAKTGDPNQPVPQDTKFIHTKPNRFEEVAWTRYSQKDQLYLHIGLKPRVKEHYRANKVNLWLELVPHLHNLNDISQYTSTTTKVPSTDITFRPTRKNSVPVTSAFPTAKQDDPKQQPSPFSVDQRDYSTELSVTIAVGASLLFLNILAFAALYYKKDKRRHDVHRRCSPQRTTTNDLTHAQEEEIMSLQMKHTDLDHECESIHPHEVVLRTACPPDYTLAMRRSPDDVPLMTPNTITMIPNTIPGIQPLHTFNTFTGGQNNTLPHPHPHPHSHSTTRV

SEQ ID NO: 770077 - protein, 509 aa, Homo sapiens; identical to SEQ ID NO: 770076

SEQ ID NO: 770078 - protein, 132 aa, Homo sapiens
MRSQERRGPCASCCPTQSSRASGRVCSPLAAGPVHLVDHSISAQCVSSQHSVQYVAGTHDTLVEQRPGCPHPYRSSFLSARYSSRGNSIFRASPMTKSQTSELLPRAVWSVFVLISRHSKNSHATPPKAGNP

SEQ ID NO: 770079 - protein, 96 aa, Homo sapiens
MPKEALKLPGTLPNPGRAVIKNGAQKAPGTFTDTRHLHQPCSRIVLLQTTSSEGSPAGWEIAPPGPHCGYTRRYTSESATHTPEISLYCAYTTHRA

SEQ ID NO: 770080 - protein, 394 aa, Homo sapiens
RGGAAAGRGRMTRRGRRRSSHFLGPPAGAAGCTQRRSRELAAAAMSHQTGIQASEDVKEIFARARNGKYRLLKISIENEQLVIGSYSQPSDSWDKDYDSFVLPLLEDKQPCYILFRLDSQNAQGYEWIFIAWSPDHSHVRQKMLYAATRATLKKEFGGGHIKDEVFGTVKEDVSLHGYKKYLLSQSSPAPLTAAEEELRQIKINEVQTDVGVDTKHQTLQGVAFPISREAFQALEKLNNRQLNYVQLEIDIKNEIIILANTTNTELKDLPKRIPKDSARYHFFLYKHSHEGDYLESIVFIYSMPGYTCSIRERMLYSSCKSRLLEIVERQLQMDVIRKIEIDNGDELTADFLYEEVHPKQHAHKQSFAKPKGPAGKRGIRRLIRGPAETEATTD

SEQ ID NO: 770081 - protein, 394 aa, Homo sapiens; identical to SEQ ID NO: 770080

SEQ ID NO: 770082 - protein, 524 aa, Homo sapiens
RGGAAAGRGRMTRRGRRRSSHFLGPPAGAAGCTQRRSRELAAAAMSHQTGIQGNSARRDSQGRGFRESRESREGCRTGRAGVGPGAPEVGLAGRAGPRRLSALLLPGRCRPASSSSPVPAAVTLQIDPKFGGAKEIGFRGGLVEGGVPSTVPDSRPTFPLLVTYGRAGTVEATGASVRCREPASEDVKEIFARARNGKYRLLKISIENEQLVIGSYSQPSDSWDKDYDSFVLPLLEDKQPCYILFRLDSQNAQGYEWIFIAWSPDHSHVRQKMLYAATRATLKKEFGGGHIKDEVFGTVKEDVSLHGYKKYLLSQSSPAPLTAAEEELRQIKINEVQTDVGVDTKHQTLQGVAFPISREAFQALEKLNNRQLNYVQLEIDIKNEIIILANTTNTELKDLPKRIPKDSARYHFFLYKHSHEGDYLESIVFIYSMPGYTCSIRERMLYSSCKSRLLEIVERQLQMDVIRKIEIDNGDELTADFLYEEVHPKQHAHKQSFAKPKGPAGKRGIRRLIRGPAETEATTD

SEQ ID NO: 770083 - protein, 252 aa, Homo sapiens
MLYAATRATLKKEFGGGHIKDEVFGTVKEDVSLHGYKKYLLSQSSPAPLTAAEEELRQIKINEVQTDVGVDTKHQTLQGVAFPISREAFQALEKLNNRQLNYVQLEIDIKNEIIILANTTNTELKDLPKRIPKDSARYHFFLYKHSHEGDYLESIVFIYSMPGYTCSIRERMLYSSCKSRLLEIVERQLQMDVIRKIEIDNGDELTADFLYEEVHPKQHAHKQSFAKPKGPAGKRGIRRLIRGPAETEATTD

SEQ ID NO: 770084 - protein, 394 aa, Homo sapiens; identical to SEQ ID NO: 770080

SEQ ID NO: 770085 - protein, 394 aa, Homo sapiens; identical to SEQ ID NO: 770080

SEQ ID NO: 770086 - protein, 108 aa, Homo sapiens
YEFDSLFYFLQSEPRGSYWGMHSHMFYDVFINQYHLCCRISIHFFKSKISIGLSVATLRMRLSTSYHLSSIKILNMCIECFLIFLLFQYMHTMFLVKKSLKSGTSAVV

SEQ ID NO: 770087 - protein, 265 aa, Homo sapiens
MQLYLTSIISWFEIGQPAASEDVKEIFARARNGKYRLLKISIENEQLVIGSYSQPSDSWDKDYDSFVLPLLEDKQPCYILFRLDSQNAQGYEWIFIAWSPDHSHVRQKMLYAATRATLKKEFGGGHIKDEVFGTVKEDVSLHGYKKYLLSQSSPAPLTAAEEELRQIKINEVQTDVGVDTKHQTLQGVAFPISREAFQALEKLNNRQLNYVQLEIDIKNEIIILANTTNTELKDLPKRIPKDSARYHFFLYKHSHEGDYLESIGI

SEQ ID NO: 770088 - protein, 163 aa, Homo sapiens
RGGAAAGRGRMTRRGRRRSSHFLGPPAGAAGCTQRRSRELAAAAMSHQTGIQGNSARRDSQGRGFRESRESREGCRTGRAGVGPGAPEVGLAGRAGPRRLSALLLPGRCRPASSSSPVPAAVTLQIDPKFGGAKEIGFRGGLVEGGVPSTVPDSRPTFPLLVT

SEQ ID NO: 770089 - protein, 252 aa, Homo sapiens; identical to SEQ ID NO: 770083

SEQ ID NO: 770090 - protein, 401 aa, Homo sapiens
RGGAAAGRGRMTRRGRRRSSHFLGPPAGAAGCTQRRSRELAAAAMSHQTGIQASEDVKEIFARARNGKYRLLKISIENEQLVIGSYSQPSDSWDKDYDSFVLPLLEDKQPCYILFRLDSQNAQGYEWIFIAWSPDHSHVRQKMLYAATRATLKKEFGGGHIKDEVFGTVKEDVSLHGYKKYLLSQSSPAPLTAAEEELRQIKINESPEDHIGVQTDVGVDTKHQTLQGVAFPISREAFQALEKLNNRQLNYVQLEIDIKNEIIILANTTNTELKDLPKRIPKDSARYHFFLYKHSHEGDYLESIVFIYSMPGYTCSIRERMLYSSCKSRLLEIVERQLQMDVIRKIEIDNGDELTADFLYEEVHPKQHAHKQSFAKPKGPAGKRGIRRLIRGPAETEATTD

SEQ ID NO: 770091 - protein, 163 aa, Homo sapiens; identical to SEQ ID NO: 770088

SEQ ID NO: 770092 - protein, 104 aa, Homo sapiens
MPWGGRQKVANKWVCISDNHLGAAILKLDIITQVRIGLLVHGKRPPHSLWYCIGMSLQAKCLPILQTEARGDRADWWPNVKESNFLIRYIPLSDLSVFSHQITN

SEQ ID NO: 770093 - protein, 305 aa, Homo sapiens
MPCWNPGLSRSRSVGRHDDSSPVSPPPGPSRRAVELARRLGAPCAAPLLLALLALVLLYLVSGALVFRALEQPHEQQAQRELGEVREKFLRAHPCVSDQELGLLIKEVADALGGGADPETNSTSNSSHSAWDLGSAFFFSGTIITTIGYGNVALRTDAGRLFCIFYALVGIPLFGILLAGVGDRLGSSLRHGIGHIEAIFSVTLTTVGFGDYVAGADPRQDSPGYQPLVWFWILLGLAYFASVLTTNRELAASRCRAALGPEMGRAHGFRAAKLELGTCDSAALTSEPGPARPGRRTKDQHWLPS

SEQ ID NO: 770094 - protein, 54 aa, Homo sapiens
SCEGGQEGEGAGAVHLVGSLGLCPPSPRTPSAKAHTHPSQLMASGTLRALMNPG

SEQ ID NO: 770095 - protein, 108 aa, Homo sapiens
MEAVFDMELTLLWEAPTVYLDHWLLGGCGGKNQTPVLPCALYLPLSLALITLLYIIILHTLTHDFYTHGSICYKHTDKKGFLFSSDFLIYINIWVSYKLMGLSAIITN

SEQ ID NO: 770096 - protein, 130 aa, Homo sapiens
MAPPGNPKLQQLAPDLTHRFSKHMYDGINQCMKPSTATFLPLQTQRTEIPALHLSGQKPRHHLGIPPTHSPIPISIPVASLDLPVSPHPHCPCLGPGHHHLSPGHCGLLPSSLPASHPGLLCPSSTLSLK

SEQ ID NO: 770097 - protein, 92 aa, Homo sapiens
DRRQFVSTNFYSTEADSENHFITMARHERSTGELQSFGKDLCNNWKHSVPKWHGAEGRKKTKNEDKRSLFPQEDCNLVVELENKGKQWPCMS

SEQ ID NO: 770098 - protein, 249 aa, Homo sapiens
LSPTMKETPTQPPKKVVPQLRVYQGVTNPTPGQDQAQHPVSPSVTVQLLDLGLTITPEPTTEVGHSTPPKRTIVSPKHPEVTLPHPDQVQTQHSHLTRATVQPLDLGFTITPKSMTEVEPSTALMTTAPPPGHPEVTLPPSDKGQAQHSHLTQATVQPLDLELTITTKPTTEVKPSPTTEETSTQPPDLGLAIIPEPTTETRHSTALEKTTAPRPDRVQTLHRSLTEVTGPPTELEPAQDSLVQSESYT

SEQ ID NO: 770099 - protein, 163 aa, Homo sapiens [sequence omitted]

SEQ ID NO: 770100 - protein, 104 aa, Homo sapiens
EFLPKTDSILSDPTDHLGIEFMESEEVYQRQVLSISCIIFGIVIVGMFCAAFYFKSKKQAKQIQEQLKVPQNGKSYSLKASSTMAKSENLVKSHVQLQNKMSGF

SEQ ID NO: 770101 - protein, 68 aa, Homo sapiens
MTLQEAHVAGAVWDSGGERKCTAQGMWRQAQRQAWGPEGAAGEQGAGPGVPPCRSEACPAQDSEVQQE

SEQ ID NO: 770102 - protein, 731 aa, Homo sapiens
SQRRRVPRGREASPPAQPGTSLPAQPGRSPGGKATLLALYCRITRGLATGVAGKWKEEQMSQSRRVNPDDRELGGDPQIQAPRDQLGSLADGHQCHLLTSRMETTPLNSQKQLSACEDGEDCQENGVLQKVVPTPGDKVESGQISNGYSAVPSPGAGDDTRHSIPATTTTLVAELHQGERETWGKKVDFLLSVIGYAVDLGNVWRFPYICYQNGGGAFLLPYTIMAIFGGIPLFYMELALGQYHRNGCISIWRKICPIFKGIGYAICIIAFYIASYYNTIMAWALYYLISSFTDQLPWTSCKNSWNTGNCTNYFSEDNITWTLHSTSPAEEFYTRHVLQIHRSKGLQDLGGISWQLALCIMLIFTVIYFSIWKGVKTSGKVVWVTATFPYIILSVLLVRGATLPGAWRGVLFYLKPNWQKLLETGVWIDAAAQIFFSLGPGFGVLLAFASYNKFNNNCYQDALVTSVVNCMTSFVSGFVIFTVLGYMAEMRNEDVSEVAKDAGPSLLFITYAEAIANMPASTFFAIIFFLMLITLGLDSTFAGLEGVITAVLDEFPHVWAKRRERFVLAVVITCFFGSLVTLTFGGAYVVKLLEEYATGPAVLTVALIEAVAVSWFYGITQFCRDVKEMLGFSPGWFWRICWVAISPLFLLFIICSFLMSPPQLRLFQYNYPYWSIILGYCIGTSSFICIPTYIAYRLIITPGTFKERIIKSITPETPTEIPCGDIRLNAV

SEQ ID NO: 770103 - protein, 159 aa, Homo sapiens
MTFPDLGTVGSQAKTWQPRPKWEIPTKHIHQTSSLFLSPLPLSYAPISPENAPNFTKCLWSPRGSAPGEKGEAEEVELWEFTALISGAAPFFSVVSGWLLRLLRSGLERPHDQSFHMSPAPIAICLEVSLWSPPQPRGIFSFVRHYSHIGFIETFLGAP

SEQ ID NO: 770104 - protein, 217 aa, Homo sapiens
MTVLAPAWSPTTYLLLLLLLSSGLSGTQDCSFQHSPISSDFAVKIRELSDYLLQDYPVTVASNLQDEELCGGLWRLVLAQRWMERLKTVAGSKMQGLLERVNTEIHFVTKCAFQETSEQLVALKPWITRQNFSRCLELQCQPDSSTLPPPWSPRPLEATAPTAPQPPLLLLLLLPVGLLLLAAAWCLHWQRTRRRTPRPGEQVPPVPSPQDLLLVEH

SEQ ID NO: 770105 - protein, 235 aa, Homo sapiens
MTVLAPAWSPTTYLLLLLLLSSGLSGTQDCSFQHSPISSDFAVKIRELSDYLLQDYPVTVASNLQDEELCGGLWRLVLAQRWMERLKTVAGSKMQGLLERVNTEIHFVTKCAFQPPPSCLRFVQTNISRLLQETSEQLVALKPWITRQNFSRCLELQCQPDSSTLPPPWSPRPLEATAPTAPQPPLLLLLLLPVGLLLLAAAWCLHWQRTRRRTPRPGEQVPPVPSPQDLLLVEH

SEQ ID NO: 770106 - protein, 262 aa, Homo sapiens
LGHEGPRLVLLSLPRPGDRRHEGPPAEMTVLAPAWSPTTYLLLLLLLSSGLSGTQDCSFQHSPISSDFAVKIRELSDYLLQDYPVTVASNLQDEELCGGLWRLVLAQRWMERLKTVAGSKMQGLLERVNTEIHFVTKCAFQPPPSCLRFVQTNISRLLQETSEQLVALKPWITRQNFSRCLELQCQPDSSTLPPPWSPRPLEATAPTAPQPPLLLLLLLPVGLLLLAAAWCLHWQRTRRRTPRPGEQVPPVPSPQDLLLVEH

SEQ ID NO: 770107 - protein, 102 aa, Homo sapiens
VGSEFGSTGSNVGSEFGSKGLILRSLKQRSETDIYASHFTGEDTEAHRGESPARGCIAWTQRKLARGRSLPWAPLIPSPEWRQRQNPAPAPFTQLCTKPLSP

SEQ ID NO: 770108 - protein, 244 aa, Homo sapiens
MTVLAPAWSPTTYLLLLLLLSSGLSGTQDCSFQHSPISSDFAVKIRELPGLILFSPQSDYLLQDYPVTVASNLQDEELCGGLWRLVLAQRWMERLKTVAGSKMQGLLERVNTEIHFVTKCAFQPPPSCLRFVQTNISRLLQETSEQLVALKPWITRQNFSRCLELQCQPDSSTLPPPWSPRPLEATAPTAPQPPLLLLLLLPVGLLLLAAAWCLHWQRTRRRTPRPGEQVPPVPSPQDLLLVEH

SEQ ID NO: 770109 - protein, 153 aa, Homo sapiens
MPSASTPQPLGGRWDRAPRSRVRRLSRRLRPRGSPPGAWGAAWAWRAAGPKLCPAGRRLRPSENSSTTWAGGPAVQGDPAHPPKLLAWVLSPSLPGAGGASRRLPVRGPPSPRAPRGAMVPARATRPTPPRKQREPAPASAGPERGSHCAAAG

SEQ ID NO: 770110 - protein, 532 aa, Homo sapiens
MESAEPAGQARAAATKLSEAVGAALQEPRRQRRLVLVIVCVALLLDNMLYMVIVPIVPDYIAHMRGGGEGPTRTPEVWEPTLPLPTPANASAYTANTSASPTAAWPAGSALRPRYPTESEDVKIGVLFASKAILQLLVNPLSGPFIDRMSYDVPLLIGLGVMFASTVLFAFAEDYATLFAARSLQGLGSAFADTSGIAMIADKYPEEPERSRALGVALAFISFGSLVAPPFGGILYEFAGKRVPFLVLAAVSLFDALLLLAVAKPFSAAARARANLPVGTPIHRLMLDPYIAVVAGALTTCNIPLAFLEPTIATWMKHTMAASEWEMGMAWLPAFVPHVLGVYLTVRLAARYPHLQWLYGALGLAVIGASSCIVPACRSFAPLVVSLCGLCFGIALVDTALLPTLAFLVDVRHVSVYGSVYAIADISYSVAYALGPIVAGHIVHSLGFEQLSLGMGLANLLYAPVLLLLRNVGLLTRSRSERDVLLDEPPQGLYDAVRLRERPVSGQDGEPRSPPGPFDECEDDYNYYYTRS

SEQ ID NO: 770111 - protein, 139 aa, Homo sapiens
SLYRPEEYSRFEAKIHDLREQMMNSSISSGSGSLRTSQKRSLYVRALFDYDKTKDSGLPSQGLNFKFGDILHVINASDDEWWQARQVTPDGESDEVGVIPSKRRVEKKERARLKTVKFNSKTRDKGEIPDDMGSKGLSK

SEQ ID NO: 770112 - protein, 384 aa, Homo sapiens
SLYRPEEYSRFEAKIHDLREQMMNSSISSGSGSLRTSQKRSLYVRALFDYDKTKDSGLPSQGLNFKFGDILHVINASDDEWWQARQVTPDGESDEVGVIPSKRRVEKKERARLKTVKFNSKTRDKGQSFNDKRKKNLFSRKFPFYKNKDQSEQETSDADQHVTSNASDSESSYRGQEEYVLSYEPVNQQEVNYTRPVIILGPMKDRINDDLISEFPDKFGSCVPHTTRPKRDYEVDGRDYHFVTSREQMEKDIQEHKFIEAGQYNNHLYGTSVQSVREVAEKGKHCILDVSGNAIKRLQIAQLYPISIFIKPKSMENIMEMNKRLTEEQARKTFERAMKLEQEFTEHFTAIVQGDTLEDIYNQVKQIIEEQSGSYIWVPAKEKL

SEQ ID NO: 770113 - protein, 252 aa, Homo sapiens
TRGSTHASKFPFYKNKDQSEQETSDADQHVTSNASDSESSYRGQEEYVLSYEPVNQQEVNYTRPVIILGPMKDRINDDLISEFPDKFGSCVPHTTRPKRDYEVDGRDYHFVTSREQMEKDIQEHKFIEAGQYNNHLYGTSVQSVREVAEKGKHCILDVSGNAIKRLQIAQLYPISIFIKPKSMENIMEMNKRLTEEQARKTFERAMKLEQEFTEHFTAIVQGDTLEDIYNQVKQIIEEQSGSYIWVPAKEKL

SEQ ID NO: 770114 - protein, 384 aa, Homo sapiens; identical to SEQ ID NO: 770112

SEQ ID NO: 770115 - protein, 384 aa, Homo sapiens; identical to SEQ ID NO: 770112

SEQ ID NO: 770116 - protein, 369 aa, Homo sapiens
SLYRPEEYSRFEAKIHDLREQMMNSSISSGSGSLRTSQKRSLYVRALFDYDKTKDSGLPSQGLNFKFGDILHVINASDDEWWQARQVTPDGESDEVGVIPSKRRVEKKERARLKTVKFNSKTRDKGQSFNDKRKKNLFSRKFPFYKNKDQSEQETSDADQHVTSNASDSESSYRGQEEYVLSYEPVNQQEVNYTRPVIILGPMKDRINDDLISEFPDKFGSCVPHTTRPKRDYEVDGRDYHFVTSREQMEKDIQEHKFIEAGQYNNHLYGTSVQSVREVAEKGKHCILDVSGNAIKRLQIAQLYPISIFIKPKSMENIMEMNKRLTEEQARKTFERAMKLEQEFTEHFTAICTGEYAELYSTCRYRARM

SEQ ID NO: 770117 - protein, 362 aa, Homo sapiens
SLYRPEEYSRFEAKIHDLREQMMNSSISSGSGSLRTSQKRSLYVRALFDYDKTKDSGLPSQGLNFKFGDILHVINASDDEWWQARQVTPDGESDEVGVIPSKRRVEKKERARLKTVKFNSKTRDKGEIPDDMGSKGLKHVTSNASDSESSYRGQEEYVLSYEPVNQQEVNYTRPVIILGPMKDRINDDLISEFPDKFGSCVPHTTRPKRDYEVDGRDYHFVTSREQMEKDIQEHKFIEAGQYNNHLYGTSVQSVREVAEKGKHCILDVSGNAIKRLQIAQLYPISIFIKPKSMENIMEMNKRLTEEQARKTFERAMKLEQEFTEHFTAIVQGDTLEDIYNQVKQIIEEQSGSYIWVPAKEKL

SEQ ID NO: 770118 - protein, 384 aa, Homo sapiens; identical to SEQ ID NO: 770112

SEQ ID NO: 770119 - protein, 384 aa, Homo sapiens; identical to SEQ ID NO: 770112

SEQ ID NO: 770120 - protein, 384 aa, Homo sapiens; identical to SEQ ID NO: 770112

SEQ ID NO: 770121 - protein, 129 aa, Homo sapiens
SLYRPEEYSRFEAKIHDLREQMMNSSISSGSGSLRTSQKRSLYVRALFDYDKTKDSGLPSQGLNFKFGDILHVINASDDEWWQARQVTPDGESDEVGVIPSKRRVEKKERARLKTVKFNSKTRDKGVSI

SEQ ID NO: 770122 - protein, 402 aa, Homo sapiens
MSSRLGLERTVTVSQLKVATRALPTGETMPMISAASDPGPSRPSRPTPDQPRARLGRRRGFPSLTRARPMPGGAWGPPPPPVAGEPQARATRSSGPGSGLDGYVEAGRPTDRRPKAAVRWAGGDAQPQPHRAAWSSPPCWPRLAAVQLAAYRKFVVLFTDDLGHISQWSSIMAGSLAGMVSTIVTYPTDLIKTRLIMQNILEPSYRGLLHAFSTIYQQEGFLALYRGVSLTVVGALPFSAGSLLVYMNLEKIWNGPRDQFSLPQNFANVCLAAAVTQTLSFPFETVKRKMQAQSPYLPHSGGVDVHFSGAVDCFRQIVKAQGVLGLWNGLTANLLKIVPYFGIMFSTFEFCKRICLYQNGYILSPLSYKLTPGVDQSLQPQELRELKKFFKTRKPKPKKPTL

SEQ ID NO: 770123 - protein, 441 aa, Homo sapiens
MSSRLGLERTVTVSQLKVATRALPTGETMPMISAASDPGPSRPSRPTPDQPRARLGRRRGFPSLTRARPMPGGAWGPPPPPVAGEPQARATRSSGPGSGLMATWRRDGRLTGGQRLLCAGLAGTLSLSLTAPLELATVLAQVGVVRGHARGPWATGHRVWRAEGLRALWKGNAVACLRLFPCSAVQLAAYRKFVVLFTDDLGHISQWSSIMAGSLAGMVSTIVTYPTDLIKTRLIMQNILEPSYRGLLHAFSTIYQQEGFLALYRGVSLTVVGALPFSAGSLLVYMNLEKIWNGPRDQFSLPQNFANVCLAAAVTQTLSFPFETVKRKMQAQSPYLPHSGGVDVHFSGAVDCFRQIVKAQGVLGLWNGLTANLLKIVPYFGIMFSTFEFCKRICLYQNGYILSPLSYKLTPGVDQSLQPQELRELKKFFKTRKPKPKKPTL

SEQ ID NO: 770124 - protein, 326 aa, Homo sapiens
MSSRLGLERTVTVSQLKVATRALPTGETMPMISAASDPGPSRPSRPTPDQPRARLGRRRGFPSLTRARPMPGGAWGPPPPPVAGEPQARATRSSGPGSGLMATWRRDGRLTGGQRLLCAGLAGTLSLSLTAPLELATVLAQVGVVRGHARGPWATGHRVWRAEGLRALWKGNAVACLRLFPCSAVQLAAYRKFVVLFTDDLGHISQWSSIMAGSLAGMVSTIVTYPTDLIKTRLIMQNILEPSYRGLLHAFSTIYQQEGFLALYRGVSLTVVGSEPLPPTQWRSRCPFLRSSGLLPADSEGPGGPGALEWIDSQFTEDSSIFWNYV

SEQ ID NO: 770125 - protein, 414 aa, Homo sapiens
MSSRLGLERTVTVSQLKVATRALPTGETMPMISAASDPGPSRPSRPTPDQPRARLGRRRGFPSLTRARPMPGGAWGPPPPPVAGEPQARATRSSGPGSGLMATWRRDGRLTGGQRLLCAGLAGTLSLSLTAPLELATVLAQVGVVRGHARGPWATGHRVWRAEGLRALWKGNAVACLRLFPCSAVQLAAYRKFVVLFTDDLGHISQWSSIMAGSLAGMVSTIVTYPTDLIKTRLIMQNILEPSYRGLLHAFSTIYQQEGFLALYRGVSLTVVGALPFSAGSLLVYMNLEKIWNGPRDQFSLPQNFANVCLAAAVTQTLSFPFETVKRKMQAQSPYLPHSGGVDVHFSGAVDCFRQIVKAQGVLGLWNGLTANLLKVRRATSLRCSPASSNSTLFLCHPQPLLQFAWKTPSSTNG

SEQ ID NO: 770126 - protein, 536 aa, Homo sapiens
AAARDLELKRKSQNKRENLLPVAAAGTANMMAAAPIQQNGTHTGVPIDLDPPDSRKRPLEAPPEAGSTKRTNTGEDGQYFLKVLIPSYAAGSIIGKGGQTIVQLQKETGATIKLSKSKDFYPGTTERVCLIQGTVEALNAVHGFIAEKIREMPQNVAKTEPVSILQPQTTVNPDRIKQTLPSSPTTTKSSPSDPMTTSRANQVKIIVPNSTAGLIIGKGGATVKAVMEQSGAWVQLSQKPDGINLQERVVTVSGEPEQNRKAVELIIQKIQEDPQSGSCLNISYANVTGPVANSNPTGSPYANTAEVLPTAAAAAGLLGHANLAGVAAFPAVLSGFTGNDLVAITSALNTLASYGYNLNTLGLGLSQAAATGALAAAAASANPAAAAANLLATYASEASASGSTAGGTAGTFALGSLAAATAATNGYFGAASPLAASAILGTEKSTDGSKDVVEIAVPENLVGAILGKGGKTLVEYQELTGARIQISKKGEFVPGTRNRKVTITGTPAATQAAQYLITQRITYEQGVRAANPQKVG

SEQ ID NO: 770127 - protein, 536 aa, Homo sapiens; identical to SEQ ID NO: 770126

SEQ ID NO: 770128 - protein, 512 aa, Homo sapiens
AAARDLELKRKSQNKRENLLPVAAAGTANMMAAAPIQQNGTHTGVPIDLDPPDSRKRPLEAPPEAGSTKRTNTGEDGQYFLKVLIPSYAAGSIIGKGGQTIVQLQKETGATIKLSKSKDFYPGTTERVCLIQGTVEALNAVHGFIAEKIREMPQNVAKTEPVSILQPQTTVNPDRIKQVKIIVPNSTAGLIIGKGGATVKAVMEQSGAWVQLSQKPDGINLQERVVTVSGEPEQNRKAVELIIQKIQEDPQSGSCLNISYANVTGPVANSNPTGSPYANTAEVLPTAAAAAGLLGHANLAGVAAFPAVLSGFTGNDLVAITSALNTLASYGYNLNTLGLGLSQAAATGALAAAAASANPAAAAANLLATYASEASASGSTAGGTAGTFALGSLAAATAATNGYFGAASPLAASAILGTEKSTDGSKDVVEIAVPENLVGAILGKGGKTLVEYQELTGARIQISKKGEFVPGTRNRKVTITGTPAATQAAQYLITQRITYEQGVRAANPQKVG

SEQ ID NO: 770129 - protein, 385 aa, Homo sapiens
MPQNVAKTEPVSILQPQTTVNPDRIKQTLPSSPTTTKSSPSDPMTTSRANQVKIIVPNSTAGLIIGKGGATVKAVMEQSGAWVQLSQKPDGINLQERVVTVSGEPEQNRKAVELIIQKIQEDPQSGSCLNISYANVTGPVANSNPTGSPYANTAEVLPTAAAAAGLLGHANLAGVAAFPAVLSGFTGNDLVAITSALNTLASYGYNLNTLGLGLSQAAATGALAAAAASANPAAAAANLLATYASEASASGSTAGGTAGTFALGSLAAATAATNGYFGAASPLAASAILGTEKSTDGSKDVVEIAVPENLVGAILGKGGKTLVEYQELTGARIQISKKGEFVPGTRNRKVTITGTPAATQAAQYLITQRITYEQGVRAANPQKVG

SEQ ID NO: 770130 - protein, 181 aa, Homo sapiens
AAARDLELKRKSQNKRENLLPVAAAGTANMMAAAPIQQNGTHTGVPIDLDPPDSRKRPLEAPPEAGSTKRTNTGEDGQYFLKVLIPSYAAGSIIGKGGQTIVQLQKETGATIKLSKSKDFYPGTTERVCLIQGTVEALNAVHGFIAEKIREMPQNVAKTEPVSILQPQTTVNPDRIKQVSV

SEQ ID NO: 770131 - protein, 154 aa, Homo sapiens
AAARDLELKRKSQNKRENLLPVAAAGTANMMAAAPIQQNGTHTGVPIDLDPPDSRKRPLEAPPEAGSTKRTNTGEDGQYFLKVLIPSYAAGSIIGKGGQTIVQLQKETGATIKLSKSKDFYPGTTERVCLIQGTVEALNAVHGFIAEKIREMPQ

SEQ ID NO: 770132 - protein, 536 aa, Homo sapiens; identical to SEQ ID NO: 770126

SEQ ID NO: 770133 - protein, 466 aa, Homo sapiens
MLSEEDGQYFLKVLIPSYAAGSIIGKGGQTIVQLQKETGATIKLSKSKDFYPGTTERVCLIQGTVEALNAVHGFIAEKIREMPQNVAKTEPVSILQPQTTVNPDRIKQTLPSSPTTTKSSPSDPMTTSRANQVKIIVPNSTAGLIIGKGGATVKAVMEQSGAWVQLSQKPDGINLQERVVTVSGEPEQNRKAVELIIQKIQEDPQSGSCLNISYANVTGPVANSNPTGSPYANTAEVLPTAAAAAGLLGHANLAGVAAFPAVLSGFTGNDLVAITSALNTLASYGYNLNTLGLGLSQAAATGALAAAAASANPAAAAANLLATYASEASASGSTAGGTAGTFALGSLAAATAATNGYFGAASPLAASAILGTEKSTDGSKDVVEIAVPENLVGAILGKGGKTLVEYQELTGARIQISKKGEFVPGTRNRKVTITGTPAATQAAQYLITQRITYEQGVRAANPQKVG

SEQ ID NO: 770134 - protein, 210 aa, Homo sapiens
AAARDLELKRKSQNKRENLLPVAAAGTANMMAAAPIQQNGTHTGVPIDLDPPDSRKRPLEAPPEAGSTKRTNTGEDGQYFLKVLIPSYAAGSIIGKGGQTIVQLQKETGATIKLSKSKDFYPGTTERVCLIQGTVEALNAVHGFIAEKIREMPQNVAKTEPVSILQPQTTVNPDRIKQTLPSSPTTTKSSPSDPMTTSRANQKHNISWIS

SEQ ID NO: 770135 - protein, 72 aa, Homo sapiens
SERTPGEDRRKGSKSPKQQPDRAPKGALGRPRAHRLSGEKGIRLHETPARPGGDKPKWSSNLPLWEAGSISW

SEQ ID NO: 770136 - protein, 736 aa, Homo sapiens
MDTSGHFHDSGVGDLDEDPKCPCPSSGDEQQQQQQQQQQQQPPPPAPPAAPQQPLGPSLQPQPPQLQQQQQQQQQQQQQQQQQQQPPHPLSQLAQLQSQPVHPGLLHSSPTAFRAPPSSNSTAILHPSSRQGSQLNLNDHLLGHSPSSTATSGPGGGSRHRQASPLVHRRDSNPFTEIAMSSCKYSGGVMKPLSRLSASRRNLIEAETEGQPLQLFSPSNPPEIVISSREDNHAHQTLLHHPNATHNHQHAGTTASSTTFPKANKRKNQNIGYKLGHRRALFEKRKRLSDYALIFGMFGIVVMVIETELSWGLYSKDSMFSLALKCLISLSTIILLGLIIAYHTREVQLFVIDNGADDWRIAMTYERILYISLEMLVCAIHPIPGEYKFFWTARLAFSYTPSRAEADVDIILSIPMFLRLYLIARVMLLHSKLFTDASSRSIGALNKINFNTRFVMKTLMTICPGTVLLVFSISLWIIAAWTVRVCERYHDQQDVTSNFLGAMWLISITFLSIGYGDMVPHTYCGKGVCLLTGIMGAGCTALVVAVVARKLELTKAEKHVHNFMMDTQLTKRIKNAAANVLRETWLIYKHTKLLKKIDHAKVRKHQRKFLQAIHQLRSVKMEQRKLSDQANTLVDLSKMQNVMYDLITELNDRSEDLEKQIGSLESKLEHLTASFNSLPLLIADTLRQQQQQLLSAIIEARGVSVAVGTTHTPISDSPIGVSSTSFPTPYTSSSSC

SEQ ID NO: 770137 - protein, 736 aa, Homo sapiens; identical to SEQ ID NO: 770136

SEQ ID NO: 770138 - protein, 426 aa, Homo sapiens
MERPIKDSMFSLALKCLISLSTIILLGLIIAYHTREVQLFVIDNGADDWRIAMTYERILYISLEMLVCAIHPIPGEYKFFWTARLAFSYTPSRAEADVDIILSIPMFLRLYLIARVMLLHSKLFTDASSRSIGALNKINFNTRFVMKTLMTICPGTVLLVFSISLWIIAAWTVRVCERYHDQQDVTSNFLGAMWLISITFLSIGYGDMVPHTYCGKGVCLLTGIMGAGCTALVVAVVARKLELTKAEKHVHNFMMDTQLTKRIKNAAANVLRETWLIYKHTKLLKKIDHAKVRKHQRKFLQAIHQLRSVKMEQRKLSDQANTLVDLSKMQNVMYDLITELNDRSEDLEKQIGSLESKLEHLTASFNSLPLLIADTLRQQQQQLLSAIIEARGVSVAVGTTHTPISDSPIGVSSTSFPTPYTSSSSC

SEQ ID NO: 770139 - protein, 459 aa, Homo sapiens
WRTAGTGFSGELAPLLQPLSPAPRRRRGFPSQREWRWRKDSMFSLALKCLISLSTIILLGLIIAYHTREVQLFVIDNGADDWRIAMTYERILYISLEMLVCAIHPIPGEYKFFWTARLAFSYTPSRAEADVDIILSIPMFLRLYLIARVMLLHSKLFTDASSRSIGALNKINFNTRFVMKTLMTICPGTVLLVFSISLWIIAAWTVRVCERYHDQQDVTSNFLGAMWLISITFLSIGYGDMVPHTYCGKGVCLLTGIMGAGCTALVVAVVARKLELTKAEKHVHNFMMDTQLTKRIKNAAANVLRETWLIYKHTKLLKKIDHAKVRKHQRKFLQAIHQLRSVKMEQRKLSDQANTLVDLSKMQNVMYDLITELNDRSEDLEKQIGSLESKLEHLTASFNSLPLLIADTLRQQQQQLLSAIIEARGVSVAVGTTHTPISDSPIGVSSTSFPTPYTSSSSC

SEQ ID NO: 770140 - protein, 725 aa, Homo sapiens
MDTSGHFHDSGVGDLDEDPKCPCPSSGDEQQQQQQQQQQQQPPPPAPPAAPQQPLGPSLQPQPPQLQQQQQQQQQQQQQQPPHPLSQLAQLQSQPVHPGLLHSSPTAFRAPPSSNSTAILHPSSRQGSQLNLNDHLLGHSPSSTATSGPGGGSRHRQASPLVHRRDSNPFTEIAMSSCKYSGGVMKPLSRLSASRRNLIEAETEGQPLQLFSPSNPPEIVISSREDNHAHQTLLHHPNATHNHQHAGTTASSTTFPKANKRKNQNIGYKLGHRRALFEKRKRLSDYALIFGMFGIVVMVIETELSWGLYSKDSMFSLALKCLISLSTIILLGLIIAYHTREVQLFVIDNGADDWRIAMTYERILYISLEMLVCAIHPIPGEYKFFWTARLAFSYTPSRAEADVDIILSIPMFLRLYLIARVMLLHSKLFTDASSRSIGALNKINFNTRFVMKTLMTICPGTVLLVFSISLWIIAAWTVRVCERYHDQQDVTSNFLGAMWLISITFLSIGYGDMVPHTYCGKGVCLLTGIMGAGCTALVVAVVARKLELTKAEKHVHNFMMDTQLTKRIKNAAANVLRETWLIYKHTKLLKKIDHAKVRKHQRKFLQAIHQLRSVKMEQRKLSDQANTLVDLSKMQNVMYDLITELNDRSEDLEKQIGSLESKLEHLTASFNSLPLLIADTLRQQQQQLLSAIIEARGVSVAVGTTHTPISDSPIGVPLLGSGKRR

SEQ ID NO: 770141 - protein, 426 aa, Homo sapiens; identical to SEQ ID NO: 770138

SEQ ID NO: 770142 - protein, 731 aa, Homo sapiens
MDTSGHFHDSGVGDLDEDPKCPCPSSGDEQQQQQQQQQQQQPPPPAPPAAPQQPLGPSLQPQPPQLQQQQQQQQQQQQQQPPHPLSQLAQLQSQPVHPGLLHSSPTAFRAPPSSNSTAILHPSSRQGSQLNLNDHLLGHSPSSTATSGPGGGSRHRQASPLVHRRDSNPFTEIAMSSCKYSGGVMKPLSRLSASRRNLIEAETEGQPLQLFSPSNPPEIVISSREDNHAHQTLLHHPNATHNHQHAGTAASSTTFPKANKRKNQNIGYKLGHRRAPFEKRKRLSDYALIFGMFGIVVMVIETELSWGLYSKDSMFSLALKCLISLSTIILLGLIIAYHTREAQLFVIDNGADDWRIAMTYERILYISLEMLVCAIHPIPGEYKFFWTARLAFSYTPSRAEADVDIILSIPMFLRLYLIARVMLLHSKLFTDASSRSIGALNKINFNTRFVMKTLMTICPGTVLLVFSISLWIIAAWTVRACERYHDQQDVTSNFLGAMWLISITFLSIGYGDMVPHTYCGKGVCLLTGIMGAGCTALVVAVVARKLELTKAEKHVHNFMMDTQLTKRIKNAAANVLRETWLIYKHTKLLKKIDHAKVRKHQRKFLQAIHQLRSVKMEQRKLSDQANTLVDLSKMQNVMYDLITELNDRSEDLEKQIGSLESKLEHLTASFNSLPLLIADTLRQQQQQLLSAIIEARGVSVAVGTTHTPISDSPIGVSSTSFPTPYTSSSSC

SEQ ID NO: 770143 - protein, 870 aa, Homo sapiens
MLLKSNCVLEAFGNAKTNRNDNSSRFGKYMDINFDFKGDPIGGHINNYLLEKSRVIVQQPGERSFHSFYQLLQGGSEQMLRSLHLQKSLSSYNYIHVGAQLKSSINDAAEFRVVADAMKVIGFKPEEIQTVYKILAAILHLGNLKFVVDGDTPLIENGKVVSIIAELLSTKTDMVEKALLYRTVATGRDIIDKQHTEQEASYGRDAFAKAIYERLFCWIVTRINDIIEVKNYDTTIHGKNTVIGVLDIYGFEIFDNNSFEQFCINYCNEKLQQLFIQLVLKQEQEEYQREGIPWKHIDYFNNQIIVDLVEQQHKGIIAILDDACMNVGKVTDEMFLEALNSKLGKHAHFSSRKLCASDKILEFDRDFRIRHYAGDVVYSVIGFIDKNKDTLFQDFKRLMYNSSNPVLKNMWPEGKLSITEVTKRPLTAATLFKNSMIALVDNLASKEPYYVRCIKPNDKKSPQIFDDERCRHQVEYLGLLENVRVRRAGFAFRQTYEKFLHRYKMISEFTWPNHDLPSDKEAVKKLIERCGFQDDVAYGKTKIFIRTPRTLFTLEELRAQMLIRIVLFLQKVWRGTLARMRYKRTKAALTIIRYYRRYKVKSYIHEVARRFHGVKTMRDYGKHVKWPSPPKVLRRFEEALQTIFNRWRASQLIKSIPASDLPQVRAKVAAVEMLKGQRADLGLQRAWEGNYLASKPDTPQTSGTFVPVANELKRKDKYMNVLFSCHVRKVNRFSKVEDRAIFVTDRHLYKMDPTKQYKVMKTIPLYNLTGLSVSNGKDQLVVFHTKDNKDLIVCLFSKQPTHESRIGELVGVLVNHFKSEKRHLQVNVTNPVQCSLHGKKCTVSVETRLNQPQPDFTKNRSGFILSVPGN

SEQ ID NO: 770144 - protein, 91 aa, Homo sapiens
WRYTEPRGSREGGGRGHPAERESGEPCTEEHCPDCLNTRGEKRHLQVNVTNPVQCSLHGKKCTVSVETRLNQPQPDFTKNRSGFILSVPGN

SEQ ID NO: 770145 - protein, 870 aa, Homo sapiens; identical to SEQ ID NO: 770143

SEQ ID NO: 770146 - protein, 870 aa, Homo sapiens; identical to SEQ ID NO: 770143

SEQ ID NO: 770147 - protein, 461 aa, Homo sapiens
MLLKSNCVLEAFGNAKTNRNDNSSRFGKYMDINFDFKGDPIGGHINNYLLEKSRVIVQQPGERSFHSFYQLLQGGSEQMLRSLHLQKSLSSYNYIHVGAQLKSSINDAAEFRVVADAMKVIGFKPEEIQTVYKILAAILHLGNLKFVVDGDTPLIENGKVVSIIAELLSTKTDMVEKALLYRTVATGRDIIDKQHTEQEASYGRDAFAKAIYERLFCWIVTRINDIIEVKNYDTTIHGKNTVIGVLDIYGFEIFDNNSFEQFCINYCNEKLQQLFIQLVLKQEQEEYQREGIPWKHIDYFNNQIIVDLVEQQHKGIIAILDDACMNVGKVTDEMFLEALNSKLGKHAHFSSRKLCASDKILEFDRDFRIRHYAGDVVYSVIGFIDKNKDTLFQDFKRLMYNSSNPVLKNMWPEGKLSITEVTKRPLTAATLFKNSMIALVDNLASKYRWGFTMLTRLVLNS

SEQ ID NO: 770148 - protein, 125 aa, Homo sapiens
GSQGPCHGAEAVVGGPASATLALPRPLWGPSGILLALVEEAGCAGANGGRELPGRCPVLMLPANCPSGVFGSCSEKRHLQVNVTNPVQCSLHGKKCTVSVETRLNQPQPDFTKNRSGFILSVPGN

SEQ ID NO: 770149 - protein, 870 aa, Homo sapiens; identical to SEQ ID NO: 770143

SEQ ID NO: 770150 - protein, 825 aa, Homo sapiens
MLLKSNCVLEAFGNAKTNRNDNSSRFGKYMDINFDFKGDPIGGHINNYLLEKSRVIVQQPGERSFHSFYQLLQGGSEQMLRSLHLQKSLSSYNYIHVGAQLKSSINDAAEFRVVADAMKVIGFKPEEIQTVYKILAAILHLGNLKFVVDGDTPLIENGKVVSIIAELLSTKTDMVEKALLYRTVATGRDIIDKQHTEQEASYGRDAFAKAIYERLFCWIVTRINDIIEVKNYDTTIHGKNTVIGVLDIYGFEIFDNNSFEQFCINYCNEKLQQLFIQLVLKQEQEEYQREGIPWKHIDYFNNQIIVDLVEQQHKGIIAILDDACMNVGKVTDEMFLEALNSKLGKHAHFSSRKLCASDKILEFDRDFRIRHYAGDVVYSVIGFIDKNKDTLFQDFKRLMYNSSNPVLKNMWPEGKLSITEVTKRPLTAATLFKNSMIALVDNLASKEPYYVRCIKPNDKKSPQIFDDERCRHQVEYLGLLENVRVRRAGFAFRQTYEKFLHRYKMISEFTWPNHDLPSDKEAVKKLIERCGFQDDVAYGKTKIFIRTPRTLFTLEELRAQMLIRIVLFLQKVWRGTLARMRYKRTKAALTIIRYYRRYKVKSYIHEVARRFHGVKTMRDYGKHVKWPSPPKVLRRFEEALQTIFNRWRASQLIKSIPASDLPQVRAKVAAVEMLKGQRADLGLQRAWEGNYLASKPDTPQTSGTFVPVANELKRKDKYMNVLFSCHVRKVNRFSKVEDRAIFVTDRHLYKMDPTKQYKVMKTIPLYNLTGLSVSNGKDQLVVFHTKDNKDLIVCLFSKQPTHESRIGELVGVLVNHFKRNHLLIL

SEQ ID NO: 770151 - protein, 261 aa, Homo sapiens
MLRVLCLLRPWRPLRARGCASDGAAGGSEIQVRALAGPDQGITEILMNRPSARNALGNVFVSELLETLAQLREDRQVRVLLFRSGVKGVFCAGADLKEREQMSEAEVGVFVQRLRGLMNDIASSAVMGLIETTRGLLPGAGGTQRLPRCLGVALAKELIFTGRRLSGTEAHVLGLVNHAVAQNEEGDAAYQRARALAQEILPQAPIAVRLGKVAIDRGTEVDIASGMAIEGMCYAQNIPTRDRLEGMAAFREKRTPKFVGK

SEQ ID NO: 770152 - protein, 114 aa, Homo sapiens
MLRVLCLLRPWRPLRARGCASDGAAGGSEIQVRALAGPDQGITEILMNRPSARNALGNVFVSELLETLAQLREDRQVRVLLFRSGVKGVFCAGADLKEREQMSEAEVGVFVQRD

SEQ ID NO: 770153 - protein, 120 aa, Homo sapiens
LGPLLCHSLCLQQASLLDCPLPCTLPTCMHTHRHSCTRSHMHPCMHTYMHTCTLTSFAWPIPTLLSALSLKATASSDNSLLTFYTRAPLCPLEAPYLFVLFLQVLLTNSNYLMSVFPTRL

SEQ ID NO: 770154 - protein, 102 aa, Homo sapiens
MNRPSARNALGNVFVSELLETLAQLREDRQVRVLLFRSGVKGVFCAGADLKEREQMSEAEVGVFVQRLRGLMNDIGFKPGHSKAVKFPQACFQVLTIAVTFA

SEQ ID NO: 770155 - protein, 102 aa, Homo sapiens; identical to SEQ ID NO: 770154

SEQ ID NO: 770156 - protein, 135 aa, Homo sapiens
MGLIETTRGLLPGAGGTQRLPRCLGVALAKELIFTGRRLSGTEAHVLGLVNHAVAQNEEGDAAYQRARALAQEILPQAPIAVRLGKVAIDRGTEVDIASGMAIEGMCYAQNIPTRDRLEGMAAFREKRTPKFVGK

SEQ ID NO: 770157 - protein, 102 aa, Homo sapiens; identical to SEQ ID NO: 770154

SEQ ID NO: 770158 - protein, 102 aa, Homo sapiens; identical to SEQ ID NO: 770154

SEQ ID NO: 770159 - protein, 120 aa, Homo sapiens; identical to SEQ ID NO: 770153

SEQ ID NO: 770160 - protein, 173 aa, Homo sapiens
MLRVLCLLRPWRPLRARGCASDGAAGGSEIQVRALAGPDQGITEILMNRPSARNALGNVFVSELLETLAQLREDRQVRVLLFRSGVKGVFCAGADLKEREQMSEAEVGVFVQRLRGLMNDIAAFPAPTIAAMDGFALGGGLELALACDLRVAGTGPGLGAGGGARESGVSETG

SEQ ID NO: 770161 - protein, 246 aa, Homo sapiens
MNRPSARNALGNVFVSELLETLAQLREDRQVRVLLFRSGVKGVFCAGADLKEREQMSEAEVGVFVQRLRGLMNDIAAFPAPTIAAMDGFALGGGLELALACDLRVAASSAVMGLIETTRGLLPGAGGTQRLPRCLGVALAKELIFTGRRLSGTEAHVLGLVNHAVAQNEEGDAAYQRARALAQEILPQAPIAVRLGKVAIDRGTEVDIASGMAIEGMCYAQNIPTRDRLEGMAAFREKRTPKFVGK

SEQ ID NO: 770162 - protein, 292 aa, Homo sapiens
MLRVLCLLRPWRPLRARGCASDGAAGGSEIQVRALAGPDQGITEILMNRPSARNALGNVFVSELLETLAQLREDRQVRVLLFRSGVKGVFCAGADLKEREQMSEAEVGVFVQRLRGLMNDIAAFPAPTIAAMDGFALGGGLELALACDLRVAASSAVMGLIETTRGLLPGAGGTQRLPRCLGVALAKELIFTGRRLSGTEAHVLGLVNHAVAQNEEGDAAYQRARALAQEILPQAPIAVRLGKVAIDRGTEVDIASGMAIEGMCYAQNIPTRDRLEGMAAFREKRTPKFVGK

SEQ ID NO: 770163 - protein, 196 aa, Homo sapiens
MNRPSARNALGNVFVSELLETLAQLREDRQVRVLLFRSGVKGVFCAGADLKEREQMSEAEVGVFVQRLRGLMNDIGGTQRLPRCLGVALAKELIFTGRRLSGTEAHVLGLVNHAVAQNEEGDAAYQRARALAQEILPQAPIAVRLGKVAIDRGTEVDIASGMAIEGMCYAQNIPTRDRLEGMAAFREKRTPKFVGK

SEQ ID NO: 770164 - protein, 215 aa, Homo sapiens
MNRPSARNALGNVFVSELLETLAQLREDRQVRVLLFRSGVKGVFCAGADLKEREQMSEAEVGVFVQRLRGLMNDIASSAVMGLIETTRGLLPGAGGTQRLPRCLGVALAKELIFTGRRLSGTEAHVLGLVNHAVAQNEEGDAAYQRARALAQEILPQAPIAVRLGKVAIDRGTEVDIASGMAIEGMCYAQNIPTRDRLEGMAAFREKRTPKFVGK

SEQ ID NO: 770165 - protein, 114 aa, Homo sapiens; identical to SEQ ID NO: 770152

SEQ ID NO: 770166 - protein, 119 aa, Homo sapiens
MGLIETTRGLLPGAGGTQRLPRCLGVALAKELIFTGRRLSGTEAHVLGLVNHAVAQNEEGDAAYQRARALAQEILPQAPIAVRLGKVAIDRGTENIPTRDRLEGMAAFREKRTPKFVGK

SEQ ID NO: 770167 - protein, 324 aa, Homo sapiens
MNRPSARNALGNVFVSELLETLAQLREDRQVRVLLFRSGVKGVFCAGADLKEREQMSEAEVGVFVQRLRGLMNDIAAFPAPTIAAMDGFALGGGLELALACDLRVAASSAVMGLIETTRGLLPGAGGTQRLPRCLGVALAKELIFTGRRLSGTEAHVLGLVNHAVAQNEEGDAAYQRARALAQEILPQAPIAVRLGKVAIDRGTEVDIASGMAIEGMCYAQNIPTRDRLEGMAAFSMGDACPEEQDPEGRFVARLPSSFHLSRLPFLHKDDDGNKMTGVMPGTKVLILPPTATFLSFTLARNNHEGWVCFGKCLSLYLNDKELN

SEQ ID NO: 770168 - protein, 120 aa, Homo sapiens; identical to SEQ ID NO: 770153

SEQ ID NO: 770169 - protein, 223 aa, Homo sapiens
  misc_feature (210)..(210): Xaa can be any naturally occurring amino acid
MLRVLCLLRPWRPLRARGCASDGAAGGSEIQVRALAGPDQGITEILMNRPSARNALGNVFVSELLETLAQLREDRQVRVLLFRSGVKGVFCAGADLKEREQMSEAEVGVFVQRLRGLMNDIASSAVMGLIETTRGLLPGAGGTQRLPRCLGVALAKELIFTGRRLSGTEAHVLGLVNHAVAQNEEGDAAYQRARALAQEILPQAPNCPFXLGQKLANLTRREP

SEQ ID NO: 770170 - protein, 135 aa, Homo sapiens; identical to SEQ ID NO: 770156

SEQ ID NO: 770171 - protein, 102 aa, Homo sapiens; identical to SEQ ID NO: 770154

SEQ ID NO: 770172 - protein, 102 aa, Homo sapiens; identical to SEQ ID NO: 770154

SEQ ID NO: 770173 - protein, 102 aa, Homo sapiens; identical to SEQ ID NO: 770154

SEQ ID NO: 770174 - protein, 148 aa, Homo sapiens
MLRVLCLLRPWRPLRARGCASDGAAGGSEIQVRALAGPDQGITEILMNRPSARNALGNVFVSELLETLAQLREDRQVRVLLFRSGVKGVFCAGADLKEREQMSEAEVGVFVQRLRGLMNDIGFKPGHSKAVKFPQACFQVLTIAVTFA

SEQ ID NO: 770175 - protein, 135 aa, Homo sapiens; identical to SEQ ID NO: 770156

SEQ ID NO: 770176 - protein, 127 aa, Homo sapiens
MNRPSARNALGNVFVSELLETLAQLREDRQVRVLLFRSGVKGVFCAGADLKEREQMSEAEVGVFVQRLRGLMNDIAAFPAPTIAAMDGFALGGGLELALACDLRVAGTGPGLGAGGGARESGVSETG

SEQ ID NO: 770177 - protein, 135 aa, Homo sapiens; identical to SEQ ID NO: 770156

SEQ ID NO: 770178 - protein, 246 aa, Homo sapiens; identical to SEQ ID NO: 770161

SEQ ID NO: 770179 - protein, 989 aa, Homo sapiens
MWNCAALGQSHEARATFKITSGVTYNPNLQDKLSVDFKVLAFDLQQMIDEIFLSSNLKNEYKNSRVLQFENGSIIVVFDLFFAQWVSDENVKEELIQGLEANKSSQLVTFHIDLNSVDILASLENFSTVSPATTSDKLTTTSHLATPGNVSIECLPGSSPCTDALTCIKADLFCDGEVNCPDGSDEDNKMCATVCDGRFLLTGSSGSFQATHYPKPSETSVVCQWIIRVNQGLSIKLSFDDFNTYYTDILDIYEGVGSSKILRASIWETNPGTIRIFSNQVTATFLIESDESDYVGFNATYTAFNSSELNNYEKINCNFEDGFCFWVQDLNDDNEWERIQGSTFSPFTGPNFDHTFGNASGFYISTPTGPGGRQERVGLLSLPLDPTLEPACLSFWYHMYGENVHKLSINISNDQNMEKTVFQKEGNYGDNWNYGQVTLNETVKFKVAFNAFKNKILSDIALDDISLTYGICNGSLYPEPTLVPTPPPELPTDCGGPFELWEPNTTFSSTNFPNSYPNLAFCVWILNAQKGKNIQLHFQEFDLENINDVVEIRDGEEADSLLLAVYTGPGPVKDVFSTTNRMTVLLITNDVLARGGFKANFTTGYHLGIPEPCKADHFQCKNGECVPLVNLCDGHLHCEDGSDEADCVRFFNGTTNNNGLVRFRIQSIWHTACAENWTTQISNDVCQLLGLGSGNSSKPIFSTDGGPFVKLNTAPDGHLILTPSQQCLQDSLIRLQCNHKSCGKKLAAQDITPKIVGGSNAKEGAWPWVVGLYYGGRLLCGASLVSSDWLVSAAHCVYGRNLEPSKWTAILGLHMKSNLTSPQTVPRLIDEIVINPHYNRRRKDNDIAMMHLEFKVNYTDYIQPICLPEENQVFPPGRNCSIAGWGTVVYQGTTANILQEADVPLLSNERCQQQMPEYNITENMICAGYEEGGIDSCQGDSGGPLMCQENNRWFLAGVTSFGYKCALPNRPGVYARVSRFTEWIQSFLH

SEQ ID NO: 770180 - protein, 1019 aa, Homo sapiens
MGSKRGISSRHHSLSSYEIMFAALFAILVVLCAGLIAVSCLTIKESQRGAALGQSHEARATFKITSGVTYNPNLQDKLSVDFKVLAFDLQQMIDEIFLSSNLKNEYKNSRVLQFENGSIIVVFDLFFAQWVSDENVKEELIQGLEANKSSQLVTFHIDLNSVDILDKLTTTSHLATPGNVSIECLPGSSPCTDALTCIKADLFCDGEVNCPDGSDEDNKMCATVCDGRFLLTGSSGSFQATHYPKPSETSVVCQWIIRVNQGLSIKLSFDDFNTYYTDILDIYEGVGSSKILRASIWETNPGTIRIFSNQVTATFLIESDESDYVGFNATYTAFNSSELNNYEKINCNFEDGFCFWVQDLNDDNEWERIQGSTFSPFTGPNFDHTFGNASGFYISTPTGPGGRQERVGLLSLPLDPTLEPACLSFWYHMYGENVHKLSINISNDQNMEKTVFQKEGNYGDNWNYGQVTLNETVKFKVAFNAFKNKILSDIALDDISLTYGICNGSLYPEPTLVPTPPPELPTDCGGPFELWEPNTTFSSTNFPNSYPNLAFCVWILNAQKGKNIQLHFQEFDLENINDVVEIRDGEEADSLLLAVYTGPGPVKDVFSTTNRMTVLLITNDVLARGGFKANFTTGYHLGIPEPCKADHFQCKNGECVPLVNLCDGHLHCEDGSDEADCVRFFNGTTNNNGLVRFRIQSIWHTACAENWTTQISNDVCQLLGLGSGNSSKPIFSTDGGPFVKLNTAPDGHLILTPSQQCLQDSLIRLQCNHKSCGKKLAAQDITPKIVGGSNAKEGAWPWVVGLYYGGRLLCGASLVSSDWLVSAAHCVYGRNLEPSKWTAILGLHMKSNLTSPQTVPRLIDEIVINPHYNRRRKDNDIAMMHLEFKVNYTDYIQPICLPEENQVFPPGRNCSIAGWGTVVYQGTTANILQEADVPLLSNERCQQQMPEYNITENMICAGYEEGGIDSCQGDSGGPLMCQENNRWFLAGVTSFGYKCALPNRPGVYARVSRFTEWIQSFLH

SEQ ID NO: 770181 - protein, 44 aa, Homo sapiens
LHLNPRITVSYSGGLNRGANSKRILSPLGGCGRAPQSEFGGSTT

SEQ ID NO: 770182 - protein, 176 aa, Homo sapiens
MAMSFEWPWQYRFPPFFTLQPNVDTRQKQLAAWCSLVLSFCRLHKQSSMTVMEAQESPLFNNVKLQRKLPVESIQIVLEELRKKGNLEWLDKSKSSFLIMWRRPEEWGKLIYQWVSRSGQNNSVFTLYELTNGEDTEDEEFHGLDEATLLRALQALQQEHKAEIITVSDGRGVKFF

SEQ ID NO: 770183 - protein, 176 aa, Homo sapiens; identical to SEQ ID NO: 770182

SEQ ID NO: 770184 - protein, 176 aa, Homo sapiens; identical to SEQ ID NO: 770182

SEQ ID NO: 770185 - protein, 192 aa, Homo sapiens
PKYVWGEPGVNQSRGCTMAISELARQYRFPPFFTLQPNVDTRQKQLAAWCSLVLSFCRLHKQSSMTVMEAQESPLFNNVKLQRKLPVESIQIVLEELRKKGNLEWLDKSKSSFLIMWRRPEEWGKLIYQWVSRSGQNNSVFTLYELTNGEDTEDEEFHGLDEATLLRALQALQQEHKAEIITVSDGRGVKFF

SEQ ID NO: 770186 - protein, 114 aa, Homo sapiens
MAMSFEWPWQYRFPPFFTLQPNVDTRQKQLAAWCSLVLSFCRLHKQSSMTVMEAQESPLFNNVKLQRILPQALPQPIHMHFCAFTHAQTPPRASPLLPMVGRFPPKLDLKSENV

SEQ ID NO: 770187 - protein, 176 aa, Homo sapiens; identical to SEQ ID NO: 770182

SEQ ID NO: 770188 - protein, 176 aa, Homo sapiens; identical to SEQ ID NO: 770182

SEQ ID NO: 770189 - protein, 176 aa, Homo sapiens; identical to SEQ ID NO: 770182

SEQ ID NO: 770190 - protein, 176 aa, Homo sapiens; identical to SEQ ID NO: 770182

SEQ ID NO: 770191 - protein, 128 aa, Homo sapiens [sequence omitted]

SEQ ID NO: 770192 - protein, 235 aa, Homo sapiens
MAMSFEWPWQYRFPPFFTLQPNVDTRQKQLAAWCSLVLSFCRLHKQSSMTVMEAQESPLFNNVKLQRILPQALPQPIHMHFCAFTHAQSPPAPAPFYPCKGHLFLLPDSSLKYLWRKAEGRQQTEGKLPVESIQIVLEELRKKGNLEWLDKSKSSFLIMWRRPEEWGKLIYQWVSRSGQNNSVFTLYELTNGEDTEDEEFHGLDEATLLRALQALQQEHKAEIITVSDGRGVKFF

SEQ ID NO: 770193 - protein, 162 aa, Homo sapiens [sequence omitted]

SEQ ID NO: 770194 - protein, 150 aa, Homo sapiens
MKDEVALLAAVTLLGVLLQAYFSLQVISARRAFRVSPPLTTGPPEFERVYRAQVNCSEYFPLFLATLWVAGIFFHEGAAALCGLVYLFARLRYFQGYARSAQLRLAPLYASARALWLLVALAALGLLAHFLPAALRAALLGRLRTLLPWA

SEQ ID NO: 770195 - protein, 105 aa, Homo sapiens
MKGRRPCAAWSTCSRASATSRATRAPRSSGWHRCTRARAPSGCWWRWLRSACSPTSSRPRCAPRSSDGSGRCCRGPETKAPGPTEPGKKSRSLQLPRGGALASAS

SEQ ID NO: 770196 - protein, 260 aa, Homo sapiens
MKDEVALLAAVTLLGVLLQAYFSLQVISARRAFRVSPPLTTGPPEFERVYRAQVNCSEYFPLFLATLWVAGIFFHEGAAALCGLVYLFARLRYFQGYARSAQLSEGRAGSGAGPGKDRGRAGLLGSGTEAGGGRRAGAQRLWGFGGRALAAARGSPRGARVAAGKKRASSRHLPADRRPQAGTAVRERARPLAAGGAGCARPARPLPPGRAARRAPRTAPDAAAVGLRPRPPGRRSRERRAGASSCPGEGRSLPHPSLYH

SEQ ID NO: 770197 - protein, 105 aa, Homo sapiens
MVTPPCTPSTEMGRGEHRGSASSPGPSSEQQTGLSVPQLAFTHSPCHHTDGTMKDEVALLAAVTLLGVLLQAYFSLQVISARRAFRVSPPLTTGPPEFERVYRAQ

SEQ ID NO: 770198 - protein, 150 aa, Homo sapiens; identical to SEQ ID NO: 770194

SEQ ID NO: 770199 - protein, 105 aa, Homo sapiens; identical to SEQ ID NO: 770195

SEQ ID NO: 770200 - protein, 160 aa, Homo sapiens
MKDEVALLAAVTLLGVLLQAYFSLQVISARRAFRVSPPLTTGPPEFERVYRAQGGGPVRPGLPVRAPPLLPGLRALRAAQAGTAVRERARPLAAGGAGCARPARPLPPGRAARRAPRTAPDAAAVGLRPRPPGRRSRERRAGASSCPGEGRSLPHPSLYH

SEQ ID NO: 770201 - protein, 477 aa, Homo sapiens
MPPCQPQRPLLLLLLLLACQPQVPSAQVMDFLFEKWKLYGDQCHHNLSLLPPPTELVCNRTFDKYSCWPDTPANTTANISCPWYLPWHHKVQHRFVFKRCGPDGQWVRGPRGQPWRDASQCQMDGEEIEVQKEVAKMYSSFQVMYTVGYSLSLGALLLALAILGGLSKLHCTRNAIHANLFASFVLKASSVLVIDGLLRTRYSQKIGDDLSVSTWLSDGAVAGCRVAAVFMQYGIVANYCWLLVEGLYLHNLLGLATLPERSFFSLYLGIGWGAPMLFVVPWAVVKCLFENVQCWTSNDNMGFWWILRFPVFLAILINFFIFVRIVQLLVAKLRARQMHHTDYKFRLAKSTLTLIPLLGVHEVVFAFVTDEHAQGTLRSAKLFFDLFLSSFQGLLVAVLYCFLNKEVQSELRRRWHRWRLGKVLWEERNTSNHRASSSPGHGPPSKELQFGRGGGSQDSSAETPLAGGLPRLAESPF

SEQ ID NO: 770202 - protein, 557 aa, Homo sapiens
MPPCQPQRPLLLLLLLLACQPQVPSAQVMDFLFEKWKLYGDQCHHNLSLLPPPTGEPPTQSLSACAWPQHFLSSLHGKVPGCLCSLGGPRQGALSFLRPPPPWAELVCNRTFDKYSCWPDTPANTTANISCPWYLPWHHKVQHRFVFKRCGPDGQWVRGPRGQPWRDASQCQMDGEEIEVQVSGRQAGAVGLDGNGHGGPCLALTGHCNSQKEVAKMYSSFQVMYTVGYSLSLGALLLALAILGGLSKLHCTRNAIHANLFASFVLKASSVLVIDGLLRTRYSQKIGDDLSVSTWLSDGAVAGCRVAAVFMQYGIVANYCWLLVEGLYLHNLLGLATLPERSFFSLYLGIGWGAPMLFVVPWAVVKCLFENVQCWTSNDNMGFWWILRFPVFLAILINFFIFVRIVQLLVAKLRARQMHHTDYKFRLAKSTLTLIPLLGVHEVVFAFVTDEHAQGTLRSAKLFFDLFLSSFQGLLVAVLYCFLNKEVQSELRRRWHRWRLGKVLWEERNTSNHRASSSPGHGPPSKELQFGRGGGSQDSSAETPLAGGLPRLAESPF

SEQ ID NO: 770203 - protein, 82 aa, Homo sapiens
PQRTGRRTGADWLCHSKLHCTRNAIHANLFASFVLKASSVLVIDGLLRTRYSQKIGDDLSVSTWLSDGVSPLGGLRQVGGSA

SEQ ID NO: 770204 - protein, 83 aa, Homo sapiens
MLSVKLHGAVKLLVLPLEGAASQAAKETHIRVIRSHHSAEAGNSLHWPGFPPSGVESGCSYQGWMSSKCRQPGTRAAATNAGR

SEQ ID NO: 770205 - protein, 167 aa, Homo sapiens
MLPEKALHGHPQLPRTVPTRAAMRAAGTLLAFCCLVLSTTGGPSPDTCSQDLNSRVKPGFPKTIKTNDPGVLQAARYSVEKFNNCTNDMFLFKESRITRALVQIVKGLKYMLEVEIGRTTCKKNQHLRLDDCDFQTNHTLKQTLSCYSEVWVVPWLQHFEVPVLRCH

SEQ ID NO: 770206 - protein, 285 aa, Homo sapiens
MLPEKALHGHPQLPRTVPTRAAMRAAGTLLAFCCLVLSTTGGPSPDTCSQDLNSRVKPGFPKTIKTNDPGVLQAARYSVEKFNNCTNDMFLFKESRITRALVQIVKGLKYMLEVEIGRTTCKKNQHLRLDDCDFQTNHTLKQVKQQALLSDVPSLPQPTPSQDCEKHRHHVSNAAPQTSPLRKPGLPDSRTTEDPGEQEVEPVPGAPQMTSSRPRGGDTALEERPGVRVERVRVRKAFKQSRNYICIIYIHMICIICISYIAYLCRESKRTGTQQHLAITEVKST

SEQ ID NO: 770207 - protein, 84 aa, Homo sapiens
FQSDSASTCGDVPFFTWLLMLGGKANAENPRASTDPYKKDSTASYRFNYCFFMRNSKPQSLTIVYLLIPKRQTPTRHPPVYTSI

SEQ ID NO: 770208 - protein, 105 aa, Homo sapiens
EPRRQPSPFVSQTAPPPGATARGAPRKPCTGAARKGVDHSGGRRGFAQNLAGTVAFSRSAPKRLPSGLPPAWPTLAEGRRPGRRLCSPRFCERPQTGLRSLCLLE

SEQ ID NO: 770209 - protein, 97 aa, Homo sapiens
KKSHTPPAMILRPPQRCGTVLFLLGGQFELTGKGIVRTITGSTERKARGSFAIWSENQPPTPKAKLLPFQKLRDGGAIFLDDCTSERWFQVIEKDIP

SEQ ID NO: 770210 - protein, 285 aa, Homo sapiens
VQDRPVVIGRGQNFNIYKRIFTDMVSSPGTNCAEAYHSWADLRDVLFNLCENLVKSSEANSPAHEEFKTMLLIAHYYATRSAAQSVKQLETVAARLSVSLLRHTQLLPVDKAFYEAGIAAKAVGWDNMAFIFLNRFLDLTDAIEEGTLDGLDHSDFQDTDIPFEVPLPAKQHVPEAEREEVRDWVLTVSMDQRLEQVLPRDERGAYEASLVAASTGVRALPCLITGYPILRNKIEFKRPGKAANKDNWNKFLMAIKTSHSPVCQDVLKFISQWCGGLPSTSFSFQ

SEQ ID NO: 770211 - protein, 87 aa, Homo sapiens
SYLTRVRIYQLSRKQLHLYDIESCSKTMILNFCSYMQWVPGSDVLVAQNRNSLCVWYNIEAPERVTMFTIRVCWTLGALRCGIELIN

SEQ ID NO: 770212 - protein, 1755 aa, Homo sapiens
ERQVCVMHLKHLRTLLSPQDGAAKVTCMAWSQNNAKFAVCTVDRVVLLYDEHGERRDKFSTKPADMKYGRKSYMVKGMAFSPDSTKIAIGQTDNIIYVYKIGEDWGDKKVICNKFIQTSAVTCLQWPAEYIIVFGLAEGKVRLANTKTNKSSTIYGTESYVVSLTTNCSGKGILSGHADGTIVRYFFDDEGSGESQGKLVNHPCPPYALAWATNSIVAAGCDRKIVAYGKEGHMLQTFDYSRDPQEREFTTAVSSPGGQSVVLGSYDRLRVFNWIPRRSIWEEAKPKEITNLYTITALAWKRDGSRLCVGTLCGGVEQFDCCLRRSIYKNKFELTYVGPSQVIVKNLSSGTRVVLKSHYGYEVEEVKILGKERYLVAHTSETLLLGDLNTNRLSEIAWQGSGGNEKYFFENENVCMIFNAGELTLVEYGNNDTLGSVRTEFMNPHLISVRINERCQRGTEDNKKLAYLIDIKTIAIVDLIGGYNIGTVSHESRVDWLELNETGHKLLFRDRKLRLHLYDIESCSKTMILNFCSYMQWVPGSDVLVAQNRNSLCVWYNIEAPERVTMFTIRGDVIGLERGGGKTEVMVMEGVTTVAYTLDEGLIEFGTAIDDGNYIRATAFLETLEMTPETEAMWKTLSKLALEARQLHIAERCFSALGQVAKARFLHETNEIADQVSREYGGEGTDFYQVRARLAMLEKNYKLAEMIFLEQNAVEEAMGMYQELHRWDECIAVAEAKGHPALEKLRRSYYQWLMDTQQEERAGELQESQGDGLAAISLYLKAGLPAKAARLVLTREELLANTELVEHITAALIKGELYERAGDLFEKIHNPQKALECYRKGNAFMKAVELARLAFPVEVVKLEEAWGDHLVQQKQLDAAINHYIEARCSIKAIEAALGARQWKKAIYILDLQDRNTASKYYPLVAQHYASLQEYEIAEELYTKGDRTKDAIDMYTQAGRWEQAHKLAMKCMRPEDVSVLYITQAQEMEKQGKYREAERLYVTVQEPDLAITMYKKHKLYDDMIRLVGKHHPDLLSDTHLHLGKELEAEGRLQEAEYHYLEAQEWKATVNMYRASGLWEEAYRVARTQGGANAHKHVAYLWAKSLGGEAAVRLLNKLGLLEAAVDHAADNCSFEFAFELSRLALKHKTPEVHLKYAMFLEDEGKFEEAEAEFIRAGKPKEAVLMFVHNQDWEAAQRVAEAHDPDSVAEVLVGQARGALEEKDFQKAEGLLLRAQRPGLALNYYKEAGLWSDALRICKDYVPSQLEALQEEYEREATKKGARGVEGFVEQARHWEQAGEYSRAVDCYLKVRDSGNSGLAEKCWMKAAELSIKFLPPQRNMEVVLAVGPQLIGIGKHSAAAELYLNLDLVKEAIDAFIEGEEWNKAKRVAKELDPRYEDYVDQHYKEFLKNQGKVDSLVGVDVIAALDLYVEQGQWDKCIETATKQNYKILHKYVALYATHLIREGSSAQALALYVQHGAPANPQNFNIYKRIFTDMVSSPGTNCAEAYHSWADLRDVLFNLCENLVKSSEANSPAHEEFKTMLLIAHYYATRSAAQSVKQLETVAARLSVSLLRHTQLLPVDKAFYEAGIAAKAVGWDNMAFIFLNRFLDLTDAIEEGTLDGLDHSDFQDTDIPFEVPLPAKQHVPEAEREEVRDWVLTVSMDQRLEQVLPRDERGAYEASLVAASTGVRALPCLITGYPILRNKIEFKRPGKAANKDNWNKFLMAIKTSHSPVCQDVLKFISQWCGGLPSTSFSFQ

SEQ ID NO: 770213 - protein, 1742 aa, Homo sapiens
ERQVCVMHLKHLRTLLSPQDGAAKVTCMAWSQNNAKFAVCTVDRVVLLYDEHGERRDKFSTKPADMKYGRKSYMVKGMAFSPDSTKIAIGQTDNIIYVYKMWRRLSAVTCLQWPAEYIIVFGLAEGKVRLANTKTNKSSTIYGTESYVVSLTTNCSGKGILSGHADGTIVRYFFDDEGSGESQGKLVNHPCPPYALAWATNSIVAAGCDRKIVAYGKEGHMLQTFDYSRDPQEREFTTAVSSPGGQSVVLGSYDRLRVFNWIPRRSIWEEAKPKEITNLYTITALAWKRDGSRLCVGTLCGGVEQFDCCLRRSIYKNKFELTYVGPSQVIVKNLSSGTRVVLKSHYGYEVEEVKILGKERYLVAHTSETLLLGDLNTNRLSEIAWQGSGGNEKYFFENENVCMIFNAGELTLVEYGNNDTLGSVRTEFMNPHLISVRINERCQRGTEDNKKLAYLIDIKTIAIVDLIGGYNIGTVSHESRVDWLELNETGHKLLFRDRKLRLHLYDIESCSKTMILNFCSYMQWVPGSDVLVAQNRNSLCVWYNIEAPERVTMFTIRGDVIGLERGGGKTEVMVMEGVTTVAYTLDEGLIEFGTAIDDGNYIRATAFLETLEMTPETEAMWKTLSKLALEARQLHIAERCFSALGQVAKARFLHETNEIADQVSREYGGEGTDFYQVRARLAMLEKNYKLAEMIFLEQNAVEEAMGMYQELHRWDECIAVAEAKGHPALEKLRRSYYQWLMDTQQEERAGELQESQGDGLAAISLYLKAGLPAKAARLVLTREELLANTELVEHITAALIKGELYERAGDLFEKIHNPQKALECYRKGNAFMKAVELARLAFPVEVVKLEEAWGDHLVQQKQLDAAINHYIEARCSIKAIEAALGARQWKKAIYILDLQDRNTASKYYPLVAQHYASLQEYEIAEELYTKGDRTKDAIDMYTQAGRWEQAHKLAMKCMRPEDVSVLYITQAQEMEKQGKYREAERLYVTVQEPDLAITMYKKHKLYDDMIRLVGKHHPDLLSDTHLHLGKELEAEGRLQEAEYHYLEAQEWKATVNMYRASGLWEEAYRVARTQGGANAHKHVAYLWAKSLGGEAAVRLLNKLGLLEAAVDHAADNCSFEFAFELSRLALKHKTPEVHLKYAMFLEDEGKFEEAEAEFIRAGKPKEAVLMFVHNQDWEAAQRVAEAHDPDSVAEVLVGQARGALEEKDFQKAEGLLLRAQRPGLALNYYKEAGLWSDALRICKDYVPSQLEALQEEYEREATKKGARGVEGFVEQARHWEQAGEYSRAVDCYLKVRDSGNSGLAEKCWMKAAELSIKFLPPQRNMEVVLAVGPQLIGIGKHSAAAELYLNLDLVKEAIDAFIEGEEWNKAKRVAKELDPRYEDYVDQHYKEFLKNQGKVDSLVGVDVIAALDLYVEQGQWDKCIETATKQNYKILHKYVALYATHLIREGSSAQALALYVQHGAPANPQNFNIYKRIFTDMVSSPGTNCAEAYHSWADLRDVLFNLCENLVKSSEANSPAHEEFKTMLLIAHYYATRSAAQSVKQLETVAARLSVSLLRHTQLLPVDKAFYEAGIAAKAVGWDNMAFIFLNRFLDLTDAIEEGTLDGLDHSDFQDTDIPFEVPLPAKQHVPEAEREEVRDWVLTVSMDQRLEQVLPRDERGAYEASLVAASTGVRALPCLITGYPILRNKIEFKRPGKAANKDNWNKFLMAIKTSHSPVCQDVLKFISQWCGGLPSTSFSFQ

SEQ ID NO: 770214 - protein, 1170 aa, Homo sapiens
MVMEGVTTVAYTLDEGLIEFGTAIDDGNYIRATAFLETLEMTPETEAMWKTLSKLALEARQLHIAERCFSALGQVAKARFLHETNEIADQVSREYGGEGTDFYQVRARLAMLEKNYKLAEMIFLEQNAVEEAMGMYQELHRWDECIAVAEAKGHPALEKLRRSYYQWLMDTQQEERAGELQESQGDGLAAISLYLKAGLPAKAARLVLTREELLANTELVEHITAALIKGELYERAGDLFEKIHNPQKALECYRKGNAFMKAVELARLAFPVEVVKLEEAWGDHLVQQKQLDAAINHYIEARCSIKAIEAALGARQWKKAIYILDLQDRNTASKYYPLVAQHYASLQEYEIAEELYTKGDRTKDAIDMYTQAGRWEQAHKLAMKCMRPEDVSVLYITQAQEMEKQGKYREAERLYVTVQEPDLAITMYKKHKLYDDMIRLVGKHHPDLLSDTHLHLGKELEAEGRLQEAEYHYLEAQEWKATVNMYRASGLWEEAYRVARTQGGANAHKHVAYLWAKSLGGEAAVRLLNKLGLLEAAVDHAADNCSFEFAFELSRLALKHKTPEVHLKYAMFLEDEGKFEEAEAEFIRAGKPKEAVLMFVHNQDWEAAQRVAEAHDPDSVAEVLVGQARGALEEKDFQKAEGLLLRAQRPGLALNYYKEAGLWSDALRICKDYVPSQLEALQEEYEREATKKGARGVEGFVEQARHWEQAGEYSRAVDCYLKVRDSGNSGLAEKCWMKAAELSIKFLPPQRNMEVVLAVGPQLIGIGKHSAAAELYLNLDLVKEAIDAFIEGEEWNKAKRVAKELDPRYEDYVDQHYKEFLKNQGKVDSLVGVDVIAALDLYVEQGQWDKCIETATKQNYKILHKYVALYATHLIREGSSAQALALYVQHGAPANPQNFNIYKRIFTDMVSSPGTNCAEAYHSWADLRDVLFNLCENLVKSSEANSPAHEEFKTMLLIAHYYATRSAAQSVKQLETVAARLSVSLLRHTQLLPVDKAFYEAGIAAKAVGWDNMAFIFLNRFLDLTDAIEEGTLDGLDHSDFQDTDIPFEVPLPAKQHVPEAEREEVRDWVLTVSMDQRLEQVLPRDERGAYEASLVAASTGVRALPCLITGYPILRNKIEFKRPGKAANKDNWNKFLMAIKTSHSPVCQDVLKFISQWCGGLPSTSFSFQ

SEQ ID NO: 770215 - protein, 1739 aa, Homo sapiens
ERQVCVMHLKHLRTLLSPQDGAAKVTCMAWSQNNAKFAVCTVDRVVLLYDEHGERRDKFSTKPADMKYGRKSYMVKGMAFSPDSTKIAIGQTDNIIYVYKIGEDWGDKKVICNKFIQTSAVTCLQWPAEYIIVFGLAEGKVRLANTKTNKSSTIYGTESYVVSLTTNCSGKGILSGHADGTIVRYFFDDEGSGESQGKLVNHPCPPYALAWATNSIVAAGCDRKIVAYGKEGHMLQTFDYSRDPQEREFTTAVSSPGGQSVVLGSYDRLRVFNWIPRRSIWEEAKPKEITNLYTITALAWKRDGSRLCVGTLCGGVEQFDCCLRRSIYKNKFELTYVGPSQVIVKNLSSGTRVVLKSHYGYEVEEVKILGKERYLVAHTSETLLLGDLNTNRLSEIAWQGSGGNEKYFFENENVCMIFNAGELTLVEYGNNDTLGSVRTEFMNPHLISVRINERCQRGTEDNKKLAYLIDIKTIAIVDLIGGYNIGTVSHESRVDWLELNETGHKLLFRDRKLRLHLYDIESCSKTMILNFCSYMQWVPGSDVLVAQNRNSLCVWYNIEAPERVTMFTIRGDVIGLERGGGKTEVMVMEGVTTVAYTLDEGLIEFGTAIDDGNYIRATAFLETLEMTPETEAMWKTLSKLALEARQLHIAERCFSALGQVAKARFLHETNEIADQVSREYGGEGTDFYQVRARLAMLEKNYKLAEMIFLEQNAVEEAMGMYQELHRWDECIAVAEAKGHPALEKLRRSYYQWLMDTQQEERAGELQESQGDGLAAISLYLKAGLPAKAARLVLTREELLANTELVEHITAALIKGELYERAGDLFEKIHNPQKALECYRKGNAFMKAVELARLAFPVEVVKLEEAWGDHLVQQKQLDAAINHYIEARCSIKAIEAALGARQWKKAIYILDLQDRNTASKYYPLVAQHYASLQEYEIAEELYTKGDRTKDAIDMYTQAGRWEQAHKLAMKCMRPEDVSVLYITQAQEMEKQGKYREAERLYVTVQEPDLAITMYKKHKLYDDMIRLVGKHHPDLLSDTHLHLGKELEAEGRLQEAEYHYLEAQEWKATVNMYRASGLWEEAYRVARTQGGANAHKHVAYLWAKSLGGEAAVRLLNKLGLLEAAVDHAADNCSFEFAFELSRLALKHGKFEEAEAEFIRAGKPKEAVLMFVHNQDWEAAQRVAEAHDPDSVAEVLVGQARGALEEKDFQKAEGLLLRAQRPGLALNYYKEAGLWSDALRICKDYVPSQLEALQEEYEREATKKGARGVEGFVEQARHWEQAGEYSRAVDCYLKVRDSGNSGLAEKCWMKAAELSIKFLPPQRNMEVVLAVGPQLIGIGKHSAAAELYLNLDLVKEAIDAFIEGEEWNKAKRVAKELDPRYEDYVDQHYKEFLKNQGKVDSLVGVDVIAALDLYVEQGQWDKCIETATKQNYKILHKYVALYATHLIREGSSAQALALYVQHGAPANPQNFNIYKRIFTDMVSSPGTNCAEAYHSWADLRDVLFNLCENLVKSSEANSPAHEEFKTMLLIAHYYATRSAAQSVKQLETVAARLSVSLLRHTQLLPVDKAFYEAGIAAKAVGWDNMAFIFLNRFLDLTDAIEEGTLDGLDHSDFQDTDIPFEVPLPAKQHVPEAEREEVRDWVLTVSMDQRLEQVLPRDERGAYEASLVAASTGVRALPCLITGYPILRNKIEFKRPGKAANKDNWNKFLMAIKTSHSPVCQDVLKFISQWCGGLPSTSFSFQ

SEQ ID NO: 770216 - protein, 1763 aa, Homo sapiens
ERQVCVMHLKHLRTLLSPQDGAAKVTCMAWSQNNAKFAVCTVDRVVLLYDEHGERRDKFSTKPADMKYGRKSYMVKGMAFSPDSTKIAIGQTDNIIYVYKIGEDWGDKKVICNKFIQTSAVTCLQWPAEYIIVFGLAEGKVRLANTKTNKSSTIYGTESYVVSLTTNCSGKGILSGHADGTIVRYFFDDEGSGESQGKLVNHPCPPYALAWATNSIVAAGCDRKIVAYGKEGHMLQTFDYSRDPQEREFTTAVSSPGGQSVVLGSYDRLRVFNWIPRRSIWEEAKPKEITNLYTITALAWKRDGSRLCVGTLCGGVEQFDCCLRRSIYKNKFELTYVGPSQVIVKNLSSGTRVVLKSHYGYEVEEVKILGKERYLVAHTSETLLLGDLNTNRLSEIAWQGSGGNEKYFFENENVCMIFNAGELTLVEYGNNDTLGSVRTEFMNPHLISVRINERCQRGTEDNKKLAYLIDIKTIAIVDLIGGYNIGTVSHESRVDWLELNETGHKLLFRDRKLRLHLYDIESCSKTMILNFCSYMQWVPGSDVLVAQNRNSLCVWYNIEAPERVTMFTIRGDVIGLERGGGKTEVMVMEGVTTVAYTLDEGLIEFGTAIDDGNYIRATAFLETLEMTPETEAMWKTLSKLALEARQLHIAERCFSALGQVAKARFLHETNEIADQVSREYGGEGTDFYQVRARLAMLEKNYKLAEMIFLEQNAVEEAMGMYQELHRWDECIAVAEAKGHPALEKLRRSYYQWLMDTQQEERAGELQESQGDGLAAISLYLKAGLPAKAARLVLTREELLANTELVEHITAALIKGELYERAGDLFEKIHNPQKALECYRKGNAFMKAVELARLAFPVEVVKLEEAWGDHLVQQKQLDAAINHYIEARCSIKAIEAALGARQWKKAIYILDLQDRNTASKYYPLVAQHYASLQEYEIAEELYTKGDRTKDAIDMYTQAGRWEQAHKLAMKCMRPEDVSVLYITQAQEMEKQGKYREAERLYVTVQEPDLAITMYKKHKLYDDMIRLVGKHHPDLLSDTHLHLGKELEAEGRLQEAEYHYLEAQEWKATVNMYRASGLWEEAYRVARTQGGANAHKHVAYLWAKSLGGEAAVRLLNKLGLLEAAVDHAADNCSFEFAFELSRLALKHKTPEVHLKYAMFLEDEGKFEEAEAEFIRAGKPKEAVLMFVHNQDWEAAQRVAEAHDPDSVAEVLVGQARGALEEKDFQKAEGLLLRAQRPGLALNYYKEAGLWSDALRICKDYVPSQLEALQEEYEREATKKGARGVEGFVEQARHWEQAGEYSRAVDCYLKVRDSGNSGLAEKCWMKAAELSIKFLPPQRNMEVVLAVGPQLIGIGKHSAAAELYLNLDLVKEAIDAFIEGEEWNKAKRVAKELDPRYEDYVDQHYKEFLKNQGKVDSLVGVDVIAALDLYVEQGQWDKCIETATKQNYKILHKYVALYATHLIREGSSAQALALYVQHGAPANPQNFNIYKRIFTDMVSSPGTNCAEAYHSWADLRDVLFNLAVLSPSSKCENLVKSSEANSPAHEEFKTMLLIAHYYATRSAAQSVKQLETVAARLSVSLLRHTQLLPVDKAFYEAGIAAKAVGWDNMAFIFLNRFLDLTDAIEEGTLDGLDHSDFQDTDIPFEVPLPAKQHVPEAEREEVRDWVLTVSMDQRLEQVLPRDERGAYEASLVAASTGVRALPCLITGYPILRNKIEFKRPGKAANKDNWNKFLMAIKTSHSPVCQDVLKFISQWCGGLPSTSFSFQ

SEQ ID NO: 770217 - protein, 1722 aa, Homo sapiens
ERQVCVMHLKHLRTLLSPQDGAAKVTCMAWSQNNAKFAVCTVDRVVLLYDEHGERRDKFSTKPADMKYGRKSYMVKGMAFSPDSTKIAIGQTDNIIYVYKIGEDWGDKKVICNKFIQTSAVTCLQWPAEYIIVFGLAEGKVRLANTKTNKSSTIYGTESYVVSLTTNCSGKGILSGHADGTIVRYFFDDEGSGESQGKLVNHPCPPYALAWATNSIVAAGCDRKIVAYGKEGHMLQTFDYSRDPQEREFTTAVSSPGGQSVVLGSYDRLRVFNWIPRRSIWEEAKPKEITNLYTITALAWKRDGSRLCVGTLCGGVEQFDCCLRRSIYKNKFELTYVGPSQVIVKNLSSGTRVVLKSHYGYEVEEVKILGKERYLVAHTSETLLLGDLNTNRLSEIAWQGSGGNEKYFFENENVCMIFNAGELTLVEYGNNDTLGSVRTEFMNPHLISVRINERCQRGTEDNKKLAYLIDIKTIAIVDLIGGYNIGTVSHESRVDWLELNETGHKLLFRDRKLRLHLYDIESCSKTMILNFCSYMQWVPGSDVLVAQNRNSLCVWYNIEAPERVTMFTIRGDVIGLERGGGKTEVMVMEGVTTVAYTLDEGLIEFGTAIDDGNYIRATAFLETLEMTPETEAMWKTLSKLALEARQLHIAERCFSALGQVAKARFLHETNEIADQVSREYGGEGTDFYQVRARLAMLEKNYKLAEMIFLEQNAVEEAMGMYQELHRWDECIAVAEAKGHPALEKLRRSYYQWLMDTQQEERAGELQESQGDGLAAISLYLKAGLPAKAARLVLTREELLANTELVEHITAALIKGELYERAGDLFEKIHNPQKALECYRKGNAFMKAVELARLAFPVEVVKLEEAWGDHLVQQKQLDAAINHYIEARCSIKAIEAALGARQWKKAIYILDLQDRNTASKYYPLVAQHYASLQEYEIAEELYTKGDRTKDAIDMYTQAGRWEQAHKLAMKCMRPEDVSVLYITQAQEMEKQGKYREAERLYVTVQEPDLAITMYKKHKLYDDMIRLVGKHHPDLLSDTHLHLGKELEAEGRLQEAEYHYLEAQEWKATVNMYRASGLWEEAYRVARTQGGANAHKHVAYLWAKSLGGEAAVRLLNKLGLLEAAVDHAADNCSFEFAFELSRLALKHKTPEVHLKYAMFLEDEGKFEEAEAEFIRAGKPKEAVLMFVHNQDWEAAQRVAEAHDPDSVAEVLVGQARGALEEKDFQKAEGLLLRAQRPGLALNYYKEAGLWSDALRICKDYVPSQLEALQEEYEREATKKGARGVEGFVEQARHWEQAGEYSRAVDCYLKVRDSGNSGLAEKCWMKAAELSIKFLPPQRNMEVVLAVGPQLIGIGKHSAAAELYLNLDLVKEAIDAFIEGEEWNKAKRVAKELDPRYEDYVDQHYKEFLKNQGKVDSLVGVDVIAALDLYVEQGQWDKCIETATKQNYKILHKYVALYATHLIREGSSAQALALYVQHGAPANPQNFNIYKRIFTDMVSSPGTNCAEAYHSWADLRDVLFNLCENLVKSSEANSPAHEEFKTMLLIAHYYATRSAAQSVKQLETVAARLSVSLLRHTQLLPVDKAFYEAGIAAKAVGWDNMAFIFLNRFLDLTDEAEREEVRDWVLTVSMDQRLEQVLPRDERGAYEASLVAASTGVRALPCLITGYPILRNKIEFKRPGKAANKDNWNKFLMAIKTSHSPVCQDVLKFISQWCGGLPSTSFSFQ

SEQ ID NO: 770218 - protein, 1730 aa, Homo sapiens
ERQVCVMHLKHLRTLLSPQDGAAKVTCMAWSQNNAKFAVCTVDRVVLLYDEHGERRDKFSTKPADMKYGRKSYMVKGMAFSPDSTKIAIGQTDNIIYVYKIGEDWGDKKVICNKFIQTSAVTCLQWPAEYIIVFGLAEGKVRLANTKTNKSSTIYGTESYVVSLTTNCSGKGILSGHADGTIVRYFFDDEGSGESQGKLVNHPCPPYALAWATNSIVAAGCDRKIVAYGKEGHMLQTFDYSRDPQEREFTTAVSSPGGQSVVLGSYDRLRVFNWIPRRSIWEEAKPKEITNLYTITALAWKRDGSRLCVGTLCGGVEQFDCCLRRSIYKNKFELTYVGPSQVIVKNLSSGTRVVLKSHYGYEVEEVKILGKERYLVAHTSETLLLGDLNTNRLSEIAWQGSGGNEKYFFENENVCMIFNAGELTLVEYGNNDTLGSVRTEFMNPHLISVRINERCQRGTEDNKKLAYLIDIKTIAIVDLIGGYNIGTVSHESRVDWLELNETGHKLLFRDRKLRLHLYDIESCSKTMILNFCSYMQWVPGSDVLVAQNRNSLCVWYNIEAPERVTMFTIRGDVIGLERGGGKTEVMVMEGVTTVAYTLDEGLIEFGTAIDDGNYIRATAFLETLEMTPETEAMWKTLSKLALEARQLHIAERCFSALGQVAKARFLHETNEIADQVSREYGGEGTDFYQVRARLAMLEKNYKLAEMIFLEQNAVEEAMGMYQELHRWDECIAVAEAKGHPALEKLRRSYYQWLMDTQQEERAGELQESQGDGLAAISLYLKAGLPAKAARLVLTREELLANTELVEHITAALIKGELYERAGDLFEKIHNPQKALECYRKGNAFMKAVELARLAFPVEVVKLEEAWGDHLVQQKQLDAAINHYIEARCSIKAIEAALGARQWKKAIYILDLQDRNTASKYYPLVAQHYASLQEYEIAEELYTKGDRTKDAIDMYTQAGRWEQAHKLAMKCMRPEDVSVLYITQAQEMEKQGKYREAERLYVTVQEPDLAITMYKKHKLYDDMIRLVGKHHPDLLSDTHLHLGKELEAEGRLQEAEYHYLEAQEWKATVNMYRASGLWEEAYRVARTQGGANAHKHVAYLWAKSLGGEAAVRLLNKLGLLEAAVDHAADNCSFEFAFELSRLALKHKTPEVHLKYAMFLEDEGKFEEAEAEFIRAGKPKEAVLMFVHNQDWEAAQRVAEAHDPDSVAEVLVGQARGALEEKDFQKAEGLLLRAQRPGLALNYYKEAGLWSDALRICKDYVPSQLEALQEEYEREATKKGARGVEGFVEQARHWEQAGEYSRAVDCYLKVRDSGNSGLAEKCWMKAAELSIKFLPPQRNMEVVLAVGPQLIGIGKHSAAAELYLNLDLVKEAIDAFIEGEEWNKAKRVAKELDPRYEDYVDQHYKEFLKNQGKVDSLVGVDVIAALDLYVEQGQWDKCIETATKQNYKILHKYVALYATHLIREGSSAQALALYVQHGAPANPQNFNIYKRIFTDMVSSPGTNCAEAYHSWADLRDVLFNLAVLSPSSKCENLVKSSEANSPAHEEFKTMLLIAHYYATRSAAQSVKQLETVAARLSVSLLRHTQLLPVDKAFYEAGIAAKAVGWDNMAFIFLNRFLDLTDEAEREEVRDWVLTVSMDQRLEQVLPRDERGAYEASLVAASTGVRALPCLITGYPILRNKIEFKRPGKAANKDNWNKFLMAIKTSHSPVCQDVLKFISQWCGGLPSTSFSFQ

SEQ ID NO: 770219 - protein, 1756 aa, Homo sapiens
ERQVCVMHLKHLRTLLSPQDGAAKVTCMAWSQNNAKFAVCTVDRVVLLYDEHGERRDKFSTKPADMKYGRKSYMVKGMAFSPDSTKIAIGQTDNIIYVYKIGEDWGDKKVICNKFIQTSAVTCLQWPAEYIIVFGLAEGKVRLANTKTNKSSTIYGTESYVVSLTTNCSGKGILSGHADGTIVRYFFDDEGSGESQGKLVNHPCPPYALAWATNSIVAAGCDRKIVAYGKEGHMLQTFDYSRDPQEREFTTAVSSPGGQSVVLGSYDRLRVFNWIPRRSIWEEAKPKEITNLYTITALAWKRDGSRLCVGTLCGGVEQFDCCLRRSIYKNKFELTYVGPSQVIVKNLSSGTRVVLKSHYGYEVEEVKILGKERYLVAHTSETLLLGDLNTNRLSEIAWQGSGGNEKYFFENENVCMIFNAGELTLVEYGNNDTLGSVRTEFMNPHLISVRINERCQRGTEDNKKLAYLIDIKTIAIVDLIGGYNIGTVSHESRVDWLELNETGHKLLFRDRKLRLHLYDIESCSKTMILNFCSYMQWVPGSDVLVAQNRNSLCVWYNIEAPERVTMFTIRGDVIGLERGGGKTEVMVMEGVTTVAYTLDEGLIEFGTAIDDGNYIRATAFLETLEMTPETEAMWKTLSKLALEARQLHIAERCFSALGQVAKARFLHETNEIADQVSREYGGEGTDFYQVRARLAMLEKNYKLAEMIFLEQNAVEEAMGMYQELHRWDECIAVAEAKGHPALEKLRRSYYQWLMDTQQEERAGELQESQGDGLAAISLYLKAGLPAKAARLVLTREELLANTELVEHITAALIKGELYERAGDLFEKIHNPQKALECYRKGNAFMKAVELARLAFPVEVVKLEEAWGDHLVQQKQLDAAINHYIEARCSIKAIEAALGARQWKKAIYILDLQDRNTASKYYPLVAQHYASLQEYEIAEELYTKGDRTKDAIDMYTQAGRWEQAHKLAMKCMRPEDVSVLYITQAQEMEKQGKYREAERLYVTVQEPDLAITMYKKHKLYDDMIRLVGKHHPDLLSDTHLHLGKELEAEGRLQEAEYHYLEAQEWKATVNMYRASGLWEEAYRVARTQGGANAHKHVAYLWAKSLGGEAAVRLLNKLGLLEAAVDHAADNCSFEFAFELSRLALKHKTPEVHLKYAMFLEDEGKFEEAEAEFIRAGKPKEAVLMFVHNQDWEAAQRVAEAHDPDSVAEVLVGQARGALEEKDFQKAEGLLLRAQRPGLALNYYKEAGLWSDALRICKDYVPSQLEALQEEYEREATKKGARGVEGFVEQARHWEQAGEYSRAVDCYLKVRDSGNSGLAEKCWMKAAELSIKFLPPQRNMEVVLAVGPQLIGIGKHSAAAELYLNLDLVKEAIDAFIEGEEWNKAKRVAKELDPRYEDYVDQHYKEFLKNQGKVDSLVGVDVIAALDLYVEQGQWDKCIETATKQNYKILHKYVALYATHLIREGSSAQALALYVQHGAPANPQNFNIYKRIFTDMVSSPGTNCAEAYHSWADLRDVLFNLCENLVKSSEANSPAHEEFKTMLLIAHYYATRSAAQSVKQLETVAARLSVSLLRHTQLLPVDKAFYEAGIAAKAVGWDNMAFIFLNRFLDLTDAIEEGTLDGLDHSDFQDTDIPFEVPLPAKQHVPEAEREEVRDWVLTVSMDQRLEQVLPRDERGAYEASLVAASTGVRALPCLITGYPILRNKIEFKRPGKAANKDNWNKFLMAIKVREEDLENEGREGSTKKRKKNKSGCSGSYL

SEQ ID NO: 770220 - protein, 1714 aa, Homo sapiens
ERQVCVMHLKHLRTLLSPQDGAAKVTCMAWSQNNAKFAVCTVDRVVLLYDEHGERRDKFSTKPADMKYGRKSYMVKGMAFSPDSTKIAIGQTDNIIYVYKIGEDWGDKKVICNKFIQTSAVTCLQWPAEYIIVFGLAEGKVRLANTKTNKSSTIYGTESYVVSLTTNCSGKGILSGHADGTIVRYFFDDEGSGESQGKLVNHPCPPYALAWATNSIVAAGCDRKIVAYGKEGHMLQTFDYSRDPQEREFTTAVSSPGGQSVVLGSYDRLRVFNWIPRRSIWEEAKPKEITNLYTITALAWKRDGSRLCVGTLCGGVEQFDCCLRRSIYKNKFELTYVGPSQVIVKNLSSGTRVVLKSHYGYEVEEVKILGKERYLVAHTSETLLLGDLNTNRLSEIAWQGSGGNEKYFFENENVCMIFNAGELTLVEYGNNDTLGSVRTEFMNPHLISVRINERCQRGTEDNKKLAYLIDIKTIAIVDLIGGYNIGTVSHESRVDWLELNETGHKLLFRDRKLRLHLYDIESCSKTMILNFCSYMQWVPGSDVLVAQNRNSLCVWYNIEAPERVTMFTIRGDVIGLERGGGKTEVMVMEGVTTVAYTLDEGLIEFGTAIDDGNYIRATAFLETLEMTPETEAMWKTLSKLALEARQLHIAERCFSALGQVAKARFLHETNEIADQVSREYGGEGTDFYQVRARLAMLEKNYKLAEMIFLEQNAVEEAMGMYQELHRWDECIAVAEAKGHPALEKLRRSYYQWLMDTQQEERAGELQESQGDGLAAISLYLKAGLPAKAARLVLTREELLANTELVEHITAALIKGELYERAGDLFEKIHNPQKALECYRKGNAFMKAVELARLAFPVEVVKLEEAWGDHLVQQKQLDAAINHYIEARCSIKAIEAALGARQWKKAIYILDLQDRNTASKYYPLVAQHYASLQEYEIAEELYTKGDRTKDAIDMYTQAGRWEQAHKLAMKCMRPEDVSVLYITQAQEMEKQGKYREAERLYVTVQEPDLAITMYKKHKLYDDMIRLVGKHHPDLLSDTHLHLGKELEAEGRLQEAEYHYLEAQEWKATVNMYRASGLWEEAYRVARTQGGANAHKHVAYLWAKSLGGEAAVRLLNKLGLLEAAVDHAADNCSFEFAFELSRLALKHKTPEVHLKYAMFLEDEGKFEEAEAEFIRAGKPKEAVLMFVHNQDWEAAQRVAEAHDPDSVAEVLVGQARGALEEKDFQKAEGLLLRAQRPGLALNYYKEAGLWSDALRICKDYVPSQLEALQEEYEREATKKGARGVEGFVEQARHWEQAGEYSRAVDCYLKVRDSGNSGLAEKCWMKAAELSIKFLPPQRNMEVVLAVGPQLIGIGKHSAAAELYLNLDLVKEAIDAFIEGEEWNKAKRVAKELDPRYEDYVDQHYKEFLKNQGKVDSLVGVDVIAALDLYVEQGQWDKCIETATKQNYKILHKYVALYATHLIREGSSAQALALYVQHGAPANPQNFNIYKRIFTDMVSSPGTNCAEAYHSWADLRDVLFNLCENLVKSSEANSPAHEEFKTMLLIAHYYATRSAAQSVKQLETVAARLSVSLLRHTQLLPVDKAFYEAGIAAKAVGWDNMAFIFLNRFLDLTDAIEEGTLDGLDHSDFQDTDIPFEVPLPAKQHVPEAEREEVRDWVLTVSMDQRLEQVLPRDERGAYEASLVAASTGVRALPCLITGIEAYSTPDPVVGRKQQDQ

SEQ ID NO: 770221 - protein, 1644 aa, Homo sapiens
ERQVCVMHLKHLRTLLSPQDGAAKVTCMAWSQNNAKFAVCTVDRVVLLYDEHGERRDKFSTKPADMKYGRKSYMVKGMAFSPDSTKIAIGQTDNIIYVYKIGEDWGDKKVICNKFIQTSAVTCLQWPAEYIIVFGLAEGKVRLANTKTNKSSTIYGTESYVVSLTTNCSGKGILSGHADGTIVRYFFDDEGSGESQGKLVNHPCPPYALAWATNSIVAAGCDRKIVAYGKEGHMLQTFDYSRDPQEREFTTAVSSPGGQSVVLGSYDRLRVFNWIPRRSIWEEAKPKEITNLYTITALAWKRDGSRLCVGTLCGGVEQFDCCLRRSIYKNKFELTYVGPSQVIVKNLSSGTRVVLKSHYGYEVEEVKILGKERYLVAHTSETLLLGDLNTNRLSEIAWQGSGGNEKYFFENENVCMIFNAGELTLVEYGNNDTLGSVRTEFMNPHLISVRINERCQRGTEDNKKLAYLIDIKTIAIVDLIGGYNIGTVSHESRVDWLELNETGHKLLFRDRKLRLHLYDIESCSKTMILNFCSYMQWVPGSDVLVAQNRNSLCVWYNIEAPERVTMFTIRGDVIGLERGGGKTEVMVMEGVTTVAYTLDEGLIEFGTAIDDGNYIRATAFLETLEMTPETEAMWKTLSKLALEARQLHIAERCFSALGQVAKARFLHETNEIADQVSREYGGEGTDFYQVRARLAMLEKNYKLAEMIFLEQNAVEEAMGMYQELHRWDECIAVAEAKGHPALEKLRRSYYQWLMDTQQEERAGELQESQGDGLAAISLYLKAGLPAKAARLVLTREELLANTELVEHITAALIKGELYERAGDLFEKIHNPQKALECYRKGNAFMKAVELARLAFPVEVVKLEEAWGDHLVQQKQLDAAINHYIEARCSIKAIEAALGARQWKKAIYILDLQDRNTASKYYPLVAQHYASLQEYEIAEELYTKGDRTKDAIDMYTQAGRWEQAHKLAMKCMRPEDVSVLYITQAQEMEKQGKYREAERLYVTVQEPDLAITMYKKHKLYDDMIRLVGKHHPDLLSDTHLHLGKELEAEGRLQEAEYHYLEAQEWKATVNMYRASGLWEEAYRVARTQGGANAHKHVAYLWAKSLGGEAAVRLLNKLGLLEAAVDHAADNCSFEFAFELSRLALKHKTPEVHLKYAMFLEDEGKFEEAEAEFIRAGKPKEAVLMFVHNQDWEAAQRVAEAHDPDSVAEVLVGQARGALEEKDFQKAEGLLLRAQRPGLALNYYKEAGLWSDALRICKDYVPSQLEALQEEYEREATKKGARGVEGFVEQARHWEQAGEYSRAVDCYLKVRDSGNSGLAEKCWMKAAELSIKFLPPQRNMEVVLAVGPQLIGIGKHSAAAELYLNLDLVKEAIDAFIEGEEWNKAKRVAKELDPRYEDYVDQHYKEFLKNQGKVDSLVGVDVIAALDLYVEQGQWDKCIETATKQNYKILHKYVALYATHLIREGSSAQALALYVQHGAPANPQNFNIYKRIFTDMVSSPGTNCAEAYHSWADLRDVLFNLCENLVKSSEANSPAHEEFKTMLLIAHYYATRSAAQSVKQLETVAARLSVSLLRHTQLLPVDKAFYEAGIAAKAVGWDNMAFIFLNRFLDLTDAIEEGTLDGLDHSDFQDTDIPFEVPLPAKQHVP

SEQ ID NO: 770222 - protein, 212 aa, Homo sapiens [sequence omitted]

SEQ ID NO: 770223 - protein, 78 aa, Homo sapiens
MKMELSEHLHRYEDYVDQHYKEFLKNQGKVDSVRLGELAGGRMQGETHKTLSLFFPSCHLFSLVTLSSIDPAGGCGCD

SEQ ID NO: 770224 - protein, 97 aa, Homo sapiens
FWNMKMELSEHLHRYEDYVDQHYKEFLKNQGKVDSVRLGELAGGRMQGETHKTLSLFFPSCHLFSLVTLSSIDPAGGCGCDSCFGPVCGAGPVGQVH

SEQ ID NO: 770225 - protein, 1821 aa, Homo sapiens
ERQVCVMHLKHLRTLLSPQDGAAKVTCMAWSQNNAKFAVCTVDRVVLLYDEHGERRDKFSTKPADMKYGRKSYMVKGMAFSPDSTKIAIGQTDNIIYVYKIGEDWGDKKVICNKFIQTVKFRPVPGTLDEQTYISISTYKYSQELHFYHLNVTFPTARMVLHGCSWSSAVFLRALLCPSLEEIESAVTCLQWPAEYIIVFGLAEGKVRLANTKTNKSSTIYGTESYVVSLTTNCSGKGILSGHADGTIVRYFFDDEGSGESQGKLVNHPCPPYALAWATNSIVAAGCDRKIVAYGKEGHMLQTFDYSRDPQEREFTTAVSSPGGQSVVLGSYDRLRVFNWIPRRSIWEEAKPKEITNLYTITALAWKRDGSRLCVGTLCGGVEQFDCCLRRSIYKNKFELTYVGPSQVIVKNLSSGTRVVLKSHYGYEVEEVKILGKERYLVAHTSETLLLGDLNTNRLSEIAWQGSGGNEKYFFENENVCMIFNAGELTLVEYGNNDTLGSVRTEFMNPHLISVRINERCQRGTEDNKKLAYLIDIKTIAIVDLIGGYNIGTVSHESRVDWLELNETGHKLLFRDRKLRLHLYDIESCSKTMILNFCSYMQWVPGSDVLVAQNRNSLCVWYNIEAPERVTMFTIRGDVIGLERGGGKTEVMVMEGVTTVAYTLDEGLIEFGTAIDDGNYIRATAFLETLEMTPETEAMWKTLSKLALEARQLHIAERCFSALGQVAKARFLHETNEIADQVSREYGGEGTDFYQVRARLAMLEKNYKLAEMIFLEQNAVEEAMGMYQELHRWDECIAVAEAKGHPALEKLRRSYYQWLMDTQQEERAGELQESQGDGLAAISLYLKAGLPAKAARLVLTREELLANTELVEHITAALIKGELYERAGDLFEKIHNPQKALECYRKGNAFMKAVELARLAFPVEVVKLEEAWGDHLVQQKQLDAAINHYIEARCSIKAIEAALGARQWKKAIYILDLQDRNTASKYYPLVAQHYASLQEYEIAEELYTKGDRTKDAIDMYTQAGRWEQAHKLAMKCMRPEDVSVLYITQAQEMEKQGKYREAERLYVTVQEPDLAITMYKKHKLYDDMIRLVGKHHPDLLSDTHLHLGKELEAEGRLQEAEYHYLEAQEWKATVNMYRASGLWEEAYRVARTQGGANAHKHVAYLWAKSLGGEAAVRLLNKLGLLEAAVDHAADNCSFEFAFELSRLALKHKTPEVHLKYAMFLEDEGKFEEAEAEFIRAGKPKEAVLMFVHNQDWEAAQRVAEAHDPDSVAEVLVGQARGALEEKDFQKAEGLLLRAQRPGLALNYYKEAGLWSDALRICKDYVPSQLEALQEEYEREATKKGARGVEGFVEQARHWEQAGEYSRAVDCYLKVRDSGNSGLAEKCWMKAAELSIKFLPPQRNMEVVLAVGPQLIGIGKHSAAAELYLNLDLVKEAIDAFIEGEEWNKAKRVAKELDPRYEDYVDQHYKEFLKNQGKVDSLVGVDVIAALDLYVEQGQWDKCIETATKQNYKILHKYVALYATHLIREGSSAQALALYVQHGAPANPQNFNIYKRIFTDMVSSPGTNCAEAYHSWADLRDVLFNLCENLVKSSEANSPAHEEFKTMLLIAHYYATRSAAQSVKQLETVAARLSVSLLRHTQLLPVDKAFYEAGIAAKAVGWDNMAFIFLNRFLDLTDAIEEGTLDGLDHSDFQDTDIPFEVPLPAKQHVPEAEREEVRDWVLTVSMDQRLEQVLPRDERGAYEASLVAASTGVRALPCLITGYPILRNKIEFKRPGKAANKDNWNKFLMAIKTSHSPVCQDVLKFISQWCGGLPSTSFSFQ

SEQ ID NO: 770226 - protein, 803 aa, Homo sapiens
MYTQAGRWEQAHKLAMKCMRPEDVSVLYITQAQEMEKQGKYREAERLYVTVQEPDLAITMYKKHKLYDDMIRLVGKHHPDLLSDTHLHLGKELEAEGRLQEAEYHYLEAQEWKATVNMYRASGLWEEAYRVARTQGGANAHKHVAYLWAKSLGGEAAVRLLNKLGLLEAAVDHAADNCSFEFAFELSRLALKHKTPEVHLKYAMFLEDEGKFEEAEAEFIRAGKPKEAVLMFVHNQDWEAAQRVAEAHDPDSVAEVLVGQARGALEEKDFQKAEGLLLRAQRPGLALNYYKEAGLWSDALRICKDYVPSQLEALQEEYEREATKKGARGVEGFVEQARHWEQAGEYSRAVDCYLKVRDSGNSGLAEKCWMKAAELSIKFLPPQRNMEVVLAVGPQLIGIGKHSAAAELYLNLDLVKEAIDAFIEGEEWNKAKRVAKELDPRYEDYVDQHYKEFLKNQGKVDSLVGVDVIAALDLYVEQGQWDKCIETATKQNYKILHKYVALYATHLIREGSSAQALALYVQHGAPANPQNFNIYKRIFTDMVSSPGTNCAEAYHSWADLRDVLFNLCENLVKSSEANSPAHEEFKTMLLIAHYYATRSAAQSVKQLETVAARLSVSLLRHTQLLPVDKAFYEAGIAAKAVGWDNMAFIFLNRFLDLTDAIEEGTLDGLDHSDFQDTDIPFEVPLPAKQHVPEAEREEVRDWVLTVSMDQRLEQVLPRDERGAYEASLVAASTGVRALPCLITGYPILRNKIEFKRPGKAANKDNWNKFLMAIKTSHSPVCQDVLKFISQWCGGLPSTSFSFQ

SEQ ID NO: 770227 - protein, 1812 aa, Homo sapiens
ERQVCVMHLKHLRTLLSPQDGAAKVTCMAWSQNNAKFAVCTVDRVVLLYDEHGERRDKFSTKPADMKYGRKSYMVKGMAFSPDSTKIAIGQTDNIIYVYKIGEDWGDKKVICNKFIQTSAVTCLQWPAEYIIVFGLAEGKVRLANTKTNKSSTIYGTESYVVSLTTNCSGKGILSGHADGTIVRYFFDDEGSGESQGKLVNHPCPPYALAWATNSIVAAGCDRKIVAYGKEGHMLQTFDYSRDPQEREFTTAVSSPGGQSVVLGSYDRLRVFNWIPRRSIWEEAKPKEITNLYTITALAWKRDGSRLCVGTLCGGVEQFDCCLRRSIYKNKFELTYVGPSQVIVKNLSSGTRVVLKSHYGYEVEEVKILGKERYLVAHTSETLLLGDLNTNRLSEIAWQGSGGNEKYFFENENVCMIFNAGELTLVEYGNNDTLGSVRTEFMNPHLISVRINERCQRGTEDNKKLAYLIDIKTIAIVDLIGGYNIGTVSHESRVDWLELNETGHKLLFRDRKLRLHLYDIESCSKTMILNFCSYMQWVPGSDVLVAQNRNSLCVWYNIEAPERVTMFTIRGDVIGLERGGGKTEVMVMEGVTTVAYTLDEGLIEFGTAIDDGNYIRATAFLETLEMTPETEAMWKTLSKLALEARQLHIAERCFSALGQVAKARFLHETNEIADQVSREYGGEGTDFYQVRARLAMLEKNYKLAEMIFLEQNAVEEAMGMYQELHRWDECIAVAEAKGHPALEKLRRSYYQWLMDTQQEERAGELQESQGDGLAAISLYLKAGLPAKAARLVLTREELLANTELVEHITAALIKGELYERAGDLFEKIHNPQKALECYRKGNAFMKAVELARLAFPVEVVKLEEAWGDHLVQQKQLDAAINHYIEARCSIKAIEAALGARQWKKAIYILDLQDRNTASKYYPLVAQHYASLQEYEIAEELYTKGDRTKDAIDMYTQAGRWEQAHKLAMKCMRPEDVSVLYITQAQEMEKQGKYREAERLYVTVQEPDLAITMYKKHKLYDDMIRLVGKHHPDLLSDTHLHLGKELEAEGRLQEAEYHYLEAQEWKATVNMYRASGLWEEAYRVARTQGGANAHKHVAYLWAKSLGGEAAVRLLNKLGLLEAAVDHAADNCSFEFAFELSRLALKHKTPEVHLKYAMFLEDEGKFEEAEAEFIRAGKPKEAVLMFVHNQDWEAAQRVAEAHDPDSVAEVLVGQARGALEEKDFQKAEGLLLRAQRPGLALNYYKEAGLWSDALRICKDYVPSQLEALQEEYEREATKKGARGVEGFVEQARHWEQAGEYSRAVDCYLKVRDSGNSGLAEKCWMKAAELSIKFLPPQRNMEVVLAVGPQLIGIGKHSAAAELYLNLDLVKEAIDAFIEGEEWNKAKRVAKELDPRYEDYVDQHYKEFLKNQGKVDSLVGVDVIAALDLYVEQGQWDKCIETATKQNYKILHKYVALYATHLIREGSSAQALALYVQHGAPANPQNFNIYKRIFTDMVSSPGTNCAEAYHSWADLRDVLFNLCENLVKSSEANSPAHEEFKTMLLIAHYYATRSAAQSVKQLETVAARLSVSLLRHTQLLPVDKAFYEAGIAAKVSWDKEGWGREEEVKGWKIEYPFCSGRGKLSVGLMFGGCSPPMSSWIFLPGSQRNSIQAQLAHSHLHLDPREVAFKPSLFTPICNSSLLQAVGWDNMAFIFLNRFLDLTDEAEREEVRDWVLTVSMDQRLEQVLPRDERGAYEASLVAASTGVRALPCLITGYPILRNKIEFKRPGKAANKDNWNKFLMAIKTSHSPVCQDVLKFISQWCGGLPSTSFSFQ

SEQ ID NO: 770228 - protein, 1755 aa, Homo sapiens; identical to SEQ ID NO: 770212

SEQ ID NO: 770229 - protein, 1804 aa, Homo sapiens
ERQVCVMHLKHLRTLLSPQDGAAKVTCMAWSQNNAKFAVCTVDRVVLLYDEHGERRDKFSTKPADMKYGRKSYMVKGMAFSPDSTKIAIGQTDNIIYVYKIGEDWGDKKVICNKFIQTSAVTCLQWPAEYIIVFGLAEGKVRLANTKTNKSSTIYGTESYVVSLTTNCSGKGILSGHADGTIVRYFFDDEGSGESQGKLVNHPCPPYALAWATNSIVAAGCDRKIVAYGKEGHMLQTFDYSRDPQEREFTTAVSSPGGQSVVLGSYDRLRVFNWIPRRSIWEEAKPKEITNLYTITALAWKRDGSRLCVGTLCGGVEQFDCCLRRSIYKNKFELTYVGPSQVIVKNLSSGTRVVLKSHYGYEVEEVKILGKERYLVAHTSETLLLGDLNTNRLSEIAWQGSGGNEKYFFENENVCMIFNAGELTLVEYGNNDTLGSVRTEFMNPHLISVRINERCQRGTEDNKKLAYLIDIKTIAIVDLIGGYNIGTVSHESRVDWLELNETGHKLLFRDRKLRLHLYDIESCSKTMILNFCSYMQWVPGSDVLVAQNRNSLCVWYNIEAPERVTMFTIRGDVIGLERGGGKTEVMVMEGVTTVAYTLDEGLIEFGTAIDDGNYIRATAFLETLEMTPETEAMWKTLSKLALEARQLHIAERCFSALGQVAKARFLHETNEIADQVSREYGGEGTDFYQVRARLAMLEKNYKLAEMIFLEQNAVEEAMGMYQELHRWDECIAVAEAKGHPALEKLRRSYYQWLMDTQQEERAGELQESQGDGLAAISLYLKAGLPAKAARLVLTREELLANTELVEHITAALIKGELYERAGDLFEKIHNPQKALECYRKGNAFMKAVELARLAFPVEVVKLEEAWGDHLVQQKQLDAAINHYIEARCSIKAIEAALGARQWKKAIYILDLQDRNTASKYYPLVAQHYASLQEYEIAEELYTKGDRTKDAIDMYTQAGRWEQAHKLAMKCMRPEDVSVLYITQAQEMEKQGKYREAERLYVTVQEPDLAITMYKKHKLYDDMIRLVGKHHPDLLSDTHLHLGKELEAEGRLQEAEYHYLEAQEWKATVNMYRASGLWEEAYRVARTQGGANAHKHVAYLWAKSLGGEAAVRLLNKLGLLEAAVDHAADNCSFEFAFELSRLALKHKTPEVHLKYAMFLEDEGKFEEAEAEFIRAGKPKEAVLMFVHNQDWEAAQRVAEAHDPDSVAEVLVGQARGALEEKDFQKAEGLLLRAQRPGLALNYYKEAGLWSDALRICKDYVPSQLEALQEEYEREATKKGARGVEGFVEQARHWEQAGEYSRAVDCYLKVRDSGNSGLAEKCWMKAAELSIKFLPPQRNMEVVLAVGPQLIGIGKHSAAAELYLNLDLVKEAIDAFIEGEEWNKAKRVAKELDPRYEDYVDQHYKEFLKNQGKVDSLVGVDVIAALDLYVEQGQWDKCIETATKQNYKILHKYVALYATHLIREGSSAQALALYVQHGAPANPQNFNIYKRIFTDMVSSPGTNCAEAYHSWADLRDVLFNLCENLVKSSEANSPAHEEFKTMLLIAHYYATRSAAQSVKQLETVAARLSVSLLRHTQLLPVDKAFYEAGIAAKVSWDKEGWGREEEVKGWKIEYPFCSGRGKLSVGLMFGGCSPPMSSWIFLPGSQRNSIQAQLAHSHLHLDPREVAFKPSLFTPICNSSLLQAVGWDNMAFIFLNRFLDLTDAIEEGTLDGLDHSDFQDTDIPFEVPLPAKQHVPEAEREEVRDWVLTVSMDQRLEQVLPRDERGAYEASLVAASTGVRALPCLITGIEAYSTPDPVVGRKQQDQ

SEQ ID NO: 770230 - protein, 1605 aa, Homo sapiens
ERQVCVMHLKHLRTLLSPQDGAAKVTCMAWSQNNAKFAVCTVDRVVLLYDEHGERRDKFSTKPADMKYGRKSYMVKGMAFSPDSTKIAIGQTDNIIYVYKIGEDWGDKKVICNKFIQTSAVTCLQWPAEYIIVFGLAEGKVRLANTKTNKSSTIYGTESYVVSLTTNCSGKGILSGHADGTIVRYFFDDEGSGESQGKLVNHPCPPYALAWATNSIVAAGCDRKIVAYGKEGHMLQTFDYSRDPQEREFTTAVSSPGGQSVVLGSYDRLRVFNWIPRRSIWEEAKPKEITNLYTITALAWKRDGSRLCVGTLCGGVEQFDCCLRRSIYKNKFELTYVGPSQVIVKNLSSGTRVVLKSHYGYEVEEVKILGKERYLVAHTSETLLLGDLNTNRLSEIAWQGSGGNEKYFFENENVCMIFNAGELTLVEYGNNDTLGSVRTEFMNPHLISVRINERCQRGTEDNKKLAYLIDIKTIAIVDLIGGYNIGTVSHESRVDWLELNETGHKLLFRDRKLRLHLYDIESCSKTMILNFCSYMQWVPGSDVLVAQNRNSLCVWYNIEAPERVTMFTIRGDVIGLERGGGKTEVMVMEGVTTVAYTLDEGLIEFGTAIDDGNYIRATAFLETLEMTPETEAMWKTLSKLALEARQLHIAERCFSALGQVAKARFLHETNEIADQVSREYGGEGTDFYQVRARLAMLEKNYKLAEMIFLEQNAVEEAMGMYQELHRWDECIAVAEAKGHPALEKLRRSYYQWLMDTQQEERAGELQESQGDGLAAISLYLKAGLPAKAARLVLTREELLANTELVEHITAALIKGELYERAGDLFEKIHNPQKALECYRKGNAFMKAVELARLAFPVEVVKLEEAWGDHLVQQKQLDAAINHYIEARCSIKAIEAALGARQWKKAIYILDLQDRNTASKYYPLVAQHYASLQEYEIAEELYTKGDRTKDAIDMYTQAGRWEQAHKLAMKCMRPEDVSVLYITQAQEMEKQGKYREAERLYVTVQEPDLAITMYKKHKLYDDMIRLVGKHHPDLLSDTHLHLGKELEAEGRLQEAEYHYLEAQEWKATVNMYRASGLWEEAYRVARTQGGANAHKHVAYLWAKSLGGEAAVRLLNKLGLLEAAVDHAADNCSFEFAFELSRLALKHKTPEVHLKYAMFLEDEGKFEEAEAEFIRAGKPKEAVLMFVHNQDWEAAQRVAEAHDPDSVAEVLVGQARGALEEKDFQKAEGLLLRAQRPGLALNYYKEAGLWSDALRICKDYVPSQLEALQEEYEREATKKGARGVEGFVEQARHWEQAGEYSRAVDCYLKVRDSGNSGLAEKCWMKAAELSIKFLPPQRNMEVVLAVGPQLIGIGKHSAAAELYLNLDLVKEAIDAFIEGEEWNKAKRVAKELDPRYEDYVDQHYKEFLKNQGKVDSLVGVDVIAALDLYVEQGQWDKCIETATKQNYKILHKYVALYATHLIREGSSAQALALYVQHGAPANPQNFNIYKRIFTDMVSSPGTNCAEAYHSWADLRDVLFNLCENLVKSSEANSPAHEEFKTMLLIAHYYATRSAAQSVKQLVRCRGSKEHSVRRAHLQMYKAELIHVLDSSAWALESPHLSFSFSSV

SEQ ID NO: 770231 - protein, 586 aa, Homo sapiens
ERQVCVMHLKHLRTLLSPQDGAAKVTCMAWSQNNAKFAVCTVDRVVLLYDEHGERRDKFSTKPADMKYGRKSYMVKGMAFSPDSTKIAIGQTDNIIYVYKIGEDWGDKKVICNKFIQTSAVTCLQWPAEYIIVFGLAEGKVRLANTKTNKSSTIYGTESYVVSLTTNCSGKGILSGHADGTIVRYFFDDEGSGESQGKLVNHPCPPYALAWATNSIVAAGCDRKIVAYGKEGHMLQTFDYSRDPQEREFTTAVSSPGGQSVVLGSYDRLRVFNWIPRRSIWEEAKPKEITNLYTITALAWKRDGSRLCVGTLCGGVEQFDCCLRRSIYKNKFELTYVGPSQVIVKNLSSGTRVVLKSHYGYEVEEVKILGKERYLVAHTSETLLLGDLNTNRLSEIAWQGSGGNEKYFFENENVCMIFNAGELTLVEYGNNDTLGSVRTEFMNPHLISVRINERCQRGTEDNKKLAYLIDIKTIAIVDLIGGYNIGTVSHESRVDWLELNETGHKLLFRDRKLRLHLYDIESCSKTMILNFCSYMQWVPGSDVLVAQNRNSLCVWYNIEAPERVTMFTIRVCWTLGALRCGIELIN

SEQ ID NO: 770232 - protein, 110 aa, Homo sapiens
MNLSGGLAHHISPLGKWSKAGDNPTSPCNCVTCLFFLQLHLYDIESCSKTMILNFCSYMQWVPGSDVLVAQNRNSLCVWYNIEAPERVTMFTIRVCWTLGALRCGIELIN

SEQ ID NO: 770233 - protein, 404 aa, Homo sapiens
MSHIQIPPGLTELLQGYTVEVLRQQPPDLVEFAVEYFTRLREARAPASVLPAATPRQSLGHPPPEPGPDRVADAKGDSESEEDEDLEVPVPSRFNRRVSVCAETYNPDEEEEDTDPRVIHPKTDEQRCRLQEACKDILLFKNLDQEQLSQVLDAMFERIVKADEHVIDQGDDGDNFYVIERGTYDILVTKDNQTRSVGQYDNRGSFGELALMYNTPRAATIVATSEGSLWGLDRVTFRRIIVKNNAKKRKMFESFIESVPLLKSLEVSERMKIVDVIGEKIYKDGERIITQGEKADSFYIIESGEVSILIRSRTKSNKDGGNQEVEIARCHKGQYFGELALVTNKPRAASAYAVGDVKCLVMDVQAFERLLGPCMDIMKRNISHYEEQLVKMFGSSVDLGNLGQ

SEQ ID NO: 770234 - protein, 382 aa, Homo sapiens
MSHIQIPPGLTELLQGYTVEVLRQQPPDLVEFAVEYFTRLREARAPASVLPAATPRQSLGHPPPEPGPDRVADAKGDSESEEDEDLEVPVPSRFNRRVSVCAETYNPDEEEEDTDPRVIHPKTDEQRCRLQEACKDILLFKNLDQEQLSQVLDAMFERIVKADEHVIDQGDDGDNFYVIERGTYDILVTKDNQTRSVGQYDNRGSFGELALMYNTPRAATIVATSEGSLWGLDRVTFRRIIVKNNAKKRKMFESFIESVPLLKSLEVSERMKIVDVIGEKIYKDGERIITQTKSNKDGGNQEVEIARCHKGQYFGELALVTNKPRAASAYAVGDVKCLVMDVQAFERLLGPCMDIMKRNISHYEEQLVKMFGSSVDLGNLGQ

SEQ ID NO: 770235 - protein, 404 aa, Homo sapiens; identical to SEQ ID NO: 770233

SEQ ID NO: 770236 - protein, 404 aa, Homo sapiens; identical to SEQ ID NO: 770233

SEQ ID NO: 770237 - protein, 154 aa, Homo sapiens
MFESFIESVPLLKSLEVSERMKIVDVIGEKIYKDGERIITQGEKADSFYIIESGEVSILIRSRTKSNKDGGNQEVEIARCHKGQYFGELALVTNKPRAASAYAVGDVKCLVMDVQAFERLLGPCMDIMKRNISHYEEQLVKMFGSSVDLGNLGQ

SEQ ID NO: 770238 - protein, 404 aa, Homo sapiens; identical to SEQ ID NO: 770233

SEQ ID NO: 770239 - protein, 404 aa, Homo sapiens; identical to SEQ ID NO: 770233

SEQ ID NO: 770240 - protein, 404 aa, Homo sapiens; identical to SEQ ID NO: 770233

SEQ ID NO: 770241 - protein, 124 aa, Homo sapiens
MKRTDVQGCGRMGRTGAAGLCKVSNLDDSLLNSYRNIPFCKWLVSQGVISYNMEWVCLGKGLHEGNGLNSFSPSPLFNNAVMDVQAFERLLGPCMDIMKRNISHYEEQLVKMFGSSVDLGNLGQ

SEQ ID NO: 770242 - protein, 404 aa, Homo sapiens; identical to SEQ ID NO: 770233

SEQ ID NO: 770243 - protein, 404 aa, Homo sapiens; identical to SEQ ID NO: 770233

SEQ ID NO: 770244 - protein, 275 aa, Homo sapiens
MSHIQIPPGLTELLQGYTVEVLRQQPPDLVEFAVEYFTRLREARAPASVLPAATPRQSLGHPPPEPGPDRVADAKGDSESEEDEDLEVPVPSRFNRRVSVCAETYNPDEEEEDTDPRVIHPKTDEQRCRLQEACKDILLFKNLDQEQLSQVLDAMFERIVKADEHVIDQGDDGDNFYVIERGTYDILVTKDNQTRSVGQYDNRGSFGELALMYNTPRAATIVATSEGSLWGLDRVTFRRIIVKNNAKKRKMFESFIESVPLLKSLEVKWLEEESV

SEQ ID NO: 770245 - protein, 274 aa, Homo sapiens
RPRACWRNEEDTDPREQLSQVLDAMFERIVKADEHVIDQGDDGDNFYVIERGTYDILVTKDNQTRSVGQYDNRGSFGELALMYNTPRAATIVATSEGSLWGLDRVTFRRIIVKNNAKKRKMFESFIESVPLLKSLEVSERMKIVDVIGEKIYKDGERIITQGEKADSFYIIESGEVSILIRSRTKSNKDGGNQEVEIARCHKGQYFGELALVTNKPRAASAYAVGDVKCLVMDVQAFERLLGPCMDIMKRNISHYEEQLVKMFGSSVDLGNLGQ

SEQ ID NO: 770246 - protein, 377 aa, Homo sapiens
MSHIQIPPGLTELLQGYTVEVLRQQPPDLVEFAVEYFTRLREARAPASVLPAATPRQSLGHPPPEPGPDRVADAKGDSESEEDEDLEVPVPSRFNRRVSVCAETYNPDEEERRYRSKGEQLSQVLDAMFERIVKADEHVIDQGDDGDNFYVIERGTYDILVTKDNQTRSVGQYDNRGSFGELALMYNTPRAATIVATSEGSLWGLDRVTFRRIIVKNNAKKRKMFESFIESVPLLKSLEVSERMKIVDVIGEKIYKDGERIITQGEKADSFYIIESGEVSILIRSRTKSNKDGGNQEVEIARCHKGQYFGELALVTNKPRAASAYAVGDVKCLVMDVQAFERLLGPCMDIMKRNISHYEEQLVKMFGSSVDLGNLGQ

SEQ ID NO: 770247 - protein, 404 aa, Homo sapiens; identical to SEQ ID NO: 770233

SEQ ID NO: 770248 - protein, 404 aa, Homo sapiens; identical to SEQ ID NO: 770233

SEQ ID NO: 770249 - protein, 404 aa, Homo sapiens; identical to SEQ ID NO: 770233

SEQ ID NO: 770250 - protein, 311 aa, Homo sapiens
MSHIQIPPGLTELLQGYTVEVLRQQPPDLVEFAVEYFTRLREARAPASVLPAATPRQSLGHPPPEPGPDRVADAKGDSESEEDEDLEVPVPSRFNRRVSVCAETYNPDEEEEDTDPRVIHPKTDEQRCRLQEACKDILLFKNLDQEQLSQVLDAMFERIVKADEHVIDQGDDGDNFYVIERGTYDILVTKDNQTRSVGQYDNRGSFGELALMYNTPRAATIVATSEGSLWGLDRVTFRRIIVKNNAKKRKMFESFIESVPLLKSLEDGQRFNPHLHFASEGPFIRPLVKITPTQFLYLWFKTACLSNNLSA

SEQ ID NO: 770251 - protein, 404 aa, Homo sapiens; identical to SEQ ID NO: 770233

SEQ ID NO: 770252 - protein, 273 aa, Homo sapiens [sequence omitted]

SEQ ID NO: 770253 - protein, 552 aa, Homo sapiens
AGLSRTVPAVAAHPLIAPAYAQLQPHQLLPQPSSKHLQPQFVIQQQPQPQQQQPPPQQSRPVLQAEPHPQLASVSPSVALQPSSEAHAMPLGPVTPALPLQCPTANLHKPGGSQQCHPPTPDTGPQNGHPEGVPHTPQRRFQHTSAVILQLQPASPVPQQCVPDDWKEVAPGEKSVPETRSGPSPHQQAIVTAMPGGLPVPTSPNIQPSPAHETGQGIVHALTDLSSPGMTSGNGNSASSIAGTAPQNGENKPPQAIVKPQILTHVIEGFVIQEGAEPFPVGRSSLLVGNLKKKYAQGFLPEKLPQQDHTTTTDSEMEEPYLQESKEEGAPLKLKCELCGRVDFAYKFKRSKRFCSMACAKRYNVGCTKRVGLFHSDRSKLQKAGAATHNRRRASKASLPPLTKDTKKQPTGTVPLSVTAALQLTHSQEDSSRCSDNSSYEEPLSPISASSSTSRRRQGQRDLELPDMHMRDLVGMGHHFLPSEPTKWNVEDVYEFIRSLPGCQEIAEEFRAQEIDGQALLLLKEDHLMSAMNIKLGPALKIYARISMLKDS

SEQ ID NO: 770254 - protein, 273 aa, Homo sapiens [sequence omitted]

SEQ ID NO: 770255 - protein, 442 aa, Homo sapiens
RRMCLRGGCSPRAPAARARQPRPPPALPPRPRAPVPASRPGRPLLTPARPVRSDAPRQPRAPARRLPAERRRPARARDPARVGARPRGCVGPARPGPAGPWTETGQGIVHALTDLSSPGMTSGNGNSASSIAGTAPQNGENKPPQAIVKPQILTHVIEGFVIQEGAEPFPVGRSSLLVGNLKKKYAQGFLPEKLPQQDHTTTTDSEMEEPYLQESKEEGAPLKLKCELCGRVDFAYKFKRSKRFCSMACAKRYNVGCTKRVGLFHSDRSKLQKAGAATHNRRRASKASLPPLTKDTKKQPTGTVPLSVTAALQLTHSQEDSSRCSDNSSYEEPLSPISASSSTSRRRQGQRDLELPDMHMRDLVGMGHHFLPSEPTKWNVEDVYEFIRSLPGCQEIAEEFRAQEIDGQALLLLKEDHLMSAMNIKLGPALKIYARISMLKDS

SEQ ID NO: 770256 - protein, 597 aa, Homo sapiens
  misc_feature (351)..(351): Xaa can be any naturally occurring amino acid
AGLSRTVPAVAAHPLIAPAYAQLQPHQLLPQPSSKHLQPQFVIQQQPQPQQQQPPPQQSRPVLQAEPHPQLASVSPSVALQPSSEAHAMPLGPVTPALPLQCPTANLHKPGGSQQCHPPTPDTGPQNGHPEGVPHTPQRRFQHTSAVILQLQPASPVPQQCVPDDWKEVAPGEKSVPETRSGPSPHQQAIVTAMPGGLPVPTSPNIQPSPAHETGQGIVHALTDLSSPGMTSGNGNSASSIAGTAPQNGENKPPQAIVKPQILTHVIEGFVIQEGAEPFPVGRSSLLVGNLKKKYAQGFLPEKLPQQDHIEATSDGTLRDVHVPVICKDCRPRGKRNNLSLDLTMGEYPKXSWIAVPGVDSKMKEGVSSPSNLKGVEASWWAASGTCAYKVQGVPTRFCIHGSVQMRYNVGCTKRVGLFHSDRSKLQKAGAATHNRRRASKASLPPLTKDTKKQPTGTVPLSVTAALQLTHSQEDSSRCSDNSSYEEPLSPISASSSTSRRRQGQRDLELPDMHMRDLVGMGHHFLPSEPTKWNVEDVYEFIRSLPGCQEIAEEFRAQEIDGQALLLLKEDHLMSAMNIKLGPALKIYARISMLKDS

SEQ ID NO: 770257 - protein, 365 aa, Homo sapiens
  misc_feature (105)..(105): Xaa can be any naturally occurring amino acid
GTQSREMDIAVLQRSPCYCHPRYWWRSEVDLPGTCVRRRTIVSCTAMIPSAYWVFGASRRQAGSADRYVPECVIAQLRHACVEDVWKEGRYAEEGVPCRVVETFXEEMVQSDATRGHVRRQEGNGQGGRYHAKEVAIAGWVHRALKIKCELCGRVDFAYKFKRSKRFCSMACAKRYNVGCTKRVGLFHSDRSKLQKAGAATHNRRRASKASLPPLTKDTKKQPTGTVPLSVTAALQLTHSQEDSSRCSDNSSYEEPLSPISASSSTSRRRQGQRDLELPDMHMRDLVGMGHHFLPSEPTKWNVEDVYEFIRSLPGCQEIAEEFRAQEIDGQALLLLKEDHLMSAMNIKLGPALKIYARISMLKDS

SEQ ID NO: 770258 - protein, 510 aa, Homo sapiens
RRMCLRGGCSPRAPAARARQPRPPPALPPRPRAPVPASRPGRPLLTPARPVRSDAPRQPRAPARRLPAERRRPARARDPARVGARPRGCVGPARPGPAGPWTETGQGIVHALTDLSSPGMTSGNGNSASSIAGTAPQNGENKPPQAIVKPQILTHVIEGFVIQEGAEPFPVGRSSLLVGNLKKKYAQGFLPEKLPQQDHTTTTDSEMEEPYLQESKEEGAPLKLKCELCGRVDFAYKFKRSKRFCSMACAKRYNVGCTKRVGLFHSDRSKLQKAGAATHNRRRASKASLPPLTKDTKKQPTGTVPLSVTAALQLTHSQEDSSRCSDNSSYEEPLSPISASSSTSRRRQGQRDLELPDMHMRDLVGMGHHFLPSEPTKWNVEDVYEFIRSLPEYPHRTKSPTVWSHDSISLKSRLSSLRLPGDSRGIPCPGNRRASPAAAQGGPPDERHEHQAGARPEDLRPHQHAQGLLGLVAARILAQGASSRLSRARQTFLRGPEMGPVGGQGLSLGA

SEQ ID NO: 770259 - protein, 138 aa, Homo sapiens [sequence omitted]

SEQ ID NO: 770260 - protein, 138 aa, Homo sapiens [sequence omitted]

SEQ ID NO: 770261 - protein, 442 aa, Homo sapiens; identical to SEQ ID NO: 770255

SEQ ID NO: 770262 - protein, 442 aa, Homo sapiens; identical to SEQ ID NO: 770255

SEQ ID NO: 770263 - protein, 442 aa, Homo sapiens; identical to SEQ ID NO: 770255

SEQ ID NO: 770264 - protein, 442 aa, Homo sapiens; identical to SEQ ID NO: 770255

SEQ ID NO: 770265 - protein, 442 aa, Homo sapiens; identical to SEQ ID NO: 770255

SEQ ID NO: 770266 - protein, 442 aa, Homo sapiens; identical to SEQ ID NO: 770255

SEQ ID NO: 770267 - protein, 418 aa, Homo sapiens
RRMCLRGGCSPRAPAARARQPRPPPALPPRPRAPVPASRPGRPLLTPARPVRSDAPRQPRAPARRLPAERRRPARARDPARVGARPRGCVGPARPGPAGPWTETGQGIVHALTDLSSPGMTSGNGNSASSIAGTAPQNGENKPPQAIVKPQILTHVIEGFVIQEGAEPFPVGRSSLLVGNLKKKYAQGFLPEKLPQQDHTTTTDSEMEEPYLQESKEEGAPLKLKCELCGRVDFAYKFKRSKRFCSMACAKRYNVGCTKRVGLFHSDRSKLQKAGAATHNRRRASKASLPPLTKDTKKQPTGTVPLSVTAALQLTHSQEDSSRCSDNSSYEEPLSPISASSSTSRRRQGQRDLELPDMHMRDLVGMGHHFLPSEPTKWNVEDVYEFIRSLPGKALGNSMSPRNSKERENERPSHHQED

SEQ ID NO: 770268 - protein, 409 aa, Homo sapiens
RRMCLRGGCSPRAPAARARQPRPPPALPPRPRAPVPASRPGRPLLTPARPVRSDAPRQPRAPARRLPAERRRPARARDPARVGARPRGCVGPARPGPAGPWTETGQGIVHALTDLSSPGMTSGNGNSASSIAGTAPQNGENKPPQAIVKPQILTHVIEGFVIQEGAEPFPVGRSSLLVGNLKKKYAQGFLPEKLPQQDHTTTTDSEMEEPYLQESKEEGAPLKLKCELCGRVDFAYKFKRSKRFCSMACAKRYNVGCTKRVGLFHSDRSKLQKAGAATHNRRRASKASLPPLTKDTKKQPTGTVPLSVTAALQLTHSQEDSSRCSDNSSYEEPLSPISASSSTSRRRQGQRDLELPDMHMRDLVGMGHHFLPSEPTKWNVEDVYEFIRSLPAVRSQATPSTFCLKISLA

SEQ ID NO: 770269 - protein, 442 aa, Homo sapiens; identical to SEQ ID NO: 770255

SEQ ID NO: 770270 - protein, 323 aa, Homo sapiens
MTSGNGNSASSIAGTAPQNGENKPPQAIVKPQILTHVIEGFVIQEGAEPFPVGRSSLLVGNLKKKYAQGFLPEKLPQQDHTTTTDSEMEEPYLQESKEEGAPLKLKCELCGRVDFAYKFKRSKRFCSMACAKRYNVGCTKRVGLFHSDRSKLQKAGAATHNRRRASKASLPPLTKDTKKQPTGTVPLSVTAALQLTHSQEDSSRCSDNSSYEEPLSPISASSSTSRRRQGQRDLELPDMHMRDLVGMGHHFLPSEPTKWNVEDVYEFIRSLPGCQEIAEEFRAQEIDGQALLLLKEDHLMSAMNIKLGPALKIYARISMLKDS

SEQ ID NO: 770271 - protein, 357 aa, Homo sapiens
MLFEVEERKFTVVWLCIETGQGIVHALTDLSSPGMTSGNGNSASSIAGTAPQNGENKPPQAIVKPQILTHVIEGFVIQEGAEPFPVGRSSLLVGNLKKKYAQGFLPEKLPQQDHTTTTDSEMEEPYLQESKEEGAPLKLKCELCGRVDFAYKFKRSKRFCSMACAKRYNVGCTKRVGLFHSDRSKLQKAGAATHNRRRASKASLPPLTKDTKKQPTGTVPLSVTAALQLTHSQEDSSRCSDNSSYEEPLSPISASSSTSRRRQGQRDLELPDMHMRDLVGMGHHFLPSEPTKWNVEDVYEFIRSLPGCQEIAEEFRAQEIDGQALLLLKEDHLMSAMNIKLGPALKIYARISMLKDS

SEQ ID NO: 770272 - protein, 440 aa, Homo sapiens
RRMCLRGGCSPRAPAARARQPRPPPALPPRPRAPVPASRPGRPLLTPARPVRSDAPRQPRAPARRLPAERRRPARARDPARVGARPRGCVGPARPGPAGPWTETGQGIVHALTDLSSPGMTSGNGNSASSIAGTAPQNGLSFQGPEEGGQCSGIIDKTLGEKFPTQTQVGRSSLLVGNLKKKYAQGFLPEKLPQQDHTTTTDSEMEEPYLQESKEEGAPLKLKCELCGRVDFAYKFKRSKRFCSMACAKRYNVGCTKRVGLFHSDRSKLQKAGAATHNRRRASKASLPPLTKDTKKQPTGTVPLSVTAALQLTHSQEDSSRCSDNSSYEEPLSPISASSSTSRRRQGQRDLELPDMHMRDLVGMGHHFLPSEPTKWNVEDVYEFIRSLPGCQEIAEEFRAQEIDGQALLLLKEDHLMSAMNIKLGPALKIYARISMLKDS

SEQ ID NO: 770273 - protein, 232 aa, Homo sapiens
MELGSEPIDGLKICQTAWLCSFCLRPISTMTTVTSPVPLSLKYNVGCTKRVGLFHSDRSKLQKAGAATHNRRRASKASLPPLTKDTKKQPTGTVPLSVTAALQLTHSQEDSSRCSDNSSYEEPLSPISASSSTSRRRQGQRDLELPDMHMRDLVGMGHHFLPSEPTKWNVEDVYEFIRSLPGCQEIAEEFRAQEIDGQALLLLKEDHLMSAMNIKLGPALKIYARISMLKDS

SEQ ID NO: 770274 - protein, 157 aa, Homo sapiens
MVCSPILKKTLCSQPTGTVPLSVTAALQLTHSQEDSSRCSDNSSYEEPLSPISASSSTSRRRQGQRDLELPDMHMRDLVGMGHHFLPSEPTKWNVEDVYEFIRSLPGCQEIAEEFRAQEIDGQALLLLKEDHLMSAMNIKLGPALKIYARISMLKDS

SEQ ID NO: 770275 - protein, 138 aa, Homo sapiens [sequence omitted]

SEQ ID NO: 770276 - protein, 136 aa, Homo sapiens
TNLRLGTRPRVKGRWHRRWGFMLVNIDSTGFLQSPNTLAPLSSPLSVPHFPGGIWSGLPNLSWVTSRAASRPGWRPRKPLPSFLPLLSPGLVNSSVVSFSPFSLFLQQPGFSPLHPLQVEREKLGPAGPCLLAQTP

SEQ ID NO: 770277 - protein, 442 aa, Homo sapiens; identical to SEQ ID NO: 770255

SEQ ID NO: 770278 - protein, 442 aa, Homo sapiens; identical to SEQ ID NO: 770255

SEQ ID NO: 770279 - protein, 442 aa, Homo sapiens; identical to SEQ ID NO: 770255

SEQ ID NO: 770280 - protein, 405 aa, Homo sapiens
RRMCLRGGCSPRAPAARARQPRPPPALPPRPRAPVPASRPGRPLLTPARPVRSDAPRQPRAPARRLPAERRRPARARDPARVGARPRGCVGPARPGPAGPWTETGQGIVHALTDLSSPGMTSGNGNSASSIAGTAPQNGENKPPQAIVKPQILTHVIEGFVIQEGAEPFPVGRSSLLVGNLKKKYAQGFLPEKLPQQDHTTTTDSEMEEPYLQESKEEGAPLKLKCELCGRVDFAYKFKRSKRFCSMACAKRYNVGCTKRVGLFHSDRSKLQKAGAATHNRRRASKASLPPLTKDTKKQPTGTVPLSVTAALQLTHSQEDSSRCSDNSSYEEPLSPISASSSTSRRRQGQRDLELPDMHMRDLVGMGHHFLPSEPTKWNVEDVYEFIRSLPEYPHRHQIPDSLVP

SEQ ID NO: 770281 - protein, 217 aa, Homo sapiens
AGLSRTVPAVAAHPLIAPAYAQLQPHQLLPQPSSKHLQPQFVIQQQPQPQQQQPPPQQSRPVLQAEPHPQLASVSPSVALQPSSEAHAMPLGPVTPALPLQCPTANLHKPGGSQQCHPPTPDTGPQNGHPEGVPHTPQRRFQHTSAVILQLQPASPVPQQCVPDDWKEVAPGEKSVPETRSGPSPHQQAIVTAMPGGLPVPTSPNIQPSPAHDEKGF

SEQ ID NO: 770282 - protein, 474 aa, Homo sapiens
MLERLYQTKDGSQRGGIFSQFANQNLSKKIPGVKLCESIVYGEVSMGQSSLNRHIKDHSGHEPKEYQEYGEKPDTRNQCWKPFSSHHSFRTHEIIHTGEKLYDCKECGKTFFSLKRIRRHIITHSGYTPYKCKVCGKAFDYPSRFRTHERSHTGEKPYECQECGKAFTCITSVRRHMIKHTGDGPYKCKVCGKPFHSLSSFQVHERIHTGEKPFKCKQCGKAFSCSPTLRIHERTHTGEKPYECKQCGKAFSYLPSLRLHERIHTGEKPFVCKQCGKAFRSASTFQIHERTHTGEKPYECKECGEAFSCIPSMRRHMIKHTGEGPYKCKVCGKPFHSLSPFRIHERTHTGEKPYVCKHCGKAFVSSTSIRIHERTHTGEKPYECKQCGKAFSYLNSFRTHEMIHTGEKPFECKRCGKAFRSSSSFRLHERTHTGQKPYHCKECGKAYSCRASFQRHMLTHAEDGPPYKCMWESL

SEQ ID NO: 770283 - protein, 581 aa, Homo sapiens
TWFRFASPRGPEWLAWSLCGAVSCTCLGIRREEAGTPGSQEMDSVAFEDVDVNFTQEEWALLDPSQKNLYRDVMWETMRNLASIGKKWKDQNIKDHYKHRGRNLRSHMLERLYQTKDGSQRGGIFSQFANQNLSKKIPGVKLCESIVYGEVSMGQSSLNRHIKDHSGHEPKEYQEYGEKPDTRNQCWKPFSSHHSFRTHEIIHTGEKLYDCKECGKTFFSLKRIRRHIITHSGYTPYKCKVCGKAFDYPSRFRTHERSHTGEKPYECQECGKAFTCITSVRRHMIKHTGDGPYKCKVCGKPFHSLSSFQVHERIHTGEKPFKCKQCGKAFSCSPTLRIHERTHTGEKPYECKQCGKAFSYLPSLRLHERIHTGEKPFVCKQCGKAFRSASTFQIHERTHTGEKPYECKECGEAFSCIPSMRRHMIKHTGEGPYKCKVCGKPFHSLSPFRIHERTHTGEKPYVCKHCGKAFVSSTSIRIHERTHTGEKPYECKQCGKAFSYLNSFRTHEMIHTGEKPFECKRCGKAFRSSSSFRLHERTHTGQKPYHCKECGKAYSCRASFQRHMLTHAEDGPPYKCMWESL

SEQ ID NO: 770284 - protein, 165 aa, Homo sapiens
ALGRLLNTLGEARKPREMAPSAAVPDRVLQRMHPPSLLPARPVGPAPILPEGPTGGEARGCCLSSGPFWRGAGCPQAESDGSFLLGAPGFPDSSRPGKAPGPLSRCPESLHFSSFATELIGRCASDRRARACAPPKTSGVPGRPPGRNEHHGERPASKTTSGTWT

SEQ ID NO: 770285 - protein, 113 aa, Homo sapiens
QNLALLPRLECNGMILAHSNLCLPGSSDSPVSASRVAGITGTCHHAQLIFVFLVETRFHHVGEAGLELTSNDPPSSASQSAGITGVSQRTRTRSRLLTWTYEPSENESTIARM

SEQ ID NO: 770286 - protein, 272 aa, Homo sapiens
QDPETEMSEGRSTGPCIWGVERRMETESGNQEKVMEEESTEKKKEVEKKKRSRVKQVLADIAKQVDFWFGDANLHKDRFLREQIEKSRDGYVDISLLVSFNKMKKLTTDGKLIARALRSSAVVELDLEGTRIRRKKPLGERPKDEDERTVYVELLPKNVNHSWIERVFGKCGNVVYISIPHYKSTGDPKGFAFVEFETKEQAAKAIEFLNNPPEEAPRKPGIFPKTVKNKPIPALRVVEEKKKKKKKKGRMKKEDNIQAKEENMDTSNTSIS

SEQ ID NO: 770287 - protein, 276 aa, Homo sapiens
GEKQKSIKRVPYFADGAELWLPEDSERMETESGNQEKVMEEESTEKKKEVEKKKRSRVKQVLADIAKQVDFWFGDANLHKDRFLREQIEKSRDGYVDISLLVSFNKMKKLTTDGKLIARALRSSAVVELDLEGTRIRRKKPLGERPKDEDERTVYVELLPKNVNHSWIERVFGKCGNVVYISIPHYKSTGDPKGFAFVEFETKEQAAKAIEFLNNPPEEAPRKPGIFPKTVKNKPIPALRVVEEKKKKKKKKGRMKKEDNIQAKEENMDTSNTSIS

SEQ ID NO: 770288 - protein, 144 aa, Homo sapiens
  misc_feature (21)..(21): Xaa can be any naturally occurring amino acid
MVFKHFNGVPYLQSSPTYRQXGMYDSGPHKIIGMETESGNQEKVMEEESTEKKKEVEKKKRSRVKQVLADIAKQVDFWFGDANLHKDRFLREQIEKSRDGYVDISLLVSFNKMKKLTTDGKLIARALRSSAVVEVRIKNNYCLY

SEQ ID NO: 770289 - protein, 109 aa, Homo sapiens
GTRDVGAAANVVYISIPHYKSTGDPKGFAFVEFETKEQAAKAIEFLNNPPEEAPRKPGIFPKTVKNKPIPALRVVEEKKKKKKKKGRMKKEDNIQAKEENMDTSNTSIS

SEQ ID NO: 770290 - protein, 282 aa, Homo sapiens
  misc_feature (21)..(21): Xaa can be any naturally occurring amino acid
MVFKHFNGVPYLQSSPTYRQXGMYDSGPHKIIGMETESGNQEKVMEEESTEKKKEVEKKKRSRVKQVLADIAKQVDFWFGDANLHKDRFLREQIEKSRDGYVDISLLVSFNKMKKLTTDGKLIARALRSSAVVELDLEGTRIRRKKPLGERPKDEDERTVYVELLPKNVNHSWIERVFGKCGNVVYISIPHYKSTGDPKGFAFVEFETKEQAAKAIEFLNNPPEEAPRKPGIFPKTVKNKPIPALRVVEEKKKKKKKKGRMKKEDNIQAKEENMDTSNTSIS

SEQ ID NO: 770291 - protein, 144 aa, Homo sapiens; identical to SEQ ID NO: 770288
  misc_feature (21)..(21): Xaa can be any naturally occurring amino acid

SEQ ID NO: 770292 - protein, 144 aa, Homo sapiens; identical to SEQ ID NO: 770288
  misc_feature (21)..(21): Xaa can be any naturally occurring amino acid

SEQ ID NO: 770293 - protein, 665 aa, Homo sapiens
MVEAIVEFDYQAQHDDELTISVGEIITNIRKEDGGWWEGQINGRRGLFPDNFVREIKKEMKKDPLTNKAPEKPLHEVPSGNSLLSSETILRTNKRGERRRRRCQVAFSYLPQNDDELELKVGDIIEVVGEVEEGWWEGVLNGKTGMFPSNFIKELSGESDELGISQDEQLSKSSLRETTGSESDGGDSSSTKSEGANGTVATAAIQPKKVKGVGFGDIFKDKPIKLRPRSIEVENDFLPVEKTIGKKLPATTATPDSSKTEMDSRTKSKDYCKVIFPYEAQNDDELTIKEGDIVTLINKDCIDVGWWEGELNGRRGVFPDNFVKLLPPDFEKEGNRPKKPPPPSAPVIKQGAGTTERKHEIKKIPPERPEMLPNRTEEKERPEREPKLDLQKPSVPAIPPKKPRPPKTNSLSRPGALPPRRPERPVGPLTHTRGDSPKIDLAGSSLSGILDKDLSDRSNDIDLEGFDSVVSSTEKLSHPTTSRPKATGRRPPSQSLTSSSLSSPDIFDSPSPEEDKEEHISLAHRGVDASKKTSKTVTISQVSDNKASLPPKPGTMAAGGGGPAPLSSAAPSPLSSSLGTAGHRANSPSLFGTEGKPKMEPAASSQAAVEELRTQVRELRSIIETMKDQQKREIKQLLSELDEEKKIRLRLQMEVNDIKKALQSK

SEQ ID NO: 770294 - protein, 665 aa, Homo sapiens; identical to SEQ ID NO: 770293

SEQ ID NO: 770295 - protein, 697 aa, Homo sapiens
DLKVLWAPHREFYFINSRLSVRSKRRSGGTGEPVEAIVEFDYQAQHDDELTISVGEIITNIRKEDGGWWEGQINGRRGLFPDNFVREIKKEMKKDPLTNKAPEKPLHEVPSGNSLLSSETILRTNKRGERRRRRCQVAFSYLPQNDDELELKVGDIIEVVGEVEEGWWEGVLNGKTGMFPSNFIKELSGESDELGISQDEQLSKSSLRETTGSESDGGDSSSTKSEGANGTVATAAIQPKKVKGVGFGDIFKDKPIKLRPRSIEVENDFLPVEKTIGKKLPATTATPDSSKTEMDSRTKSKDYCKVIFPYEAQNDDELTIKEGDIVTLINKDCIDVGWWEGELNGRRGVFPDNFVKLLPPDFEKEGNRPKKPPPPSAPVIKQGAGTTERKHEIKKIPPERPEMLPNRTEEKERPEREPKLDLQKPSVPAIPPKKPRPPKTNSLSRPGALPPRRPERPVGPLTHTRGDSPKIDLAGSSLSGILDKDLSDRSNDIDLEGFDSVVSSTEKLSHPTTSRPKATGRRPPSQSLTSSSLSSPDIFDSPSPEEDKEEHISLAHRGVDASKKTSKTVTISQVSDNKASLPPKPGTMAAGGGGPAPLSSAAPSPLSSSLGTAGHRANSPSLFGTEGKPKMEPAASSQAAVEELRTQVRELRSIIETMKDQQKREIKQLLSELDEEKKIRLRLQMEVNDIKKALQSK

SEQ ID NO: 770296 - protein, 662 aa, Homo sapiens
CQVNQRDLQFSESTELIPAQSSDTARNYHFILHRMEVSAAKAPSAADLSEIEIKKEMKKDPLTNKAPEKPLHEVPSGNSLLSSETILRTNKRGERRRRRCQVAFSYLPQNDDELELKVGDIIEVVGEVEEGWWEGVLNGKTGMFPSNFIKELSGESDELGISQDEQLSKSSLRETTGSESDGGDSSSTKSEGANGTVATAAIQPKKVKGVGFGDIFKDKPIKLRPRSIEVENDFLPVEKTIGKKLPATTATPDSSKTEMDSRTKSKDYCKVIFPYEAQNDDELTIKEGDIVTLINKDCIDVGWWEGELNGRRGVFPDNFVKLLPPDFEKEGNRPKKPPPPSAPVIKQGAGTTERKHEIKKIPPERPEMLPNRTEEKERPEREPKLDLQKPSVPAIPPKKPRPPKTNSLSRPGALPPRRPERPVGPLTHTRGDSPKIDLAGSSLSGILDKDLSDRSNDIDLEGFDSVVSSTEKLSHPTTSRPKATGRRPPSQSLTSSSLSSPDIFDSPSPEEDKEEHISLAHRGVDASKKTSKTVTISQVSDNKASLPPKPGTMAAGGGGPAPLSSAAPSPLSSSLGTAGHRANSPSLFGTEGKPKMEPAASSQAAVEELRTQVRELRSIIETMKDQQKREIKQLLSELDEEKKIRLRLQMEVNDIKKALQSK

SEQ ID NO: 770297 - protein, 634 aa, Homo sapiens
  misc_feature (2)..(2): Xaa can be any naturally occurring amino acid
  misc_feature (5)..(6): Xaa can be any naturally occurring amino acid
  misc_feature (18)..(18): Xaa can be any naturally occurring amino acid
FXFPXXLTSPSSSISLFXCNFVREIKKEMKKDPLTNKAPEKPLHEVPSGNSLLSSETILRTNKRGERRRRRCQVAFSYLPQNDDELELKVGDIIEVVGEVEEGWWEGVLNGKTGMFPSNFIKELSGESDELGISQDEQLSKSSLRETTGSESDGGDSSSTKSEGANGTVATAAIQPKKVKGVGFGDIFKDKPIKLRPRSIEVENDFLPVEKTIGKKLPATTATPDSSKTEMDSRTKSKDYCKVIFPYEAQNDDELTIKEGDIVTLINKDCIDVGWWEGELNGRRGVFPDNFVKLLPPDFEKEGNRPKKPPPPSAPVIKQGAGTTERKHEIKKIPPERPEMLPNRTEEKERPEREPKLDLQKPSVPAIPPKKPRPPKTNSLSRPGALPPRRPERPVGPLTHTRGDSPKIDLAGSSLSGILDKDLSDRSNDIDLEGFDSVVSSTEKLSHPTTSRPKATGRRPPSQSLTSSSLSSPDIFDSPSPEEDKEEHISLAHRGVDASKKTSKTVTISQVSDNKASLPPKPGTMAAGGGGPAPLSSAAPSPLSSSLGTAGHRANSPSLFGTEGKPKMEPAASSQAAVEELRTQVRELRSIIETMKDQQKREIKQLLSELDEEKKIRLRLQMEVNDIKKALQSK

SEQ ID NO: 770298 - protein, 498 aa, Homo sapiens
GHRRYYSLRETTGSESDGGDSSSTKSEGANGTVATAAIQPKKVKGVGFGDIFKDKPIKLRPRSIEVENDFLPVEKTIGKKLPATTATPDSSKTEMDSRTKSKDYCKVIFPYEAQNDDELTIKEGDIVTLINKDCIDVGWWEGELNGRRGVFPDNFVKLLPPDFEKEGNRPKKPPPPSAPVIKQGAGTTERKHEIKKIPPERPEMLPNRTEEKERPEREPKLDLQKPSVPAIPPKKPRPPKTNSLSRPGALPPRRPERPVGPLTHTRGDSPKIDLAGSSLSGILDKDLSDRSNDIDLEGFDSVVSSTEKLSHPTTSRPKATGRRPPSQSLTSSSLSSPDIFDSPSPEEDKEEHISLAHRGVDASKKTSKTVTISQVSDNKASLPPKPGTMAAGGGGPAPLSSAAPSPLSSSLGTAGHRANSPSLFGTEGKPKMEPAASSQAAVEELRTQVRELRSIIETMKDQQKREIKQLLSELDEEKKIRLRLQMEVNDIKKALQSK

SEQ ID NO: 770299 - protein, 715 aa, Homo sapiens
MVEAIVEFDYQAQHDDELTISVGEIITNIRKEDGGWWEGQINGRRGLFPDNFVREIKKEMKKDPLTNKAPEKPLHEVPSGNSLLSSETILRTNKRGERRRRRCQVAFSYLPQNDDELELKVGDIIEVVGEVEEGWWEGVLNGKTGMFPSNFIKELSGESDELGISQDEQLSKSSLRETTGSESDGGDSSSTKSEGANGTVATAAIQPKKVKGVGFGDIFKDKPIKLRPRSIEVENDFLPVEKTIGKKLPATTATPDSSKTEMDSRTKSKDYCKVIFPYEAQNDDELTIKEGDIVTLINKDCIDVGWWEGELNGRRGVFPDNFVKLLPPDFEKEGNPHPQTPPENLVGCVEEVSQSPELLKIKLRLTSRTSPYSSKKPFKGYPAIRRPKKPPPPSAPVIKQGAGTTERKHEIKKIPPERPEMLPNRTEEKERPEREPKLDLQKPSVPAIPPKKPRPPKTNSLSRPGALPPRRPERPVGPLTHTRGDSPKIDLAGSSLSGILDKDLSDRSNDIDLEGFDSVVSSTEKLSHPTTSRPKATGRRPPSQSLTSSSLSSPDIFDSPSPEEDKEEHISLAHRGVDASKKTSKTVTISQVSDNKASLPPKPGTMAAGGGGPAPLSSAAPSPLSSSLGTAGHRANSPSLFGTEGKPKMEPAASSQAAVEELRTQVRELRSIIETMKDQQKREIKQLLSELDEEKKIRLRLQMEVNDIKKALQSK

SEQ ID NO: 770300 - protein, 622 aa, Homo sapiens
MVEAIVEFDYQAQHDDELTISVGEIITNIRKEDGGWWEGQINGRRGLFPDNFVREIKKEMKKDPLTNKAPEKPLHEVPSGNSLLSSETILRTNKRGERRRRRCQVAFSYLPQNDDELELKVGDIIEVVGEVEEGWWEGVLNGKTGMFPSNFIKELSGESDELGISQDEQLSKSSLRETTGSESDGGDSSSTKSEGANGTVATAAIQPKKVKGVGFGDIFKDKPIKLRPRSIEVENDFLPVEKTIGKKLPATTATPDSSKTEMDSRTKSKDYCKVIFPYEAQNDDELTIKEGDIVTLINKDCIDVGWWEGELNGRRGVFPDNFVKLLPPDFEKEGNRPKKPPPPSAPVIKQGAGTTERKHEIKKIPPERPEMLPNRTEEKERPEREPKLDLQKPSVPAIPPKKPRPPKTNSLSRPGALPPRRPERPVGPLTHTRGDSPKIDLAGSSLSGILDKDLSDRSNDIDLEGFDSVVSSTEKLSHPTTSRPKATGRRPPSQSLTSVSDNKASLPPKPGTMAAGGGGPAPLSSAAPSPLSSSLGTAGHRANSPSLFGTEGKPKMEPAASSQAAVEELRTQVRELRSIIETMKDQQKREIKQLLSELDEEKKIRLRLQMEVNDIKKALQSK

SEQ ID NO: 770301 - protein, 665 aa, Homo sapiens; identical to SEQ ID NO: 770293

SEQ ID NO: 770302 - protein, 591 aa, Homo sapiens
MVEAIVEFDYQAQHDDELTISVGEIITNIRKEDGGWWEGQINGRRGLFPDNFVREIKKEMKKDPLTNKAPEKPLHEVPSGNSLLSSETILRTNKRGERRRRRCQVAFSYLPQNDDELELKVGDIIEVVGEVEEGWWEGVLNGKTGMFPSNFIKELSGESDELGISQDEQLSKSSLRETTGSESDGGDSSSTKSEGANGTVATAAIQPKKVKGVGFGDIFKDKPIKLRPRSIEVENDFLPVEKTIGKKLPATTATPDSSKTEMDSRTKSKDYCKVIFPYEAQNDDELTIKEGDIVTLINKDCIDVGWWEGELNGRRGVFPDNFVKLLPPDFEKEGNRPKKPPPPSAPVIKQGAGTTERKHEIKKIPPERPEMLPNRTEEKERPEREPKLDLQKPSVPAIPPKKPRPPKTNSLSRPGALPPRRPERPVGPLTHTRGDSPKIDLAGSSLSGILDKDLSDRSNDIDLEGFDSVVSSTEKLSHPTTSRPKATGRRPPSQSLTSSSLSSPDIFDSPSPEEDKEEHISLAHRGVDASKKTSKTVTISQVSDNKASLPPKPGTMAAGGGGTSCDFSISPSFRLFMKLEMSSCLIFHQPS

SEQ ID NO: 770303 - protein, 665 aa, Homo sapiens; identical to SEQ ID NO: 770293

SEQ ID NO: 770304 - protein, 665 aa, Homo sapiens; identical to SEQ ID NO: 770293

SEQ ID NO: 770305 - protein, 427 aa, Homo sapiens
MGEETIGKKLPATTATPDSSKTEMDSRTKSKDYCKVIFPYEAQNDDELTIKEGDIVTLINKDCIDVGWWEGELNGRRGVFPDNFVKLLPPDFEKEGNRPKKPPPPSAPVIKQGAGTTERKHEIKKIPPERPEMLPNRTEEKERPEREPKLDLQKPSVPAIPPKKPRPPKTNSLSRPGALPPRRPERPVGPLTHTRGDSPKIDLAGSSLSGILDKDLSDRSNDIDLEGFDSVVSSTEKLSHPTTSRPKATGRRPPSQSLTSSSLSSPDIFDSPSPEEDKEEHISLAHRGVDASKKTSKTVTISQVSDNKASLPPKPGTMAAGGGGPAPLSSAAPSPLSSSLGTAGHRANSPSLFGTEGKPKMEPAASSQAAVEELRTQVRELRSIIETMKDQQKREIKQLLSELDEEKKIRLRLQMEVNDIKKALQSK

SEQ ID NO: 770306 - protein, 511 aa, Homo sapiens
ISSRHTSPHSTHLLTPRISPQRERRRSLCGGGDSSSTKSEGANGTVATAAIQPKKVKGVGFGDIFKDKPIKLRPRSIEVENDFLPVEKTIGKKLPATTATPDSSKTEMDSRTKSKDYCKVIFPYEAQNDDELTIKEGDIVTLINKDCIDVGWWEGELNGRRGVFPDNFVKLLPPDFEKEGNRPKKPPPPSAPVIKQGAGTTERKHEIKKIPPERPEMLPNRTEEKERPEREPKLDLQKPSVPAIPPKKPRPPKTNSLSRPGALPPRRPERPVGPLTHTRGDSPKIDLAGSSLSGILDKDLSDRSNDIDLEGFDSVVSSTEKLSHPTTSRPKATGRRPPSQSLTSSSLSSPDIFDSPSPEEDKEEHISLAHRGVDASKKTSKTVTISQVSDNKASLPPKPGTMAAGGGGPAPLSSAAPSPLSSSLGTAGHRANSPSLFGTEGKPKMEPAASSQAAVEELRTQVRELRSIIETMKDQQKREIKQLLSELDEEKKIRLRLQMEVNDIKKALQSK

SEQ ID NO: 770307 - protein, 432 aa, Homo sapiens
LSQYQHAVETIGKKLPATTATPDSSKTEMDSRTKSKDYCKVIFPYEAQNDDELTIKEGDIVTLINKDCIDVGWWEGELNGRRGVFPDNFVKLLPPDFEKEGNRPKKPPPPSAPVIKQGAGTTERKHEIKKIPPERPEMLPNRTEEKERPEREPKLDLQKPSVPAIPPKKPRPPKTNSLSRPGALPPRRPERPVGPLTHTRGDSPKIDLAGSSLSGILDKDLSDRSNDIDLEGFDSVVSSTEKLSHPTTSRPKATGRRPPSQSLTSSSLSSPDIFDSPSPEEDKEEHISLAHRGVDASKKTSKTVTISQVSDNKASLPPKPGTMAAGGGGPAPLSSAAPSPLSSSLGTAGHRANSPSLFGTEGKPKMEPAASSQAAVEELRTQVRELRSIIETMKDQQKREIKQLLSELDEEKKIRLRLQMEVNDIKKALQSK

SEQ ID NO: 770308 - protein, 571 aa, Homo sapiens
MVEAIVEFDYQAQHDDELTISVGEIITNIRKEDGGWWEGQINGRRGLFPDNFVREIKKEMKKDPLTNKAPEKPLHEVPSGNSLLSSETILRTNKRGERRRRRCQVAFSYLPQNDDELELKVGDIIEVVGEVEEGWWEGVLNGKTGMFPSNFIKELSGESDELGISQDEQLSKSSKDYCKVIFPYEAQNDDELTIKEGDIVTLINKDCIDVGWWEGELNGRRGVFPDNFVKLLPPDFEKEGNRPKKPPPPSAPVIKQGAGTTERKHEIKKIPPERPEMLPNRTEEKERPEREPKLDLQKPSVPAIPPKKPRPPKTNSLSRPGALPPRRPERPVGPLTHTRGDSPKIDLAGSSLSGILDKDLSDRSNDIDLEGFDSVVSSTEKLSHPTTSRPKATGRRPPSQSLTSSSLSSPDIFDSPSPEEDKEEHISLAHRGVDASKKTSKTVTISQVSDNKASLPPKPGTMAAGGGGPAPLSSAAPSPLSSSLGTAGHRANSPSLFGTEGKPKMEPAASSQAAVEELRTQVRELRSIIETMKDQQKREIKQLLSELDEEKKIRLRLQMEVNDIKKALQSK

SEQ ID NO: 770309 - protein, 209 aa, Homo sapiens
MVEAIVEFDYQAQHDDELTISVGEIITNIRKEDGGWWEGQINGRRGLFPDNFVREIKKEMKKDPLTNKAPEKPLHEVPSGNSLLSSETILRTNKRGERRRRRCQVAFSYLPQNDDELELKVGDIIEVVGEVEEGWWEGVLNGKTGMFPSNFIKELSGESDELGISQDEQLSKSNYWEEVTCNYSNSRLIKNRNGQQDKEQGLLQSNISI

SEQ ID NO: 770310 - protein, 815 aa, Homo sapiens
GTKLGAAKMRLSPAPLKLSRTPALLALALPLAAALAFSDETLDKVPKSEGYCSRILRAQGTRREGYTEFSLRVEGDPDFYKPGTSYRVTLSAAPPSYFRGFTLIALRENREGDKEEDHAGTFQIIDEEETQFMSNCPVAVTESTPRRRTRIQVFWIAPPAGTGCVILKASIVQKRIIYFQDEGSLTKKLCEQDSTFDGVTDKPILDCCACGTAKYRLTFYGNWSEKTHPKDYPRRANHWSAIIGGSHSKNYVLWEYGGYASEGVKQVAELGSPVKMEEEIRQQSDEVLTVIKAKAQWPAWQPLNVRAAPSAEFSVDRTRHLMSFLTMMGPSPDWNVGLSAEDLCTKECGWVQKVVQDLIPWDAGTDSGVTYESPNKPTIPQEKIRPLTSLDHPQSPFYDPEGGSITQVARVVIERIARKGEQCNIVPDNVDDIVADLAPEEKDEDDTPETCIYSNWSPWSACSSSTCDKGKRMRQRMLKAQLDLSVPCPDTQDFQPCMGPGCSDEDGSTCTMSEWITWSPCSISCGMGMRSRERYVKQFPEDGSVCTLPTEETEKCTVNEECSPSSCLMTEWGEWDECSATCGMGMKKRHRMIKMNPADGSMCKAETSQAEKCMMPECHTIPCLLSPWSEWSDCSVTCGKGMRTRQRMLKSLAELGDCNEDLEQVEKCMLPECPIDCELTEWSQWSECNKSCGKGHVIRTRMIQMEPQFGGAPCPETVQRKKCRIRKCLRNPSIQKLRWREARESRRSEQLKEESEGEQFPGCRMRPWTAWSECTKLCGGGIQERYMTVKKRFKSSQFTSCKDKKEIRACNVHPC

SEQ ID NO: 770311 - protein, 815 aa, Homo sapiens; identical to SEQ ID NO: 770310

SEQ ID NO: 770312 - protein, 815 aa, Homo sapiens; identical to SEQ ID NO: 770310

SEQ ID NO: 770313 - protein, 266 aa, Homo sapiens
ICGPSLGTVNEECSPSSCLMTEWGEWDECSATCGMGMKKRHRMIKMNPADGSMCKAETSQAEKCMMPECHTIPCLLSPWSEWSDCSVTCGKGMRTRQRMLKSLAELGDCNEDLEQVEKCMLPECPIDCELTEWSQWSECNKSCGKGHVIRTRMIQMEPQFGGAPCPETVQRKKCRIRKCLRNPSIQKLRWREARESRRSEQLKEESEGEQFPGCRMRPWTAWSECTKLCGGGIQERYMTVKKRFKSSQFTSCKDKKEIRACNVHPC

SEQ ID NO: 770314 - protein, 815 aa, Homo sapiens; identical to SEQ ID NO: 770310

SEQ ID NO: 770315 - protein, 815 aa, Homo sapiens; identical to SEQ ID NO: 770310

SEQ ID NO: 770316 - protein, 815 aa, Homo sapiens; identical to SEQ ID NO: 770310

SEQ ID NO: 770317 - protein, 815 aa, Homo sapiens; identical to SEQ ID NO: 770310

SEQ ID NO: 770318 - protein, 815 aa, Homo sapiens; identical to SEQ ID NO: 770310

SEQ ID NO: 770319 - protein, 180 aa, Homo sapiens [sequence omitted]

SEQ ID NO: 770320 - protein, 876 aa, Homo sapiens
GTKLGAAKMRLSPAPLKLSRTPALLALALPLAAALAFSDETLDKVPKSEGYCSRILRAQGTRREGYTEFSLRVEGDPDFYKPGTSYRVTLSAAPPSYFRGFTLIALRENREGDKEEDHAGTFQIIDEEETQFMSNCPVAVTESTPRRRTRIQVFWIAPPAGTGCVILKASIVQKRIIYFQDEGSLTKKLCEQDSTFDGVTDKPILDCCACGTAKYRLTFYGNWSEKTHPKDYPRRANHWSAIIGGSHSKNYVLWEYGGYASEGVKQVAELGSPVKMEEEIRQQSDEVLTVIKAKAQWPAWQPLNVRAAPSAEFSVDRTRHLMSFLTMMGPSPDWNVGLSAEDLCTKECGWVQKVVQDLIPWDAGTDSGVTYESPNKPTIPQEKIRPLTSLDHPQSPFYDPEGGSITQVARVVIERIARKGEQCNIVPDNVDDIVADLAPEEKDEDDTPETCIYSNWSPWSACSSSTCDKGKRMRQRMLKAQLDLSVPCPDTQDFQPCMGPGCSDEDGSTCTMSEWITWSPCSISCGMGMRSRERYVKQFPEDGSVCTLPTEETEKCTVNEECSPSSCLMTEWGEWDECSATCGMGMKKRHRMIKMNPADGSMCKAETSQAEKCMMPECHTIPCLLSPWSEWSDCSVTCGKGMRTRQRMLKSLAELGDCNEDLEQVEKCMLPECPIDCELTEWSQWSECNKSCGKGHVIRTRMIQMEPQFGGAPCPETVQRKKCRIRKCLRNPSIQKLRWREARESRRSEQLKEESEGEQFPGMAPKCQPGWSPGQAGFCTGLSLGPVKWDHYSIAYSCAEAAAEVAGESSEGLQVTGCNAYVDGVPQSTGLGGQPPACKPWSLKVLEKVFVGRKTAALPVPSVQQHIAKAAQAKSL

SEQ ID NO: 770321 - protein, 114 aa, Homo sapiens
GVYPGYYFTFLTGILVTLAARAVRNNYRHYFLSSRALKAVYDAGTWAVTQLAVSYTVAPFVMLAVEPTISLYKSMYFYLHIISLLIILFLPMKPQAHTQRRPQTLNSINKRKTD

SEQ ID NO: 770322 - protein, 251 aa, Homo sapiens
MEGGAAAATPTALPYYVAFSQLLGLTLVAMTGAWLGLYRGGIAWESDLQFNAHPLCMVIGLIFLQGNALLVYRVFRNEAKRTTKVLHGLLHIFALVIALVGLVAVFDYHRKKGYADLYSLHSWCGILVFVLYFVQWLVGFSFFLFPGASFSLRSRYRPQHIFFGATIFLLSVGTALLGLKEALLFNLGGKYSAFEPEGVLANVLGLLLACFGGAVLYILTRADWKRPSQAEEQALSMDFKTLTEGDSPGSQ

SEQ ID NO: 770323 - protein, 251 aa, Homo sapiens; identical to SEQ ID NO: 770322

SEQ ID NO: 770324 - protein, 297 aa, Homo sapiens
MELLASCPRSRLSPWGGWAPPPSHSRDLRPLPQDDGWEGACGVCLSMEGGAAAATPTALPYYVAFSQLLGLTLVAMTGAWLGLYRGGIAWESDLQFNAHPLCMVIGLIFLQGNALLVYRVFRNEAKRTTKVLHGLLHIFALVIALVGLVAVFDYHRKKGYADLYSLHSWCGILVFVLYFVQWLVGFSFFLFPGASFSLRSRYRPQHIFFGATIFLLSVGTALLGLKEALLFNLGGKYSAFEPEGVLANVLGLLLACFGGAVLYILTRADWKRPSQAEEQALSMDFKTLTEGDSPGSQ

SEQ ID NO: 770325 - protein, 251 aa, Homo sapiens; identical to SEQ ID NO: 770322

SEQ ID NO: 770326 - protein, 195 aa, Homo sapiens [sequence omitted]

SEQ ID NO: 770327 - protein, 195 aa, Homo sapiens [sequence omitted]

SEQ ID NO: 770328 - protein, 210 aa, Homo sapiens
MEGGAAAATPTALPYYVAFSQLLGLTLVAMTGAWLGLYRGGIAWESDLQFNAHPLCMVIGLIFLQGNALLVYRVFRNEAKRTTKVLHGLLHIFALVIALVGLVAVFDYHRKKGYADLYSLHSWCGILVFVLYFVQWLVGFSFFLFPGASFSLRSRYRPQHIFFGATIFLLSVGTALLGLKEALLFNLGKSGWSQNNYSHPPWCLHITPAP

SEQ ID NO: 770329 - protein, 251 aa, Homo sapiens; identical to SEQ ID NO: 770322

SEQ ID NO: 770330 - protein, 251 aa, Homo sapiens; identical to SEQ ID NO: 770322

SEQ ID NO: 770331 - protein, 251 aa, Homo sapiens; identical to SEQ ID NO: 770322

SEQ ID NO: 770332 - protein, 236 aa, Homo sapiens
LARSRTICPGLGGGLCEEPRGYQVNSEAACCLSVTNSGPQTQPGICRTPDKKALLVYRVFRNEAKRTTKVLHGLLHIFALVIALVGLVAVFDYHRKKGYADLYSLHSWCGILVFVLYFVQWLVGFSFFLFPGASFSLRSRYRPQHIFFGATIFLLSVGTALLGLKEALLFNLGGKYSAFEPEGVLANVLGLLLACFGGAVLYILTRADWKRPSQAEEQALSMDFKTLTEGDSPGSQ

SEQ ID NO: 770333 - protein, 251 aa, Homo sapiens; identical to SEQ ID NO: 770322

SEQ ID NO: 770334 - protein, 251 aa, Homo sapiens; identical to SEQ ID NO: 770322

SEQ ID NO: 770335 - protein, 156 aa, Homo sapiens
MEGGAAAATPTALPYYVAFSQLLGLTLVAMTGAWLGLYRGGIAWESDLQFNAHPLCMVIGLIFLQGNALLVYRVFRNEAKRTTKVLHGLLHIFALVIALVGLVAVFDYHRKKGYADLYSLHSWCGILVFVLYFVQVSPSNTPGLGPPTREVGGGGE

SEQ ID NO: 770336 - protein, 107 aa, Homo sapiens
  misc_feature (106)..(106): Xaa can be any naturally occurring amino acid
CEAACSHPIPSRDGGCCPSCTGCFHSGVVRAEGDVFSPPNENCTVCVCLAGNVSCISPECPSGPCQTPPQTDCCTCVPVRCYFHGRWYADGAVFSGGGDECTTCVXQ

SEQ ID NO: 770337 - protein, 37 aa, Homo sapiens
LFLTGQGEEESASLWISVCPMGKAFIQQEASCVASNG

SEQ ID NO: 770338 - protein, 140 aa, Homo sapiens
SCLLLGMLLLSPSPLRASLSLPGSLLLPLQTSLASLFIHTFRPGKRQLIQENTHPVGWGHCFLVLSVTLCDHRQVSASFWFCFFIYKLGRIIHVLPNTRLAFFSFLVATLLHPWMSAPEAEEQREKRRRRNPPRKQAGSK

SEQ ID NO: 770339 - protein, 210 aa, Homo sapiens
LSVRAPGVPAARPRLSSARQAGAGRGELRGQRLWWVRRCGCGAGQAGSMLRAVGSLLRLGRGLTVRCGPGAPLEATRRPAPALPPRGLPCYSSGGAPSNSGPQGHGEIHRVPTQRRPSQFDKKILLWTGRFKSMEEIPPRIPPEMIDTARNKARVKACYIMIGLTIIACFAVIVSAKRAVERHESLTSWNLAKKAKWREEAALAAQAKAK

SEQ ID NO: 770340 - protein, 210 aa, Homo sapiens; identical to SEQ ID NO: 770339

SEQ ID NO: 770341 - protein, 1022 aa, Homo sapiens
ATCSARRAAPGGIRRAGPARPGGPRAPEAMPALARDGGQLPLLVVFSAMIFGTITNQDLPVIKCVLINHKNNDSSVGKSSSYPMVSESPEDLGCALRPQSSGTVYEAAAVEVDVSASITLQVLVDAPGNISCLWVFKHSSLNCQPHFDLQNRGVVSMVILKMTETQAGEYLLFIQSEATNYTILFTVSIRNTLLYTLRRPYFRKMENQDALVCISESVPEPIVEWVLCDSQGESCKEESPAVVKKEEKVLHELFGTDIRCCARNELGRECTRLFTIDLNQTPQTTLPQLFLKVGEPLWIRCKAVHVNHGFGLTWELENKALEEGNYFEMSTYSTNRTMIRILFAFVSSVARNDTGYYTCSSSKHPSQSALVTIVEKGFINATNSSEDYEIDQYEEFCFSVRFKAYPQIRCTWTFSRKSFPCEQKGLDNGYSISKFCNHKHQPGEYIFHAENDDAQFTKMFTLNIRRKPQVLAEASASQASCFSDGYPLPSWTWKKCSDKSPNCTEEITEGVWNRKANRKVFGQWVSSSTLNMSEAIKGFLVKCCAYNSLGTSCETILLNSPGPFPFIQDNISFYATIGVCLLFIVVLTLLICHKYKKQFRYESQLQMVQVTGSSDNEYFYVDFREYEYDLKWEFPRENLEFGKVLGSGAFGKVMNATAYGISKTGVSIQVAVKMLKEKADSSEREALMSELKMMTQLGSHENIVNLLGACTLSGPIYLIFEYCCYGDLLNYLRSKREKFHRTWTEIFKEHNFSFYPTFQSHPNSSMPGSREVQIHPDSDQISGLHGNSFHSEDEIEYENQKRLEEEEDLNVLTFEDLLCFAYQVAKGMEFLEFKSCVHRDLAARNVLVTHGKVVKICDFGLARDIMSDSNYVVRGNARLPVKWMAPESLFEGIYTIKSDVWSYGILLWEIFSLGVNPYPGIPVDANFYKLIQNGFKMDQPFYATEEIYIIMQSCWAFDSRKRPSFPNLTSFLGCQLADAEEAMYQNVDGRVSECPHTYQNRRPFSREMDLGLLSPQAQVEDS

SEQ ID NO: 770342 - protein, 793 aa, Homo sapiens
ATCSARRAAPGGIRRAGPARPGGPRAPEAMPALARDGGQLPLLVVFSAMIFGTITNQDLPVIKCVLINHKNNDSSVGKSSSYPMVSESPEDLGCALRPQSSGTVYEAAAVEVDVSASITLQVLVDAPGNISCLWVFKHSSLNCQPHFDLQNRGVVSMVILKMTETQAGEYLLFIQSEATNYTILFTVSIRNTLLYTLRRPYFRKMENQDALVCISESVPEPIVEWVLCDSQGESCKEESPAVVKKEEKVLHELFGTDIRCCARNELGRECTRLFTIDLNQTPQTTLPQLFLKVGEPLWIRCKAVHVNHGFGLTWELENKALEEGNYFEMSTYSTNRTMIRILFAFVSSVARNDTGYYTCSSSKHPSQSALVTIVEKGFINATNSSEDYEIDQYEEFCFSVRFKAYPQIRCTWTFSRKSFPCEQKGLDNGYSISKFCNHKHQPGEYIFHAENDDAQFTKMFTLNIRRKPQVLAEASASQASCFSDGYPLPSWTWKKCSDKSPNCTEEITEGVWNRKANRKVFGQWVSSSTLNMSEAIKGFLVKCCAYNSLGTSCETILLNSPGPFPFIQDNISFYATIGVCLLFIVVLTLLICHKYKKQFRYESQLQMVQVTGSSDNEYFYVDFREYEYDLKWEFPRENLEFGKVLGSGAFGKVMNATAYGISKTGVSIQVAVKMLKEKADSSEREALMSELKMMTQLGSHENIVNLLGACTLSGPIYLIFEYCCYGDLLNYLRSKREKFHRTWTEIFKEHNFSFYPTFQSHPNSSMPGSREVQIHPDSDQISGLHGNSFHSEG

SEQ ID NO: 770343 - protein, 1029 aa, Homo sapiens
ATCSARRAAPGGIRRAGPARPGGPRAPEAMPALARDGGQLPLLVVFSAMIFGTITNQDLPVIKCVLINHKNNDSSVGKSSSYPMVSESPEDLGCALRPQSSGTVYEAAAVEVDVSASITLQVLVDAPGNISCLWVFKHSSLNCQPHFDLQNRGVVSMVILKMTETQAGEYLLFIQSEATNYTILFTVSIRNTLLYTLRRPYFRKMENQDALVCISESVPEPIVEWVLCDSQGESCKEESPAVVKKEEKVLHELFGTDIRCCARNELGRECTRLFTIDLNQTPQTTLPQLFLKVGEPLWIRCKAVHVNHGFGLTWELENKALEEGNYFEMSTYSTNRTMIRILFAFVSSVARNDTGYYTCSSSKHPSQSALVTIVEKGFINATNSSEDYEIDQYEEFCFSVRFKAYPQIRCTWTFSRKSFPCEQKGLDNGYSISKFCNHKHQPGEYIFHAENDDAQFTKMFTLNIRRKPQVLAEASASQASCFSDGYPLPSWTWKKCSDKSPNCTEEITEGVWNRKANRKVFGQWVSSSTLNMSEAIKGFLVKCCAYNSLGTSCETILLNSPGPFPFIQDNISFYATIGVCLLFIVVLTLLICHKYKKQFRYESQLQMVQVTGSSDNEYFYVDFREYEYDLKWEFPRENLEFGKVLGSGAFGKVMNATAYGISKTGVSIQVAVKMLKEKADSSEREALMSELKMMTQLGSHENIVNLLGACTLSGPIYLIFEYCCYGDLLNYLRSKREKFHRTWTEIFKEHNFSFYPTFQSHPNSSMPGSREVQIHPDSDQISGLHGNSFHSEDEIEYENQKRLEEEEDLNVLTFEDLLCFAYQVAKGMEFLEFKSCVHRDLAARNVLVTHGKVVKICDFGLARDIMSDSNYVVRGNARLPVKWMAPESLFEGIYTIKSDVWSYGILLWEIFSLGVNPYPGIPVDANFYKLIQNGFKMDQPFYATEEIYIIMQSCWAFDSRKRPSFPNLTSFLGCQLADAEEAKLWKIPETMKAVKIAPQRENPPQRMPGKNKDKGNTKAARSPGTLQKF

SEQ ID NO: 770344 - protein, 287 aa, Homo sapiens
MLWCFNCFICETLKNLLGKSCEWFEPSPQVTATHDGGFLSLECEIKLAPKRSRLETRAGEEDEGEEDSDSDYEISAKARYFGYIKQGLYLVTEMERFAPPRKRPRTITKNYRLVSLRSTTPEELYQRKIESEEYEEALSLAHTYGLDTDLVYQRQWRKSAVNVASIQNYLSKIKKRSWVLHECLERVPENVDAAKELLQYGLKGTDLEALLAIGKGADDGRFTLPGEIDIDSISYEELSPPDEEPAKNKKEKELKKRQELLKLVNFSKLTLEQKELCRCRRKLLTYL

SEQ ID NO: 770345 - protein, 366 aa, Homo sapiens
TNQSYQESHCFSFSSHYPHGINTAVYHPGHRLLLVGGCETAEVGMSKASSCGLSAWRVLSGSPYYKQVTNGGDGVTAVPKTLGLLRMLSVKFYSRQGQEQDGIFKMSLSPDGMLLAAIHFSGKLSIWAIPSLKQQGEWGQNEQPGYDDLNPDWRLSTEKRKKIKDKESFYPLIDVNWWADSAVTLARCSGALTVSSVKTLKNLLGKSCEWFEPSPQVTATHDGGFLSLECEIKLAPKRSRLETRAGEEDEGEEDSDSDYEISAKARYFGYIKQGLYLVTEMERFAPPRKRPRTITKNYRLVSLRSTTPEELYQRKIESEEYEEALSLAHTYGLDTDLVYQRQWRKSAVNVASIQNYLVCLNILVMW

SEQ ID NO: 770346 - protein, 474 aa, Homo sapiens
TNQSYQESHCFSFSSHYPHGINTAVYHPGHRLLLVGGCETAEVGMSKASSCGLSAWRVLSGSPYYKQVTNGGDGVTAVPKTLGLLRMLSVKFYSRQGQEQDGIFKMSLSPDGMLLAAIHFSGKLSIWAIPSLKQQGEWGQNEQPGYDDLNPDWRLSTEKRKKIKDKESFYPLIDVNWWADSAVTLARCSGALTVSSVKTLKNLLGKSCEWFEPSPQVTATHDGGFLSLECEIKLAPKRSRLETRAGEEDEGEEDSDSDYEISAKARYFGYIKQGLYLVTEMERFAPPRKRPRTITKNYRLVSLRSTTPEELYQRKIESEEYEEALSLAHTYGLDTDLVYQRQWRKSAVNVASIQNYLSKIKKRSWVLHECLERVPENVDAAKELLQYGLKGTDLEALLAIGKGADDGRFTLPGEIDIDSISYEELSPPDEEPAKNKKEKELKKRQELLKLVNFSKLTLEQKELCRCRRKLLTYL

SEQ ID NO: 770347 - protein, 465 aa, Homo sapiens
MGEMLLLARCLLLVLVSSLLVCSGLACGPGRGFGKRRHPKKLTPLAYKQFIPNVAEKTLGASGRYEGKISRNSERFKELTPNYNPDIIFKDEENTGADRLMTQRCKDKLNALAISVMNQWPGVKLRVTEGWDEDGHHSEESLHYEGRAVDITTSDRDRSKYGMLARLAVEAGFDWVYYESKAHIHCSVKAENSVAAKSGGCFPGSATVHLEQGGTKLVKDLSPGDRVLAADDQGRLLYSDFLTFLDRDDGAKKVFYVIETREPRERLLLTAAHLLFVAPHNDSATGEPEASSGSGPPSGGALGPRALFASRVRPGQRVYVVAERDGDRRLLPAAVHSVTLSEEAAGAYAPLTAQGTILINRVLASCYAVIEEHSWAHRAFAPFRLAHALLAALAPARTDRGGDSGGGDRGGGGGRVALTAPGAADAPGAGATAGIHWYSQLLYQIGTWLLDSEALHPLGMAVKSS

SEQ ID NO: 770348 - protein, 118 aa, Homo sapiens [sequence omitted]

SEQ ID NO: 770349 - protein, 81 aa, Homo sapiens
MAWSPPATLFLFLLLLGQPPPSRPQSLGTTKLRLVGPESKPEEGRLEVLHQGQWGTVCDDNFAIQQHHQDSSTTRTAAPPG

SEQ ID NO: 770350 - protein, 756 aa, Homo sapiens [sequence omitted]

SEQ ID NO: 770351 - protein, 756 aa, Homo sapiens [sequence omitted]

SEQ ID NO: 770352 - protein, 112 aa, Homo sapiens [sequence omitted]

SEQ ID NO: 770353 - protein, 124 aa, Homo sapiens
LEQAGKKEKEQSCSWGQIFGGFIRFSVNQWGLARTGVRRGHGRERIVKESSNILARATGRTKLPHRWAEAQCWTHRITCTPIRYPSGDTKCGAEVADLGFRGDTYLWVKAGSLQDPTSRVHAPV

SEQ ID NO: 770354 - protein, 953 aa, Homo sapiens
MDVAESPERDPHSPEDEEQPQGLSDDDILRDSGSDQDLDGAGVRASDLEDEESAARGPSQEEEDNHSDEEDRASEPKSQDQDSEVNELSRGPTSSPCEEEGDEGEEDRTSDLRDEASSVTRELDEHELDYDEEVPEEPAPAVQEDEAEKAGAEDDEEKGEGTPREEGKAGVQSVGEKESLEAAKEKKKEDDDGEIDDGEIDDDDLEEGEVKDPSDRKVRPRPTCRFFMKGNCTWGMNCRFIHPGVNDKGNYSLITKADPFPPNGAPPLGPHPLMPANPWGGPVVDEILPPPPPEPPTESAWERGLRHAKEVLKKATIRKEQEPDFEEKRFTVTIGEDEREFDKENEVFRDWNSRIPRDVRDTVLEPYADPYYDYEIERFWRGGQYENFRVQYTETEPYHNYRERERERERENRQRERERERERDRERERRQRERERERERERDKERQRRKEEWERERAKRDEKDRQHRDRDREKEREKEKGKPKPRSPQPPSRQAEPPKKEAATTGPQVKRADEWKDPWRRSKSPKKKLGVSVSPSRARRRRKTSASSASASNSSRSSSRSSSYSGSGSSRSRSRSSSYSSYSSRSSRHSSFSGSRSRSRSFSSSPSPSPTPSPHRPSIRTKGEPAPPPGKAGEKSVKKPAPPPAPPQATKTTAPVPEPTKPGDPREARRKERPARTPPRRRTLSGSGSGSGSSYSGSSSRSRSLSVSSVSSVSSATSSSSSAHSVDSEDMYADLASPVSSASSRSPAPAQTRKEKGKSKKEDGVKEEKRKRDSSTQPPKSAKPPAGGKSSQQPSTPQQAPPGQPQQGTFVAHKEIKLTLLNKAADKGSRKRYEPSDKDRQSPPPAKRPNTSPDRGSRDRKSGGRLGSPKPERQRGQNSKAPAAPADRKRQLSPQSKSSSKVTSVPGKASDPGAASTKSGKASTLSRREELLKQLKAVEDAIARKRAKIPGKA

SEQ ID NO: 770355 - protein, 953 aa, Homo sapiens; identical to SEQ ID NO: 770354

SEQ ID NO: 770356 - protein, 912 aa, Homo sapiens
MDVAESPERDPHSPEDEEQPQGLSDDDILRDSGSDQDLDGAGVRASDLEDEESAARGPSQEEEDNHSDEEDRASEPKSQDQDSEVNELSRGPTSSPCEEEGDEGEEDRTSDLRDEASSVTRELDEHELDYDEEVPEEPAPAVQEDEAEKAGAEDDEEKGEGTPREEGKAGVQSVGEKESLEAAKEKKKEDDDGEIDDGEIDDDDLEEGEVKDPSDRKVRPRPTCRFFMKGNCTWGMNCRFIHPGVNDKGNYSLITKADPFPPNGAPPLGPHPLMPANPWGGPVVDEILPPPPPEPPTESAWERGLRHAKEVLKKATIRKEQEPDFEEKRFTVTIGEDEREFDKENEVFRDWNSRIPRDVRDTVLEPYADPYYDYEIERFWRGGQYENFRVQYTETEPYHNYRKERQRRKEEWERERAKRDEKDRQHRDRDREKEREKEKGKPKPRSPQPPSRQAEPPKKEAATTGPQVKRADEWKDPWRRSKSPKKKLGVSVSPSRARRRRKTSASSASASNSSRSSSRSSSYSGSGSSRSRSRSSSYSSYSSRSSRHSSFSGSRSRSRSFSSSPSPSPTPSPHRPSIRTKGEPAPPPGKAGEKSVKKPAPPPAPPQATKTTAPVPEPTKPGDPREARRKERPARTPPRRRTLSGSGSGSGSSYSGSSSRSRSLSVSSVSSVSSATSSSSSAHSVDSEDMYADLASPVSSASSRSPAPAQTRKEKGKSKKEDGVKEEKRKRDSSTQPPKSAKPPAGGKSSQQPSTPQQAPPGQPQQGTFVAHKEIKLTLLNKAADKGSRKRYEPSDKDRQSPPPAKRPNTSPDRGSRDRKSGGRLGSPKPERQRGQNSKAPAAPADRKRQLSPQSKSSSKVTSVPGKASDPGAASTKSGKASTLSRREELLKQLKAVEDAIARKRAKIPGKA

SEQ ID NO: 770357 - protein, 824 aa, Homo sapiens
MDVAESPERDPHSPEDEEQPQGLSDDDILRDSGSDQDLDGAGVRASDLEDEESAARGPSQEEEDNHSDEEDRASEPKSQDQDSEVNELSRGPTSSPCEEEGDEGEEDRTSDLRDEASSVTRELDEHELDYDEEVPEEPAPAVQEDEAEKAGAEDDEEKGEGTPREEGKAGVQSVGEKESLEAAKEKKKEDDDGEIDDGEIDDDDLEEGEVKDPSDRKVRPRPTCRFFMKGNCTWGMNCRFIHPGVNDKGNYSLITKADPFPPNGAPPLGPHPLMPANPWGGPVVDEILPPPPPEPPTESAWERGLRHAKEVLKKATIRKEQEPDFEEKRFTVTIGEDEREFDKENEVFRDWNSRIPRDVRDTVRQAEPPKKEAATTGPQVKRADEWKDPWRRSKSPKKKLGVSVSPSRARRRRKTSASSASASNSSRSSSRSSSYSGSGSSRSRSRSSSYSSYSSRSSRHSSFSGSRSRSRSFSSSPSPSPTPSPHRPSIRTKGEPAPPPGKAGEKSVKKPAPPPAPPQATKTTAPVPEPTKPGDPREARRKERPARTPPRRRTLSGSGSGSGSSYSGSSSRSRSLSVSSVSSVSSATSSSSSAHSVDSEDMYADLASPVSSASSRSPAPAQTRKEKGKSKKEDGVKEEKRKRDSSTQPPKSAKPPAGGKSSQQPSTPQQAPPGQPQQGTFVAHKEIKLTLLNKAADKGSRKRYEPSDKDRQSPPPAKRPNTSPDRGSRDRKSGGRLGSPKPERQRGQNSKAPAAPADRKRQLSPQSKSSSKVTSVPGKASDPGAASTKSGKASTLSRREELLKQLKAVEDAIARKRAKIPGKA

SEQ ID NO: 770358 - protein, 953 aa, Homo sapiens; identical to SEQ ID NO: 770354

SEQ ID NO: 770359 - protein, 953 aa, Homo sapiens; identical to SEQ ID NO: 770354

SEQ ID NO: 770360 - protein, 953 aa, Homo sapiens; identical to SEQ ID NO: 770354

SEQ ID NO: 770361 - protein, 223 aa, Homo sapiens
MYADLASPVSSASSRSPAPAQTRKEKGKSKKEDGVKEEKRKRDSSTQPPKSAKPPAGGKSSQQPSTPQQAPPGQPQQGTFVAHKEIKLTLLNKAADKGSRKRYEPSDKDRQSPPPAKRPNTSPDRGSRDRKSGGRLGSPKPERQRGQNSKAPAAPADRKRQLSPQSKSSSKVTSVPGKASDPGAASTKSGKASTLSRREELLKQLKAVEDAIARKRAKIPGKA

SEQ ID NO: 770362 - protein, 167 aa, Homo sapiens
DLWEQSRLLARNPCPLGRGHGFWLLALLSSLASLLSQAADKGSRKRYEPSDKDRQSPPPAKRPNTSPDRGSRDRKSGGRLGSPKPERQRGQNSKAPAAPADRKRQLSPQSKSSSKVTSVPGKASDPGAASTKSGKASTLSRREELLKQLKAVEDAIARKRAKIPGKA

SEQ ID NO: 770363 - protein, 696 aa, Homo sapiens
MDVAESPERDPHSPEDEEQPQGLSDDDILRDSGSDQDLDGAGVRASDLEDEESAARGPSQEEEDNHSDEEDRASEPKSQDQDSEVNELSRGPTSSPCEEEGDEGEEDRTSDLRDEASSVTRELDEHELDYDEEVPEEPAPAVQEDEAEKAGAEDDEEKGEGTPREEGKAGVQSVGEKESLEAAKEKKKEDDDGEIDDGEIDDDDLEEGEVKDPSDRKVRPRPTCRFFMKGNCTWGMNCRFIHPGVNDKGNYSLITKADPFPPNGAPPLGPHPLMPANPWGGPVVDEILPPPPPEPPTESAWERGLRHAKEVLKKATIRKEQEPDFEEKRFTVTIGEDEREFDKENEVFRDWNSRIPRDVRDTVLEPYADPYYDYEIERFWRGGQYENFRVQYTETEPYHNYRERERERERENRQRERERERERDRERERRQRERERERERERDKERQRRKEEWERERAKRDEKDRQHRDRDREKEREKEKGKPKPRSPQPPSRQAEPPKKEAATTGPQVKRADEWKDPWRRSKSPKKKLGVSVSPSRARRRRKTSASSASASNSSRSSSRSSSYSGSGSSRSRSRSSSYSSYSSRSSRHSSFSGSRSRSRSFSSSPSPSPTPSPHRPSIRTKGEPAPPPGKAGEKSVKKPAPPPAPPQATKTTAPVPEPTKPGDPREARRKERPARTPPRRTAKFSGLPRDIIENY

SEQ ID NO: 770364 - protein, 410 aa, Homo sapiens
MDVAESPERDPHSPEDEEQPQGLSDDDILRDSGSDQDLDGAGVRASDLEDEESAARGPSQEEEDNHSDEEDRASEPKSQDQDSEVNELSRGPTSSPCEEEGDEGEEDRTSDLRDEASSVTRELDEHELDYDEEVPEEPAPAVQEDEAEKAGAEDDEEKGEGTPREEGKAGVQSVGEKESLEAAKEKKKEDDDGEIDDGEIDDDDLEEGEVKDPSDRKVRPRPTCRFFMKGNCTWGMNCRFIHPGVNDKGNYSLITKADPFPPNGAPPLGPHPLMPANPWGGPVVDEILPPPPPEPPTESAWERGLRHAKEVLKKATIRKEQEPDFEEKRFTVTIGEDEREFDKENEVFRDWNSRIPRDVRDTVLEPYADPYYDYEIERFWRGGQYENFRVQYTETEPYHNYRKYDFNIHI

SEQ ID NO: 770365 - protein, 953 aa, Homo sapiens; identical to SEQ ID NO: 770354

SEQ ID NO: 770366 - protein, 392 aa, Homo sapiens
ECHTGDAVSWSRSRSSSYSSYSSRSSRHSSFSGSRSRSRSFSSSPSPSPTPSPHRPSIRTKGEPAPPPGKAGEKSVKKPAPPPAPPQATKTTAPVPEPTKPGDPREARRKERPARTPPRRRTLSGSGSGSGSSYSGSSSRSRSLSVSSVSSVSSATSSSSSAHSVDSEDMYADLASPVSSASSRSPAPAQTRKEKGKSKKEDGVKEEKRKRDSSTQPPKSAKPPAGGKSSQQPSTPQQAPPGQPQQGTFVAHKEIKLTLLNKAADKGSRKRYEPSDKDRQSPPPAKRPNTSPDRGSRDRKSGGRLGSPKPERQRGQNSKAPAAPADRKRQLSPQSKSSSKVTSVPGKASDPGAASTKSGKASTLSRREELLKQLKAVEDAIARKRAKIPGKA

SEQ ID NO: 770367 - protein, 953 aa, Homo sapiens; identical to SEQ ID NO: 770354

SEQ ID NO: 770368 - protein, 223 aa, Homo sapiens; identical to SEQ ID NO: 770361

SEQ ID NO: 770369 - protein, 211 aa, Homo sapiens
MTSPSRQPRPRKEKGKSKKEDGVKEEKRKRDSSTQPPKSAKPPAGGKSSQQPSTPQQAPPGQPQQGTFVAHKEIKLTLLNKAADKGSRKRYEPSDKDRQSPPPAKRPNTSPDRGSRDRKSGGRLGSPKPERQRGQNSKAPAAPADRKRQLSPQSKSSSKVTSVPGKASDPGAASTKSGKASTLSRREELLKQLKAVEDAIARKRAKIPGKA

SEQ ID NO: 770370 - protein, 704 aa, Homo sapiens
MDVAESPERDPHSPEDEEQPQGLSDDDILRDSGSDQDLDGAGVRASDLEDEESAARGPSQEEEDNHSDEEDRASEPKSQDQDSEVNELSRGPTSSPCEEEGDEGEEDRTSDLRDEASSVTRELDEHELDYDEEVPEEPAPAVQEDEAEKAGAEDDEEKGEGTPREEGKAGVQSVGEKESLEAAKEKKKEDDDGEIDDGEIDDDDLEEGEVKDPSDRKVRPRPTCRFFMKGNCTWGMNCRFIHPGVNDKGNYSLITKADPFPPNGAPPLGPHPLMPANPWGGPVVDEILPPPPPEPPTESAWERGLRHAKEVLKKATIRKEQEPDFEEKRFTVTIGEDEREFDKENEVFRDWNSRIPRDVRDTVLEPYADPYYDYEIERFWRGGQYENFRVQYTETEPYHNYRERERERERENRQRERERERERDRERERRQRERERERERERDKERQRRKEEWERERAKRDEKDRQHRDRDREKEREKEKGKPKPRSPQPPSRQAEPPKKEAATTGPQVKRADEWKDPWRRSKSPKKKLGVSVSPSRARRRRKTSASSASASNSSRSSSRSSSYSGSGSSRSRSRSSSYSSYSSRSSRHSSFSGSRSRSRSFSSSPSPSPTPSPHRPSIRTKGEPAPPPGKAGEKSVKKPAPPPAPPQATKTTAPVPEPTKPGDPREARRKERPARTPPRRRTLSGSGSGSGSSYSGSSSRSSS

SEQ ID NO: 770371 - protein, 742 aa, Homo sapiens
MDVAESPERDPHSPEDEEQPQGLSDDDILRDSGSDQDLDGAGVRASDLEDEESAARGPSQEEEDNHSDEEDRASEPKSQDQDSEVNELSRGPTSSPCEEEGDEGEEDRTSDLRDEASSVTRELDEHELDYDEEVPEEPAPAVQEDEAEKAGAEDDEEKGEGTPREEGKAGVQSVGEKESLEAAKEKKKEDDDGEIDDGEIDDDDLEEGEVKDPSDRKVRPRPTCRFFMKGNCTWGMNCRFIHPGVNDKGNYSLITKADPFPPNGAPPLGPHPLMPANPWGGPVVDEILPPPPPEPPTESAWERGLRHAKEVLKKATIRKEQEPDFEEKRFTVTIGEDEREFDKENEVFRDWNSRIPRDVRDTVLEPYADPYYDYEIERFWRGGQYENFRVQYTETEPYHNYRERERERERENRQRERERERERDRERERRQRERERERERERDKERQRRKEEWERERAKRDEKDRQHRDRDREKEREKEKGKPKPRSPQPPSRQAEPPKKEAATTGPQVKRADEWKDPWRRSKSPKKKLGVSVSPSRARRRRKTSASSASASNSSRSSSRSSSYSGSGSSRSRSRSSSYSSYSSRSSRHSSFSGSRSRSRSFSSSPSPSPTPSPHRPSIRTKGEPAPPPGKAGEKLRLVQKCAWVRTQAHFSLPSQIHPVYTTCLARRSTLSTLPSLPVMHAIYTICLASRSTLSILPSLSSRPTLSILPPGQQIQPVYYYLTGQQIHLSTLPACTEVRLGQ

SEQ ID NO: 770372 - protein, 31 aa, Homo sapiens
MQLYTHVSENLPPYARPRFLRLQESLATTET

SEQ ID NO: 770373 - protein, 733 aa, Homo sapiens
MSGAAPHPHSSRVSALRPCGVVGAWVGMGVCQRTRAPWKEKSQLERAALGFRKGGSGMFASGWNQTVPIEEAGSMAALLLLPLLLLLPLLLLKLHLWPQLRWLPADLAFAVRALCCKRALRARALAAAAADPEGPEGGCSLAWRLAELAQQRAAHTFLIHGSRRFSYSEAERESNRAARAFLRALGWDWGPDGGDSGEGSAGEGERAAPGAGDAAAGSGAEFAGGDGAARGGGAAAPLSPGATVALLLPAGPEFLWLWFGLAKAGLRTAFVPTALRRGPLLHCLRSCGARALVLAPEFLESLEPDLPALRAMGLHLWAAGPGTHPAGISDLLAEVSAEVDGPVPGYLSSPQSITDTCLYIFTSGTTGLPKAARISHLKILQCQGFYQLCGVHQEDVIYLALPLYHMSGSLLGIVGCMGIGATVVLKSKFSAGQFWEDCQQHRVTVFQYIGELCRYLVNQPPSKAERGHKVRLAVGSGLRPDTWERFVRRFGPLQVLETYGLTEGNVATINYTGQRGAVGRASWLYKHIFPFSLIRYDVTTGEPIRDPQGHCMATSPAGQGKLLKDVFRPGDVFFNTGDLLVCDDQGFLRFHDRTGDTFRWKGENVATTEVAEVFEALDFLQEVNVYGVTVPGHEGRAGMAALVLRPPHALDLMQLYTHVSENLPPYARPRFLRLQESLATTETFKQQKVRMANEGFDPSTLSDPLYVLDQAVGAYLPLTTARYSALLAGNLRI

SEQ ID NO: 770374 - protein, 701 aa, Homo sapiens
MSGAAPHPHSSRVSALRPCGVVGAWVGMGVCQRTRAPWKEKSQLERAALGFRKGGSGMFASGWNQTVPIEEAGSMAALLLLPLLLLLPLLLLKLHLWPQLRWLPADLAFAVRALCCKRALRARALAAAAADPEGPEGGCSLAWRLAELAQQRAAHTFLIHGSRRFSYSEAERESNRAARAFLRALGWDWGPDGGDSGEGSAGEGERAAPGAGDAAAGSGAEFAGGDGAARGGGAAAPLSPGATVALLLPAGPEFLWLWFGLAKAGLRTAFVPTALRRGPLLHCLRSCGARALVLAPEFLESLEPDLPALRAMGLHLWAAGPGTHPAGISDLLAEVSAEVDGPVPGYLSSPQSITDTCLYIFTSGTTGLPKAARISHLKILQCQGFYQLCGVHQEDVIYLALPLYHMSGSLLGIVGCMGIGATVVLKSKFSAGQFWEDCQQHRVTVFQYIGELCRYLVNQPPSKAERGHKVRLAVGSGLRPDTWERFVRRFGPLQVLETYGLTEGNVATINYTGQRGAVGRASWLYKHIFPFSLIRYDVTTGEPIRDPQGHCMATSPGEPGLLVAPVSQQSPFLGYAGGPELAQGKLLKDVFRPGDVFFNTGDLLVCDDQGFLRFHDRTGDTFRWKGENVATTEVAEVFEALDFLQEVNVYGVTVPGHEGRAGMAALVLRPPHALDLMQLYTHVSENLPPYARPRFLRLQRL

SEQ ID NO: 770375 - protein, 801 aa, Homo sapiens
MSGAAPHPHSSRVSALRPCGVVGAWVGMGVCQRTRAPWKEKSQLERAALGFRKGGSGMFASGWNQTVPIEEAGSMAALLLLPLLLLLPLLLLKLHLWPQLRWLPADLAFAVRALCCKRALRARALAAAAADPEGPEGGCSLAWRLAELAQQRAAHTFLIHGSRRFSYSEAERESNRAARAFLRALGWDWGPDGGDSGEGSAGEGERAAPGAGDAAAGSGAEFAGGDGAARGGGAAAPLSPGATVALLLPAGPEFLWLWFGLAKAGLRTAFVPTALRRGPLLHCLRSCGARALVLAPEFLESLEPDLPALRAMGLHLWAAGPGTHPAGISDLLAEVSAEVDGPVPGYLSSPQSITDTCLYIFTSGTTGLPKAARISHLKILQCQGFYQLCGVHQEDVIYLALPLYHMSGSLLGIVGCMGIGATVVLKSKFSAGQFWEDCQQHRVTVFQYIGELCRYLVNQPPSKAERGHKVRLAVGSGLRPDTWERFVRRFGPLQVLETYGLTEGNVATINYTGQRGAVGRASWLYKHIFPFSLIRYDVTTGEPIRDPQGHCMATSPGEPGLLVAPVSQQSPFLGYAGGPELAQGKLLKDVFRPGDVFFNTGDLLVCDDQGFLRFHDRTGDTFRWKGENVATTEVAEVFEALDFLQEVNVYGVTVPGAYGMEGGGGTQPPPRIGSTWAQGARGLRGGQPWRGLLCLPHPPGHEGRAGMAALVLRPPHALDLMQLYTHVSENLPPYARPRFLRLQESLATTETFKQQKVRMANEGFDPSTLSDPLYVLDQAVGAYLPLTTARYSALLAGNLRI

SEQ ID NO: 770376 - protein, 657 aa, Homo sapiens
MSGAAPHPHSSRVSALRPCGVVGAWVGMGVCQRTRAPWKEKSQLERAALGFRKGGSGMFASGWNQTVPIEEAGSMAALLLLPLLLLLPLLLLKLHLWPQLRWLPADLAFAVRALCCKRALRARALAAAAADPEGPEGGCSLAWRLAELAQQRAAHTFLIHGSRRFSYSEAERESNRAARAFLRALGWDWGPDGGDSGEGSAGEGERAAPGAGDAAAGSGAEFAGGDGAARGGGAAAPLSPGATVALLLPAGPEFLWLWFGLAKAGLRTAFVPTALRRGPLLHCLRSCGARALVLAPEFLESLEPDLPALRAMGLHLWAAGPGTHPAGISDLLAEVSAEVDGPVPGYLSSPQSITDTCLYIFTSGTTGLPKAARISHLKILQCQGFYQLCGVHQEDVIYLALPLYHMSGSLLGIVGCMGIGATVVLKSKFSAGQFWEDCQQHRVTVFQYIGELCRYLVNQPPSKAERGHKVRLAVGSGLRPDTWERFVRRFGPLQVLETYGLTEGNVATINYTGQRGAVGRASWLYKHIFPFSLIRYDVTTGEPIRDPQGHCMATSPGEPGLLVAPVSQQSPFLGYAGGPELAQGKLLKDVFRPGDVFFNTGDLLVCDDQGFLRFHDRTGDTFRWKGENVATTEVAEVFEALDFLQEVNVYGVTVPGA

SEQ ID NO: 770377 - protein, 142 aa, Homo sapiens
MEGGGGTQPPPRIGSTWAQGARGLRGGQPWRGLLCLPHPPGHEGRAGMAALVLRPPHALDLMQLYTHVSENLPPYARPRFLRLQESLATTETFKQQKVRMANEGFDPSTLSDPLYVLDQAVGAYLPLTTARYSALLAGNLRI

SEQ ID NO: 770378 - protein, 368 aa, Homo sapiens
MSGAAPHPHSSRVSALRPCGVVGAWVGMGVCQRTRAPWKEKSQLERAALGFRKGGSGMFASGWNQTVPIEEAGSMAALLLLPLLLLLPLLLLKLHLWPQLRWLPADLAFAVRALCCKMWPLLMLLLALGLLGLPALTPGRVPDRAVWLARPLGPWASRSDLVETLYAQCKCRAGPLGEAKPNPRYSPSKFYNLGGFLWPGRPGLILKAAETRSQGERRGLGGKRPVGPSGKRRKEGLLREHPKMGLGGPILWARAPSAWTPLFLHPALNHGFRPLAQLKGEDPFGRAGNPIWAAERENPPPLENRGGSREWSRGKPKRGAPRVVPGEKRARQSGAERGPGGPPLWGAAERGNKNGRAQYEQDLGGECP

SEQ ID NO: 770379 - protein, 202 aa, Homo sapiens
MPKPPKPRNNLEDRHNPGIQGRREHRPGPGRVRAASSPGGSAPRAERRLWGEGWESGAAPHPHSSRVSALRPCGVVGAWVGMGVCQRTRAPWKEKSQLERAALGFRKGGSGMFASGWNQTVPIEEAGSMAALLLLPLLLLLPLLLLKLHLWPQLRWLPADLAFAVRALCCKRALRARALAAAAADPEGPEGGCSLAWRLAEL

SEQ ID NO: 770380 - protein, 757 aa, Homo sapiens
MSGAAPHPHSSRVSALRPCGVVGAWVGMGVCQRTRAPWKEKSQLERAALGFRKGGSGMFASGWNQTVPIEEAGSMAALLLLPLLLLLPLLLLKLHLWPQLRWLPADLAFAVRALCCKRALRARALAAAAADPEGPEGGCSLAWRLAELAQQRAAHTFLIHGSRRFSYSEAERESNRAARAFLRALGWDWGPDGGDSGEGSAGEGERAAPGAGDAAAGSGAEFAGGDGAARGGGAAAPLSPGATVALLLPAGPEFLWLWFGLAKAGLRTAFVPTALRRGPLLHCLRSCGARALVLAPEFLESLEPDLPALRAMGLHLWAAGPGTHPAGISDLLAEVSAEVDGPVPGYLSSPQSITDTCLYIFTSGTTGLPKAARISHLKILQCQGFYQLCGVHQEDVIYLALPLYHMSGSLLGIVGCMGIGATVVLKSKFSAGQFWEDCQQHRVTVFQYIGELCRYLVNQPPSKAERGHKVRLAVGSGLRPDTWERFVRRFGPLQVLETYGLTEGNVATINYTGQRGAVGRASWLYKHIFPFSLIRYDVTTGEPIRDPQGHCMATSPGEPGLLVAPVSQQSPFLGYAGGPELAQGKLLKDVFRPGDVFFNTGDLLVCDDQGFLRFHDRTGDTFRWKGENVATTEVAEVFEALDFLQEVNVYGVTVPGHEGRAGMAALVLRPPHALDLMQLYTHVSENLPPYARPRFLRLQESLATTETFKQQKVRMANEGFDPSTLSDPLYVLDQAVGAYLPLTTARYSALLAGNLRI

SEQ ID NO: 770381 - protein, 757 aa, Homo sapiens; identical to SEQ ID NO: 770380

SEQ ID NO: 770382 - protein, 441 aa, Homo sapiens
MGLVAPESITQRMRQSAGVGGGEIASAAGDDVKKAALYCGLCRFRKKVSWPVAAMVHCSCVLFRKYGNFIDKLRLFTRGGSGGMGYPRLGGEGGKGGDVWVVAQNRMTLKQLKDRYPRKRFVAGVGANSKISALKGSKGKDWEIPVPVGISVTDENGKIIGELSKENDRILVAQGGLGGKLLTNFLPLKGQKRIIHLDLKLIADVGLVGFPNAGKSSLLSCVSHAKPAIADYAFTTLKPELGKIMYSDFKQISVADLPGLIEGAHMNKGMGHKFLKHIERTRQLLFVVDISGFQLSSHTQYRTAFETIILLTKELELYKEELQTKPALLAVNKMDLPDAQDKFHELMSQLQNPKDFLHLFEKNMIPERTVEFQHIIPISAVTGEGIEELKNCIRKSLDEQANQENDALHKKQLLNLWISDTMSSTEPPSKHAVTTSKMDII

SEQ ID NO: 770383 - protein, 241 aa, Homo sapiens
MGLVAPESITQRMRQSAGVGGGEIASAAGDDSKKAALYCGLCRFRKKVSWPVAAMVHCSCVLFRKYGNFIDKLRLFTRGGSGGMGYPRLGGEGGKGGDVWVVAQNRMTLKQLKDRYPRKRFVAGVGANSKISALKGSKGKDWEIPVPVGISVTDENGKIIGELSKENDRILVAQGGLGGKLLTNFLPLKGQKRIIHLDLKLIADVGLVGFPNAGKSSLLSCVSHAKPAIADYAYTTFKPET

SEQ ID NO: 770384 - protein, 441 aa, Homo sapiens; identical to SEQ ID NO: 770382

SEQ ID NO: 770385 - protein, 214 aa, Homo sapiens
MGLVAPESITQRMRQSAGVGGGEIASAAGDDSKKAALYCGLCRFRKKVSWPVAAMVHCSCVLFRKYGNFIDKLRLFTRGGSGGMGYPRLGGEGGKGGDVWVVAQNRMTLKQLKDRYPRKRFVAGVGANSKISALKGSKGKDWEIPVPVGISVTDENGKIIGELSKENDRILVAQGGLGGKLLTNFLPLKGQKRIIHLDLKLIADVGLVGYNIKA

SEQ ID NO: 770386 - protein, 150 aa, Homo sapiens
MGLVAPESITQRMRQSAGVGGGEIASAAGDDSKKAALYCGLCRFRKKVSWPVAAMVHCSCVLFRKYGNFIDKLRLFTRGGSGGMGYPRLGGEGGKGGDVWVVAQNRMTLKQLKDRYPRKRFVAGVGANSKISALKGSKGKDWEIPVPVYL

SEQ ID NO: 770387 - protein, 229 aa, Homo sapiens
MGPLLFLPPREGCGHRVTAWWATPPRRHAQSGGRWGDPLHRALRDPSLRSPNLWRCPSTTDTGDPTSDAGPYHLRGMHATEAAICCLCRIALSSWLAEVVRITYITPWTGGYLAHQPGIMTDADPLAGGMLGQHDGQATLYPSGSPTRHRHPDTMTLWSGTDPDTSWGDLGHLLWSSPPGIRSLGIRPGTMAFSPDLIATATYNNRGADAKELQTQQTVARLVPHLYRT

SEQ ID NO: 770388 - protein, 146 aa, Homo sapiens
YQYGNYSWDLADEQNVSAATSTQAAGDRSPSPGPEGEGSQGRGCPNPVSCAQVNGFNTLGENIADNGGVRQAYKAYLKWMAEGGKDQQLPGLDLTHEQLFFINYAQVAAAVLVPPSPCFPTHLWRAHSGAPPGTRAQHGRPLGGKA

SEQ ID NO: 770389 - protein, 159 aa, Homo sapiens
LPVRQLLLGPGRRTERERCHQHPGCGGTGAPALALREKEVRAGAAPILSPVRRPTSSGWQRVARTSSCPAWISPMSSSSSSTMPRWQPQSWSHHPHASPLISGGPTLGHLQGPEPSMEGPLGEKHEGQGAGAGQDFNGDGRRGAPADSPHPTLEGAAWG

SEQ ID NO: 770390 - protein, 128 aa, Homo sapiens [sequence omitted]

SEQ ID NO: 770391 - protein, 187 aa, Homo sapiens
MDSFGQPRPEDNQSVVRRMQKKYWKTKQVFIKATGKKEDEHLVASDAELDAKLEVFHSVQETCTELLKIIEKYQLRLNVISEEENELGLFLKFQAERDATQAGKMMDATGKALCSSAKQRLALCTPLSRLKQEVATFSQRAVSDTLMTINRMEQARTEYRGALLWMKDVSQELDPDTLKQMEKFRKV

SEQ ID NO: 770392 - protein, 66 aa, Homo sapiens
ARSGFWRGWVPCGGRAPPGHARCSEGARQPGARLGDFPRRWRSLLIEAAADHPNSLQATYCKTILL

SEQ ID NO: 770393 - protein, 87 aa, Homo sapiens
  misc_feature (15)..(15): Xaa can be any naturally occurring amino acid
YRTNETCIHIGGTQXRGPYHWVSQEESELCLSHTDNQPVPSQSPKKLTRSPNNGNQDMSAWFNLFADLDPLSNPDAIGHSDDELLNA

SEQ ID NO: 770394 - protein, 482 aa, Homo sapiens
MDSFGQPRPEDNQSVVRRMQKKYWKTKQVFIKATGKKEDEHLVASDAELDAKLEVFHSVQETCTELLKIIEKYQLRLNVISEEENELGLFLKFQAERDATQAGKMMDATGKALCSSAKQRLALCTPLSRLKQEVATFSQRAVSDTLMTINRMEQARTEYRGALLWMKDVSQELDPDTLKQMEKFRKVQMQVRNSKASFDKLKMDVCQKVDLLGASRCNMLSHSLTTYQRTLLGFWKKTARMMSQIHEACIGFHPYDFVALKQLQDTPSKISEDNKDEQIGGFLTEQLNKLVLSDEEASFESEQANKDHNEKHSQMREFGAPQFSNSENVAKDLPVDSLEGEDFEKEFSFLNNLLSSGSSSTSEFTQECQTAFGSPSASLTSQEPSMGSEPLAHSSRFLPSQLFDLGFHVAGAFNNWVSQEESELCLSHTDNQPVPSQSPKKLTRSPNNGNQDMSAWFNLFADLDPLSNPDAIGHSDDELLNA

SEQ ID NO: 770395 - protein, 530 aa, Homo sapiens
MDDLQSQNLSMDMTDSPPALANNRLENGMAQLITTEAWNINSTDLVKKALVTVPAPSILNPPAESQSGMALKVAATVLQPLCLGESPVVMPIHMQVEGSSAPELNPNGNATYVMTTQGPVQLPVVLEQHVFQHLNSPLVLPQEAPCSSSTIHNNLFQGAEDPEAQPQLLDLRIPSQPQEPTLPFEAVLQNLFPSQGTLGPPPCQPPPGYAPVPPQPFSSPLSPLVPPATLLVPYPVIVPLPVPVPIPIPIPVPQSSESKFSSSFPKPPSSFGLHPFKGTQTPLEKDELKPFDILQPKEYFQLSRHTVIKMGSENEALDLSMKSVPWLKAGEVSPPIFQEDAALDLSVAAHRKSEPPPETLYDSGASVDSSGHTVMEKLPSGMEISFAPATSHEAPAMMDSHISSSDAATEMLSQPNHPSGEVKAENNIEMVGESQAAKVIVSVEDAVPTIFCGKIKGLSGVSTKNFSFKREDSVLQGYDINSQGEESMGNAEPLRKPIKNRSIKLKKVNSQEIHMLPIKKQRLATFFPRK

SEQ ID NO: 770396 - protein, 530 aa, Homo sapiens; identical to SEQ ID NO: 770395

SEQ ID NO: 770397 - protein, 496 aa, Homo sapiens
MDDLQSQNLSMDMTDSPPALANNRLENGMAQLITTEAWNINSTDLPLCLGESPVVMPIHMQVEGSSAPELNPNGNATYVMTTQGPVQLPVVLEQHVFQHLNSPLVLPQEAPCSSSTIHNNLFQGAEDPEAQPQLLDLRIPSQPQEPTLPFEAVLQNLFPSQGTLGPPPCQPPPGYAPVPPQPFSSPLSPLVPPATLLVPYPVIVPLPVPVPIPIPIPVPQSSESKFSSSFPKPPSSFGLHPFKGTQTPLEKDELKPFDILQPKEYFQLSRHTVIKMGSENEALDLSMKSVPWLKAGEVSPPIFQEDAALDLSVAAHRKSEPPPETLYDSGASVDSSGHTVMEKLPSGMEISFAPATSHEAPAMMDSHISSSDAATEMLSQPNHPSGEVKAENNIEMVGESQAAKVIVSVEDAVPTIFCGKIKGLSGVSTKNFSFKREDSVLQGYDINSQGEESMGNAEPLRKPIKNRSIKLKKVNSQEIHMLPIKKQRLATFFPRK

SEQ ID NO: 770398 - protein, 124 aa, Homo sapiens
RHRTGQSPDLPFCPGPENPAPSRPFERWILLTYLAALASLVESWVLPDCAGLLFVTRGQPRIPPGAGLPRKNEAVNLHKACLDFSPLGEEDHIKKGGRLAWTQNSTTKQTSFLRTSEFMIQVSQ

SEQ ID NO: 770399 - protein, 104 aa, Homo sapiens
KTLTNTPGQSERWQKAVLVHFPLLCGSCTYLPSRLPAQILTQGLEGTAWDLCSPPPLAGYVSLAKPPLSSFHVLICRVGKEQCARPPVVLSLPGQSPGERPSVT

SEQ ID NO: 770400 - protein, 93 aa, Homo sapiens
RAGWYGPGVRIEHQSPQLSALLVAEALYCVTMTWIWKQKGASKDRKLRVCLLSRPGHWGSGTRASVSAGVAGCFLMQLEQNGMSWDNRDVYPS

SEQ ID NO: 770401 - protein, 69 aa, Homo sapiens
ENREVDAQRENGEQTEKEAKNNLQGKHNIQGTRKRIEASKVEKEGQIREEKSHEIPLRSHGIKHLQCPS

SEQ ID NO: 770402 - protein, 822 aa, Homo sapiens
MQPGATTCTEDRIQHALERCLHGLSLSRRSTSWSAGLCLNCWSLQELVSRDPGHFLILLEQILQKTREVQEKGTYDLLTPLALLFYSTVLCTPHFPPDSDLLLKAASTYHRFLTWPVPYCSICQELLTFIDAELKAPGISYQRLVRAEQGLPIRSHRSSTVAKTLAELEDIFTETAEAQELASGIGDAAEARRWLRTKLQAVGEKAGFPGVLDTAKPGKLHTIPIPVARCYTYSWSQDSFDILQEILLKEQELLQPGILGDDEEEEEEEEEVEEDLETDGHCAERDSLLSTSSLASHDSTLSLASSQASGPALSRHLLTSFVSGLSDGMDSGYVEDSEESSSEWPWRRGSQERRGHRRPGQKFIRIYKLFKSTSQLVLRRDSRSLEGSSDTALPLRRAGSLCSPLDEPVSPPSRAQRSRSLPQPKLGTQLPSWLLAPASRPQRRRPFLSGDEDPKASTLRVVVFGSDRISGKVARAYSNLRRLENNRPLLTRFFKLQFFYVPVKRSHGTSPGACPPPRSQTPSPPTDSPRHASPGELGTTPWEESTNDISHYLGMLDPWYERNVLGLMHLPPEVLCQQSLKAEAQALEGSPTQLPILADMLLYYCRFAARPVLLQVYQTELTFITGEKTTEIFIHSLELGHSAATRAIKASGPGSKRLGIDGDREAVPLTLQIIYSKGAISGRSRWSNLEKVCTSVNLNKACRKQEELDSSMEALTLNLTEVVKRQNSKSKKGFNQISTSQIKVDKVQIIGSNSCPFAVCLDQDERKILQSVVRCEVSPCYKPEKSDLSSPPQTPPDLPAQAAPDLCSLLCLPIMTFSGALP

SEQ ID NO: 770403 - protein, 880 aa, Homo sapiens
MQPGATTCTEDRIQHALERCLHGLSLSRRSTSWSAGLCLNCWSLQELVSRDPGHFLILLEQILQKTREVQEKGTYDLLTPLALLFYSTVLCTPHFPPDSDLLLKAASTYHRFLTWPVPYCSICQELLTFIDAELKAPGISYQRLVRAEQGLPIRSHRSSTVTVLLLNPVEVQAEFLAVANKLSTPGHSPHSAYTTLLLHAFQATFGAHCDVPGLHCRLQAKTLAELEDIFTETAEAQELASGIGDAAEARRWLRTKLQAVGEKAGFPGVLDTAKPGKLHTIPIPVARCYTYSWSQDSFDILQEILLKEQELLQPGILGDDEEEEEEEEEVEEDLETDGHCAERDSLLSTSSLASHDSTLSLASSQASGPALSRHLLTSFVSGLSDGMDSGYVEDSEESSSEWPWRRGSQERRGHRRPGQKFIRIYKLFKSTSQLVLRRDSRSLEGSSDTALPLRRAGSLCSPLDEPVSPPSRAQRSRSLPQPKLGTQLPSWLLAPASRPQRRRPFLSGDEDPKASTLRVVVFGSDRISGKVARAYSNLRRLENNRPLLTRFFKLQFFYVPVKRSHGTSPGACPPPRSQTPSPPTDSPRHASPGELGTTPWEESTNDISHYLGMLDPWYERNVLGLMHLPPEVLCQQSLKAEAQALEGSPTQLPILADMLLYYCRFAARPVLLQVYQTELTFITGEKTTEIFIHSLELGHSAATRAIKASGPGSKRLGIDGDREAVPLTLQIIYSKGAISGRSRWSNLEKVCTSVNLNKACRKQEELDSSMEALTLNLTEVVKRQNSKSKKGFNQISTSQIKVDKVQIIGSNSCPFAVCLDQDERKILQSVVRCEVSPCYKPEKSDLSSPPQTPPDLPAQAAPDLCSLLCLPIMTFSGALP

SEQ ID NO: 770404 - protein, 791 aa, Homo sapiens
MLSSEPHAFPWKPGPWSCCFCPGLLWSPPRALPGLEEALVSVELSTSRHEGGGCTVACCAPLGAIAGPCVPSTVLLLNPVEVQAEFLAVANKLSTPGHSPHSAYTTLLLHAFQATFGAHCDVPGLHCRLQAKTLAELEDIFTETAEAQELASGIGDAAEARRWLRTKLQAVGEKAGFPGVLDTAKPGKLHTIPIPVARCYTYSWSQDSFDILQEILLKEQELLQPGILGDDEEEEEEEEEVEEDLETDGHCAERDSLLSTSSLASHDSTLSLASSQASGPALSRHLLTSFVSGLSDGMDSGYVEDSEESSSEWPWRRGSQERRGHRRPGQKFIRIYKLFKSTSQLVLRRDSRSLEGSSDTALPLRRAGSLCSPLDEPVSPPSRAQRSRSLPQPKLGTQLPSWLLAPASRPQRRRPFLSGDEDPKASTLRVVVFGSDRISGKVARAYSNLRRLENNRPLLTRFFKLQFFYVPVKRSHGTSPGACPPPRSQTPSPPTDSPRHASPGELGTTPWEESTNDISHYLGMLDPWYERNVLGLMHLPPEVLCQQSLKAEAQALEGSPTQLPILADMLLYYCRFAARPVLLQVYQTELTFITGEKTTEIFIHSLELGHSAATRAIKASGPGSKRLGIDGDREAVPLTLQIIYSKGAISGRSRWSNLEKVCTSVNLNKACRKQEELDSSMEALTLNLTEVVKRQNSKSKKGFNQISTSQIKVDKVQIIGSNSCPFAVCLDQDERKILQSVVRCEVSPCYKPEKSDLSSPPQTPPDLPAQAAPDLCSLLCLPIMTFSGALP

SEQ ID NO: 770405 - protein, 133 aa, Homo sapiens
TVAAAANMAETSEEVAVLVQRVVKDITNAFRRNPHIDEIGLIPCPEARYNRSPIVLVENKLGVESWCVKFLLPYVHNKLLLYRTRKQWLNRDELIDVTCTLLLLNPDFTTAWNVRYVIFISDMIKFVQISEDM

SEQ ID NO: 770406 - protein, 71 aa, Homo sapiens
SLISQTVIDSSVMEQNPLRSEPALVPPKDEEAAVSTEEPRINLPHLLEEEVEFSTDLIDSYPGHETLWCHR

SEQ ID NO: 770407 - protein, 248 aa, Homo sapiens
TVAAAANMAETSEEVAVLVQRVVKDITNAFRRNPHIDEIGLIPCPEARYNRSPIVLVENKLGVESWCVKFLLPYVHNKLLLYRTRKQWLNRDELIDVTCTLLLLNPDFTTAWNVRKELILSGTLNPIKDLHLGKLALTKFPKSPETWIHRRWVLQQLIQETSLPSFVTKGNLGTIPTERAQRLIQEEMEVCGEAAGRYPSNYNAWSHRIWVLQHLAKLDVKVGILLSPGQTACLPLKSSGSSSFSEEL

SEQ ID NO: 770408 - protein, 109 aa, Homo sapiens
MGSRRFTCCATEPRLPSMMCPCGGIIGKQPFSDSQRTNELQKEIRQGRIAFGEKPLTRLALVFANNVSLNCCQIFFSLCRIHQSSYAKEHHCTALLKIHTIKWTLTCKT

SEQ ID NO: 770409 - protein, 157 aa, Homo sapiens
ICHPLRYPVIMNPHLCVFLVLVSFILSLLNSQLHNQIVLQFTCFKNVEIFNFFCEPSQLLNLACSDSVINNIFMYLDSVIFGFLPISGILLSYYKIVSSILRIPSSDGKYKAFSTCGSHLAVVCLFYGTGLGAYLSSAASSFPRKGAVTSVMYTVVI

SEQ ID NO: 770410 - protein, 81 aa, Homo sapiens
PLPPLPLIPVRTHLQLPGEKRTPPIRSPTQACAQRRGQPGPESNWKNMQAVKTNERGNLRLGCIAERRTDASRESEQTQQL

SEQ ID NO: 770411 - protein, 219 aa, Homo sapiens
HLRSSGQREGEQGGSPAAADLLGPGPSPSPAPASPDGAMRGPSGALWLLLALRTVLGGMEVRWCATSDPEQHKCGNMSEAFREAGIQPSLLCVRGTSADHCVQLIAAQEADAITLDGGAIYEAGKEHGLKPVVGEVYDQEVGTSYYAVAVVRRSSHVTIDTLKGVKSCHTGINRTVGWNVPVGYLVESGRLSVMGCDVLKGPKRGADLHPESSQVAHQP

SEQ ID NO: 770412 - protein, 264 aa, Homo sapiens
HLRSSGQREGEQGGSPAAADLLGPGPSPSPAPASPDGAMRGPSGALWLLLALRTVLGGMEVRWCATSDPEQHKCGNMSEAFREAGIQPSLLCVRGTSADHCVQLIAAQEADAITLDGGAIYEAGKEHGLKPVVGEVYDQEVGTSYYAVAVVRRSSHVTIDTLKGVKSCHTGINRTVGWNVPVGYLVESGRLSVMGCDVLKAVSDYFGGSCVPGAGETSYSESLCRLCRVTALGKGCVTRAPWRDTTTTAGPSGAWRKGQGTWLL

SEQ ID NO: 770413 - protein, 264 aa, Homo sapiens; identical to SEQ ID NO: 770412

SEQ ID NO: 770414 - protein, 80 aa, Homo sapiens
MQEGGCGTTAFRPGTPFSSSSQSPTDGVSPKFQRPYFGSGLGGRTTTYPLSSLETRATWPAPGRYHWRVCILNRFHTCDL

SEQ ID NO: 770415 - protein, 135 aa, Homo sapiens
GVGKSTLAGTFGGLQGDSAHEPENPEDTYERRIMVDKEEVTLVVYDIWEQGDAGGWLRDHCLQTGDAFLIVFSVTDRRSFSKVPETLLRLRAGRPHHDLPVILVGNKSDLARSREVSLEEGRHLAGTLSCKHIET

SEQ ID NO: 770416 - protein, 181 aa, Homo sapiens
LGRVYVYLGGLKGTWGETKPAMAAAEEEDGGPEGPNRERGGAGATFECNICLETAREAVVSVCGHLYCWPCLHQWLETRPERQECPVCKAGISREKVVPLYGRGSQKPQDPRLKTPPRPQGQRPAPESRGGFQPFGDTGGFHFSFGVGAFPFGFFTTVFNAHEPFRRGTGVDLGQGHPASS

SEQ ID NO: 770417 - protein, 134 aa, Homo sapiens
LGRVYVYLGGLKGTWGETKPAMAAAEEEDGGPEGPNRERGGAGATFECNICLETAREAVVSVCGHLYCWPCLHQWLETRPERQECPVCKAGISREKVVPLYGRGSQKPQDPRLKILIWCWCFSLWLFHHRLQCP

SEQ ID NO: 770418 - protein, 201 aa, Homo sapiens
LGRVYVYLGGLKGTWGETKPAMAAAEEEDGGPEGPNRERGGAGATFECNICLETAREAVVSVCGHLYCWPCLHQWLETRPERQECPVCKAGISREKVVPLYGRGSQKPQDPRLKNSSHLVIPGASTSHLVLVLFPLAFSPPSSMPMSLSAGVQVWIWDRVTQPPADRIPSSCFSPSSSFFGCSVFELCLLPAHLQPEENQY

SEQ ID NO: 770419 - protein, 201 aa, Homo sapiens; identical to SEQ ID NO: 770418

SEQ ID NO: 770420 - protein, 140 aa, Homo sapiens
FKHRKQFQKEIRESKEWLMLRLGSSDLICALRESVPGSAVWLLSAQLFFFFNYYYYYTLSFRVHVYNVQVSYICIHVPCWCTAPTNSSSSIRYISQCYPSPLPPPHNSPQSVMFPFLCPCVLIRSALILGDGAQAWGSID

SEQ ID NO: 770421 - protein, 87 aa, Homo sapiens
LLFLFFEGAPKTHTWGKRRLLELRVKMPKLHGRRSALPAKDVQEDFYQIRLNVPQCQLITPVVRKTTWHFWVSGIFENKSKGRRDIY

SEQ ID NO: 770422 - protein, 57 aa, Homo sapiens
MNDPSSGVSGVLAGEPKAGRSGPAAHWGLDATVELPLAQRENKQSHPGRGDGTRVAG

SEQ ID NO: 770423 - protein, 96 aa, Homo sapiens
TPISSPDLSSQLQICESNCQPDFASQIPQRHLKLSMSKSELTISTLKLASSSICHLERNNPLSRRSNSQELRSHPCPSPTSNQSLRPVDYTRLNSS

SEQ ID NO: 770424 - protein, 144 aa, Homo sapiens
GEPGACWGRAFQQRHGHVRRPRGRDELWEHEACQEGRGPEGVKTRRVGGPELVPSGPGGLQPTHPERRGRELTLAMGCPCQEFGTIWRQQRLRGSATYLTTHSGAGGSAAHLQGKLIAGCCCQVGLSAFYPLDLSCLGWGGGHN

SEQ ID NO: 770425 - protein, 106 aa, Homo sapiens
MSICFEHHVGVQNVPDFGFQIFEIQPVIINFNDCGCYSYNHHCYNCHHHHCYHCRTNGSSKVWSCVGPLIADLTPDGDAITQREKGAWSRSPSKSTPGWEEDHKDH

SEQ ID NO: 770426 - protein, 115 aa, Homo sapiens
DVLVVAALALRTLRLRQRGLAAPAPARPRPPTSCLSPNTAALPCGGPFSVSPARPVHFGRHERPVPPGSPGWLPGAPQGGHPKGAECPRRGWHDPHSLGCLPWQPRVAASHCEPR

SEQ ID NO: 770427 - protein, 604 aa, Homo sapiens
SRRSRARLPRKTTGLAGRRARCAIPGGGGNGGGDGGDCSGRLSPLPCAPASRRAAEQPAVPGSPSPRAHGRAQRTIAATAMGKPARKGCEWKRFLKNNWVLLSTVAAVVLGITTGVLVREHSNLSTLEKFYFAFPGEILMRMLKLIILPLIISSMITGVAALDSNVSGKIGLRAVVYYFCTTLIAVILGIVLVVSIKPGVTQKVGEIARTGSTPEVSTVDAMLDLIRNMFPENLVQACFQQYKTKREEVKPPSDPEMNMTEESFTAVMTTAISKNKTKEYKIVGMYSDGINVLGLIVFCLVFGLVIGKMGEKGQILVDFFNALSDATMKIVQIIMCYMPLGILFLIAGKIIEVEDWEIFRKLGLYMATVLTGLAIHSIVILPLIYFIVVRKNPFRFAMGMAQALLTALMISSSSATLPVTFRCAEENNQVDKRITRFVLPVGATINMDGTALYEAVAAVFIAQLNDLDLGIGQIITISITATSASIGAAGVPQAGLVTMVIVLSAVGLPAEDVTLIIAVDWLLDRFRTMVNVLGDAFGTGIVEKLSKKELEQMDVSSEVNIVNPFALESTILDNEDSDTKKSYVNGGFAVDKSDTISFTQTSQF

SEQ ID NO: 770428 - protein, 559 aa, Homo sapiens
SRRSRARLPRKTTGLAGRRARCAIPGGGGNGGGDGGDCSGRLSPLPCAPASRRAAEQPAVPGSPSPRAHGRAQRTIAATAMGKPARKGCEWKRFLKNNWVLLSTVAAVVLGITTGVLVREHSNLSTLEKFYFAFPGEILMRMLKLIILPLIISSMITGVAALDSNVSGKIGLRAVVYYFCTTLIAVILGIVLVVSIKPGVTQKVGEIARTGSTPEVSTVDAMLDLIRNMFPENLVQACFQQYKTKREEVKPPSDPEMNMTEESFTAVMTTAISKNKTKEYKIVGMYSDGINVLGLIVFCLVFGLVIGKMGEKGQILVDFFNALSDATMKIVQIIMCYMPLGILFLIAGKIIEVEDWEIFRKLGLYMATVLTGLAIHSIVILPLIYFIVVRKNPFRFAMGMAQALLTALMISSSSATLPVTFRCAEENNQVDKRITRFVLPVGATINMDGTALYEAVAAVFIAQLNDLDLGIGQIITIRDRFRTMVNVLGDAFGTGIVEKLSKKELEQMDVSSEVNIVNPFALESTILDNEDSDTKKSYVNGGFAVDKSDTISFTQTSQF

SEQ ID NO: 770429 - protein, 604 aa, Homo sapiens; identical to SEQ ID NO: 770427

SEQ ID NO: 770430 - protein, 383 aa, Homo sapiens
MLDLIRNMFPENLVQACFQQYKTKREEVKPPSDPEMNMTEESFTAVMTTAISKNKTKEYKIVGMYSDGINVLGLIVFCLVFGLVIGKMGEKGQILVDFFNALSDATMKIVQIIMCYMPLGILFLIAGKIIEVEDWEIFRKLGLYMATVLTGLAIHSIVILPLIYFIVVRKNPFRFAMGMAQALLTALMISSSSATLPVTFRCAEENNQVDKRITRFVLPVGATINMDGTALYEAVAAVFIAQLNDLDLGIGQIITISITATSASIGAAGVPQAGLVTMVIVLSAVGLPAEDVTLIIAVDWLLDRFRTMVNVLGDAFGTGIVEKLSKKELEQMDVSSEVNIVNPFALESTILDNEDSDTKKSYVNGGFAVDKSDTISFTQTSQF

SEQ ID NO: 770431 - protein, 508 aa, Homo sapiens
SRRSRARLPRKTTGLAGRRARCAIPGGGGNGGGDGGDCSGRLSPLPCAPASRRAAEQPAVPGSPSPRAHGRAQRTIAATAMGKPARKGCEWKRFLKNNWVLLSTVAAVVLGITTGVLVREHSNLSTLEKFYFAFPGEILMRMLKLIILPLIISSMITGVAALDSNVSGKIGLRAVVYYFCTTLIAVILGIVLVVSIKPGVTQKVGEIARTGSTPEVSTVDAMLDLIRNMFPENLVQACFQQYKTKREEVKPPSDPEMNMTEESFTAVMTTAISKNKTKEYKIVGMYSDGINVLGLIVFCLVFGLVIGKMGEKGQILVDFFNALSDATMKIVQIIMCYMPLGILFLIAGKIIEVEDWEIFRKLGLYMATVLTGLAIHSIVILPLIYFIVVRKNPFRFAMGMAQALLTALMISSSSATLPVTFRCAEENNQVDKRITRFVLPVGATINMDGTALYEAVAAVFIAQLNDLDLGIGQIITIRWGMVSHSLSSLIQGLPPVKIVHEGTPRMSQ

SEQ ID NO: 770432 - protein, 211 aa, Homo sapiens [sequence omitted]

SEQ ID NO: 770433 - protein, 169 aa, Homo sapiens
SSRQYGERPPAPPWTQPSVPRRGAATWGQEKAEYATPLGTQEARRASGGRGGVDHGDQGLSPCCGDGGARGRRRLPTFWPSGLLRLRLDSLGALPPEPSRAGRGRLFGLSVVLLKRNAGGEATPREGGPRRRWLRESCSPLPARHSRRRASWVSRWMEGAPPRMPSLPL

SEQ ID NO: 770434 - protein, 159 aa, Homo sapiens
VCLSGCLGLWFAEGCMEAMPSSPAPALGSHRRPELRTTSQRRILTQSESNVTHTLSSTNKRATKPETSSSAALACVPGVPSAAGHGRDGVKQKGPAVTTLIPEEPLCWHERKSQGKGLFKVRLHQWKVSTSPQGSRQPVPFPLTVPTLTRGRLTRNKGP

SEQ ID NO: 770435 - protein, 134 aa, Homo sapiens [sequence omitted]

SEQ ID NO: 770436 - protein, 43 aa, Homo sapiens
VTPEFQVPMAMGKWAEHPQANASKISPFAILTKLCNTCANIFL

SEQ ID NO: 770437 - protein, 551 aa, Homo sapiens
SFFILQLVPELWILNWKKMSIQVEHPAGGYKKLFETVEELSSPLTAHVTGRIPLWLTGSLLRCGPGLFEVGSEPFYHLFDGQALLHKFDFKEGHVTYHRRFIRTDAYVRAMTEKRIVITEFGTCAFPDPCKNIFSRFFSYFRGVEVTDNALVNVYPVGEDYYACTETNFITKINPETLETIKQVDLCNYVSVNGATAHPHIENDGTVYNIGNCFGKNFSIAYNIVKIPPLQADKEDPISKSEIVVQFPCSDRFKPSYVHSFGLTPNYIVFVETPVKINLFKFLSSWSLWGANYMDCFESNETMGVWLHIADKKRKKYLNNKYRTSPFNLFHHINTYEDNGFLIVDLCCWKGFEFVYNYLYLANLRENWEEVKKNARKAPQPEVRRYVLPLNIDKADTGKNLVTLPNTTATAILCSDETIWLEPEVLFSGPRQAFEFPQINYQKYCGKPYTYAYGLGLNHFVPDRLCKLNVKTKETWVWQEPDSYPSEPIFVSHPDALEEDDGVVLSVVVSPGAGQKPAYLLILNAKDLSEVARAEVEINIPVTFHGLFKKS

SEQ ID NO: 770438 - protein, 147 aa, Homo sapiens
LPSPLHKAGQGWSGGLPGTQATSRPLRGRPFLVSAPSATADLVDEEEPLALARKAATVGACEEPGDVAQLRAAQLSAGVGVGAGRPSQSPPDIPSPLLPNNSALLRQGPTFQNTFSVARKKASPVSAYPPVPISKGQGTRVLWAQAH

SEQ ID NO: 770439 - protein, 167 aa, Homo sapiens
MHWGTLCGFLWLWPYLFYVQAVPIQKVQDDTKTLIKTIVTRINDISHTQSVSSKQKVTGLDFIPGLHPILTLSKMDQTLAVYQQILTSMPSRNVIQISNDLENLRDLLHVLAFSKSCHLPWASGLETLDSLGGVLEASGYSTEVVALSRLQGSLQDMLWQLDLSPGC

SEQ ID NO: 770440 - protein, 217 aa, Homo sapiens
MGSTVPRSASVLLLLLLLRRAEQPCGAELTFELPDNAKQCFHEEVEQGVKFSLDYQVITGGHYDVDCYVEDPQGNTIYRETKKQYDSFTYRAEVKGVYQFCFSNEFSTFSHKTVYFDFQVGDEPPILPDMGNRVTALTQMESACVTIHEALKTVIDSQTHYRLREAQDRARAEDLNSRVSYWSVGETIALFVVSFSQVLLLKSFFTEKRPISRAVHS

SEQ ID NO: 770441 - protein, 217 aa, Homo sapiens; identical to SEQ ID NO: 770440

SEQ ID NO: 770442 - protein, 207 aa, Homo sapiens
MGSTVPRSASVLLLLLLLRRAEQPCGAELTFELPDNAKQCFHEEVEQGVKFSLDYQVITGGHYDVDCYVEDPQGNTIYRETKKQYDSFTYRAEVKGVYQFCFSNEFSTFSHKTVYFDFQVGDEPPILPDMGNRVTALTQMESACVTIHEALKTVIDSQTHYRLREAQDRARAEDLNSRVSYWSVGETIALFVVSFSQVLLLKSFFTS

SEQ ID NO: 770443 - protein, 217 aa, Homo sapiens; identical to SEQ ID NO: 770440

SEQ ID NO: 770444 - protein, 217 aa, Homo sapiens; identical to SEQ ID NO: 770440

SEQ ID NO: 770445 - protein, 217 aa, Homo sapiens; identical to SEQ ID NO: 770440

SEQ ID NO: 770446 - protein, 188 aa, Homo sapiens
SLITVSGWHLVSGGCSFDNSNFFMVVKVITGGHYDVDCYVEDPQGNTIYRETKKQYDSFTYRAEVKGVYQFCFSNEFSTFSHKTVYFDFQVGDEPPILPDMGNRVTALTQMESACVTIHEALKTVIDSQTHYRLREAQDRARAEDLNSRVSYWSVGETIALFVVSFSQVLLLKSFFTEKRPISRAVHS

SEQ ID NO: 770447 - protein, 128 aa, Homo sapiens
RPPLYLQASIRPLSNEFSTFSHKTVYFDFQVGDEPPILPDMGNRVTALTQMESACVTIHEALKTVIDSQTHYRLREAQDRARAEDLNSRVSYWSVGETIALFVVSFSQVLLLKSFFTEKRPISRAVHS

SEQ ID NO: 770448 - protein, 217 aa, Homo sapiens
MGSTVPRSASVLLLLLLLRRAEQPCGAELTFELPDNAKQCFHEEVEQGVKFSLDYQVITGGHYDVDCYVEDPQGNTIYRETKKQYDSFTYRAEVKGVYQFCFSNEFSTFSHKTVYFDFQVGDEPPILPDMGNRVTALTQMESACVTIHEALKTVIDSQTHYRLREAQDRARAEDLNSRVSYWSVGETIALFVVSFSQVLLLKSFFTGPSCPRLEQLS

SEQ ID NO: 770449 - protein, 235 aa, Homo sapiens
MGSTVPRSASVLLLLLLLRRAEQPCGAELTFELPDNAKQCFHEEVEQGVKFSLDYQVITGGHYDVDCYVEDPQGNTIYRETKKQYDSFTYRAEVKGVYQFCFSNEFSTFSHKTVYFDFQVGDEPPILPDMGNRVTALTQMESACVTIHEALKTVIDSQTHYRLRGNAPREPGGPRKPRKKNPFLNLRPGKISYPFYNPGWSVGETIALFVVSFSQVLLLKSFFTEKRPISRAVHS

SEQ ID NO: 770450 - protein, 738 aa, Homo sapiens
MRGPPAWPLRLLEPPSPAEPGRLLPVACVWAAASRVPGSLSPFTGLRPARLWGAGPALLWGVGAARRWRSGCRGGGPGASRGVLGLARLLGLWARGPGSCRCGAFAGPGAPRLPRARFPGGPAAAAWAGDEAWRRGPAAPPGDKGRLRPAAAGLPEARKLLGLAYPERRRLAAAVGFLTMSSVISMSAPFFLGKIIDVIYTNPTVDYSDNLTRLCLGLSAVFLCGAAANAIRVYLMQTSGQRIVNRLRTSLFSSILRQEVAFFDKTRTGELINRLSSDTALLGRSVTENLSDGLRAGAQASVGISMMFFVSPNLATFVLSVVPPVSIIAVIYGRYLRKLTKVTQDSLAQATQLAEERIGNVRTVRAFGKEMTEIEKYASKVDHVMQLARKEAVARAGFFGATGLSGNLIVLSVLYKGGLLMGSAHMTVGELSSFLMYAFWVGISIGGLSSFYSELMKGLGAGGRLWELLEREPKLPFNEGVILNEKSFQGALEFKNVHFAYPARPEVPIFQDFSLSIPSGSVTALVGPSGSGKSTVLSLLLRLYDPASGTISLDGHDIRQLNPVWLRSKIGTVSQEPILFSCSIAENIAYGADDPSSVTAEEIQRVAEVANAVAFIRNFPQGFNTVVGEKGVLLSGGQKQRIAIARALLKNPKILLLDEATSALDAENEYLVQEALDRLMDGRTVLVIAHRLSTIKNANMVAVLDQGKITEYGKHEELLSKPNGIYRKLMNKQSFISA

SEQ ID NO: 770451 - protein, 368 aa, Homo sapiens
MTEIEKYASKVDHVMQLARKEAVARAGFFGATGLSGNLIVLSVLYKGGLLMGSAHMTVGELSSFLMYAFWVGISIGGLSSFYSELMKGLGAGGRLWELLEREPKLPFNEGVILNEKSFQGALEFKNVHFAYPARPEVPIFQDFSLSIPSGSVTALVGPSGSGKSTVLSLLLRLYDPASGTISLDGHDIRQLNPVWLRSKIGTVSQEPILFSCSIAENIAYGADDPSSVTAEEIQRVAEVANAVAFIRNFPQGFNTVVGEKGVLLSGGQKQRIAIARALLKNPKILLLDEATSALDAENEYLVQEALDRLMDGRTVLVIAHRLSTIKNANMVAVLDQGKITEYGKHEELLSKPNGIYRKLMNKQSFISA

SEQ ID NO: 770452 - protein, 110 aa, Homo sapiens [sequence omitted]

SEQ ID NO: 770453 - protein, 723 aa, Homo sapiens
MRGPPAWPLRLLEPPSPAEPGRLLPVACVWAAASRVPGSLSPFTGLRPARLWGAGPALLWGVGAARRWRSGCRGGGPGASRGVLGLARLLGLWARGPGSCRCGAFAGPGAPRLPRARFPGGPAAAAWAGDEAWRRGPAAPPGDKGRLRPAAAGLPEARKLLGLAYPERRRLAAAVGFLTMSSVISMSAPFFLGKIIDVIYTNPTVDYSDNLTRLCLGLSAVFLCGAAANAIRVYLMQTSGQRIVNRLRTSLFSSILRQEVAFFDKTRTGELINRLSSDTALLGRSVTENLSDGLRAGAQASVGISMMFFVSPNLATFVLSVVPPVSIIAVIYGRYLRKLTKVTQDSLAQATQLAEERIGNVRTVRAFGKEMTEIEKYASKVDHVMQLARKEAVARAGFFGATGLSGNLIVLSVLYKGGLLMGSAHMTVGELSSFLMYAFWVGISIGGLSSFYSELMKGLGAGGRLWELLEREPKLPFNEGVILNEKSFQGALEFKNVHFAYPARPEVPIFQDFSLSIPSGSVTALVGPSGSGKSTVLSLLLRLYDPASGTISLDGHDIRQEPILFSCSIAENIAYGADDPSSVTAEEIQRVAEVANAVAFIRNFPQGFNTVVGEKGVLLSGGQKQRIAIARALLKNPKILLLDEATSALDAENEYLVQEALDRLMDGRTVLVIAHRLSTIKNANMVAVLDQGKITEYGKHEELLSKPNGIYRKLMNKQSFISA

SEQ ID NO: 770454 - protein, 738 aa, Homo sapiens; identical to SEQ ID NO: 770450

SEQ ID NO: 770455 - protein, 107 aa, Homo sapiens
  misc_feature (5)..(5): Xaa can be any naturally occurring amino acid
GIGKXIMDQSKVLSHIKWSGVTRRLAEDLTTSNSDRLIEETISIAMAKESFAQEECGVIHANEHFGHRFPAVNSLIQRINLRKRRDSLILGGVIGICTILLLLYAFH

SEQ ID NO: 770456 - protein, 181 aa, Homo sapiens
MAIEIEQLLARLTGVNDKMAEYTNSAGVPSLNAALMHTLQRHRDILQDYTHEFHKTKANFMAIRERENLMGSVRKDIESYKSGSGVNNRRTELFLKEHDHLRNSDRLIEETISIAMATKENMTSQRGMLKSIHSKMNTLANRFPAVNSLIQRINLRKRRDSLILGGVIGICTILLLLYAFH

SEQ ID NO: 770457 - protein, 232 aa, Homo sapiens
MAAGTSSYWEDLRKQARQLENELDLKLVSFSKLCTSYSHSSTRDGRRDRYSSDTTPLLNGSSQDRMFETMAIEIEQLLARLTGVNDKMAEYTNSAGVPSLNAALMHTLQRHRDILQDYTHEFHKTKANFMAIRERENLMGSVRKDIESYKSGSGVNNRRTELFLKEHDHLRNSDRLIEETISIAMAKESFANRFPAVNSLIQRINLRKRRDSLILGGVIGICTILLLLYAFH

SEQ ID NO: 770458 - protein, 150 aa, Homo sapiens
MAAGTSSYWEDLRKQARQLENELDLKLVSFSKLCTSYSHSSTRDGRRDRYSSDTTPLLNGSSQDRMFETMAIEIEQLLARLTGVNDKMAEYTNSAGVPSLNAALMHTLQRHRDILQDYTTCIPSTPSQLYVYTRNGPIFMDSLLKIRSVC

SEQ ID NO: 770459 - protein, 132 aa, Homo sapiens [sequence omitted]

SEQ ID NO: 770460 - protein, 250 aa, Homo sapiens
MAAGTSSYWEDLRKQARQLENELDLKLVSFSKLCTSYSHSSTRDGRRDRYSSDTTPLLNGSSQDRMFETMAIEIEQLLARLTGVNDKMAEYTNSAGVPSLNAALMHTLQRHRDILQDYTHEFHKTKANFMAIRERENLMGSVRKDIESYKSGSGVNNRRTELFLKEHDHLRNSDRLIEETISIAMATKENMTSQRGMLKSIHSKMNTLANRFPAVNSLIQRINLRKRRDSLILGGVIGICTILLLLYAFH

SEQ ID NO: 770461 - protein, 175 aa, Homo sapiens
MAAGTSSYWEDLRKQARQLENELDLKLVSFSKLCTSYSHSSTRDGRRDRYSSDTTPLLNGSSQDRMFETMAIEIEQLLARLTGVNDKMAEYTNSAGVPSLNAALMHTLQRHRDILQVIYWARDVFIITGVWVFFFNPCIGYVHIYLKGQREKSEKINAMLKGLVLLFFGVTIIKF

SEQ ID NO: 770462 - protein, 233 aa, Homo sapiens
MAAGTSSYWEDLRKQARQLENELDLKLVSFSKLCTSYSHSSTRDGRRDRYSSDTTPLLNGSSQDRMFETMAIEIEQLLARLTGVNDKMAEYTNSAGVPSLNAALMHTLQRHRDILQDYTHEFHKTKANFMAIRERENLMGSVRKDIESYKSGSGVNNRRTELFLKEHDHLRNSDRLIEETISIAMATKENMTSQRGMLKSIHSHPRKGGTPHLGGVFGTGPSRWWWMGQWWEI

SEQ ID NO: 770463 - protein, 110 aa, Homo sapiens
MAASQGNFVFTCFWKEHTELARAGLCFPLCSFLLPRMQMRWQVPQQPSPTIRHGFLTFGSGSTETEGRGLGVRWWHLHHRPTDSVSSPSGKVTEMKSLPYGRQGYSEFSV

SEQ ID NO: 770464 - protein, 386 aa, Homo sapiens
GTRGVSGWRGSLFGASPLNPSWGHGGQPDTPARMELTELLLVVMLLLTARLTLSSPAPPACDLRVLSKLLRDSHVLHSRLSQCPEVHPLPTPVLLPAVDFSLGEWKTQMEETKAQDILGAVTLLLEGVMAARGQLGPTCLSSLLGQLSGQVRLLLGALQSLLGTQLPPQGRTTAHKDPNAIFLSFQHLLRGKVRFLMLVGGSTLCVRRAPPTTAVPSRTSLVLTLNELPNRTSGLLETNFTASARTTGSGLLKWQQGFRAKIPGLLNQTSRSLDQIPGYLNRIHELLNGTRGLFPGPSRRTLGAPDISSGTSDTGSLPPNLQPGYSPSPTHPPTGQYTLFPLPPTLPTPVVQLHPLLPDPSAPTPTPTSPLLNTSYTHSQNLSQEG

SEQ ID NO: 770465 - protein, 424 aa, Homo sapiens
FLPICSPEGCLLCTWVLEPFSTRIDSSPLARLCPTLLCPEVQEPKPPPWPQEGFRGEAPNREPRQPDTPARMELTELLLVVMLLLTARLTLSSPAPPACDLRVLSKLLRDSHVLHSRLSQCPEVHPLPTPVLLPAVDFSLGEWKTQMEETKAQDILGAVTLLLEGVMAARGQLGPTCLSSLLGQLSGQVRLLLGALQSLLGTQLPPQGRTTAHKDPNAIFLSFQHLLRGKVRFLMLVGGSTLCVRRAPPTTAVPSRTSLVLTLNELPNRTSGLLETNFTASARTTGSGLLKWQQGFRAKIPGLLNQTSRSLDQIPGYLNRIHELLNGTRGLFPGPSRRTLGAPDISSGTSDTGSLPPNLQPGYSPSPTHPPTGQYTLFPLPPTLPTPVVQLHPLLPDPSAPTPTPTSPLLNTSYTHSQNLSQEG

SEQ ID NO: 770466 - protein, 319 aa, Homo sapiens
GTRGVSGWRGSLFGASPLNPSWGHGGQPDTPARMELTELLLVVMLLLTARLTLSSPAPPACDLRVLSKLLRDSHVLHSRLSQCPEVHPLPTPVLLPAVDFSLGEWKTQMEETKAQDILGAVTLLLEGVMAARGQLGPTCLSSLLGQLSGQVRLLLGALQSLLGTQLPPQGRTTAHKDPNAIFLSFQHLLRGKDFWIVGDKLHCLSQNYWLWASEVAAGIQSQDSWSAEPNLQVPGPNPRIPEQDTRTLEWNSWTLSWTLTQDPRSPGHFLRNIRHRLPATQPPAWIFSFPNPSSYWTVYALPSSTHLAHPCGPAPPPAS

SEQ ID NO: 770467 - protein, 169 aa, Homo sapiens
GTRGVSGWRGSLFGASPLNPSWGHGGQPDTPARMELTELLLVVMLLLTARLTLSSPAPPACDLRVLSKLLRDSHVLHSRLSQCPEVHPLPTPVLLPAVDFSLGEWKTQMEETKAQDILGAVTLLLEGVMAARGQLGPTCLSSLLGQLSGQVRLLLGALQSLLGTQTREA

SEQ ID NO: 770468 - protein, 122 aa, Homo sapiens [sequence omitted]

SEQ ID NO: 770469 - protein, 76 aa, Homo sapiens
SPSSPTFPLILLPLILLQLPLTTNDFHISSPVLTVLQNPTRGLSGVLNNATRICVIASHVLSSAIHYVRPQGPKEG

SEQ ID NO: 770470 - protein, 160 aa, Homo sapiens
SRVSGARAGCHDPNPPGGRGPAGKANEYPLPLHRLPVGFLCKARRRVLKSAINATRCKASKCGAIHVYVGNRFSIKVQVERRGLHIFISIYLLRRNLILSPRLECSGAISTRCFPPLPGFRRFLCLSLPSSWDYRHAPLLLANFCIFSSRSGCSRTPDLK

SEQ ID NO: 770471 - protein, 222 aa, Homo sapiens
LKYGAFVPPELFGSEFFMGRLMRRIPEPRICFLEAIWSNIFSLNLLDAWYDLTSSGESWKQHIKDKTRSLEKEPLTTSGTSSRLEASWLQPGTALAQAFKGFLTGRPLHQRSPNFLQGLQLHQDYCSHKDFSTWADYQLDSMPSQLTPKEPRLCLVDAAYFINTSSPSMFRPGRRLDLILSFDYSLSAPFEVPWSPQGNPSAQPGQAPEASSRATEPLPHTA

SEQ ID NO: 770472 - protein, 136 aa, Homo sapiens
MNKPLLDWERNFAAVLDGAKGHSDDDYDDPELRMEETWQSIKILPARPIKESEYADTHYFKVAMDTPLPLDTRTSISIGQPTWNTQTRLERVDKPISKDVRSQNINRRCIRKKEQDSFTTSSASHNTSEEVPTLAP

SEQ ID NO: 770473 - protein, 170 aa, Homo sapiens
RITINGESPKHRSWHTLTPIADDKLFLCGGLSADNIPLSDGWIHNVTTNCWKQLTHLPKTRPRLWHTACLGKENEIMVFGGSKDDLLALDTGHCNDLLIFQTQPYSLLRSCLDCIGKNSIMLESQISLLPPKLLQQVLKKITFWAAANHREEQRVQKEETENKYQWISSN

SEQ ID NO: 770474 - protein, 205 aa, Homo sapiens
IQILPAEKLPSILPWTPDPGLEELFTALSPSLKPCAMSLQKRVFPRRQNGTHEVAAKPCPVATRQPRARDQERKKGSFTSSLRMESHSRAGKSRKSAKFRSISRSLMLCNAKTSDDGSSPDEKYPDPFEISLAQGKEGIFHSSVQLADTSEAGPSSVPDLALASEAAQLQAAGNDRGKTCRRIFFMKESSTASSREKPGKSRSTK

SEQ ID NO: 770475 - protein, 103 aa, Homo sapiens
MLPLWKLLHVSLYPQSMAAVIRIPQGGADEDPCTSVPVPLIRDLGWGVPICTCSFSSHALCRSLCRVSIILIRSTGDAGDSVIIVPLEGQRQSVCADLILGEC

SEQ ID NO: 770476 - protein, 103 aa, Homo sapiens
MSQENTKNKTKTPLALPNEKATSLNCRAFWQLRVFTPRETAALAPAGKTGLPSTPPRLPSPSGGFFSASSQTERRQVTEQGLNRSHARLSWGRPLQITLANLN

SEQ ID NO: 770477 - protein, 103 aa, Homo sapiens
AHSGQASEPASCTRPPGDYSAGITGKSHCTQLLCTFKTLQMIPRLGASALAEVPMMWTRGLLMQQEHSLAPALCHLGTPARAPLHAWQIRACELPISSPLPLM

SEQ ID NO: 770478 - protein, 386 aa, Homo sapiens
GLPETSHKLNRESGLNKDAFPQYIHNMLSTSRSRFIRNTNESGEEVTTFFDYDYGAPCHKFDVKQIGAQLLPPLYSLVFIFGFVGNMLVVLILINCKKLKCLTDIYLLNLAISDLLFLITLPLWAHSAANEWVFGNAMCKLFTGLYHIGYFGGIFFIILLTIDRYLAIVHAVFALKARTVTFGVVTSVITWLVAVFASVPGIIFTKCQKEDSVYVCGPYFPRGWNNFHTIMRNILGLVLPLLIMVICYSGILKTLLRCRNEKKRHRAVRVIFTIMIVYFLFWTPYNIVILLNTFQEFFGLSNCESTSQLDQATQVTETLGMTHCCINPIIYAFVGEKFRRYLSVFFRKHITKRFCKQCPVFYRETVDGVTSTNTPSTGEQEVSAGL

SEQ ID NO: 770479 - protein, 400 aa, Homo sapiens
GLPETSHKLNRESGLNKDAFPQYIHNMLSTSRSRFIRNTNESGEEVTTFFDYDYGAPCHKFDVKQIGAQLLPPLYSLVFIFGFVGNMLVVLILINCKKLKCLTDIYLLNLAISDLLFLITLPLWAHSAANEWVFGNAMCKLFTGLYHIGYFGGIFFIILLTIDRYLAIVHAVFALKARTVTFGVVTSVITWLVAVFASVPGIIFTKCQKEDSVYVCGPYFPRGWNNFHTIMRNILGLVLPLLIMVICYSGILKTLLRCRNEKKRHRAVRVIFTIMIVYFLFWTPYNIVILLNTFQEFFGLSNCESTSQLDQATQVTETLGMTHCCINPIIYAFVGEKFRSLFHIALGCRIAPLQKPVCGGPGVRPGKNVKVTTQGLLDGRGKGKSIGRAPEASLQDKEGA

SEQ ID NO: 770480 - protein, 186 aa, Homo sapiens
MEQPKDGAGPEGNNLSLPSSGTEPWPPAPLPAPPPLLLNSTDPTHLGLPESVASVTVPIRLDTLSCLLHSALLGAYTFQQALPSCPCCSQAGHSQPGAVRRPPRGRGGWEVRHRPGWGRGLHRRGLGRAEQPERGRAGGPGAGPRTPPMTLPSPPTLPAQDGKKEARGPEPPLETPLAAEDWETEY

SEQ ID NO: 770481 - protein, 151 aa, Homo sapiens
MSSGSNSSQQLDLLSQLVNTANGRPGTMRSSPEEPCPHPLGSRSEAYRGCLHKPHQNRGRPPAGDPHCIPRLRGSTCSSGEKFSECFADKIDQMQARLPAAGAACACGGPTSAGHQRLGVRGRPLSAPPPPKPVREGKTPKSTDWAVKEDE

SEQ ID NO: 770482 - protein, 183 aa, Homo sapiens
MNGFSTEEDSREGPPAAPAAAAPGYGQSCCLIEDGERCVRPAGNASFSKRVQKSISQKKLKLDIDKSVRHLYICDFHKNFIQSVRNKRKRKTSDDGGDSPEHDTDIPEVDLFQLQVNTLRRYKRHYKLQTRPGFNKAQLAETVSRHFRNIPVNEKETLAYFIYMVKSNKSRLDQKSEGGKQLE

SEQ ID NO: 770483 - protein, 123 aa, Homo sapiens
MNGFSTEEDSREGPPAAPAAAAPGYGQSCCLIEDGERCVRPAGNASFSKRVQKSISQKKLKLDIDKSVRHLYICDFHKNFIQSVRNKRKRKTSDDGGDSPEHDTDIPEVKVKETSCGSWKNGF

SEQ ID NO: 770484 - protein, 113 aa, Homo sapiens
MNGFSTEEDSREGPPAAPAAAAPGYGQSCCLIEDGERCVRPAGNASFSKRVQKSISQKKLKLDIDKSVRHLYICDFHKNFIQSVRNKRKRKTSDDGGDSPEHDTDIPECSPPA

SEQ ID NO: 770485 - protein, 183 aa, Homo sapiens; identical to SEQ ID NO: 770482

SEQ ID NO: 770486 - protein, 142 aa, Homo sapiens
MNGFSTEEDSREGPPAAPAAAAPGYGQSCCLIEDGERCVRPAGNASFSKRVQKSISQKKLKLDIDKSVDLFQLQVNTLRRYKRHYKLQTRPGFNKAQLAETVSRHFRNIPVNEKETLAYFIYMVKSNKSRLDQKSEGGKQLE

SEQ ID NO: 770487 - protein, 118 aa, Homo sapiens
ATEDPGVAMGRAPPVVTGIVKNKPYPKSRFCRGVPDAKIRIFDLGRKKAKVDEFPLCGHMVSDEYEQLSSEALEAARICANKYMVKSCGKDGFHIRVRLHPFHVIRINKMLSCAGADR

SEQ ID NO: 770488 - protein, 99 aa, Homo sapiens
WRLLWEVLLAGTLPLGVCKELSSYLDLLTASSPGHQERPGLEDGKEHTSQRILGGGFLQAVNLQPRLPASYGSNHFGSHRRLHIAIHREGEEMEKAKTF

SEQ ID NO: 770489 - protein, 90 aa, Homo sapiens
STSLPFSHPHPTAGSQESHSPSPLIPVSHNCPVNPQMQARFHLPQAPSFCFGITRGQAALQAPKFTLSYSWKSPAPGLTEPGEGISSHHS

SEQ ID NO: 770490 - protein, 101 aa, Homo sapiens
QTLPHHLRSQAPTYIGRIISATHHLQHHSCHRLLYVEFFPCLHLTLLSHCRDLSPATVLPLPSDGLLPGCIAVTQQILTPRQNSQEMPTEDADVIWFTDGP

SEQ ID NO: 770491 - protein, 366 aa, Homo sapiens
MAARTVIIDHGSGFLKAGTAGWNEPQMVFPNIVNYLPCKENPGPSYARRRVSLGIDICHPDTFSYPIERGRILNWEGVQYLWSFVLENHRREQEVPPVIITETPLREPADRKKMLEILFELLHVPSVLLADQLQMSLYASGLLTGVVVDSGYGLTRVQPFHQGRPLPASGKTLEFAGQDLSAYLLKSLFKEDCDRRCLFQLETVAVTQMNKCYVPQNLGEALDFRERQQSALDESNTYQLPDGSRVELTPMQRVAPEMFFSPQVFEQPGPSIPRAIVESVESCEISLRPLLVSHVMACGGNTLYPGFTKRLFRELMGDHVSSTKATVWEGSNRNFSVWLGASVVAHLSTYQSEWMSREEYGEHMRM

SEQ ID NO: 770492 - protein, 858 aa, Homo sapiens
MGEINQVAVEKYLEENPQFAKEYFDRKLRVEVLGEIFKNSQVPVQSSMSFSELTQVEESALCLELLWTVQEEGGTPEQGVHRALQRLAHLLQADRCSMFLCRSRNGIPEVASRLLDVTPTSKFEDNLVGPDKEVVFPLDIGIVGWAAHTKKTHNVPDVKKNSHFSDFMDKQTGYVTKNLLATPIVVGKEVLAVIMAVNKVNASEFSKQDEEVFSKYLNFVSIILRLHHTSYMYNIESRRSQILMWSANKVFEELTDVERQFHKALYTVRSYLNCERYSIGLLDMTKEKEFYDEWPIKLGEVEPYKGPKTPDGREVNFYKIIDYILHGKEEIKVIPTPPADHWTLISGLPTYVAENGFICNMMNAPADEYFTFQKGPVDETGWVIKNVLSLPIVNKKEDIVGVATFYNRKDGKPFDEHDEYITETLTQFLGWSLLNTDTYDKMNKLENRKDIAQEMLMNQTKATPEEIKSILKFQEKLNVDVIDDCEEKQLVAILKEDLPDPRSAELYEFRFSDFPLTEHGLIKCGIRLFFEINVVEKFKVPVEVLTRWMYTVRKGYRAVTYHNWRHGFNVGQTMFTLLMTGRLKKYYTDLEAFAMLAAAFCHDIDHRGTNNLYQMKSTSPLARLHGSSILERHHLEYSKTLLQDESLNIFQNLNKRQFETVIHLFEVAIIATDLALYFKKRTMFQKIVDACEQMQTEEEAIKYVTVDPTKKEIIMAMMMTACDLSAITKPWEVQSQVALMVANEFWEQGDLERTVLQQQPIPMMDRNKRDELPKLQVGFIDFVCTFVYKEFSRFHKEITPMLSGLQNNRVEWKSLADEYDAKMKVIEEEAKKQEGGAEKAAEDSGGGDDKKSKTCLML

SEQ ID NO: 770493 - protein, 350 aa, Homo sapiens
MLHILHGDMGASRPALKFQEKLNVDVIDDCEEKQLVAILKEDLPDPRSAELYEFRFSDFPLTEHGLIKCGIRLFFEINVVEKFKVPVEVLTRWMYTVRKGYRAVTYHNWRHGFNVGQTMFTLLMTGRLKKYYTDLEAFAMLAAAFCHDIDHRGTNNLYQMKSTSPLARLHGSSILERHHLEYSKTLLQDESLNIFQNLNKRQFETVIHLFEVAIIATDLALYFKKRTMFQKIVDACEQMQTEEEAIKYVTVDPTKKEIIMAMMMTACDLSAITKPWEVQSQVALMVANEFWEQGDLERTVLQQQPIPMMDRNKRDELPKLQVGFIDFVCTFVYKLLKIQEVVMTKSPKHV

SEQ ID NO: 770494 - protein, 805 aa, Homo sapiens
MGEINQVAVEKYLEENPQFAKEYFDRKLRVEVLGEIFKNSQVPVQSSMSFSELTQVEESALCLELLWTVQEEGGTPEQGVHRALQRLAHLLQADRCSMFLCRSRNGIPEVASRLLDVTPTSKFEDNLVGPDKEVVFPLDIGIVGWAAHTKKTHNVPDVKKNSHFSDFMDKQTGYVTKNLLATPIVVGKEVLAVIMAVNKVNASEFSKQDEEVFSKYLNFVSIILRLHHTSYMYNIESRRSQILMWSANKVFEELTDVERQFHKALYTVRSYLNCERYSIGLLDMTKEKEFYDEWPIKLGEVEPYKGPKTPDGREVNFYKIIDYILHGKEEIKVIPTPPADHWTLISGLPTYVAENGFICNMMNAPADEYFTFQKGPVDETGWVIKNVLSLPIVNKKEDIVGVATFYNRKDGKPFDEHDEYITETLTQFLGWSLLNTDTYDKMNKLENRKDIAQEMLMNQTKATPEEIKSILKFQEKLNVDVIDDCEEKQLVAILKEDLPDPRSAELYEFRFSDFPLTEHGLIKCGIRLFFEINVVEKFKVPVEVLTRWMYTVRKGYRAVTYHNWRHGFNVGQTMFTLLMTGRLKKYYTDLEAFAMLAAAFCHDIDHRGTNNLYQMKSTSPLARLHGSSILERHHLEYSKTLLQDESLNIFQNLNKRQFETVIHLFEVAIIATDLALYFKKRTMFQKIVDACEQMQTEEEAIKYVTVDPTKKEIIMAMMMTACDLSAITKPWEVQSQVALMVANEFWEQGDLERTVLQQQPIPMMDRNKRDELPKLQVGFIDFVCTFVYKLLKIQEVVMTKSPKHV

SEQ ID NO: 770495 - protein, 85 aa, Homo sapiens
TTNTLSPTFYDFITHQINLIPITIKQSRNELDMYQRGEAGGGWRLPEGALSCGVAALRVDFGISVLQKLNIPISTQARRWKPRSA

SEQ ID NO: 770496 - protein, 91 aa, Homo sapiens
HQPPEWLGLQQCMRAPVAPHPQQHVVFGVLDFRHSNSQLMRHPLMELFHPSNLLQMPNDCRMVDAEFFSNFSCSFKRISFDDCSQLVVINF

SEQ ID NO: 770497 - protein, 575 aa, Homo sapiens
AAVEAVNVFHHLFYEGQVDIYNINDPLKETATIGFINNFGQIPKQLFKKPHPPKRVRSRLNGDNAGISVLPGSTSDKIFFHHLDNLRPSLTPVKELKEPVGQIVCTDKGILAVEQNKAMTVYECLSEWGQILCAICPNPKLVITGGTSTVVCVWEMGTSKEKAKTVTLKQALLGHTDTVTCATASLAYHIIVSGSRDRTCIIWDLNKLSFLTQLRGHRAPVSALCINELTGDIVSCAGTYIHVWSINGNPIVSVNTFTGRSQQIICCCMSEMNEWDTQNVIVTGHSDGVVRFWRMEFLQVPETPAPEPAEVLEMQEDCPEAQIGQEAQDEDSSDSEADEQSISQDPKDTPSQPSSTSHRPRAASCRATAAWCTDSGSDDSRRWSDQLSLDEKDGFIFVNYSEGQTRAHLQGPLSHPHPNPIEVRNYSRLKPGYRWERQLVFRSKLTMHTAFDRKDNAHPAEVTALGISKDHSRILVGDSRGRVFSWSVSDQPGRSAADHWVKDEGGDSCSGCSVRFSLTERRHHCRNCGQLFCQKCSRFQSEIKRLKISSPVRVCQNCYYNLQHERGSEDGPRNC

SEQ ID NO: 770498 - protein, 478 aa, Homo sapiens
TFAWGYADLSCRLGTYESDKAMTVYECLSEWGQILCAICPNPKLVITGGTSTVVCVWEMGTSKEKAKTVTLKQALLGHTDTVTCATASLAYHIIVSGSRDRTCIIWDLNKLSFLTQLRGHRAPVSALCINELTGDIVSCAGTYIHVWSINGNPIVSVNTFTGRSQQIICCCMSEMNEWDTQNVIVTGHSDGVVRFWRMEFLQVPETPAPEPAEVLEMQEDCPEAQIGQEAQDEDSSDSEADEQSISQDPKDTPSQPSSTSHRPRAASCRATAAWCTDSGSDDSRRWSDQLSLDEKDGFIFVNYSEGQTRAHLQGPLSHPHPNPIEVRNYSRLKPGYRWERQLVFRSKLTMHTAFDRKDNAHPAEVTALGISKDHSRILVGDSRGRVFSWSVSDQPGRSAADHWVKDEGGDSCSGCSVRFSLTERRHHCRNCGQLFCQKCSRFQSEIKRLKISSPVRVCQNCYYNLQHERGSEDGPRNC

SEQ ID NO: 770499 - protein, 575 aa, Homo sapiens; identical to SEQ ID NO: 770497

SEQ ID NO: 770500 - protein, 575 aa, Homo sapiens; identical to SEQ ID NO: 770497

SEQ ID NO: 770501 - protein, 264 aa, Homo sapiens
AAVEAVNVFHHLFYEGQVDIYNINDPLKETATIGFINNFGQIPKQLFKKPHPPKRVRSRLNGDNAGISVLPGSTSDKIFFHHLDNLRPSLTPVKELKEPVGQIVCTDKGILAVEQNKAMTVYECLSEWGQILCAICPNPKLVITGGTSTVVCVWEMGTSKEKAKTVTLKQALLGHTDTVTCATASLAYHIIVSGSRDRTCIIWDLNKLSFLTQLRGHRAPVSALCINELTGGNSELMSIKRPLQVAQETITKVQRYKQKEEQTL

SEQ ID NO: 770502 - protein, 281 aa, Homo sapiens
MEFLQVPETPAPEPAEVLEMQEDCPEAQIGQEAQDEDSSDSEADEQSISQDPKDTPSQPSSTSHRPRAASCRATAAWCTDSGSDDSRRWSDQLSLDEKDGFIFVNYSEGQTRAHLQGPLSHPHPNPIEVRNYSRLKPGYRWERQLVFRSKLTMHTAFDRKDNAHPAEVTALGISKDHSRILVGDSRGRVFSWSVSDQPGRSAADHWVKDEGGDSCSGCSVRFSLTERRHHCRNCGQLFCQKCSRFQSEIKRLKISSPVRVCQNCYYNLQHERGSEDGPRNC

SEQ ID NO: 770503 - protein, 281 aa, Homo sapiens; identical to SEQ ID NO: 770502

SEQ ID NO: 770504 - protein, 575 aa, Homo sapiens; identical to SEQ ID NO: 770497

SEQ ID NO: 770505 - protein, 290 aa, Homo sapiens
AAVEAVNVFHHLFYEGQVDIYNINDPLKETATIGFINNFGQIPKQLFKKPHPPKRVRSRLNGDNAGISVLPGSTSDKIFFHHLDNLRPSLTPVKELKEPVGQIVCTDKGILAVEQNKAMTVYECLSEWGQILCAICPNPKLVITGGTSTVVCVWEMGTSKEKAKTVTLKQALLGHTDTVTCATASLAYHIIVSGSRDRTCIIWDLNKLSFLTQLRGHRAPVSALCINELTGDIVSCAGTYIHVWSINGNPIVSVNTFTGRSQQIICCCMSEMNEWDTQNVIAVSWGSSER

SEQ ID NO: 770506 - protein, 129 aa, Homo sapiens
MILDYLQQTQTAHLLFTPCKRPRESLEGLFFFSVLFYQSSKYCNFHSKWSQWGPISCPPDPLLQPIQQGKTQLCFLEGSHRGIKTAQPSLAPRRVPEPRARTWGMRTPKAGTGTARSPAAPSCLFTALS

SEQ ID NO: 770507 - protein, 43 aa, Homo sapiens
MAARAVFLALSAQLLQARLMKEESPVVSWRLEPEDGTALCFIF

SEQ ID NO: 770508 - protein, 139 aa, Homo sapiens
MSWRGRSTYYWPRPRRYVQPPEMIGPMRPEQFSDEVEPATPEEGEPATQRQDPAAAQEGEDEGASAGQGPKPEADSQEQGHPQTGCECEDGPDGQEMDPPNPEEVKTPEEEMRSHYVAQTGILWLLMNNCFLNLSPRKP

SEQ ID NO: 770509 - protein, 117 aa, Homo sapiens
MSWRGRSTYYWPRPRRYVQPPEMIGPMRPEQFSDEVEPATPEEGEPATQRQDPAAAQEGEDEGASAGQGPKPEADSQEQGHPQTGCECEDGPDGQEMDPPNPEEVKTPEEGEKQSQC

SEQ ID NO: 770510 - protein, 139 aa, Homo sapiens; identical to SEQ ID NO: 770508

SEQ ID NO: 770511 - protein, 117 aa, Homo sapiens; identical to SEQ ID NO: 770509

SEQ ID NO: 770512 - protein, 118 aa, Homo sapiens
MNLSRGRSTYYWPRPRRYVQPPEMIGPMRPEQFSDEVEPATPEEGEPATQRQDPAAAQEGEDEGASAGQGPKPEADSQEQGHPQTGCECEDGPDGQEMDPPNPEEVKTPEEGEKQSQC

SEQ ID NO: 770513 - protein, 182 aa, Homo sapiens
MATDSGDPASTEDSEKPDGISFENRVPQVAATLTVEARLKEKNSTFSASGETVERKRFFRKSVEMTEDDKVAESSPKDERIKAAMNIPRVDKLPSNVLRGGQEVKYEQCSKSTSEISKDCFKEKNEKEMEEEAEMKAVATSPSGRFLKFDIELGRGAFKTVYKGLDTETWVEVAWCELQVGI

SEQ ID NO: 770514 - protein, 1743 aa, Homo sapiens
MATDSGDPASTEDSEKPDGISFENRVPQVAATLTVEARLKEKNSTFSASGETVERKRFFRKSVEMTEDDKVAESSPKDERIKAAMNIPRVDKLPSNVLRGGQEVKYEQCSKSTSEISKDCFKEKNEKEMEEEAEMKAVATSPSGRFLKFDIELGRGAFKTVYKGLDTETWVEVAWCELQDRKLTKAEQQRFKEEAEMLKGLQHPNIVRFYDSWESILKGKKCIVLVTELMTSGTLKTYLKRFKVMKPKVLRSWCRQILKGLQFLHTRTPPIIHRDLKCDNIFITGPTGSVKIGDLGLATLMRTSFAKSVIGTPEFMAPEMYEEHYDESVDVYAFGMCMLEMATSEYPYSECQNAAQIYRKVTSGIKPASFNKVTDPEVKEIIEGCIRQNKSERLSIRDLLNHAFFAEDTGLRVELAEEDDCSNSSLALRLWVEDPKKLKGKHKDNEAIEFSFNLETDTPEEVAYEMVKSGFFHESDSKAVAKSIRDRVTPIKKTREKKPAGCLEERRDSQCKSMGNVFPQPQNTTLPLAPAQQTGAECEETEVDQHVRQQLLQRKPQQHCSSVTGDNLSEAGAASVIHSDTSSQPSVAYSSNQTMGSQMVSNIPQAEVNVPGQIYSSQQLVGHYQQVSGLQKHSKLTQPQILPLVQGQSTVLPVHVLGPTVVSQPQVSPLTVQKVPQIKPVSQPVGAEQQAALLKPDLVRSLNQDVATTKENVSSPDNPSGNGKQDRIKQRRASCPRPEKGTKFQLTVLQVSTSGDNMVECQLETHNNKMVTFKFDVDGDAPEDIADYMVEDNFVLESEKEKFVEELRAIVGQAQEILHVHFATERATGVDSITVDSNSSQTGSSEQVQINSTSTQTSNESAPQSSPVGRWRFCINQTIRNRETQSPPSLQHSMSAVPGRHPLPSPKNTSNKEISRDTLLTIENNPCHRALFTSKSEHKDVVDGKISECASVETKQPAILYQVEDNRQIMAPVTNSSSYSTTSVRAVPAECEGLTKQASIFIPVYPCHQTASQADALMSHPGESTQTSGNSLTTLAFDQKPQTLSVQQPAMDAEFISQEGETTVNTEASSPKTVIPTQTPGLEPTTLQPTTVLESDGERPPKLEFADNRIKTLDEKLRNLLYQEHSISSIYPESQKDTQSIDSPFSSSAEDTLSCPVTEVIAISHCGIKDSPVQSPNFQQTGSKLLSNVAASQPANISVFKRDLNVITSVPSELCLHEMSSDASLPGDPEAYPAAVSSGGAIHLQTGVETEEMRSAIAPDPIPLTRESTADTRALNRCKAMSGSFQRGRFQVITIPQQQSAKMTSFGIEHISVFSETNHSSEEAFIKTAKSQLVEIEPATQNPKTSFSYEKLQALQETCKENKGVPKQGDNFLSFSAACETDVSSVTPEKEFEETSATGSSMQSGSELLLKEREILTAGKQPSSDSEFSASLAGSGKSVAKTGPESNQCLPHHEEQAYAQTQSSLFYSPSSPMSSDDESEIEDEDLKVELQRLREKHIQEVVNLQTQQNKELQELYERLRSIKDSKTQSTEIPLPPASPRRPRSFKSKLRSRPQSLTHVDNGIVATDPLCVESNAASCQQSPASKKGMFTDDLHKLVDDWTKEAVGNSLIKPSLNQLKQSQHKLETENWNKVSENTPSTMGYTSTWISSLSQIRGAVPTSLPQGLSLPSFPGPLSSYGMPHVCQYNAVAGAGYPVQWVGISGTTQQSVVIPAQSGGPFQPGMNMQAFPTSSVQNPATIPPGPK

SEQ ID NO: 770515 - protein, 1743 aa, Homo sapiens; identical to SEQ ID NO: 770514

SEQ ID NO: 770516 - protein, 81 aa, Homo sapiens [sequence omitted]

SEQ ID NO: 770517 - protein, 234 aa, Homo sapiens
  misc_feature (7)..(7): Xaa can be any naturally occurring amino acid
KQAVPAXVYGSGCKQAKPHSSRWRRSCCSRWGLPSRPLGEAPRPRQQVESSSWPEIDFSEKLCGAPAAGLPGAEEPLNPAPADLTAHSLGPHPPRTPEPSPTSSPRDQAKRVVSEEPAEKGKARPAEKDAKPVEAETSGMGDLPWAPPEAQAPSTAGAGDVAEHQVAPARFLQGAWRQAAGWLCRETGAAPGSAQAGPPETAHAADPQPRGPQAPPRLPPSLSPERVHPGQPAA

SEQ ID NO: 770518 - protein, 30 aa, Homo sapiens
MAPASKNAKEGSRSHGRRRWRKDKAKGERA

SEQ ID NO: 770519 - protein, 86 aa, Homo sapiens
MAKLTLLTGLLLVLTAEIGSAYQLTCYFTNWAQNQPGLGCFKPDDIDPCLCTHLIYAFAGMQNNEITTIEWDDMTLYQAFNGLKNK

SEQ ID NO: 770520 - protein, 123 aa, Homo sapiens
QRIPCRLSTLQASLPLSTTQAPAKGFLPTNQFFIFSHPLPESPPYPNSVSLLTSSNSYYRFVVVVVLRQSLSLSPRLEHSGTIPAHCNLHLRGSSDFPTSASRVAGITGMSYHAQPVVVYKQG

SEQ ID NO: 770521 - protein, 501 aa, Homo sapiens
METILEQQRRYHEEKERLMDVMAKEMLTKKSTLRDQINSDHRTRAMQDRYMEVSGNLRDLYDDKDGLRKEELNAISGPNEFAEFYNRLKQIKEFHRKHPNEICVPMSVEFEELLKARENPSEEAQNLVEFTDEEGYGRYLDLHDCYLKYINLKASEKLDYITYLSIFDQLFDIPKERKNAEYKRYLEMLLEYLQDYTDRVKPLQDQNELFGKIQAEFEKKWENGTFPGWPKETSSALTHAGAHLDLSAFSSWEELASLGLDRLKSALLALGLKCGGTLEERAQRLFSTKGKSLESLDTSLFAKNPKSKGTKRDTERNKDIAFLEAQIYEYVEILGEQRHLTHENVQRKQARTGEEREEEEEEQISESESEDEENEIIYNPKNLPLGWDGKPIPYWLYKLHGLNINYNCEICGNYTYRGPKAFQRHFAEWRHAHGMRCLGIPNTAHFANVTQIEDAVSLWAKLKLQKASERWQPDTEEEYEDSSGNVVNKKTYEDLKRQGLL

SEQ ID NO: 770522 - protein, 219 aa, Homo sapiens
METILEQQRRYHEEKERLMDVMAKEMLTKKSTLRDQINSDHRTRAMQDRYMEVSGNLRDLYDDKDGLRKEELNAISGPNEFAEFYNRLKQIKEFHRKHPNEICVPMSVEFEELLKARENPSEEAQNLVEFTDEEGYGRYLDLHDCYLKYINLKASEKLDYITYLSIFDQLFDIPKERKNAEYKRYLEMPARDTIQGTTPDSECKPSPRSGMNFSGKHSG

SEQ ID NO: 770523 - protein, 219 aa, Homo sapiens; identical to SEQ ID NO: 770522

SEQ ID NO: 770524 - protein, 501 aa, Homo sapiens; identical to SEQ ID NO: 770521

SEQ ID NO: 770525 - protein, 483 aa, Homo sapiens
METILEQQRRYHEEKERLMDVMAKEMLTKKSTLRDQINSDHRTRAMQDRYMEVSGNLRDLYDDKDGLRKEELNAISGPNEFAEFYNRLKQIKEFHRKHPNEICVPMSVEFEELLKARENPSEEAQNLVEFTDEEGYGRYLDLHDCYLKYINLKASEKLDYITYLSIFDQLFDIPKERKNAEYKRYLEMLLEYLQDYTDRVKPLQDQNELFGKIQAEFEKKWENGTFPGWPKETSSALTHAGAHLDLSAFSSWEELASLGLDRLKSALLALGLKCGGTLEERAQRLFSTKGKSLESLDTSLFAKNPKSKGTKRDTERNKDIAFLEAQIYEYVEILGEQRHLTHENVQRKQARTGEEREEEEEEQISESESEDEENEIIYNPIHGLNINYNCEICGNYTYRGPKAFQRHFAEWRHAHGMRCLGIPNTAHFANVTQIEDAVSLWAKLKLQKASERWQPDTEEEYEDSSGNVVNKKTYEDLKRQGLL

SEQ ID NO: 770526 - protein, 501 aa, Homo sapiens; identical to SEQ ID NO: 770521

SEQ ID NO: 770527 - protein, 322 aa, Homo sapiens
METILEQQRRYHEEKERLMDVMAKEMLTKKSTLRDQINSDHRTRAMQDRYMEVSGNLRDLYDDKDGLRKEELNAISGPNEFAEFYNRLKQIKEFHRKHPNEICVPMSVEFEELLKARENPSEEAQNLVEFTDEEGYGRYLDLHDCYLKYINLKASEKLDYITYLSIFDQLFDIPKERKNAEYKRYLEMLLEYLQDYTDRVKPLQDQNELFGKIQAEFEKKWENGTFPGWPKETSSALTHAGAHLDLSAFSSWEELASLGLDRLKSALLALGLKCGGTLEERAQRLFSTKGKSLESLDTSLFAKNPKSKGTKRKNMKTQVGML

SEQ ID NO: 770528 - protein, 350 aa, Homo sapiens
METILEQQRRYHEEKERLMDVMAKEMLTKKSTLRDQINSDHRTRAMQDRYMEVSGNLRDLYDDKDGLRKEELNAISGPNEFAEFYNRLKQIKEFHRKHPNEICVPMSVEFEELLKARENPSEEAQNLVEFTDEEGYGRYLDLHDCYLKYINLKASEKLDYITYLSIFDQLFDIPKERKNAEYKRYLEMLLEYLQDYTDRVKPLQDQNELFGKIQAEFEKKWENGTFPGWPKETSSALTHAGAHLDLSAFSSWEELASLGLDRLKSALLALGLKCGGTLEERAQRLFSTKGKSLESLDTSLFAKNPKSKGTKRDTERNKDIAFLEAQIYEYVEILGEQRHLTHENVHYLGG

SEQ ID NO: 770529 - protein, 448 aa, Homo sapiens
METILEQQRRYHEEKERLMDVMAKEMLTKKSTLRDQINSDHRTRAMQDICVPMSVEFEELLKARENPSEEAQNLVEFTDEEGYGRYLDLHDCYLKYINLKASEKLDYITYLSIFDQLFDIPKERKNAEYKRYLEMLLEYLQDYTDRVKPLQDQNELFGKIQAEFEKKWENGTFPGWPKETSSALTHAGAHLDLSAFSSWEELASLGLDRLKSALLALGLKCGGTLEERAQRLFSTKGKSLESLDTSLFAKNPKSKGTKRDTERNKDIAFLEAQIYEYVEILGEQRHLTHENVQRKQARTGEEREEEEEEQISESESEDEENEIIYNPKNLPLGWDGKPIPYWLYKLHGLNINYNCEICGNYTYRGPKAFQRHFAEWRHAHGMRCLGIPNTAHFANVTQIEDAVSLWAKLKLQKASERWQPDTEEEYEDSSGNVVNKKTYEDLKRQGLL

SEQ ID NO: 770530 - protein, 448 aa, Homo sapiens; identical to SEQ ID NO: 770529

SEQ ID NO: 770531 - protein, 457 aa, Homo sapiens
METILEQQRRYHEEKERLMDVMAKEMLTKKSTLRDQINSDHRTRAMQDRYMEVSGNLRDLYDDKDGLRKEELNAISGPNEFAEFYNRLKQIKEFHRKHPNEICVPMSVEFEELLKARENPSEEAQNLVEFTDEEGYGRYLDLHDCYLKYINLKASEKLDYITYLSIFDQLFDIPKERKNAEYKRYLEMLLEYLQDYTDRVKPLQDQNELFGKIQAEFEKKWENGTFPGWPKETSSALTHAGAHLDLSAFSSWEELASLGLDRLKSALLALGLKCGGTLEERAQRLFSTKGKSLESLDTSLFAKNPKSKGTKRDTERNKDIAFLEAQIYEYVEILGEQRHLTHENVQRKQARTGEEREEEEEEQISESESEDEENEIIYNPKNLPLGWDGKPIPYWLYKLHGLNINYNCEICGNYTYRGPKAFQRHFAEWRHAHGMRCLGIPNTAHFANVTQIEDAVS

SEQ ID NO: 770532 - protein, 436 aa, Homo sapiens
METILEQQRRYHEEKERLMDVMAKEMLTKKSTLRDQINSDHRTRAMQDRYMEVSGNLRDLYDDKDGLRKEELNAISGPNEFAEFYNRLKQIKEFHRKHPNEICVPMSVEFEELLKARENPSEEAQNLVEFTDEEGYGRYLDLHDCYLKYINLKASEKLDYITYLSIFDQLFDIPKERKNAEYKRYLEMLLEYLQDYTDRVKPLQDQNELFGKIQAEFEKKWENGTFPGWPKETSSALTHAGAHLDLSAFSSWEELASLGLDRLKSALLALGLKCGGTLEERAQRLFSTKGKSLESLDTSLFAKNPKSKGTKRDTERNKDIAFLEAQIYEYVEILGEQRHLTHENVQRKQARTGEEREEEEEEQISESESEDEENEIIYNPKNLPLGWDGKPIPYWLYKLHGLNINYNCEICGNYTYRGPKAFQRHFANLTIRLTAL

SEQ ID NO: 770533 - protein, 314 aa, Homo sapiens [sequence omitted]

SEQ ID NO: 770534 - protein, 276 aa, Homo sapiens
METILEQQRRYHEEKERLMDVMAKEMLTKKSTLRDQINSDHRTRAMQDRYMEVSGNLRDLYDDKDGLRKEELNAISGPNEFAEFYNRLKQIKEFHRKHPNEICVPMSVEFEELLKARENPSEEAQNLVEFTDEEGYGRYLDLHDCYLKYINLKASEKLDYITYLSIFDQLFDIPKERKNAEYKRYLEMLLEYLQDYTDRVKPLQDQNELFGKIQAEFEKKWENGTFPGWPKETSSALTHAGAHLDLSAFSSWEELASLGLDRLKSALLALGLKCGG

SEQ ID NO: 770535 - protein, 155 aa, Homo sapiens
METILEQQRRYHEEKERLMDVMAKEMLTKKSTLRDQINSDHRTRAMQDRYMEVSGNLRDLYDDKDGNYTYRGPKAFQRHFAEWRHAHGMRCLGIPNTAHFANVTQIEDAVSLWAKLKLQKASERWQPDTEEEYEDSSGNVVNKKTYEDLKRQGLL

SEQ ID NO: 770536 - protein, 501 aa, Homo sapiens; identical to SEQ ID NO: 770521

SEQ ID NO: 770537 - protein, 501 aa, Homo sapiens; identical to SEQ ID NO: 770521

SEQ ID NO: 770538 - protein, 501 aa, Homo sapiens; identical to SEQ ID NO: 770521

SEQ ID NO: 770539 - protein, 501 aa, Homo sapiens; identical to SEQ ID NO: 770521

SEQ ID NO: 770540 - protein, 501 aa, Homo sapiens; identical to SEQ ID NO: 770521

SEQ ID NO: 770541 - protein, 487 aa, Homo sapiens
FSTPERKLTALCHRLFFQLRDQINSDHRTRAMQDRYMEVSGNLRDLYDDKDGLRKEELNAISGPNEFAEFYNRLKQIKEFHRKHPNEICVPMSVEFEELLKARENPSEEAQNLVEFTDEEGYGRYLDLHDCYLKYINLKASEKLDYITYLSIFDQLFDIPKERKNAEYKRYLEMLLEYLQDYTDRVKPLQDQNELFGKIQAEFEKKWENGTFPGWPKETSSALTHAGAHLDLSAFSSWEELASLGLDRLKSALLALGLKCGGTLEERAQRLFSTKGKSLESLDTSLFAKNPKSKGTKRDTERNKDIAFLEAQIYEYVEILGEQRHLTHENVQRKQARTGEEREEEEEEQISESESEDEENEIIYNPKNLPLGWDGKPIPYWLYKLHGLNINYNCEICGNYTYRGPKAFQRHFAEWRHAHGMRCLGIPNTAHFANVTQIEDAVSLWAKLKLQKASERWQPDTEEEYEDSSGNVVNKKTYEDLKRQGLL

SEQ ID NO: 770542 - protein, 448 aa, Homo sapiens; identical to SEQ ID NO: 770529

SEQ ID NO: 770543 - protein, 314 aa, Homo sapiens [sequence omitted]

SEQ ID NO: 770544 - protein, 338 aa, Homo sapiens [sequence omitted]

SEQ ID NO: 770545 - protein, 204 aa, Homo sapiens
KNLILGSKGSAKVTGKQEISLLILHYFFLTFHLWTCSKEQRHLTHENVQRKQARTGEEREEEEEEQISESESEDEENEIIYNPKNLPLGWDGKPIPYWLYKLHGLNINYNCEICGNYTYRGPKAFQRHFAEWRHAHGMRCLGIPNTAHFANVTQIEDAVSLWAKLKLQKASERWQPDTEEEYEDSSGNVVNKKTYEDLKRQGLL

SEQ ID NO: 770546 - protein, 67 aa, Homo sapiens [sequence omitted]

SEQ ID NO: 770547 - protein, 82 aa, Homo sapiens
IAHTKVQVRSQRQRGVGGNLKLLLQALVTVWENTSYSIPRVGELGLSVCSVWRTSTTHTNQPSSGRLYHHRLLSEIVTALLW

SEQ ID NO: 770548 - protein, 116 aa, Homo sapiens
VLVVVVPRAQVSFGWDGGWGMEWLGWGIGRLGWGMGWVPQHLLFSGLCFTSTWEGAGDGWCRVRQSLQLASWSWLCSGFLGLLNIKYQLYIPQAPFPPPLIGSLSALCRGQFNRVL

SEQ ID NO: 770549 - protein, 120 aa, Homo sapiens
LSPKVTLRNPGSSGRKERPEAGTGSWLGRTRNQVINTLADHHHRGTDFGGSPWLHIIIAFPTSYKVVITLWIVYLWVSLLKTIFWSRNGHDGSTDVQQRAWRSNRRRQVQGRGPTSTRPR

SEQ ID NO: 770550 - protein, 117 aa, Homo sapiens
LSPKVTLRNPGSSGRKERPEAGTGSWLGRTRNQVINTLADHHHRGTDFGGSPWLHIIIAFPTSYKVVITLWIVYLWVSILTFCRGILVITNKNKLYKTIHISGLHYEYVVLPKKSGK

SEQ ID NO: 770551 - protein, 122 aa, Homo sapiens
RQLTPLPPSAPPSADDNIKTTAERLRGPLPPSADDNLKTPSERQLTPLPPSAPPSAPPSADDNLKTRAECLLHPLPPSADDNLKTPSERQLTPLPPSAPPSADDNIKTPAERLRGPLPPSAD

SEQ ID NO: 770552 - protein, 398 aa, Homo sapiens
LSPKVTLRNPGSSGRKERPEAGTGSWLGRTRNQVINTLADHHHRGTDFGGSPWLHIIIAFPTSYKVVITLWIVYLWVSLLKTIFWSRNGHDGSTDVQQRAWRSNRRRQEGLRSICMHTKKRVSSFRGNKIGLKDVITLRRHVETKVRAKIRKRKVTTKINHHDKINGKRKTARKQKMFQRAQELRRRAEDYHKCKIPPSARKALCNWVRMAAAEHRHSSGLPYWPYLTAETLKNRMGHQPPPPTQQHCITDNSLSLKTPLECLLTPLPPSADDNLKTPPECLLTPLPPSADDNLKTPPECLLTPLPPSADDNLKTPPECLLTPLPPSAPPSAPPSADDNLKTRAECLLHPLPPSADDNLKTPSERQLTPLPPSAPPSADDNIKTPAERLRGPLPPSAD

SEQ ID NO: 770553 - protein, 524 aa, Homo sapiens
MSDNGELEDKPPAPPVRMSSTIFSTGGKDPLSANHSLKPLPSVPEEKKPRHKIISIFSGTEKGSKKKEKERPEISPPSDFEHTIHVGFDAVTGEFTGMPEQWARLLQTSNITKLEQKKNPQAVLDVLKFYDSNTVKQKYLSFTPPEKDGLPSGTPALNAKGTEAPAVVTEEEDDDEETAPPVIAPRPDHTKSIYTRSVIDPVPAPVGDSHVDGAAKSLDKQKKKPKMTDEEIMEKLRTIVSIGDPKKKYTRYEKIGQGASGTVFTATDVALGQEVAIKQINLQKQPKKELIINEILVMKELKNPNIVNFLDSYLVGDELFVVMEYLAGGSLTDVVTETCMDEAQIAAVCRECLQALEFLHANQVIHRDIKSDNVLLGMEGSVKLTDFGFCAQITPEQSKRSTMVGTPYWMAPEVVTRKAYGPKVDIWSLGIMAIEMVEGEPPYLNENPLRALYLIATNGTPELQNPEKLSPIFRDFLNRCLEMDVEKRGSAKELLQHPFLKLAKPLSSLTPLIMAAKEAMKSNR

SEQ ID NO: 770554 - protein, 518 aa, Homo sapiens
MSDNGELEDKPPAPPVRMSSTIFSTGGKDPLSANHSLKPLPSVPEEKKPRHKIISIFSGTEKGSKKKEKERPEISPPSDFEHTIHVGFDAVTGEFTGMPEQWARLLQTSNITKLEQKKNPQAVLDVLKFYDSNTVKQKYLSFTPPEKDGLPSGTPALNAKGTEAPAVVTEEEDDDEETAPPVIAPRPDHTKSIYTRSVIDPVPAPVGDSHVDGAAKSLDKQKKKPKMTDEEIMEKLRTIVSIGDPKKKYTRYEKIGQGASGTVFTATDVALGQEVAIKQINLQKQPKKELIINEILVMKELKNPNIVNFLDSYLVGDELFVVMEYLAGGSLTDVVTETCMDEAQIAAVCRECLQALEFLHANQVIHRDIKSDNVLLGMEGSVKLTDFGFCAQITPEQSKRSTMVGTPYWMAPEVVTRKAYGPKVDIWSLGIMAIEMVEGEPPYLNENPLRALYLIATNGTPELQNPEKLSPIFRDFLNRCLEMDVEKRGSAKELLQHPFLKLAKEPFSRDPLKSARKD

SEQ ID NO: 770555 - protein, 524 aa, Homo sapiens; identical to SEQ ID NO: 770553

SEQ ID NO: 770556 - protein, 428 aa, Homo sapiens
MPEQWARLLQTSNITKLEQKKNPQAVLDVLKFYDSNTVKQKYLSFTPPEKDGLPSGTPALNAKGTEAPAVVTEEEDDDEETAPPVIAPRPDHTKSIYTRSVIDPVPAPVGDSHVDGAAKSLDKQKKKPKMTDEEIMEKLRTIVSIGDPKKKYTRYEKIGQGASGTVFTATDVALGQEVAIKQINLQKQPKKELIINEILVMKELKNPNIVNFLDSYLVGDELFVVMEYLAGGSLTDVVTETACMDEAQIAAVCRECLQALEFLHANQVIHRDIKSDNVLLGMEGSVKLTDFGFCAQITPEQSKRSTMVGTPYWMAPEVVTRKAYGPKVDIWSLGIMAIEMVEGEPPYLNENPLRALYLIATNGTPELQNPEKLSPIFRDFLNRCLEMDVEKRGSAKELLQHPFLKLAKPLSSLTPLIMAAKEAMKSNR

SEQ ID NO: 770557 - protein, 919 aa, Homo sapiens [sequence omitted]

SEQ ID NO: 770558 - protein, 872 aa, Homo sapiens [sequence omitted]

SEQ ID NO: 770559 - protein, 478 aa, Homo sapiens
MTAPWRRLRSLVWEYWAGLLVCAFWIPDSRGMPHVIRIGGIFEYADGPNAQVMNAEEHAFRFSANIINRNRTLLPNTTLTYDIQRIHFHDSFEATKKACDQLALGVVAIFGPSQGSCTNAVQSICNALEVPHIQLRWKHHPLDNKDTFYVNLYPDYASLSHAILDLVQYLKWRSATVVYDDSTGLIRLQELIMAPSRYNIRLKIRQLPIDSDDSRPLLKEMKRGREFRIIFDCSHTMAAQILKQAMAMGMMTEYYHFIFTTLDLYALDLEPYRYSGVNLTGFRILNVDNPHVSAIVEKWSMERLQAAPRAESGLLDGVMMTDAALLYDAVHIVSVCYQRAPQMTVNSLQCHRHKAWRFGGRFMNFIKEAQWEGLTGRIVFNKTSGLRTDFDLDIISLKEDGLEKVGVWSPADGLNITEVAKGRGPNVTDSLTNRSLIVTTVLFPGKSLSHKSPQLWWVLWPHLESPAGAGSLYTCRIL

SEQ ID NO: 770560 - protein, 521 aa, Homo sapiens
MTAPWRRLRSLVWEYWAGLLVCAFWIPDSRGMPHVIRIGGIFEYADGPNAQVMNAEEHAFRFSANIINRNRTLLPNTTLTYDIQRIHFHDSFEATKKACDQLALGVVAIFGPSQGSCTNAVQSICNALEVPHIQLRWKHHPLDNKDTFYVNLYPDYASLSHAILDLVQYLKWRSATVVYDDSTGLIRLQELIMAPSRYNIRLKIRQLPIDSDDSRPLLKEMKRGREFRIIFDCSHTMAAQILKQAMAMGMMTEYYHFIFTTLDLYALDLEPYRYSGVNLTGFRILNVDNPHVSAIVEKWSMERLQAAPRAESGLLDGVMMTDAALLYDAVHIVSVCYQRAPQMTVNSLQCHRHKAWRFGGRFMNFIKEAQWEGLTGRIVFNKTSGLRTDFDLDIISLKEDGLEKVGVWSPADGLNITEVAKGRGPNVTDSLTNRSLIVTTVLVRACSPCRKDCPTWGWGGRSGWRVPSIPPTQKMEAAGRWRLLESAGSSQRAAGAQQRCSLPRAEAAAFLCLTPTHSPSP

SEQ ID NO: 770561 - protein, 156 aa, Homo sapiens
SLAKWQNPVSTKNTKISWAWWRAPAIPATREAKAGESLEPGKRRLQWAEIVPLHSTLGKSETESQKQKKKTQASASPGPVLAWGIPSVTNHDSEAGLACAPPEGASCTDDLLISAPPESSGRRRATGRPFYRRGNRDTGKVAICNPARFLSCFSVF

SEQ ID NO: 770562 - protein, 53 aa, Homo sapiens
PYIPLQMLQLWKLSEPAEHPLVRAMVISDAFRAGIHEGSSEDVVTEEAQDEGD

SEQ ID NO: 770563 - protein, 60 aa, Homo sapiens
MGSSCTWPPRPLTETSLSPQILGTLTSVVFMQLSSCHRGKTAACGLPTAWSLALQFLLEH

SEQ ID NO: 770564 - protein, 429 aa, Homo sapiens
STAPKPVVILVALCLPFACCAFRPVCVFLLLFCFALLVLWFFWFGLCRLQLQSNLFASLDETLLARAEALAAVDIAVSQGKSHPFKPDATYHTMNSVPCTSTSTVPLAHHHHHHHHHQALEPGDLLDHISSPSLALMAGAGGAGAAAGGGGAHDGPGGGGGPGGGGGPGGGGPGGGGGGGPGGGGGGPGGGLLGGSAHPHPHMHSLGHLSHPAAAAAMNMPSGLPHPGLVAAAAHHGAAAAAAAAAAGQVAAASAAAAVVGAAGLASICDSDTDPRELEAFAERFKQRRIKLGVTQADVGSALANLKIPGVGSLSQSTICRFESLTLSHNNMIALKPILQAWLEEAEGAQREKMNKPELFNGGEKKRKRTSIAAPEKRSLEAYFAVQPRPSSEKIAAIAEKLDLKKNVVRVWFCNQRQKQKRMKFSATY

SEQ ID NO: 770565 - protein, 498 aa, Homo sapiens
AGLELSEKRDREAGARRSARSEGAPGSSRSSSSSPRRGRRQPPRPPRLQPPKGGRVSRRTHFPADFRSVCGYTCQAATMMSMNSKQPHFAMHPTLPEHKYPSLHSSSEAIRRACLPTPPLQSNLFASLDETLLARAEALAAVDIAVSQGKSHPFKPDATYHTMNSVPCTSTSTVPLAHHHHHHHHHQALEPGDLLDHISSPSLALMAGAGGAGAAAGGGGAHDGPGGGGGPGGGGGPGGGGPGGGGGGGPGGGGGGPGGGLLGGSAHPHPHMHSLGHLSHPAAAAAMNMPSGLPHPGLVAAAAHHGAAAAAAAAAAGQVAAASAAAAVVGAAGLASICDSDTDPRELEAFAERFKQRRIKLGVTQADVGSALANLKIPGVGSLSQSTICRFESLTLSHNNMIALKPILQAWLEEAEGAQREKMNKPELFNGGEKKRKRTSIAAPEKRSLEAYFAVQPRPSSEKIAAIAEKLDLKKNVVRVWFCNQRQKQKRMKFSATY

SEQ ID NO: 770566 - protein, 163 aa, Homo sapiens
AGLELSEKRDREAGARRSARSEGAPGSSRSSSSSPRRGRRQPPRPPRLQPPKGGRVSRRTHFPADFRSVCGYTCQAATMMSMNSKQPHFAMHPTLPEHKYPSLHSSSEAIRRACLPTPPVSAPRPRPRPARPPLPVSETLHVGGWCVQVPVRGTAGRGCRAVP

SEQ ID NO: 770567 - protein, 161 aa, Homo sapiens
MVVMIVGFLTVLIQGSTHAGGFHNVLEQSTNGSRLHIFDFDVDPLRRHTFWTITVGGTFTWLGIYGVNQSTIQRCISCKTEKHAKLALYFNLLGLWIILVCAVFSGLIMYSHFKDCDPWTSGIISAPDQLMPYFVMEIFATMPGLPGLFVACAFSGTLRLV

SEQ ID NO: 770568 - protein, 276 aa, Homo sapiens
VNILKTKICSNIYHIKSPNLVEEFKQRTQTALGRVFIFLLYLQLRFNKPVRYAATVIYIVQTILYTGVVVYAPALALNQVTGFDLWGSVFATGIVCTFYCTLGGLKAVVWTDAFQMVVMIVGFLTVLIQGSTHAGGFHNVLEQSTNGSRLHIFDFDVDPLRRHTFWTITVGGTFTWLGIYGVNQSTIQRCISCKTEKHAKLALYFNLLGLWIILVCAVFSGLIMYSHFKDCDPWTSGIISAPDQLMPYFVMEIFATMPGLPGLFVACAFSGTLRLV

SEQ ID NO: 770569 - protein, 349 aa, Homo sapiens
MEVKNFAVWDYVVFAALFFISSGIGVFFAIKERKKATSREFLVGGRQMSFGPVGLSLTASFMSAVTVLGTPSEVYRFGASFLVFFIAYLFVILLTSELFLPVFYRSGITSTYEYLQLRFNKPVRYAATVIYIVQTILYTGVVVYAPALALNQVTGFDLWGSVFATGIVCTFYCTLGGLKAVVWTDAFQMVVMIVGFLTVLIQGSTHAGGFHNVLEQSTNGSRLHIFDFDVDPLRRHTFWTITVGGTFTWLGIYGVNQSTIQRCISCKTEKHAKLALYFNLLGLWIILVCAVFSGLIMYSHFKDCDPWTSGIISAPDQLMPYFVMEIFATMPGLPGLFVACAFSGTLRLV

SEQ ID NO: 770570 - protein, 494 aa, Homo sapiens
RLNGAQGRGGGSVLLGGFSIQVPGVPGPWSSALGGATCVRQRDSGDWPAMPSRAEDYEVLYTIGTGSYGRCQKIRRKSDGKILVWKELDYGSMTEAEKQMLVSEVNLLRELKHPNIVRYYDRIIDRTNTTLYIVMEYCEGGDLASVITKGTKERQYLDEEFVLRVMTQLTLALKECHRRSDGGHTVLHRDLKPANVFLDGKQNVKLGDFGLARILNHDTSFAKTFVGTPYYMSPEQMNRMSYNEKSDIWSLGCLLYELCALMPPFTAFSQKELAGKIREGKFRRIPYRYSDELNEIITRMLNLKDYHRPSVEEILENPLIADLVADEQRRNLERRGRQLGEPEKSQDSSPVLSELKLKEIQLQERERALKAREERLEQKEQELCVRERLAEDKLARAENLLKNYSLLKERKFLSLASNPELLNLPSSVIKKKVHFSGESKENIMRSENSESQLTSKSKCKDLKKRLHAAQLRAQALSDIEKNYQLKSRQILGMR

SEQ ID NO: 770571 - protein, 433 aa, Homo sapiens
RLNGAQGRGGGSVLLGGFSIQVPGVPGPWSSALGGATCVRQRDSGDWPAMPSRAEDYEVLYTIGTGSYGRCQKIRRKSDGKILVWKELDYGSMTEAEKQMLVSEVNLLRELKHPNIVRYYDRIIDRTNTTLYIVMEYCEGGDLASVITKGTKERQYLDEEFVLRVMTQLTLALKECHRRSDGGHTVLHRDLKPANVFLDGKQNVKLGDFGLARILNHDTSFAKTFVGTPYYMSPEQMNRMSYNEKSDIWSLGCLLYELCALMPPFTAFSQKELAGKIREGKFRRIPYRYSDELNEIITRMLNLKDYHRPSVEEILENPLIADLVADEQRRNLERRGRQLGEPEKSQDSSPVLSELKLKEIQLQERERALKAREERLEQKEQELCVRERLAEDKLARAENLLKNYSLLKERKFLSLASNPGMRINLVNRSWCYK

SEQ ID NO: 770572 - protein, 486 aa, Homo sapiens
RLNGAQGRGGGSVLLGGFSIQVPGVPGPWSSALGGATCVRQRDSGDWPAMPSRAEDYEVLYTIGTGSYGRCQKIRRKSDGKILVWKELDYGSMTEAEKQMLVSEVNLLRELKHPNIVRYYDRIIDRTNTTLYIVMEYCEGGDLASVITKGTKERQYLDEEFVLRVMTQLTLALKECHRRSDGGHTVLHRDLKPANVFLDGKQNVKLGDFGLARILNHDTSFAKTFVGTPYYMSPEQMNRMSYNEKSDIWSLGCLLYELCALMPPFTAFSQKELAGKIREGKFRRIPYRYSDELNEIITRMLNLKDYHRPSVEEILENPLIADLVADEQRRNLERRGRQLGEPEKSQDSSPVLSELKLKEIQLQERERALKAREERLEQKEQELCVRERLAEDKLARAENLLKNYSLLKERKFLSLASNPVIKKKVHFSGESKENIMRSENSESQLTSKSKCKDLKKRLHAAQLRAQALSDIEKNYQLKSRQILGMR

SEQ ID NO: 770573 - protein, 258 aa, Homo sapiens [sequence omitted]

SEQ ID NO: 770574 - protein, 497 aa, Homo sapiens
RLNGAQGRGGGSVLLGGFSIQVPGVPGPWSSALGGATCVRQRDSGDWPAMPSRAEDYEVLYTIGTGSYGRCQKIRRKSDGKILVWKELDYGSMTEAEKQMLVSEVNLLRELKHPNIVRYYDRIIDRTNTTLYIVMEYCEGGDLASVITKGTKERQYLDEEFVLRVMTQLTLALKECHRRSDGGHTVLHRDLKPANVFLDGKQNVKLGDFGLARILNHDTSFAKTFVGTPYYMSPEQMNRMSYNEKSDIWSLGCLLYELCALMKYDEDKIPSLRPPFTAFSQKELAGKIREGKFRRIPYRYSDELNEIITRMLNLKDYHRPSVEEILENPLIADLVADEQRRNLERRGRQLGEPEKSQDSSPVLSELKLKEIQLQERERALKAREERLEQKEQELCVRERLAEDKLARAENLLKNYSLLKERKFLSLASNPVIKKKVHFSGESKENIMRSENSESQLTSKSKCKDLKKRLHAAQLRAQALSDIEKNYQLKSRQILGMR

SEQ ID NO: 770575 - protein, 284 aa, Homo sapiens
  misc_feature (27)..(28): Xaa can be any naturally occurring amino acid
MNRMSYNDQISDFSLEDMRFICSGDMXXGCANNEKSDIWSLGCLLYELCALMPPFTAFSQKELAGKIREGKFRRIPYRYSDELNEIITRMLNLKDYHRPSVEEILENPLIADLVADEQRRNLERRGRQLGEPEKSQDSSPVLSELKLKEIQLQERERALKAREERLEQKEQELCVRERLAEDKLARAENLLKNYSLLKERKFLSLASNPELLNLPSSVIKKKVHFSGESKENIMRSENSESQLTSKSKCKDLKKRLHAAQLRAQALSDIEKNYQLKSRQILGMR

SEQ ID NO: 770576 - protein, 203 aa, Homo sapiens
MQSDYNTEYFLPQDYHRPSVEEILENPLIADLVADEQRRNLERRGRQLGEPEKSQDSSPVLSELKLKEIQLQERERALKAREERLEQKEQELCVRERLAEDKLARAENLLKNYSLLKERKFLSLASNPELLNLPSSVIKKKVHFSGESKENIMRSENSESQLTSKSKCKDLKKRLHAAQLRAQALSDIEKNYQLKSRQILGMR

SEQ ID NO: 770577 - protein, 104 aa, Homo sapiens
MTPFITGHLHLKGTEAHLYQNLYLLHITFPAFIASASSSNWEFIGCLISTWHSALCLLKPLILRRYKSGPMTIGFPGPTIYPITRNSQPDRTVEELTEDSVEES

SEQ ID NO: 770578 - protein, 89 aa, Homo sapiens
VSRELLLPTLRPCASPSFSLSCKEQRWRGSDSHNFRLAWRRLSESLGPQHRDTGRLPRVPMWATYQTEETGLEFKTLTDSPSHANSISL

SEQ ID NO: 770579 - protein, 86 aa, Homo sapiens
FRNGHVTQSKPEMQKLLLGLSEKRLTLNSSKLGGCEARVAVAILLPSDDSLRMEFTQREWRQQMKCKKPGQDIHVCTLVKCYLKPL

SEQ ID NO: 770580 - protein, 95 aa, Homo sapiens
TTSGDEEQRGQAQGAGGQMVVTGSHSGAQAGVRYHDHNSLQPQPPGLKDGSQMAALMFTRRCCVTGWEVMNYVMLHVGDMNYVMLRVGDMNYGRQ

SEQ ID NO: 770581 - protein, 86 aa, Homo sapiens
LDSWTHESWTWKKQHHKLDADSEHIQPSAELCPSPEICCQLASAVTEAPKGHSTVLSNQLLQDGEEHGQVKIEWASYLFHFEKHQD

SEQ ID NO: 770582 - protein, 501 aa, Homo sapiens
IQTGMQKEMEQDAKRFGQAAWATAIPRLEKLQLMLARETLQLMRAKELCLNHKRAEIQGKMEDLPEQEKNTNVVDELEIQFYEIQLELYEVKFEILKNEEILLTTQLDSLKRLIKEKQDEVVYYDPCENPEELKVIDCVVGLQDDKNLEVKELRRQCQQLESKRGRICAKRASLRSRKDQCKENHRFRLQQAEESIRYSRQHHSIQMKRDKIKEEEQKKKEWINQERQKTLQRLRSFKDKRLAQSVRNTSGSEPVAPNLPSDLSQQMCLPASHAVSVIHPSSRKTRGVPLSEAGNVKSPKCQNCHGNIPVQVFVPVGDQTHSKSSEELSLPPPPPPPPPPPPPPPPPPPPLRALSSSSQAATHQNLGFRAPVKDDQPRPLVCESPAERPRDSLESFSCPGSMDEVLASLRHGRAPLRKVEVPAVRPPHASINEHILAAIRQGVKLKKVHPDLGPNPSSKPTSNRRTSDLERSIKAALQRIKRVSADSEEDSDEQDPGQWDG

SEQ ID NO: 770583 - protein, 199 aa, Homo sapiens
IQTGMQKEMEQDAKRFGQAAWATAIPRLEKLQLMLARETLQLMRAKELCLNHKRAEIQGKMEDLPEQEKNTNVVDELEIQFYEIQLELYEVKFEILKNEEILLTTQLDSLKRLIKEKQDEVVYYDPCENPEELKVIDCVVGLQDDKNLEVKELRRQCQQLESKRGRICAKRASLRSRKVICIIPPGSVQRKSSVQIATG

SEQ ID NO: 770584 - protein, 106 aa, Homo sapiens
MCGCSKHYRDHMPGAETVLIGGMRLALRYTCVVWTGPMAMSHGASAGRSEKLQGQNRAASHICLQGGCDMSPLDRSPCCKCCRRDVLHGASHASAEAGTKVHQRAG

SEQ ID NO: 770585 - protein, 187 aa, Homo sapiens
EITSDFPTKPIVSERNELLIQFLSDLSLTADGFIGHYIFRPKKLPTTTEQPVTTTFPVTTGLKPTVALCQQKCRRTGTLEGNYCSSDFVLAGTVITTITRDGSLHATVSIINIYKEGNLAIQQAGKNMSARLTVVCKQCPLLRRGLNYIIMGQVGEDGRGKIMPNSFIMMFKTKNQKLLDALKNKQC

SEQ ID NO: 770586 - protein, 415 aa, Homo sapiens
MRGANAWAPLCLLLAAATQLSRQQSPERPVFTCGGILTGESGFIGSEGFPGVYPPNSKCTWKITVPEGKVVVLNFRFIDLESDNLCRYDFVDVYNGHANGQRIGRFCGTFRPGALVSSGNKMMVQMISDANTAGNGFMAMFSAAEPNERGDQYCGGLLDRPSGSFKTPNWPDRDYPAGVTCVWHIVAPKNQLIELKFEKFDVERDNYCRYDYVAVFNGGEVNDARRIGKYCGDSPPAPIVSERNELLIQFLSDLSLTADGFIGHYIFRPKKLPTTTEQPVTTTFPVTTGLKPTVALCQQKCRRTGTLEGNYCSSDFVLAGTVITTITRDGSLHATVSIINIYKEGNLAIQQAGKNMSARLTVVCKQCPLLRRGLNYIIMGQVGEDGRGKIMPNSFIMMFKTKNQKLLDALKNKQC

SEQ ID NO: 770587 - protein, 415 aa, Homo sapiens; identical to SEQ ID NO: 770586

SEQ ID NO: 770588 - protein, 415 aa, Homo sapiens; identical to SEQ ID NO: 770586

SEQ ID NO: 770589 - protein, 196 aa, Homo sapiens
PRTLRYNTINTPKHTTRQPIVSERNELLIQFLSDLSLTADGFIGHYIFRPKKLPTTTEQPVTTTFPVTTGLKPTVALCQQKCRRTGTLEGNYCSSDFVLAGTVITTITRDGSLHATVSIINIYKEGNLAIQQAGKNMSARLTVVCKQCPLLRRGLNYIIMGQVGEDGRGKIMPNSFIMMFKTKNQKLLDALKNKQC

SEQ ID NO: 770590 - protein, 415 aa, Homo sapiens; identical to SEQ ID NO: 770586

SEQ ID NO: 770591 - protein, 105 aa, Homo sapiens
MLESGLGHQKRLARHQRHSLLRKPQDKKRQASPHLQDVRLEGNPGAPDPASRQPLTFLLILFLLFLLLVGAMFLLPASGGPCCSHARIPRTPYLVLSYVNGLPPV

SEQ ID NO: 770592 - protein, 190 aa, Homo sapiens
AASGPGDSSGGALGHPCLGKRSYWLPSPDFVSPGPQPWPCPCLWALDLAQSPSTTHREHLERRTLLDAPSAPRPERRARAQSRPRPWDRTPWALLSTSRVGQGAMSLPLTPRDGQHPLPTRTQLGANTVRAPDPASRQPLTFLLILFLLFLLLVGAMFLLPASGGPCCSHARIPRTPYLVLSYVNGLPPV

SEQ ID NO: 770593 - protein, 124 aa, Homo sapiens
AASGPGDSSGGALGHPCLGKRSYWLPSPDFVSPGPQPWPCPCLWALDLAQSPSTTHREHLERRTLLDAPSAPRPERRARGSRHLSLPTGHAGVWPRPPETLSTSPKTLPAPEASGPPILHPGSL

SEQ ID NO: 770594 - protein, 404 aa, Homo sapiens [sequence omitted]

SEQ ID NO: 770595 - protein, 344 aa, Homo sapiens
MALSLPLGPRLGSEPLNHPPGAPREADIVGCTVCPASGEESTSPEQAQTLGQDSLGPPEHFQGGPRGNEPAAHPPRWSTPSSYEDPAGGKHCEHPISGLEVLEAEQNSLHLCLLGLGRRLQDLEQGLGHWALAQSGMVQLQALQVDLRGAAERVEALLAFGEGLAQRSEPRAWAALEQILRALGAYRDSIFRRLWQLQAQLVSYSLVFEEANTLDQDLEVEGDSTGQDLEADTSHSRQDMLESGLGHQKRLARHQRHSLLRKPQDKKRQASPHLQDVRLEGNPGAPDPASRQPLTFLLILFLLFLLLVGAMFLLPASGGPCCSHARIPRTPYLVLSYVNGLPPV

SEQ ID NO: 770596 - protein, 276 aa, Homo sapiens
MHRLPRVRRGEHEALQVDLRGAAERVEALLAFGEGLAQRSEPRAWAALEQILRALGAYRDSIFRRLWQLQAQLVSYSLVFEEANTLDQDLEVEGDSDWPGPGGVWGPWAPSSLPTSTELEWDPAGDIGGLGPLGQKTARTLGVPCELCGHRGPQGRGQGLEEADTSHSRQDMLESGLGHQKRLARHQRHSLLRKPQDKKRQASPHLQDVRLEGNPGAPDPASRQPLTFLLILFLLFLLLVGAMFLLPASGGPCCSHARIPRTPYLVLSYVNGLPPV

SEQ ID NO: 770597 - protein, 39 aa, Homo sapiens
PPESRSLESWLQPRKGEWTVQHSRRRTGLESPTQDKCHL

SEQ ID NO: 770598 - protein, 116 aa, Homo sapiens
SHSVPRLECSDTYLAHCNLCLLGSRDSPALASPGAGITGMRHHAWLIFVFLVEPGFHPVGQADLELLTSGDLPTLASQSARITGVSHCTWPHSQFLNYYQRCPTFMPHPHPYEILI

SEQ ID NO: 770599 - protein, 42 aa, Homo sapiens
MGLEDIIFLDLQKEHDLELELGKRGNLRQMDGINVADALMLI

SEQ ID NO: 770600 - protein, 87 aa, Homo sapiens
HTGERPYECSECGKFFPYSSSLRKHQRVHTGSRPYECSECGKSFTQNSGLIKHRRVHTGEKPYECTECGKSFSHNSSLIKHQRIHSR

SEQ ID NO: 770601 - protein, 211 aa, Homo sapiens
MVFLKFFCMSFFCHLCQGYFDGPLYPEMSNGTLHHYFVPDGDYEENDDPEKCQLLFRVSDHRRCSQGEGSQVGSLLSLTLREEFTVLGRQVEDAGRVLEGISKSISYDLDGEESYGKYLRRESHQIGDAYSNSDKSLTELESKFKQGQEQDSRQESRLNEDFLGMLVHTRSLLKETLDISVGLRDKYELLALTIRSHGTRLGRLKNDYLKV

SEQ ID NO: 770602 - protein, 211 aa, Homo sapiens; identical to SEQ ID NO: 770601

SEQ ID NO: 770603 - protein, 211 aa, Homo sapiens; identical to SEQ ID NO: 770601

SEQ ID NO: 770604 - protein, 211 aa, Homo sapiens; identical to SEQ ID NO: 770601

SEQ ID NO: 770605 - protein, 225 aa, Homo sapiens
GLHPVRASQLLCLPNQAWAMACAPPPASLPPCSLISDCCASNQRDSVGVGPSEPGARYNLVVRRFLSPSEKRSIRVGVTRFSRCRPSPLSLTGKGNSLTPWASQVRQCFALLRLAQGARTQLTCAHCLALPSEMNPVLQMEMQKSPVVCVAHAGSCRPELFLFGHLGSSILTITSPLCENLGISCSYGGAKQLKQPAMLSVHLEDNCYGELPRPRMDFYNRKVNF

SEQ ID NO: 770606 - protein, 161 aa, Homo sapiens
SVSQRVATPASRSGTGGKRAPPGIWWAKRAAPYVGGQRQKLAWPGSCSPILRPPPPSPRHPGLLDRLARGLLPAAFPPWRLQSPPGQRKQTSPSRKPVPQPPLGKDQPAEHPGPSAPALSFWLRVQEGWHETNRDPAVPEPASRTAETTQSPLLGALTWPS

SEQ ID NO: 770607 - protein, 117 aa, Homo sapiens
MKPSLEHHLGVSGATFSELGPGGTRGPQEPSKLREGLPRKPWDWHPQCRQSAPGGLAKRPRWPKSTMPTVCPRRVPRPCLVAPPGLPEGVGSCSLNPGRGHGGPHCQLLSSRVSRWA

SEQ ID NO: 770608 - protein, 117 aa, Homo sapiens; identical to SEQ ID NO: 770607

SEQ ID NO: 770609 - protein, 268 aa, Homo sapiens
MGASSEKGLKSSESQLKLKQILFTITFWLLLRQHLTEQKALQEKEALLSEVKIGSQENEEKDEELQDIQVEGEPKEEEEEEAKEEKQERKKVEQEEAEEEDEQDIMKVLGNLVVAMFIKYWIYVCGGMFFFVSFEGKIVMYKIIYMVLFLFCVALYQVHYEWWRKILKYFWMSVVIYTMLVLIFIYTYQFENFPGLWQNMTGLKKEKLEDLGLKQFTVAELFTRIFIPTSFLLVCILHLHYFHDRFLELTDLKSIPSKEDNTHLQVSH

SEQ ID NO: 770610 - protein, 175 aa, Homo sapiens
TTIKRQKILSEELQQNRRWNSREVPDISIRARLGGWTSPLKVTPLQPHHEGRSLSHIFTFDEEATCTDEGEPLVQTNKKCNAKDSFYKSSTQKAYEDVPWDKMLPPKLVPEETTLEKTADPISQCFTLKRYKGVPAITQMVGELWDRFQTRSFLAPVKPINFVSSSSRSKYIPLY

SEQ ID NO: 770611 - protein, 363 aa, Homo sapiens
MKGNSTLATTSKNITSGLHFGLVNISGNNESTLNCSQKPSDKHLDAIPILYYIIFVIGFLVNIVVVTLFCCQKGPKKVSSIYIFNLAVADLLLLATLPLWATYYSYRYDWLFGPVMCKVFGSFLTLNMFASIFFITCMSVDRYQSVIYPFLSQRRNPWQASYIVPLVWCMACLSSLPTFYFRDVRTIEYLGVNACIMAFPPEKYAQWSAGIALMKNILGFIIPLIFIATCYFGIRKHLLKTNSYGKNRITRDQVLKMAAAVVLAFIICWLPFHVLTFLDALAWMGVINSCEVIAVIDLALPFAILLGFTNSCVNPFLYCFVGNRFQQKLRSVFRVPITWLQGKRESMSCRKSSSLREMETFVS

SEQ ID NO: 770612 - protein, 147 aa, Homo sapiens
SVSHITLQRSQNLEPVYLKWQLYWVFSSCISLLSFFFFETEFCFMLSQAVGATWCESQTHLQTSDLPKYLRITEHPATTPVLNFLLFSGRRRMFTPMLGHGWISTHPDLQVVLRPPRASQQCCRLQSVSHMCPRRIVQAILLPQPPE

SEQ ID NO: 770613 - protein, 372 aa, Homo sapiens
MFKHLRKWVVTRFFGHSRQRARLVSKDGRCNIEFGNVEAQSRFIFFVDIWTTVLDLKWRYKMTIFITAFLGSWFFFGLLWYAVAYIHKDLPEFHPSANHTPCVENINGLTSAFLFSLETQVTIGYGFRCVTEQCATAIFLLIFQSILGVIINSFMCGAILAKISRPKKRAKTITFSKNAVISKRGGKLCLLIRVANLRKSLLIGSHIYGKLLKTTVTPEGETIILDQININFVVDAGNENLFFISPLTIYHVIDHNSPFFHMAAETLLQQDFELVVFLDGTVESTSATCQVRTSYVPEEVLWGYRFAPIVSKTKEGKYRVDFHNFSKTVEVETPHCAMCLYNEKDVRARMKRGYDNPNFILSEVNETDDTKM

SEQ ID NO: 770614 - protein, 408 aa, Homo sapiens
VCIERPTTSTTSLLFPAMNASSRNVFDTLIRVLTESMFKHLRKWVVTRFFGHSRQRARLVSKDGRCNIEFGNVEAQSRFIFFVDIWTTVLDLKWRYKMTIFITAFLGSWFFFGLLWYAVAYIHKDLPEFHPSANHTPCVENINGLTSAFLFSLETQVTIGYGFRCVTEQCATAIFLLIFQSILGVIINSFMCGAILAKISRPKKRAKTITFSKNAVISKRGGKLCLLIRVANLRKSLLIGSHIYGKLLKTTVTPEGETIILDQININFVVDAGNENLFFISPLTIYHVIDHNSPFFHMAAETLLQQDFELVVFLDGTVESTSATCQVRTSYVPEEVLWGYRFAPIVSKTKEGKYRVDFHNFSKTVEVETPHCAMCLYNEKDVRARMKRGYDNPNFILSEVNETDDTKM

SEQ ID NO: 770615 - protein, 372 aa, Homo sapiens; identical to SEQ ID NO: 770613

SEQ ID NO: 770616 - protein, 389 aa, Homo sapiens
MPTVYLCSEQIRVLTESMFKHLRKWVVTRFFGHSRQRARLVSKDGRCNIEFGNVEAQSRFIFFVDIWTTVLDLKWRYKMTIFITAFLGSWFFFGLLWYAVAYIHKDLPEFHPSANHTPCVENINGLTSAFLFSLETQVTIGYGFRCVTEQCATAIFLLIFQSILGVIINSFMCGAILAKISRPKKRAKTITFSKNAVISKRGGKLCLLIRVANLRKSLLIGSHIYGKLLKTTVTPEGETIILDQININFVVDAGNENLFFISPLTIYHVIDHNSPFFHMAAETLLQQDFELVVFLDGTVESTSATCQVRTSYVPEEVLWGYRFAPIVSKTKEGKYRVDFHNFSKTVEVETPHCAMCLYNEKDVRARMKRGYDNPNFILSEVNETDDTKM

SEQ ID NO: 770617 - protein, 372 aa, Homo sapiens; identical to SEQ ID NO: 770613

SEQ ID NO: 770618 - protein, 114 aa, Homo sapiens
MIVAGTYKHILMPRTGSLDSHQAPATCPTLGHAGRRVGTRKASLLPCWKLLESAVLLLCVFSDDLQHFLAWPHDAGKGSEPKTQAPRATGVGGSHSLERPHLLRTRTGRTTGGR

SEQ ID NO: 770619 - protein, 112 aa, Homo sapiens
PLVLFVCLFFGFCLFADGQWGGARVEGLLCAYIAIVCTRPSPLLLGEWEHANNLNKVFCCHLVKDPLPQDIYDWGLWVKEVKKWPHPISITESQNPWGFELSGWRKTSVCFQ

SEQ ID NO: 770620 - protein, 75 aa, Homo sapiens
GGSWAAAQKATLICKLGQQRPFIPPQGSHTLGGTVKSDSCPVVFKLGSSKPWGISAPGTPEVCYCCSEAFQHFLK

SEQ ID NO: 770621 - protein, 955 aa, Homo sapiens
EFRAGRTEPLAAATPAPAPAPARPAMTGLEDQEFDFEFLFEFNQRDEGAAAAAPEHYGYASSNVSPALPLPTAHSTLPAPCHNLQTSTPGIIPPADHPSGYGAALDGGPAGYFLSSGHTRPDGAPALESPRIEITSCLGLYHNNNQFFHDVEVEDVLPSSKRSPSTATLSLPSLEAYRDPSCLSPASSLSSRSCNSEASSYESNYSYPYASPQTSPWQSPCVSPKTTDPEEGFPRGLGACTLLGSPRHSPSTSPRASVTEESWLGARSSRPASPCNKRKYSLNGRQPPYSPHHSPTPSPHGSPRVSVTDDSWLGNTTQYTSSAIVAAINALTTDSSLDLGDGVPVKSRKTTLEQPPSVALKVEPVGEDLGSPPPPADFAPEDYSSFQHIRKGGFCDQYLAVPQHPYQWAKPKPLSPTSYMSPTLPALDWQLPSHSGPYELRIEVQPKSHHRAHYETEGSRGAVKASAGGHPIVQLHGYLENEPLMLQLFIGTADDRLLRPHAFYQVHRITGKTVSTTSHEAILSNTKVLEIPLLPENSMRAVIDCAGILKLRNSDIELRKGETDIGRKNTRVRLVFRVHVPQPSGRTLSLQVASNPIECSQRSAQELPLVEKQSTDSYPVVGGKKMVLSGHNFLQDSKVIFVEKAPDGHHVWEMEAKTDRDLCKPNSLVVEIPPFRNQRITSPVHVSFYVCNGKRKRSQYQRFTYLPANVPIIKTEPTDDYEPAPTCGPVSQGLSPLPRPYYSQQLAMPPDPSSCLVAGFPPCPQRSTLMPAAPGVSPKLHDLSPAAYTKGVASPGHCHLGLPQPAGEAPAVQDVPRPVATHPGSPGQPPPALLPQQVSAPPSSSCPPGLEHSLCPSSPSPPLPPATQEPTCLQPCSPACPPATGRPQHLPSTVRRDESPTAGPRLLPEVHEDGSPNLAPIPVTVKREPEELDQLYLDDVNEIIRNDLSSTSTHS

SEQ ID NO: 770622 - protein, 353 aa, Homo sapiens
MLQLFIGTADDRLLRPHAFYQVHRITGKTVSTTSHEAILSNTKVLEIPLLPENSMRAVIDCAGILKLRNSDIELRKGETDIGRKNTRVRLVFRVHVPQPSGRTLSLQVASNPIECSQRSAQELPLVEKQSTDSYPVVGGKKMVLSGHNFLQDSKVIFVEKAPDGHHVWEMEAKTDRDLCKPNSLVVEIPPFRNQRITSPVHVSFYVCNGKRKRSQYQRFTYLPANVPIIKTEPTDDYEPAPTCGPVSQGLSPLPRPYYSQQLAMPPDPSSCLVAGFPPCPQRSTLMPAAPGVSPKLHDLSPAAYTKGVASPGHCHLGLPQPAGEAPAVQDVPRPVATHPGSPGQPPPALLPQQ

SEQ ID NO: 770623 - protein, 837 aa, Homo sapiens
EFRAGRTEPLAAATPAPAPAPARPAMTGLEDQEFDFEFLFEFNQRDEGAAAAAPEHYGYASSNVSPALPLPTAHSTLPAPCHNLQTSTPGIIPPADHPSGYGAALDGGPAGYFLSSGHTRPDGAPALESPRIEITSCLGLYHNNNQFFHDVEVEDVLPSSKRSPSTATLSLPSLEAYRDPSCLSPASSLSSRSCNSEASSYESNYSYPYASPQTSPWQSPCVSPKTTDPEEGFPRGLGACTLLGSPRHSPSTSPRASVTEESWLGARSSRPASPCNKRKYSLNGRQPPYSPHHSPTPSPHGSPRVSVTDDSWLGNTTQYTSSAIVAAINALTTDSSLDLGDGVPVKSRKTTLEQPPSVALKVEPVGEDLGSPPPPADFAPEDYSSFQHIRKGGFCDQYLAVPQHPYQWAKPKPLSPTSYMSPTLPALDWQLPSHSGPYELRIEVQPKSHHRAHYETEGSRGAVKASAGGHPIVQLHGYLENEPLMLQLFIGTADDRLLRPHAFYQVHRITGKTVSTTSHEAILSNTKVLEIPLLPENSMRAVIDCAGILKLRNSDIELRKGETDIGRKNTRVRLVFRVHVPQPSGRTLSLQVASNPIECSQRSAQELPLVEKQSTDSYPVVGGKKMVLSGHNFLQDSKVIFVEKAPDGHHVWEMEAKTDRDLCKPNSLVVEIPPFRNQRITSPVHVSFYVCNGKRKRSQYQRFTYLPANVPIIKTEPTDDYEPAPTCGPVSQGLSPLPRPYYSQQLAMPPDPSSCLVAGFPPCPQRSTLMPAAPGVSPKLHDLSPAAYTKGVASPGHCHLGLPQPAGEAPAVQDVPRPVATHPGSPGQPPPALLPQQ

SEQ ID NO: 770624 - protein, 837 aa, Homo sapiens; identical to SEQ ID NO: 770623

SEQ ID NO: 770625 - protein, 837 aa, Homo sapiens; identical to SEQ ID NO: 770623

SEQ ID NO: 770626 - protein, 773 aa, Homo sapiens
MPSTSFPVPSKFPLGPAAAVFGRGETLGPAPRAGGTMKSAEERTLWLCILQRQPRPAAPHGALHPAGPVPQPSDLHTGHHPAGGSPLGVEDVLPSSKRSPSTATLSLPSLEAYRDPSCLSPASSLSSRSCNSEASSYESNYSYPYASPQTSPWQSPCVSPKTTDPEEGFPRGLGACTLLGSPRHSPSTSPRASVTEESWLGARSSRPASPCNKRKYSLNGRQPPYSPHHSPTPSPHGSPRVSVTDDSWLGNTTQYTSSAIVAAINALTTDSSLDLGDGVPVKSRKTTLEQPPSVALKVEPVGEDLGSPPPPADFAPEDYSSFQHIRKGGFCDQYLAVPQHPYQWAKPKPLSPTSYMSPTLPALDWQLPSHSGPYELRIEVQPKSHHRAHYETEGSRGAVKASAGGHPIVQLHGYLENEPLMLQLFIGTADDRLLRPHAFYQVHRITGKTVSTTSHEAILSNTKVLEIPLLPENSMRAVIDCAGILKLRNSDIELRKGETDIGRKNTRVRLVFRVHVPQPSGRTLSLQVASNPIECSQRSAQELPLVEKQSTDSYPVVGGKKMVLSGHNFLQDSKVIFVEKAPDGHHVWEMEAKTDRDLCKPNSLVVEIPPFRNQRITSPVHVSFYVCNGKRKRSQYQRFTYLPANVPIIKTEPTDDYEPAPTCGPVSQGLSPLPRPYYSQQLAMPPDPSSCLVAGFPPCPQRSTLMPAAPGVSPKLHDLSPAAYTKGVASPGHCHLGLPQPAGEAPAVQDVPRPVATHPGSPGQPPPALLPQQ

SEQ ID NO: 770627 - protein, 368 aa, Homo sapiens
MEHRKLHGYLENEPLMLQLFIGTADDRLLRPHAFYQVHRITGKTVSTTSHEAILSNTKVLEIPLLPENSMRAVIDCAGILKLRNSDIELRKGETDIGRKNTRVRLVFRVHVPQPSGRTLSLQVASNPIECSQRSAQELPLVEKQSTDSYPVVGGKKMVLSGHNFLQDSKVIFVEKAPDGHHVWEMEAKTDRDLCKPNSLVVEIPPFRNQRITSPVHVSFYVCNGKRKRSQYQRFTYLPANVPIIKTEPTDDYEPAPTCGPVSQGLSPLPRPYYSQQLAMPPDPSSCLVAGFPPCPQRSTLMPAAPGVSPKLHDLSPAAYTKGVASPGHCHLGLPQPAGEAPAVQDVPRPVATHPGSPGQPPPALLPQQ

SEQ ID NO: 770628 - protein, 82 aa, Homo sapiens
TGADTTEVLVWTCGSLGSWRDSHSIFPASRPAPGTCTLAVRDVLVPCYGRGRSLWRPQLSAEAARHWLTTLMDQGGTEEEIK

SEQ ID NO: 770629 - protein, 716 aa, Homo sapiens
MPSTSFPVPSKFPLGPAAAVFGRGETLGPAPRAGGTMKSAEEEHYGYASSNVSPALPLPTAHSTLPAPCHNLQTSTPGIIPPADHPSGYGAALDGGPAGYFLSSGHTRPDGAPALESPRIEITSCLGLYHNNNQFFHDVEVEDVLPSSKRSPSTATLSLPSLEAYRDPSCLSPASSLSSRSCNSEASSYESNYSYPYASPQTSPWQSPCVSPKTTDPEEGFPRGLGACTLLGSPRHSPSTSPRASVTEESWLGARSSRPASPCNKRKYSLNGRQPPYSPHHSPTPSPHGSPRVSVTDDSWLGNTTQYTSSAIVAAINALTTDSSLDLGDGVPVKSRKTTLEQPPSVALKVEPVGEDLGSPPPPADFAPEDYSSFQHIRKGGFCDQYLAVPQHPYQWAKPKPLSPTSYMSPTLPALDWQLPSHSGPYELRIEVQPKSHHRAHYETEGSRGAVKASAGGHPIVQLHGYLENEPLMLQLFIGTADDRLLRPHAFYQVHRITGKTVSTTSHEAILSNTKVLEIPLLPENSMRAVIDCAGILKLRNSDIELRKGETDIGRKNTRVRLVFRVHVPQPSGRTLSLQVASNPIECSQRSAQELPLVEKQSTDSYPVVGGKKMVLSGHNFLQDSKVIFVEKAPDGHHVWEMEAKTDRDLCKPNSLVVEIPPFRNQRITSPVHVSFYVCNGKRKRSQYQRFTYLPANGNAIFLTVSREHERVGCFF

SEQ ID NO: 770630 - protein, 50 aa, Homo sapiens
MYNSQGENMALLLQKTEGVLVCICTLKLLTVKRQIGIAILQAPLGINFAF

SEQ ID NO: 770631 - protein, 825 aa, Homo sapiens
MPSTSFPVPSKFPLGPAAAVFGRGETLGPAPRAGGTMKSAEEEHYGYASSNVSPALPLPTAHSTLPAPCHNLQTSTPGIIPPADHPSGYGAALDGGPAGYFLSSGHTRPDGAPALESPRIEITSCLGLYHNNNQFFHDVEVEDVLPSSKRSPSTATLSLPSLEAYRDPSCLSPASSLSSRSCNSEASSYESNYSYPYASPQTSPWQSPCVSPKTTDPEEGFPRGLGACTLLGSPRHSPSTSPRASVTEESWLGARSSRPASPCNKRKYSLNGRQPPYSPHHSPTPSPHGSPRVSVTDDSWLGNTTQYTSSAIVAAINALTTDSSLDLGDGVPVKSRKTTLEQPPSVALKVEPVGEDLGSPPPPADFAPEDYSSFQHIRKGGFCDQYLAVPQHPYQWAKPKPLSPTSYMSPTLPALDWQLPSHSGPYELRIEVQPKSHHRAHYETEGSRGAVKASAGGHPIVQLHGYLENEPLMLQLFIGTADDRLLRPHAFYQVHRITGKTVSTTSHEAILSNTKVLEIPLLPENSMRAVIDCAGILKLRNSDIELRKGETDIGRKNTRVRLVFRVHVPQPSGRTLSLQVASNPIECSQRSAQELPLVEKQSTDSYPVVGGKKMVLSGHNFLQDSKVIFVEKAPDGHHVWEMEAKTDRDLCKPNSLVVEIPPFRNQRITSPVHVSFYVCNGKRKRSQYQRFTYLPANVPIIKTEPTDDYEPAPTCGPVSQGLSPLPRPYYSQQLAMPPDPSSCLVAGFPPCPQRSTLMPAAPGVSPKLHDLSPAAYTKGVASPGHCHLGLPQPAGEAPAVQDVPRPVATHPGSPGQPPPALLPQQ

SEQ ID NO: 770632 - protein, 716 aa, Homo sapiens; identical to SEQ ID NO: 770629

SEQ ID NO: 770633 - protein, 353 aa, Homo sapiens; identical to SEQ ID NO: 770622

SEQ ID NO: 770634 - protein, 693 aa, Homo sapiens
MPSTSFPVPSKFPLGPAAAVFGRGETLGPAPRAGGTMKSAEEEHYGYASSNVSPALPLPTAHSTLPAPCHNLQTSTPGIIPPADHPSGYGAALDGGPAGYFLSSGHTRPDGAPALESPRIEITSCLGLYHNNNQFFHDVEVEDVLPSSKRSPSTATLSLPSLEAYRDPSCLSPASSLSSRSCNSEASSYESNYSYPYASPQTSPWQSPCVSPKTTDPEEGFPRGLGACTLLGSPRHSPSTSPRASVTEESWLGARSSRPASPCNKRKYSLNGRQPPYSPHHSPTPSPHGSPRVSVTDDSWLGNTTQYTSSAIVAAINALTTDSSLDLGDGVPVKSRKTTLEQPPSVALKVEPVGEDLGSPPPPADFAPEDYSSFQHIRKGGFCDQYLAVPQHPYQWAKPKPLSPTSYMSPTLPALDWQLPSHSGPYELRIEVQPKSHHRAHYETEGSRGAVKASAGGHPIVQLHGYLENEPLMLQLFIGTADDRLLRPHAFYQVHRITGKTVSTTSHEAILSNTKVLEIPLLPENSMRAVIDCAGILKLRNSDIELRKGETDIGRKNTRVRLVFRVHVPQPSGRTLSLQVASNPIECSQRSAQELPLVEKQSTDSYPVVGGKKMVLSGHNFLQDSKVIFVEKAPGMLFTRGHLRPGLRRWWEPVPSRWSRTHLCTVTGTGLMGCGTEQRLCVARVCIRLWVFV

SEQ ID NO: 770635 - protein, 77 aa, Homo sapiens
WRDSHSIFPASRPAPGTCTLAVRDVLVPCYGRGRSLWRPQLSAEAARHWLTTLMDQGGTEEEMWVPGEMPCHRRERH

SEQ ID NO: 770636 - protein, 155 aa, Homo sapiens
MTPGKTSLVSLLLLLSLEAIVKAGITIPRNPGCPNSEDKNFPRTVMVNLNIHNRNTNTNPKRSSDYYNRSTSPWNLHRNEDPERYPSVIWEAKCRHLGCINADGNVDYHMNSVPIQQEILVLRREPPHCPNSFRLEKILVSVGCTCVTPIVHHVA

SEQ ID NO: 770637 - protein, 155 aa, Homo sapiens; identical to SEQ ID NO: 770636

SEQ ID NO: 770638 - protein, 50 aa, Homo sapiens
LEARSLKSEPPGRVKVSAGLYFFWRRFCSLFSQAFRGHWNSLVCNHITPI

SEQ ID NO: 770639 - protein, 187 aa, Homo sapiens
MEWKLERTAPRRVRTEEEMLWVLDSVNATYSDFKSNFAKRLSAEVPVASSPITTRWQQSQTRALSSDSFGEEQSTTYLPEASGSVLKTPPEKETLTLGSRKEQLKTPSKGISETSNSALHFCKAPHAMDRDWKESVASKGQKCLKQLFVTQNVVQQANGKMQLCEQSECVWKDHFSGSMKKRFEQED

SEQ ID NO: 770640 - protein, 130 aa, Homo sapiens
MGTHEAVRASRSVTFQAHRVLALGFFVARDSPATFIGQWRTDLGDSEVLRELARETLGLCTRSAPQDKGLGGEVPRGRLRPVGLCAGAGEPRDGARGCGDPLERYLDRQDPRCRSSTTHCPPPSRVRTLS

SEQ ID NO: 770641 - protein, 390 aa, Homo sapiens
MEEPGAQCAPPPPAGSETWVPQANLSSAPSQNCSAKDYIYQDSISLPWKVLLVMLLALITLATTLSNAFVIATVYRTRKLHTPANYLIASLAVTDLLVSILVMPISTMYTVTGRWTLGQVVCDFWLSSDITCCTASILHLCVIALDRYWAITDAVEYSAKRTPKRAAVMIALVWVFSISISLPPFFWRQAKAEEEVSECVVNTDHILYTVYSTVGAFYFPTLLLIALYGRIYVEARSRILKQTPNRTGKRLTRAQLITDSPGSTSSVTSINSRVPDVPSESGSPVYVNQVKVRVSDALLEKKKLMAARERKATKTLGIILGAFIVCWLPFFIISLVMPICKDACWFHLAIFDFFTWLGYLNSLINPIIYTMSNEDFKQAFHKLIRFKCTS

SEQ ID NO: 770642 - protein, 95 aa, Homo sapiens
LLKKSPVLQYLNYLAQILIAMSPLSNNSLFLEYSKNPLREFLHKGLHVSLSTDDPMQFHYTKESRSALQPGRQSKTPSKKKKRYFERKRPQVFRG

SEQ ID NO: 770643 - protein, 261 aa, Homo sapiens
MWMLSKELSSLTDSMEYRTLWYGKGLTFSFHGYTNLLSLTAVLDHVMCQSSLIAKIYRMSTSRCTWGPVASQLPRILTSIEEDYDKRVLLSITTEILKSVVAHFDAGELITYRELVSRQMSNDLTEQAATFGLILDDVSLTHLTFGKEFTEAVEAKQVAQREAESTRFVAEKAEQQKKAAIISAEGDSKAAELIANSLATAGNSLIELRKLEAVEDITFQLLYSGNISSLPAGQSMLLQLPLRGHPACTSAGQLGHSPDDS

SEQ ID NO: 770644 - protein, 248 aa, Homo sapiens
MGIHFSCIRGDLKKPSKKRVKREPYSTTMLQVTSLSPINEILRRYSLYTNQHWRHHGFWRKKIQPQEASEEPPAHKDRGGGERPVNARVVRVAPLRPGFALCGYAVQDISKEDTVYDICNEDAVDISDEDTVDISNEASVHDISNEAAVCDISNDAVNISNEAAVRDISNDAVDICNEAAVHDISNEDTIEDISYEDTVYDITNEDAVRYLCKKDATKEPENTGELIRNEESMTDDEDKEAQRGAPGE

SEQ ID NO: 770645 - protein, 76 aa, Homo sapiens
FGFYPSSSSQRNQGSLGIWLMPGDGECQLDLKGRLAACVWQVRQTQEPAWWGIPGYPGDTVSAELNNIRNGSPRNE

SEQ ID NO: 770646 - protein, 237 aa, Homo sapiens
PFPQQAKAGDSLHIFKEDKSPSDSVELNGVHTGRLDLDQIVFKMPNWGGGAKCGACEKTVYHAEEIQCNGRSFHKTCFHCMACRKALDSTTVAAHESEIYCKVCYGRRYGPKGIGYGQGAGCLSTDTGEHLGLQFQQSPKPARSVTTSNPSKFTAKFGESEKCPRCGKSVYAAEKVMGGGKPWHKTCFRCAICGKSLESTNVTDKDGELYCKVCYAKNFGPTGIGFGGLTQQVEKKE

SEQ ID NO: 770647 - protein, 193 aa, Homo sapiens
PFPQQAKAGDSLHIFKEDKSPSDSVELNGVHTGRLDLDQIVFKMPNWGGGAKCGACEKTVYHAEEIQCNGRSFHKTCFHCSPQSRHAQLPPATLPNSLRSLESPRSALDVASQSMLLRRLWEVASLGTRPVSAVPSVGRVWSPQMSLTKMGNFIAKFAMPKILAPRVLGLEALHNKWKRKNEEVRRFSDFLRA

SEQ ID NO: 770648 - protein, 179 aa, Homo sapiens
PFPQQAKAGDSLHIFKEDKSPSDSVELNGVHTGRLDLDQIVFKMPNWGGGAKCGACEKTVYHAEEIQCNGRSFHKTCFHCMACRKALDSTTVAAHESEIYCKVCYGRRYGPKGIGYGQGAGCLSTDTGEHLGLQFQQSPKPARSVTTSNPSKFTAKSPSAPFEQNIYFLEVWGGSFDKT

SEQ ID NO: 770649 - protein, 152 aa, Homo sapiens
PFPQQAKAGDSLHIFKEDKSPSDSVELNGVHTGRLDLDQIVFKMPNWGGGAKCGACEKTVYHAEEIQCNGRSFHKTCFHCMACRKALDSTTVAAHESEIYCKVCYGRRYGPKGIGYGQGAGCLSTDTGEHLGLQFQHPKPARSVTQHLNTRV

SEQ ID NO: 770650 - protein, 237 aa, Homo sapiens; identical to SEQ ID NO: 770646

SEQ ID NO: 770651 - protein, 237 aa, Homo sapiens; identical to SEQ ID NO: 770646

SEQ ID NO: 770652 - protein, 100 aa, Homo sapiens
GGPPKKNPPLLYFPKKKFHLGESEKCPRCGKSVYAAEKVMGGGKPWHKTCFRCAICGKSLESTNVTDKDGELYCKVCYAKNFGPTGIGFGGLTQQVEKKE

SEQ ID NO: 770653 - protein, 51 aa, Homo sapiens
MLAEQVELWWSQQPRRSALCFVVAVGLVAGCGRGRRGTAVNHQQPLQVNGG

SEQ ID NO: 770654 - protein, 33 aa, Homo sapiens
MGFRCVGRAGLQLLTASDPPASASRGAGIADGV

SEQ ID NO: 770655 - protein, 108 aa, Homo sapiens [sequence omitted]

SEQ ID NO: 770656 - protein, 109 aa, Homo sapiens
MERRGVGWKSWTAPGCRWPCIIHGICKTLHLLRCSFFSCQTDIIPSLLFYNTDLPTGVGRGAGEAEPLPGELRNNLGRTFGMSARTEARTAGSPGKVGNRAAGSLVPPW

SEQ ID NO: 770657 - protein, 97 aa, Homo sapiens
VWLLGAKIKQLVGKQSIIAGQGVCPGTRAGSIFTDEPTRRMFSGTSGTCQEVCSVSLWFGTDPCSSPLAHWCWCLAESALPSCEGQTEQMALTTGMP

SEQ ID NO: 770658 - protein, 76 aa, Homo sapiens
QNMSFSVGRSLAEDYGDGLSNKTAWISILVPAPGGLTSLQFRFFTCKIGIRILLEELNKLRSMEYLEQGTRWILEC

SEQ ID NO: 770659 - protein, 237 aa, Homo sapiens
MSRPAHPAGIGCERGRTKPTPRARAHQWKRPLVLIDVPPSANGDEGKLQRVAPASADKSRPAGLGLHSEPSPVPSAASSAGGSGGLSFRAASSLPVSPSLAVSMKAFSPVRSVRKNSLSDHSLGISRSKTPVDDPMSLLYNMNDCYSKLKELVPSIPQNKKVSKMEILQHVIDYILDLQIALDSHPTIVSLHHQRPGQNQASRTPLTTLNTDISILSLQASEFPSELMSNDSKALCG

SEQ ID NO: 770660 - protein, 237 aa, Homo sapiens; identical to SEQ ID NO: 770659

SEQ ID NO: 770661 - protein, 237 aa, Homo sapiens; identical to SEQ ID NO: 770659

SEQ ID NO: 770662 - protein, 237 aa, Homo sapiens; identical to SEQ ID NO: 770659

SEQ ID NO: 770663 - protein, 102 aa, Homo sapiens
MSLLYNMNDCYSKLKELVPSIPQNKKVSKMEILQHVIDYILDLQIALDSHPTIVSLHHQRPGQNQASRTPLTTLNTDISILSLQASEFPSELMSNDSKALCG

SEQ ID NO: 770664 - protein, 237 aa, Homo sapiens; identical to SEQ ID NO: 770659

SEQ ID NO: 770665 - protein, 244 aa, Homo sapiens
MSRPAHPAGIGCERGRTKPTPRARAHQWKRPLVLIDVPPSANGDEGKLQRVAPASADKSRPAGLGLHSEPSPVPSAASSAGGSGGLSFRAASSLPVSPSLAVSMKAFSPVRSVRKNSLSDHSLGISRSKTPVDDPMSLLYNMNDCYSKLKELVPSIPQNKKVSKMEILQHVIDYILDLQIALDSHPTIVSLHHQRPGQNQASRTPLTTLNTDISILSLQVRPAPGSPPRRRTLPRSSGLSLGDP

SEQ ID NO: 770666 - protein, 237 aa, Homo sapiens; identical to SEQ ID NO: 770659

SEQ ID NO: 770667 - protein, 237 aa, Homo sapiens; identical to SEQ ID NO: 770659

SEQ ID NO: 770668 - protein, 244 aa, Homo sapiens; identical to SEQ ID NO: 770665

SEQ ID NO: 770669 - protein, 219 aa, Homo sapiens
MSRPAHPAGIGCERGRTKPTPRARAHQWKRPLVLIDVPPSANGDEGKLQRVAPASADKSRPAGLGLHSEPSPVPSAASSAGGSGGLSFRAASSLPVSPSLAVSMKAFSPVRSVRKNSLSDHSLGISRSSKLKELVPSIPQNKKVSKMEILQHVIDYILDLQIALDSHPTIVSLHHQRPGQNQASRTPLTTLNTDISILSLQASEFPSELMSNDSKALCG

SEQ ID NO: 770670 - protein, 237 aa, Homo sapiens; identical to SEQ ID NO: 770659

SEQ ID NO: 770671 - protein, 237 aa, Homo sapiens; identical to SEQ ID NO: 770659

SEQ ID NO: 770672 - protein, 244 aa, Homo sapiens; identical to SEQ ID NO: 770665

SEQ ID NO: 770673 - protein, 244 aa, Homo sapiens; identical to SEQ ID NO: 770665

SEQ ID NO: 770674 - protein, 340 aa, Homo sapiens
METSALKQQEQPAATKIRNLPWVEKYRPQTLNDLISHQDILSTIQKFINEDRLPHLLLYGPPGTGKTSTILACAKQLYKDKEFGSMVLELNASDDRGIDIIRGPILSFASTRTIFKKGFKLVILDEADAMTQDAQNALRRVIEKFTENTRFCLICNYLSKIIPALQSRCTRFRFGPLTPELMVPRLEHVVEEEKVDISEDGMKALVTLSSGDMRRALNILQSTNMAFGKVTEETVYTCTGHPLKSDIANILDWMLNQDFTTAYRNITELKTLKGLALHDILTEIHLFVHRVDFPSSVRIHLLTKMADIEYRLSVGTNEKIQLSSLIAAFQVTRDLIVAEA

SEQ ID NO: 770675 - protein, 151 aa, Homo sapiens
ESCFCARTVSARVSGSGRGWSLCRRLGDATISADLVTFVSPPWRPQHSSSRSSPRRPRSGTCPGRRRPSGGGGQRGPGGRAGRRWLGWQVTGPQPDLFPSSPGLQPGPTCRGFPRHPPATQTRPFCLGLLPVLTLSPPAPFAEEEGGFRTW

SEQ ID NO: 770676 - protein, 266 aa, Homo sapiens
METSALKQQEQPAATKIRNLPWVEKYRPQTLNDLISHQDILSTIQKFINEDRLPHLLLYGPPGTGKTSTILACAKQLYKDKEFGSMVLELNASDDRGIDIIRGPILSFASTRTIFKKGFKLVILDEADAMTQDAQNALRRVIEKFTENTRFCLICNYLSKIIPALQSRCTRFRFGPLTPELMVPRLEHVVEEEKVDISEDGMKALVTLSSGDMRRALNILQSTNMAFGKVTEETVYTCTGHPLKSDIANILDWMLNQDFTTAVLPG

SEQ ID NO: 770677 - protein, 245 aa, Homo sapiens
MVEKYRPQTLNDLISHQDILSTIQKFINEDRLPHLLLYGPPGTGKTSTILACAKQLYKDKEFGSMVLELNASDDRGIDIIRGPILSFASTRTIFKKGFKLVILDEADAMTQDAQNALRRVIEKFTENTRFCLICNYLSKIIPALQSRCTRFRFGPLTPELMVPRLEHVVEEEKVDISEDGMKALVTLSSGDMRRALNILQSTNMAFGKVTEETVYTCTGHPLKSDIANILDWMLNQDFTTAVLPG

SEQ ID NO: 770678 - protein, 361 aa, Homo sapiens
  misc_feature (46)..(46): Xaa can be any naturally occurring amino acid
METSALKQQEQPAATKIRNLPWVEKYRPQTLNDLISHQDILSTTEXTPIQGKTLIQIGKDPGLGPNNLLAFSFLTGVPPPKGGEPGKTSTILACAKQLYKDKEFGSMVLELNASDDRGIDIIRGPILSFASTRTIFKKGFKLVILDEADAMTQDAQNALRRVIEKFTENTRFCLICNYLSKIIPALQSRCTRFRFGPLTPELMVPRLEHVVEEEKVDISEDGMKALVTLSSGDMRRALNILQSTNMAFGKVTEETVYTCTGHPLKSDIANILDWMLNQDFTTAYRNITELKTLKGLALHDILTEIHLFVHRVDFPSSVRIHLLTKMADIEYRLSVGTNEKIQLSSLIAAFQVTRDLIVAEA

SEQ ID NO: 770679 - protein, 340 aa, Homo sapiens; identical to SEQ ID NO: 770674

SEQ ID NO: 770680 - protein, 181 aa, Homo sapiens
MVLELNASDDRGIDIIRGPILSFASTRTIFKKGFKLVILDEADAMTQDAQNALRRVIEKFTENTRFCLICNYLSKIIPALQSRCTRFRFGPLTPELMVPRLEHVVEEEKVDISEDGMKALVTLSSGDMRRALNILQSTNMAFGKVTEETVYTCTGHPLKSDIANILDWMLNQDFTTAVLPG

SEQ ID NO: 770681 - protein, 619 aa, Homo sapiens
MEVEAAEARSPAPGYKRSGRRYKCLSCTKTFPNAPRAARHAATHGPADCSEEVAEVKPKPETEAKAEEASGEKVSGSAAKPRPYACPLCPKAYKTAPELRSHGRSHTGEKPFPCPECGRRFMQPVCLRVHLASHAGELPFRCAHCPKAYGALSKLKIHQRGHTGERPYACADCGKSFADPSVFRKHRRTHAGLRPYSCERCGKAYAELKDLRNHERSHTGERPFLCSECGKSFSRSSSLTCHQRIHAAQKPYRCPACGKGFTQLSSYQSHERTHSGEKPFLCPRCGRMFSDPSSFRRHQRAHEGVKPYHCEKCGKDFRQPADLAMHRRVHTGDRPFKCLQCDKTFVASWDLKRHALVHSGQRPFRCEECGRAFAERASLTKHSRVHSGERPFHCNACGKSFVVSSSLRKHERTHRSSEAAGVPPAQELVVGLALPVGVAGESSAAPAAGAGLGDPPAGLLGLPPESGGVMATQWQVVGMTVEHVECQDAGVREAPGPLEGAGEAGGEEADEKPPQFVCRECKETFSTMTLLRRHERSHPELRPFPCTQCGKSFSDRAGLRKHSRTHSSVRPYTCPHCPKAFLSASDLRKHERTHPVPMGTPTPLEPLVALLGMPEEGPA

SEQ ID NO: 770682 - protein, 619 aa, Homo sapiens; identical to SEQ ID NO: 770681

SEQ ID NO: 770683 - protein, 619 aa, Homo sapiens; identical to SEQ ID NO: 770681

SEQ ID NO: 770684 - protein, 697 aa, Homo sapiens
EEERKHKCWGPVTSRQCQLPDLAHWLSPFLVPVALRTLGPTPFFNEQIREENERRMSEPGMLGRKDVWVPRETPFTKAMEVEAAEARSPAPGYKRSGRRYKCLSCTKTFPNAPRAARHAATHGPADCSEEVAEVKPKPETEAKAEEASGEKVSGSAAKPRPYACPLCPKAYKTAPELRSHGRSHTGEKPFPCPECGRRFMQPVCLRVHLASHAGELPFRCAHCPKAYGALSKLKIHQRGHTGERPYACADCGKSFADPSVFRKHRRTHAGLRPYSCERCGKAYAELKDLRNHERSHTGERPFLCSECGKSFSRSSSLTCHQRIHAAQKPYRCPACGKGFTQLSSYQSHERTHSGEKPFLCPRCGRMFSDPSSFRRHQRAHEGVKPYHCEKCGKDFRQPADLAMHRRVHTGDRPFKCLQCDKTFVASWDLKRHALVHSGQRPFRCEECGRAFAERASLTKHSRVHSGERPFHCNACGKSFVVSSSLRKHERTHRSSEAAGVPPAQELVVGLALPVGVAGESSAAPAAGAGLGDPPAGLLGLPPESGGVMATQWQVVGMTVEHVECQDAGVREAPGPLEGAGEAGGEEADEKPPQFVCRECKETFSTMTLLRRHERSHPELRPFPCTQCGKSFSDRAGLRKHSRTHSSVRPYTCPHCPKAFLSASDLRKHERTHPVPMGTPTPLEPLVALLGMPEEGPA

SEQ ID NO: 770685 - protein, 654 aa, Homo sapiens
LRPRGLGGPVAGRVVVQSHATQSQPVYAETPFTKAMEVEAAEARSPAPGYKRSGRRYKCLSCTKTFPNAPRAARHAATHGPADCSEEVAEVKPKPETEAKAEEASGEKVSGSAAKPRPYACPLCPKAYKTAPELRSHGRSHTGEKPFPCPECGRRFMQPVCLRVHLASHAGELPFRCAHCPKAYGALSKLKIHQRGHTGERPYACADCGKSFADPSVFRKHRRTHAGLRPYSCERCGKAYAELKDLRNHERSHTGERPFLCSECGKSFSRSSSLTCHQRIHAAQKPYRCPACGKGFTQLSSYQSHERTHSGEKPFLCPRCGRMFSDPSSFRRHQRAHEGVKPYHCEKCGKDFRQPADLAMHRRVHTGDRPFKCLQCDKTFVASWDLKRHALVHSGQRPFRCEECGRAFAERASLTKHSRVHSGERPFHCNACGKSFVVSSSLRKHERTHRSSEAAGVPPAQELVVGLALPVGVAGESSAAPAAGAGLGDPPAGLLGLPPESGGVMATQWQVVGMTVEHVECQDAGVREAPGPLEGAGEAGGEEADEKPPQFVCRECKETFSTMTLLRRHERSHPELRPFPCTQCGKSFSDRAGLRKHSRTHSSVRPYTCPHCPKAFLSASDLRKHERTHPVPMGTPTPLEPLVALLGMPEEGPA

SEQ ID NO: 770686 - protein, 477 aa, Homo sapiens
MEVEAAEARSPAPGYKRSGRRYKCLSCTKTFPNAPRAARHAATHGPADCSEEVAEVKPKPETEAKAEEASGEKVSGSAAKPRPYACPLCPKAYKTAPELRSHGRSHTGEKPFPCPECGRRFMQPVCLRVHLASHAGELPFRCAHCPKAYGALSKLKIHQRGHTGERPYACADCGKSFADPSVFRKHRRTHAGLRPYSCERCGKAYAELKDLRNHERSHTGERPFLCSECGKSFSRSSSLTCHQRIHAAQKPYRCPACGKGFTQLSSYQSHERTHSGEKPFLCPRCGRMFSDPSSFRRHQRAHEGVKPYHCEKCGKDFRQPADLAMHRRVHTGDRPFKCLQCDKTFVASWDLKRHALVHSGQRPFRCEECGRAFAERASLTKHSRVHSGERPFHCNACGKSFVVSSSLRKHERTHRSSEAAGVPPAQELVVGLALPVGVAGESSAAPAAGAGLGDPPAGLHLPPLSQGLLECQRLAQA

SEQ ID NO: 770687 - protein, 415 aa, Homo sapiens
MGRQTALKRWPRSHTGERPFLCSECGKSFSRSSSLTCHQRIHAAQKPYRCPACGKGFTQLSSYQSHERTHSGEKPFLCPRCGRMFSDPSSFRRHQRAHEGVKPYHCEKCGKDFRQPADLAMHRRVHTGDRPFKCLQCDKTFVASWDLKRHALVHSGQRPFRCEECGRAFAERASLTKHSRVHSGERPFHCNACGKSFVVSSSLRKHERTHRSSEAAGVPPAQELVVGLALPVGVAGESSAAPAAGAGLGDPPAGLLGLPPESGGVMATQWQVVGMTVEHVECQDAGVREAPGPLEGAGEAGGEEADEKPPQFVCRECKETFSTMTLLRRHERSHPELRPFPCTQCGKSFSDRAGLRKHSRTHSSVRPYTCPHCPKAFLSASDLRKHERTHPVPMGTPTPLEPLVALLGMPEEGPA

SEQ ID NO: 770688 - protein, 412 aa, Homo sapiens [sequence omitted]

SEQ ID NO: 770689 - protein, 681 aa, Homo sapiens
LRYSRVIPVPPRWRRQARAPRAQETASRGGGLRIVAGGSVAAGRRTLSLELRLEKETPFTKAMEVEAAEARSPAPGYKRSGRRYKCLSCTKTFPNAPRAARHAATHGPADCSEEVAEVKPKPETEAKAEEASGEKVSGSAAKPRPYACPLCPKAYKTAPELRSHGRSHTGEKPFPCPECGRRFMQPVCLRVHLASHAGELPFRCAHCPKAYGALSKLKIHQRGHTGERPYACADCGKSFADPSVFRKHRRTHAGLRPYSCERCGKAYAELKDLRNHERSHTGERPFLCSECGKSFSRSSSLTCHQRIHAAQKPYRCPACGKGFTQLSSYQSHERTHSGEKPFLCPRCGRMFSDPSSFRRHQRAHEGVKPYHCEKCGKDFRQPADLAMHRRVHTGDRPFKCLQCDKTFVASWDLKRHALVHSGQRPFRCEECGRAFAERASLTKHSRVHSGERPFHCNACGKSFVVSSSLRKHERTHRSSEAAGVPPAQELVVGLALPVGVAGESSAAPAAGAGLGDPPAGLLGLPPESGGVMATQWQVVGMTVEHVECQDAGVREAPGPLEGAGEAGGEEADEKPPQFVCRECKETFSTMTLLRRHERSHPELRPFPCTQCGKSFSDRAGLRKHSRTHSSVRPYTCPHCPKAFLSASDLRKHERTHPVPMGTPTPLEPLVALLGMPEEGPA

SEQ ID NO: 770690 - protein, 610 aa, Homo sapiens
GVSTSLIRETPFTKCLSCTKTFPNAPRAARHAATHGPADCSEEVAEVKPKPETEAKAEEASGEKVSGSAAKPRPYACPLCPKAYKTAPELRSHGRSHTGEKPFPCPECGRRFMQPVCLRVHLASHAGELPFRCAHCPKAYGALSKLKIHQRGHTGERPYACADCGKSFADPSVFRKHRRTHAGLRPYSCERCGKAYAELKDLRNHERSHTGERPFLCSECGKSFSRSSSLTCHQRIHAAQKPYRCPACGKGFTQLSSYQSHERTHSGEKPFLCPRCGRMFSDPSSFRRHQRAHEGVKPYHCEKCGKDFRQPADLAMHRRVHTGDRPFKCLQCDKTFVASWDLKRHALVHSGQRPFRCEECGRAFAERASLTKHSRVHSGERPFHCNACGKSFVVSSSLRKHERTHRSSEAAGVPPAQELVVGLALPVGVAGESSAAPAAGAGLGDPPAGLLGLPPESGGVMATQWQVVGMTVEHVECQDAGVREAPGPLEGAGEAGGEEADEKPPQFVCRECKETFSTMTLLRRHERSHPELRPFPCTQCGKSFSDRAGLRKHSRTHSSVRPYTCPHCPKAFLSASDLRKHERTHPVPMGTPTPLEPLVALLGMPEEGPA

SEQ ID NO: 770691 - protein, 537 aa, Homo sapiens
MEVEAAEARSPAPGYKRSGRRYKCLSCTKTFPNAPRAARHAATHGPADCSEEVAEVKPKPETEAKAEEASGEKVSGSAAKPRPYACPLCPKAYKTAPELRSHGRSHTGEKPFPCPECGRRFMQPVCLRVHLASHAGELPFRCAHCPKAYGALSKLKIHQRGHTGERPYACADCGKSFADPSVFRKHRRTHAGLRPYSCERCGKAYAELKDLRNHERSHTGERPFLCSECGKSFSRSSSLTCHQRIHAAQKPYRCPACGKGFTQLSSYQSHERTHSGEKPFLCPRCGRMFSDPSSFRRHQRAHEGVKPYHCEKCGKDFRQPADLAMHRRVHTGDRPFKCLQCDKTFVASWDLKRHALVHSGQRPFRCEECGRAFAERASLTKHSRVHSGERPFHCNACGKSFVVSSSLRKHERTHRSSEAAGVPPAQELVVGLALPVGVAGESSAAPAAGAGLGDPPAGLLGLPPESGGVMATQWQVVGMTVEHVECQDAGVREAPGPLEGAGEAGGEEADENPHRGLPVPPFAWLCSLDSRSLPLSN

SEQ ID NO: 770692 - protein, 332 aa, Homo sapiens [sequence omitted]

SEQ ID NO: 770693 - protein, 111 aa, Homo sapiens
GIYRHTITGREAEPLGEHIAGVQPHAVMGAGWTLCVKTFFLCLVLGSEIHGAHSQEGENENEVRKTGTTMTRRLSWTRQGSPELHPLSPLARPMLPYRASCRRSGFPPSSS

SEQ ID NO: 770694 - protein, 141 aa, Homo sapiens
SVVVGSKGLALGNLTVSSPPVASLSPTSGSIGGGTTLVITGNGFYPGNTTVTIGDEPCQIISINPNEVYCRTPAGTTGMVDVKIFVNTIAYPPLLFTYALEDTPFLRGIIPSRGPPGTEIEITGSNFGFEILEISVMINNI

SEQ ID NO: 770695 - protein, 40 aa, Homo sapiens
CGARSILIEEVIIGVFVLKDSPNGQNGVGGEFSSKEQSIQ

SEQ ID NO: 770696 - protein, 103 aa, Homo sapiens
CGILSGVWLEWSGYCPKLFCLAGLPLSSSLGWREQAFVGAFLVSFGISEFSFFNYISGIYKTERNQGTLHHVVPPVSRSLDSLSSLHLSESSCACFLYNIYTF

SEQ ID NO: 770697 - protein, 132 aa, Homo sapiens
GGNIFEGNCYGKDILSVHKEASIGQELSKFNPCGKVFTLTPDLAAHLGILNARQPYKCKECRKGFKYFASLDNHMGIHIGEKFCEFQECRRAITHSSHLKQCVTVHTGKKSKKTKKHGKSFTNFSQLSAHVK

SEQ ID NO: 770698 - protein, 96 aa, Homo sapiens
LFQVKELERDRSRLCRRGGGTGQGCQLLRPLVLSPGPRGHLCPCVPMLPGRTGLVPCQEAELGNFRSLCLPGLGQAGLGQLRAPVRVQGYTKQRAS

SEQ ID NO: 770699 - protein, 113 aa, Homo sapiens
MCGCSRVVIIQKFSVLLGCRFPVLCQESRLLLGLFCLCCWCSGCWVLQLQIWGTGSKKLTPCCSAGPEVPAGLYLSESSYISCLYSFRVLSCSGQEEGESVSTPSSQKQKFPR

SEQ ID NO: 770700 - protein, 135 aa, Homo sapiens
APGKSMEASVDVSAPKVEADVSLPSMQGDLKTTDLSIQPPSADLKVQAGQMDVKLPEGQVPEGAGLKEHLPKVEMPSLKMPKVDLKGPQVDIKGPKLDLKVSKAEVTAPDVEVSLPSVEVDVQAPRAKLDSAQLE

SEQ ID NO: 770701 - protein, 104 aa, Homo sapiens
QEPSEREESTVEGAPVNESCGAANRADLHTQHGDFPGPDSRTCPQRLAASRAPSVTKMQRSGRHCTTPGSGAVAQVGIQRCNLNSLQTPPPRFKQFSCLSLLSS

SEQ ID NO: 770702 - protein, 125 aa, Homo sapiens
TPPSVRPTPASHPQGSPSQPQMTLSFLAVAGAPVLRRGVPRPLRLSVACRAPRAPRSDLQRLRSDCLCLQHAGPSPAAPAPHLPGTCPASACMWIDPHGPWPTLVPGATQGHWRSQLFIDHNCGH

SEQ ID NO: 770703 - protein, 650 aa, Homo sapiens
MSPPGARTLCQPLLFPACWRARCSRLPPSALLPPLGPAPCPPGQPGQPGRHQGSCPMDRAPQRQHRASRELLAAKKTHTSQIEVIPCKICGDKSSGIHYGVITCEGCKGFFRRSQRCNAAYSCTRQQNCPIDRTSRNRCQHCRLQKCLALGMSRDAVKFGRMSKKQRDSLHAEVQKQLQQRQQQQQEPVVKTPPAGAQGADTLTYTLGLPDGQLPLGSSPDLPEASACPPGLLKASGSGPSYSNNLAKAGLNGASCHLEYSPERGKAEGRESFYSTGSQLTPDRCGLRFEEHRHPGLGELGQGPDSYGSPSFRSTPEAPYASLTEIEHLVQSVCKSYRETCQLRLEDLLRQRSNIFSREEVTGYQRKSMWEMWERCAHHLTEAIQYVVEFAKRLSGFMELCQNDQIVLLKAGAMEVVLVRMCRAYNADNRTVFFEGKYGGMELFRALGCSELISSIFDFSHSLSALHFSEDEIALYTALVLINAHRPGLQEKRKVEQLQYNLELAFHHHLCKTHRQSILAKLPPKGKLRSLCSQHVERLQIFQHLHPIVVQAAFPPLYKELFSTETESPVGCPSDLEEGLLASPYGLLAHLPGPRSTLTLFLSHEPWRVVPTSSLEVSRCCGWLSVSRPAWQWDNRQRVGLAEHHLQPQL

SEQ ID NO: 770704 - protein, 650 aa, Homo sapiens; identical to SEQ ID NO: 770703

SEQ ID NO: 770705 - protein, 650 aa, Homo sapiens; identical to SEQ ID NO: 770703

SEQ ID NO: 770706 - protein, 434 aa, Homo sapiens
MSPPGARTLCQPLLFPACWRARCSRLPPSALLPPLGPAPCPPGQPGQPGRHQGSCPMDRAPQRQHRASRELLAAKKTHTSQIEVIPCKICGDKSSGIHYGVITCEGCKGFFRRSQRCNAAYSCTRQQNCPIDRTSRNRCQHCRLQKCLALGMSRDAVKFGRMSKKQRDSLHAEVQKQLQQRQQQQQEPVVKTPPAGAQGADTLTYTLGLPDGQLPLGSSPDLPEASACPPGLLKASGSGPSYSNNLAKAGLNGASCHLEYSPERGKAEGRESFYSTGSQLTPDRCGLRFEEHRHPGLGELGQGPDSYGSPSFRSTPEAPYASLTEIEHLVQSVCKSYRETCQLRLEDLLRQRSNIFSREEVTGYQRKSMWEMWERCAHHLTEAIQYVVEFAKRLSGFMELCQNDQIVLLKAGAMEVVLVRCAGAAEMLRNPLGS

SEQ ID NO: 770707 - protein, 292 aa, Homo sapiens
MPAALVENSQVICEVWASNLEEEMRKIREIVLSYSYIAMDTEFPGVVVRPIGEFRSSIDYQYQLLRCNVDLLKIIQLGLTFTNEKGEYPSGINTWQFNFKFNLTEDMYSQDSIDLLANSGLQFQKHEEEGIDTLHFAELLMTSGVVLCDNVKWLSFHSGYDFGYMVKLLTDSRLPEEEHEFFHILNLFFPSIYDVKYLMKSCKNLKGGLQEVADQLDLQRIGRQHQAGSDSLLTGMAFFRMKELFFEDSIDDAKYCGRLYGLGTGVAQKQNEDVDSAQEKMSILAIINNMQQ

SEQ ID NO: 770708 - protein, 292 aa, Homo sapiens; identical to SEQ ID NO: 770707

SEQ ID NO: 770709 - protein, 292 aa, Homo sapiens; identical to SEQ ID NO: 770707

SEQ ID NO: 770710 - protein, 292 aa, Homo sapiens; identical to SEQ ID NO: 770707

SEQ ID NO: 770711 - protein, 292 aa, Homo sapiens; identical to SEQ ID NO: 770707

SEQ ID NO: 770712 - protein, 326 aa, Homo sapiens
MPAALVENSQVICEVWASNLEEEMRKIREIVLSYSYIAMDTEFPGVVVRPIGEFRSSIDYQYQLLRCNVDLLKIIQLGLTFTNEKGEYPSGINTWQFNFKFNLTYKKEKVNNNTCVAWAKRHRRTDNTYPLHFYGNTREDMYSQDSIDLLANSGLQFQKHEEEGIDTLHFAELLMTSGVVLCDNVKWLSFHSGYDFGYMVKLLTDSRLPEEEHEFFHILNLFFPSIYDVKYLMKSCKNLKGGLQEVADQLDLQRIGRQHQAGSDSLLTGMAFFRMKELFFEDSIDDAKYCGRLYGLGTGVAQKQNEDVDSAQEKMSILAIINNMQQ

SEQ ID NO: 770713 - protein, 238 aa, Homo sapiens
MPAALVENSQVICEVWASNLEEEMRKIREIVLSYSYIAMDTEFPGVVVRPIGEFRSSIDYQYQLLRCNVDLLKIIQLGLTFTNEKGEYPSGINTWQFNFKFNLTGYDFGYMVKLLTDSRLPEEEHEFFHILNLFFPSIYDVKYLMKSCKNLKGGLQEVADQLDLQRIGRQHQAGSDSLLTGMAFFRMKELFFEDSIDDAKYCGRLYGLGTGVAQKQNEDVDSAQEKMSILAIINNMQQ

SEQ ID NO: 770714 - protein, 322 aa, Homo sapiens
MPAALVENSQVICEVWASNLEEEMRKIREIVLSYSYIAMDTEFPGVVVRPIGEFRSSIDYQYQLLRCNVDLLKIIQLGLTFTNEKGEYPSGINTWQFNFKFNLTEDMYSQDSIDLLANSGLQFQKHEEEGIDTLHFAELLMTSGVVLCDNVKWLSFHSGYDFGYMVKLLTDSRLPEEEHEFFHILNLFFPSIYDVKYLMKSCKNLKGGLQEVADQLDLQRIGRQHQAGSDSLLTGMAFFRMKEVSFLECDHRPLGSNLLKAKEVVDGLLCGLRFVEHLFFIYLLFIFFEMKPCSVTQAGVQWCDLSSLQPPPPGFKLSASAS

SEQ ID NO: 770715 - protein, 128 aa, Homo sapiens
MVKLLTDSRLPEEEHEFFHILNLFFPSIYDVKYLMKSCKNLKGGLQEVADQLDLQRIGRQHQAGSDSLLTGMAFFRMKELFFEDSIDDAKYCGRLYGLGTGVAQKQNEDVDSAQEKMSILAIINNMQQ

SEQ ID NO: 770716 - protein, 128 aa, Homo sapiens; identical to SEQ ID NO: 770715

SEQ ID NO: 770717 - protein, 84 aa, Homo sapiens
MPAALVENSQVICEVWASNLEEEMRKIREIVLSYSYIAMWTRISGVVVRPCGEGSLGRRKERYRFGGEARKRFRKERCICEDSV

SEQ ID NO: 770718 - protein, 292 aa, Homo sapiens; identical to SEQ ID NO: 770707

SEQ ID NO: 770719 - protein, 292 aa, Homo sapiens; identical to SEQ ID NO: 770707

SEQ ID NO: 770720 - protein, 292 aa, Homo sapiens; identical to SEQ ID NO: 770707

SEQ ID NO: 770721 - protein, 186 aa, Homo sapiens
MYSQDSIDLLANSGLQFQKHEEEGIDTLHFAELLMTSGVVLCDNVKWLSFHSGYDFGYMVKLLTDSRLPEEEHEFFHILNLFFPSIYDVKYLMKSCKNLKGGLQEVADQLDLQRIGRQHQAGSDSLLTGMAFFRMKELFFEDSIDDAKYCGRLYGLGTGVAQKQNEDVDSAQEKMSILAIINNMQQ

SEQ ID NO: 770722 - protein, 186 aa, Homo sapiens; identical to SEQ ID NO: 770721

SEQ ID NO: 770723 - protein, 238 aa, Homo sapiens; identical to SEQ ID NO: 770713

SEQ ID NO: 770724 - protein, 35 aa, Homo sapiens
MSFPIHIYAFQSDKSCEGTTSMLDHILNIGLLHDV

SEQ ID NO: 770725 - protein, 116 aa, Homo sapiens
MESSRVRLLPLLGAALLLMLPLLGTRAQEDAELQPRALDIYSAVDDASHEKELIEALQEVLKKLKSKRVPIYEKKYGQVPMCDAGEQCAVRKGARIGKLCDCPRGTSCNSFLLKCL

SEQ ID NO: 770726 - protein, 133 aa, Homo sapiens
VASESSTLFMEASIRPSWLPFVCSPDISLTPPLGPSVLSTFVDPSAETPSPPRALDIYSAVDDASHEKELIEALQEVLKKLKSKRVPIYEKKYGQVPMCDAGEQCAVRKGARIGKLCDCPRGTSCNSFLLKCL

SEQ ID NO: 770727 - protein, 169 aa, Homo sapiens
MESSRVRLLPLLGAALLLMLPLLGTRAQEDAELQPRALDIYSAVDDASHEKELVGIPLALDPLELSPCLFSVHASLLPPPPLLFPESGRGELSATPRHPLPSEERLELTGSWQSVERIPHPGPSEQQGPQRLRDPRSVPGTASAKFPPLDHSLCPRSPTAECVWVRGSL

SEQ ID NO: 770728 - protein, 116 aa, Homo sapiens; identical to SEQ ID NO: 770725

SEQ ID NO: 770729 - protein, 116 aa, Homo sapiens; identical to SEQ ID NO: 770725

SEQ ID NO: 770730 - protein, 116 aa, Homo sapiens; identical to SEQ ID NO: 770725

SEQ ID NO: 770731 - protein, 99 aa, Homo sapiens
MHGYMSKMGNPFLTQWQRRYFYLLPQPTRVAGRGRGPGKEPMRGVREPGFRVAGPAGIFTCTTIPGLQQSLLTMEEIQTEEETQIRRRKCLLLQIRGGK

SEQ ID NO: 770732 - protein, 501 aa, Homo sapiens
MENQLWHNTVRCCNQYQESPHDAEDILLLLLGLIVLVNIGINVATMMWHGLQNALDKMIDWATQKNEIQASESPPSGPPDKAQDVHIHCILDPVQVKMSRPTQYSSFSCHHFSNHHSSSLLRCVRRRRRRHRRCRRRCCNHQQRPQNYRQIPHSHSVFRNPHRSQKMSQLHRVPFFDQEDPDSYLEEEDNLPFPYPKYPRRGWGGFYQRAGLPSNVGLWGHQGGILASLPPPSLYLSPELRCMPKRVEARSELRLQSYGRHGSQSRLWGNVEAEQWASSPPPPHRLPPNPSWVPVGHSPYPSVGWMLYDSWDQRRRGTEGFERPPASVSRNARPEAQGCREHHSPQSHQQSLLGHAYGQSHRSPHPSTEPLGYSSQDPREVRRRAADWAEALPAWRPLTTSASLTVLDEASHQRTPAPSSVLVPHSSQPWPKVQAADPAPPPTMFVPLSRNPGGNANYQVYDSLELKRQVQKSRARSSSLPPASTSTLRPSLHRSQTEKLN

SEQ ID NO: 770733 - protein, 388 aa, Homo sapiens
MENQLWHNTVRCCNQYQESPHDAEDILLLLLGLIVLVNIGINVATMMWHGLQNALDKMIDWATQKRGPGFLPGGGGQPALPVSQVPTSRLGRVLSESGPALQCGAVGPPGGILASLPPPSLYLSPELRCMPKRVEARSELRLQSYGRHGSQSRLWGNVEAEQWASSPPPPHRLPPNPSWVPVGHSPYPSVGWMLYDSWDQRRRGTEGFERPPASVSRNARPEAQGCREHHSPQSHQQSLLGHAYGQSHRSPHPSTEPLGYSSQDPREVRRRAADWAEALPAWRPLTTSASLTVLDEASHQRTPAPSSVLVPHSSQPWPKVQAADPAPPPTMFVPLSRNPGGNANYQVYDSLELKRQVQKSRARSSSLPPASTSTLRPSLHRSQTEKLN

SEQ ID NO: 770734 - protein, 486 aa, Homo sapiens
FGTRVTHIAAKRCHNYTECLSLIRRTRIPTWRRRTTCPSRIPSTHVAAGAGFIRERACPPSGPPDKAQDVHIHCILDPVQVKMSRPTQYSSFSCHHFSNHHSSSLLRCVRRRRRRHRRCRRRCCNHQQRPQNYRQIPHSHSVFRNPHRSQKMSQLHRVPFFDQEDPDSYLEEEDNLPFPYPKYPRRGWGGFYQRAGLPSNVGLWGHQGGILASLPPPSLYLSPELRCMPKRVEARSELRLQSYGRHGSQSRLWGNVEAEQWASSPPPPHRLPPNPSWVPVGHSPYPSVGWMLYDSWDQRRRGTEGFERPPASVSRNARPEAQGCREHHSPQSHQQSLLGHAYGQSHRSPHPSTEPLGYSSQDPREVRRRAADWAEALPAWRPLTTSASLTVLDEASHQRTPAPSSVLVPHSSQPWPKVQAADPAPPPTMFVPLSRNPGGNANYQVYDSLELKRQVQKSRARSSSLPPASTSTLRPSLHRSQTEKLN

SEQ ID NO: 770735 - protein, 480 aa, Homo sapiens
MENQLWHNTVRCCNQYQESPHDAEDILLLLLGLIVLVNIGINVATMMWHGLQNALDKMIDWATQKNEIQASESPPSGPPDKAQDVHIHCILDPVQVKMSRPTQYSSFAAATAVVAVAAATTSSGRRTTDKSPIATQSSVTHIAAKRCHNYTECLSLIRRTRIPTWRRRTTCPSRIPSTHVAAGAGFIRERACPPMWGCGATRWYPGQSATTSLYLSPELRCMPKRVEARSELRLQSYGRHGSQSRLWGNVEAEQWASSPPPPHRLPPNPSWVPVGHSPYPSVGWMLYDSWDQRRRGTEGFERPPASVSRNARPEAQGCREHHSPQSHQQSLLGHAYGQSHRSPHPSTEPLGYSSQDPREVRRRAADWAEALPAWRPLTTSASLTVLDEASHQRTPAPSSVLVPHSSQPWPKVQAADPAPPPTMFVPLSRNPGGNANYQVYDSLELKRQVQKSRARSSSLPPASTSTLRPSLHRSQTEKLN

SEQ ID NO: 770736 - protein, 316 aa, Homo sapiens
SGSGNECELVSGRRRHRPRRRRLGSSLRHAGVFSSTGAMSEREERRFVEIPRESVRLMAESTGLELSDEVAALLAEDVCYRLREATQNSSQFMKHTKRRKLTVEDFNRALRWSSVEAVCGYGSQEALPMRPAREGELYFPEDREVNLVELALATNIPKGCAETAVRVHVSYLDGKGNLAPQGSVPSAVSSLTDDLLKYYHQVTRAVLGDDPQLMKVKSVSHDLEQLHRLLQVARSLFRNPHLCLGPYVRCLVGSVLYCVLEPLAASINPLNDHWTLRDGAALLLSHIFWTHGDLVSGLYQHILLSLQKILADPVRP

SEQ ID NO: 770737 - protein, 171 aa, Homo sapiens
SGSGNECELVSGRRRHRPRRRRLGSSLRHAGVFSSTGAMSEREERRFVEIPRESVRLMAESTGLELSDEVAALLAEDVCYRLREATQNSSQFMKHTKRRKLTVEDFNRALRWSSVEPLAASINPLNDHWTLRDGAALLLSHIFWTHGDLVSGLYQHILLSLQKILADPVRP

SEQ ID NO: 770738 - protein, 341 aa, Homo sapiens
SGSGNECELVSGRRRHRPRRRRLGSSLRHAGVFSSTGAMSEREERRFVEIPRESVRLMAESTGLELSDEVAALLAEDVCYRLREATQNSSQFMKHTKRRKLTVEDFNRALRWSSVEAVCGYGSQEALPMRPAREGELYFPEDREVNLVELALATNIPKGCAETAVRVHVSYLDGKGNLAPQGSVPSAVSSLTDDLLKYYHQVTRAVLGDDPQLMKVALQDLQTNSKIGALLPYFVYVVSGVKSVSHDLEQLHRLLQVARSLFRNPHLCLGPYVRCLVGSVLYCVLEPLAASINPLNDHWTLRDGAALLLSHIFWTHGDLVSGLYQHILLSLQKILADPVRP

SEQ ID NO: 770739 - protein, 332 aa, Homo sapiens
SGSGNECELVSGRRRHRPRRRRLGSSLRHAGVFSSTGAMSEREERRFVEIPRESVRLMAESTGLELSDEVAALLAEDVCYRLREATQNSSQFMKHTKRRKLTVEDFNRALRWSSVEAVCGYGSQEALPMRPAREGELYFPEDREVNLVELALATNIPKGCAETAVRVHVSYLDGKGNLAPQGSDDLLKYYHQVTRAVLGDDPQLMKVALQDLQTNSKIGALLPYFVYVVSGVKSVSHDLEQLHRLLQVARSLFRNPHLCLGPYVRCLVGSVLYCVLEPLAASINPLNDHWTLRDGAALLLSHIFWTHGDLVSGLYQHILLSLQKILADPVRP

SEQ ID NO: 770740 - protein, 175 aa, Homo sapiens
  misc_feature (125)..(125): Xaa can be any naturally occurring amino acid
  misc_feature (127)..(127): Xaa can be any naturally occurring amino acid
  misc_feature (132)..(132): Xaa can be any naturally occurring amino acid
  misc_feature (170)..(170): Xaa can be any naturally occurring amino acid
SGSGNECELVSGRRRHRPRRRRLGSSLRHAGVFSSTGAMSEREERRFVEIPRESVRLMAESTGLELSDEVAALLAEDVCYRLREATQNSSQFMKHTKRRKLTVENHVRARRAGGLWRSLGSLSGXPXPPGGXGPEDPSLSVTLADIYRELYAFFGDSLATRFATGQPATXTVRGR

SEQ ID NO: 770741 - protein, 67 aa, Homo sapiens
ADCNLLPKLHIVKVVAKKYRNFDIPKEMTGIWRYLTNAYSRDEFTNTCPSDKEVEIAYSDVAKRLTK

SEQ ID NO: 770742 - protein, 92 aa, Homo sapiens
TCTLTDVLQTAASTGRSINGYTLPLTLLPVASAGRMEKLSVEALKRLTGEFKGKYYPLKSMTEKEQQQLIDDHFLFDKPVSPLVLASGMARD

SEQ ID NO: 770743 - protein, 102 aa, Homo sapiens
MQSGLACQGVTGTVSPEILCEDTQVLFRSGPVSGRGKTAPTSCRHTVPAPPTGLAHTSNKYLISAHHLPLCQVPGLIMSQAEVVCAVFPQCERVLRRLLTLI

SEQ ID NO: 770744 - protein, 91 aa, Homo sapiens
LIPEMRGSVTKTLPSTCGLSHATKHLVIPTSQRAACVTHLFISISMVFGLKIKPSKFQQTTLGDHHLSVVISIPSRIYLLTADSNANLLFL

SEQ ID NO: 770745 - protein, 223 aa, Homo sapiens
MDSRVSSPEKQDKENFVGVNNKRLGVCGWILFSLSFLLVIITFPISIWMCLKIIKEYERAVVFRLGRIQADKAKGPGLILVLPCIDVFVKVDLRTVTCNIPPQEILTRDSVTTQVDGVVYYRIYSAVSAVANVNDVHQATFLLAQTTLRNVLGTQTLSQILAGREEIAHSIQTLLDDATELWGIRVARVEIKDVRIPVQLQRSMAAEAEATREARAKVSVVQF

SEQ ID NO: 770746 - protein, 467 aa, Homo sapiens
MEYMSTGSDNKEEIDLLIKHLNVSDVIDIMENLYASEEPAVYEPSLMTMCQDSNQNDERSKSLLLSGQEVPWLSSVRYGTVEDLLAFANHISNTAKHFYGQRPQESGILLNMVITPQNGRYQIDSDVLLIPWKLTYRNIGSDFIPRGAFGKVYLAQDIKTKKRMACKLIPVDQFKPSDVEIQACFRHENIAELYGAVLWGETVHLFMEAGEGGSVLEKLESCGPMREFEIIWVTKHVLKGLDFLHSKKVIHHDIKPSNIVFMSTKAVLVDFGLSVQMTEDVYFPKDLRGTEIYMSPEVILCRGHSTKADIYSLGATLIHMQTGTPPWVKRYPRSAYPSYLYIIHKQAPPLEDIADDCSPGMRELIEASLERNPNHRPRAADLLKHEALNPPREDQPRCQSLDSALLERKRLLSRKELELPENIADSSCTGSTEESEMLKRQRSLYIDLGALAGYFNLVRGPPTLEYG

SEQ ID NO: 770747 - protein, 467 aa, Homo sapiens; identical to SEQ ID NO: 770746

SEQ ID NO: 770748 - protein, 621 aa, Homo sapiens
GAQRANEGRRGGGWGGDAEFPSAGALAYPATGQSLSVYGEKGEMEKSGRRWLASAAPPLGRLRRRESGAEQGGLSVRATRVSLVRSALDCAPRSGVRRPGSCFCRCRRRIPVARRARLPQACSQHRTEPSGGRGWSARPAWERKAADSPERATVMEYMSTGSDNKEEIDLLIKHLNVSDVIDIMENLYASEEPAVYEPSLMTMCQDSNQNDERSKSLLLSGQEVPWLSSVRYGTVEDLLAFANHISNTAKHFYGQRPQESGILLNMVITPQNGRYQIDSDVLLIPWKLTYRNIGSDFIPRGAFGKVYLAQDIKTKKRMACKLIPVDQFKPSDVEIQACFRHENIAELYGAVLWGETVHLFMEAGEGGSVLEKLESCGPMREFEIIWVTKHVLKGLDFLHSKKVIHHDIKPSNIVFMSTKAVLVDFGLSVQMTEDVYFPKDLRGTEIYMSPEVILCRGHSTKADIYSLGATLIHMQTGTPPWVKRYPRSAYPSYLYIIHKQAPPLEDIADDCSPGMRELIEASLERNPNHRPRAADLLKHEALNPPREDQPRCQSLDSALLERKRLLSRKELELPENIADSSCTGSTEESEMLKRQRSLYIDLGALAGYFNLVRGPPTLEYG

SEQ ID NO: 770749 - protein, 502 aa, Homo sapiens
RGSGDPLSLRLPLPTPPGRPHSPCPRPDSPERATVMEYMSTGSDNKEEIDLLIKHLNVSDVIDIMENLYASEEPAVYEPSLMTMCQDSNQNDERSKSLLLSGQEVPWLSSVRYGTVEDLLAFANHISNTAKHFYGQRPQESGILLNMVITPQNGRYQIDSDVLLIPWKLTYRNIGSDFIPRGAFGKVYLAQDIKTKKRMACKLIPVDQFKPSDVEIQACFRHENIAELYGAVLWGETVHLFMEAGEGGSVLEKLESCGPMREFEIIWVTKHVLKGLDFLHSKKVIHHDIKPSNIVFMSTKAVLVDFGLSVQMTEDVYFPKDLRGTEIYMSPEVILCRGHSTKADIYSLGATLIHMQTGTPPWVKRYPRSAYPSYLYIIHKQAPPLEDIADDCSPGMRELIEASLERNPNHRPRAADLLKHEALNPPREDQPRCQSLDSALLERKRLLSRKELELPENIADSSCTGSTEESEMLKRQRSLYIDLGALAGYFNLVRGPPTLEYG

SEQ ID NO: 770750 - protein, 450 aa, Homo sapiens
MEYMSTGSDNKEEIDLLIKHLNVSDVIDIMENLYASEEPAVYEPSLMTMCQDSNQNDERSKSLLLSGQEVPWLSSVRYGTVEDLLAFANHISNTAKHFYGQRPQESGILLNMVITPQNGRYQIDSDVLLIPWKLTYRNIGSDFIPRGAFGKVYLAQDIKTKKRMACKLIPVDQFKPSDVEIQACFRHENIAELYGAVLWGETVHLFMEAGEGGSVLEKLESCGPMREFEIIWVTKHVLKGLDFLHSKKVIHHDIKRKYLGHIHVYFPKDLRGTEIYMSPEVILCRGHSTKADIYSLGATLIHMQTGTPPWVKRYPRSAYPSYLYIIHKQAPPLEDIADDCSPGMRELIEASLERNPNHRPRAADLLKHEALNPPREDQPRCQSLDSALLERKRLLSRKELELPENIADSSCTGSTEESEMLKRQRSLYIDLGALAGYFNLVRGPPTLEYG

SEQ ID NO: 770751 - protein, 224 aa, Homo sapiens
RYPRGLPTSPNIPSNIVFMSTKAVLVDFGLSVQMTEDVYFPKDLRGTEIYMSPEVILCRGHSTKADIYSLGATLIHMQTGTPPWVKRYPRSAYPSYLYIIHKQAPPLEDIADDCSPGMRELIEASLERNPNHRPRAADLLKHEALNPPREDQPRCQSLDSALLERKRLLSRKELELPENIADSSCTGSTEESEMLKRQRSLYIDLGALAGYFNLVRGPPTLEYG

SEQ ID NO: 770752 - protein, 395 aa, Homo sapiens
MEYMSTGSDNKEEIDLLIKHLNVSDVIDIMENLYASEEPAVYEPSLMTMCQDSNQNDERSKSLLLSGQEVPWLSSVRYGTVEDLLAFANHISNTAKHFYGQRPQESGILLNMVITPQNGRYQIDSDVLLIPWKLTYRNIGSDFIPRGAFGKVYLAQDIKTKKRMACKLIPVDQFKPSDVEIQACFRHENIAELYGAVLWGETVHLFMEAGEGGSVLEKLESCGPMREFEIIWVTKHVLKGLDFLHSKKVIHHDIKPSNIVFMSTKAVLVDFGLSVQMTEDVYFPKDLRGTEIYMSPEVILCRGHSTKADIYSLGATLIHMQTGTPPWVKRYPRSAYPSYLYIIHKQAPPLEDIADDCSPGMRELIEASLERNPNHRPRAADLSGLCPLGAQEAAE

SEQ ID NO: 770753 - protein, 158 aa, Homo sapiens
GAQRANEGRRGGGWGGDAEFPSAGALAYPATGQSLSVYGEKGEMEKSGRRWLASAAPPLGRLRRRESGAEQGGLSVRATRVSLVRSALDCAPRSGVRRPGSCFCRCRRRIPVARRARLPQACSQHRTEPSGGRGWSARPAWERQGRRCNLLTAKKPGE

SEQ ID NO: 770754 - protein, 467 aa, Homo sapiens; identical to SEQ ID NO: 770746

SEQ ID NO: 770755 - protein, 243 aa, Homo sapiens
DIKPSNIVFMSGWITFFECRKSKKVIHHDIKPSNIVFMSTKAVLVDFGLSVQMTEDVYFPKDLRGTEIYMSPEVILCRGHSTKADIYSLGATLIHMQTGTPPWVKRYPRSAYPSYLYIIHKQAPPLEDIADDCSPGMRELIEASLERNPNHRPRAADLLKHEALNPPREDQPRCQSLDSALLERKRLLSRKELELPENIADSSCTGSTEESEMLKRQRSLYIDLGALAGYFNLVRGPPTLEYG

SEQ ID NO: 770756 - protein, 269 aa, Homo sapiens [sequence omitted]

SEQ ID NO: 770757 - protein, 122 aa, Homo sapiens
RFAKQIRQQYVMKMNTQEAKQKADIKIKDRTLFVDQNLSMSVQDNESNREPSDPSQCDANNMKHSDLNNLKLSVPDNRQLLEQESIMKAQPQHESLGIIWNLLQNLFKIGLQKKKLYIRNLK

SEQ ID NO: 770758 - protein, 147 aa, Homo sapiens
QQRSLMDWSFTEHFKPKVLLQVLQEAHKQYRCVDSYYHTQDNSLLLVFHNPMNRQRLHCEYWNIALHSNVGFRNYLELVAKSIQDWITKEEAIYQESKMNEKIIRTRAELELKSSANAKLTSASKIFSIKESKSNKGISKTEISDQE

SEQ ID NO: 770759 - protein, 110 aa, Homo sapiens
RFAKQIRQQYVMKMNTQEAKQKADIKIKDRTLFVDQNLSMSVQDNESNREPSDPSQCDANNMKHSDLNNLKLSVPDNRQLLEQESIMKAQPQHESLGKLKCVCVCVCVCV

SEQ ID NO: 770760 - protein, 164 aa, Homo sapiens
WTEAGAKALFLSPGSLQTSLQNQSQEATYPEQHKTEFLLLPPRVECNGAILTHWRILMGIARVHAAVRPGRVKAHSAIASVSVVSEGTDMAEPEEIAYLDSLGSPVESLHRVTVQVEDIPVHIIPCAESLGGEHIEARERGGIQHERLEQRCKPLWHHYRSIST

SEQ ID NO: 770761 - protein, 268 aa, Homo sapiens
GSRAAMSLQEEAEPTPSPPSPNRESLALALTAAHSRSGSEGRTPERASSPGLNKPLLATGDSPAPSVGDLAACAPSPTSAAHMPCSLGPLPREDPLTSPSRAQGGLGGQLPASPSCRDPPGPQQLLACSPAWAPLEEADGVQATTDTGAEDSPVAPPSLTTSPCDPKEALAGCLLQGEGSPLEDPSSWPPGSVSAVTCTHSGDTPKDSTLRIPEDSRKEKLWESPGRATSPPLAGAVSPSVAVRATGLSSTPTGDEAQAGRGLPGPDP

SEQ ID NO: 770762 - protein, 118 aa, Homo sapiens
SGRGGQGLWRGKRRASDGANGGLSAVLCGGGTQRPLRRGGRKLPLRVGGLRGKGKRRDGVDSRRETLGLSGRSARHTRSRGCGPGLARPAPAAPQPLRWPPPPQPRQGLTSSRRCFFY

SEQ ID NO: 770763 - protein, 187 aa, Homo sapiens
AGGAGRGCGAASGGPATARMADSQLFCVAEERSGHCAVVDGNFLYVWGGYVSIEDNEVYLPNDEIWTYDIDSGLWRMHLMEGELPASMSGSCGACINGKLYIFGGYDDKGYSNRLYFVNLRTRDETYIWEKITDFEGQPPTPRDKLSCWVYKDRLIYFGGYGCRRHSELQDCFDVHDASWEEQIFWG

SEQ ID NO: 770764 - protein, 631 aa, Homo sapiens
GAIGSPVRLARTVVVGKRQDMVQRLLYFLTYFIRCSELQETHLLENGEDEAIVMPGTVITTTLEKGEIEESEYVLVTMHRNKSSLLFKESEEIRTPNCNCKYCSHPLLGQNVENISQQEREDIQNSSKELLGISDECRMISPSDCQEENAVDVKQYRDKLRTCFDAKLETVVCTGSVPVDKCALSESGLESTEETWQSEKLLDSDSHTGKAMRSTGMVVEKKPPDKIVPASFSCEAAQTKVTFLIGDSMSPDSDTELRSQAVVDQITRHHTKPLKEERGAIDQHQETKQTTKDQSGESDTQNMVSEEPCELPCWNHSDPESMSLFDEYFNDDSIETRTIDDVPFKTSTDSKDHCCMLEFSKILCTKNNKQNNEFCKCIETVPQDSCKTCFPQQDQRDTLSILVPHGDKESSDKKIAVGTEWDIPRNESSDSALGDSESEDTGHDMTRQVSSYYGGEQEDWAEEDEIPFPGSKLIEVSAVQPNIANFGRSLLGGYCSSYVPDFVLQGIGSDERFRQCLMSDLSHAVQHPVLDEPIAEAVCIIADMDKWTVQVASSQRRVTDNKLGKEVLVSSLVSNLLHSTLQLYKHNLSPNFCVMHLEDRLQELYFKSKMLSEYLRGQMRVHVKELGVVLG

SEQ ID NO: 770765 - protein, 84 aa, Homo sapiens
HCTRHFFILLDSESCECIAITSKFWEKPTARMSEGPRSRFLLTASTQGQQLPHRRMDMWTVDVERMWWLSTLFSGYFWTENPSI

SEQ ID NO: 770766 - protein, 82 aa, Homo sapiens
PLRLARRLRALRSTGSASSRHGFLPSSPAVSWGPALVGGRGSDASLPSRLNHLEAAAPRMCTLTTKAEPAPPRPWAGGRPLP

SEQ ID NO: 770767 - protein, 82 aa, Homo sapiens; identical to SEQ ID NO: 770766

SEQ ID NO: 770768 - protein, 82 aa, Homo sapiens; identical to SEQ ID NO: 770766

SEQ ID NO: 770769 - protein, 82 aa, Homo sapiens; identical to SEQ ID NO: 770766

SEQ ID NO: 770770 - protein, 82 aa, Homo sapiens; identical to SEQ ID NO: 770766

SEQ ID NO: 770771 - protein, 70 aa, Homo sapiens
TASIAGCVRKRRPQFPRWRCGSQSKVGLSKPTRSFEPGGGSCHWHRFGVVAPVYYFWGGLNQVLAPSIPT

SEQ ID NO: 770772 - protein, 145 aa, Homo sapiens
MNTSLSWFEQLDVLLNATDGNVVRNKQWLYPLGVSTELIGLCICFFCSSGCIFLGSPPQNSTAVTPAVLWEESEIMQKELKLLQYQLSQHQELLLKQLAEGRQAQVGSWKIPRGAPFLTWSPASFSSMPRVLSKRTYSFGAPKCS

SEQ ID NO: 770773 - protein, 118 aa, Homo sapiens
MNTSLSWFEQLDVLLNATDGNVVRNKQWLYPLGVSTELIGLCICFFCSSGCIFLGSPPQNSTAVTPAVLWEESEIMQKELKLLQYQLSQHQELLLKQLAEGRQAQVGSWKDLHSCCPI

SEQ ID NO: 770774 - protein, 120 aa, Homo sapiens
QGAPKGSAFLLEQCLEELRKELQGLQSQVWEQTQAQAQAQMQTGPGECSTTNGLPQELQTEIALLSLLQCCREESEIMQKELKLLQYQLSQHQELLLKQLAEGRQAQVGSWKDLHSCCPI

SEQ ID NO: 770775 - protein, 422 aa, Homo sapiens
AESAGNLKAWTLRDRQTGANVRGRRRRRRRWSPPGRAGRGARSRRREVPLEPAQPAALAQSGRTKSSERRRGERLVHAPCAAAGPGRQRGAGASRAPRSPWSNFGCPAAAAFPSRPGRGVAANLCAFLPPRWEPALREGLSRRLMLPALRLPSLGEPPPERRGSAAAPRARRALLRGRGTKQQPRARARGMERCPSLGVTLYALVVVLGLRATPAGGQHYLHIRPAPSDNLPLVDLIEHPDPIFDPKEKDLNETLLRSLLGGHYDPGFMATSPPEDRPGGGGGAAGGAEDLAELDQLLRQRPSGAMPSEIKGLEFSEGLAQGKKQRLSKKLRRKLQMWLWSQTFCPVLYAWNDLGSRFWPRYVKVGSCFSKRSCSVPEGMVCKPSKSVHLTVLRWRCQRRGGQRCGWIPIQYPIISECKCSC

SEQ ID NO: 770776 - protein, 85 aa, Homo sapiens
RIPYGRLSPPELYFPAGCTQDHMIRNCNCGHYLYPLPRGEKYCNNRDFPDWAHCYSDLQMSVAQRETCIGMCKESCNDTQYNLPV

SEQ ID NO: 770777 - protein, 694 aa, Homo sapiens
LEPSHHQLSMLLHINPAYLFKLLHGFPPWIMPTDGNLGDKNFQMGKPGHREGATMHVKKYLLKGLHRLQKGPGYTYKELLVWYCDNTNTHGPKRIICEGPKKKAMWFLLTLLFAALVCWQWGIFIRTYLSWEVSVSLSVGFKTMDFPAVTICNASPFKYSKIKHLLKDLDELMEAVLERILAPELSHANATRNLNFSIWNHTPLVLIDERNPHHPMVLDLFGDNHNGLTSSSASEKICNAHGCKMAMRLCSLNRTQCTFRNFTSATQALTEWYILQATNIFAQVPQQELVEMSYPGEQMILACLFGAEPCNYRNFTSIFYPHYGNCYIFNWGMTEKALPSANPGTEFGLKLILDIGQEDYVPFLASTAGVRLMLHEQRSYPFIRDEGIYAMSGTETSIGVLVDKLQRMGEPYSPCTVNGSEVPVQNFYSDYNTTYSIQACLRSCFQDHMIRNCNCGHYLYPLPRGEKYCNNRDFPDWAHCYSDLQMSVAQRETCIGMCKESCNDTQYKMTISMADWPSEASEDWIFHVLSQERDQSTNITLSRKGIVKLNIYFQEFNYRTIEESAANNIVWLLSNLGGQFGFWMGGSVLCLIEFGEIIIDFVWITIIKLVALAKSLRQRRAQASYAGPPPTVAELVEAHTNFGFQPDTAPRSPNTGPYPSEQALPIPGTPPPNYDSLRLQPLDVIESDSEGDAI

SEQ ID NO: 770778 - protein, 698 aa, Homo sapiens
ASPPLNLLPPSRSRRARRVSQCHQHSAAAASLARTAASATADSAHPPCPRSAARAGATMHVKKYLLKGLHRLQKGPGYTYKELLVWYCDNTNTHGPKRIICEGPKKKAMWFLLTLLFAALVCWQWGIFIRTYLSWEVSVSLSVGFKTMDFPAVTICNASPFKYSKIKHLLKDLDELMEAVLERILAPELSHANATRNLNFSIWNHTPLVLIDERNPHHPMVLDLFGDNHNGLTSSSASEKICNAHGCKMAMRLCSLNRTQCTFRNFTSATQALTEWYILQATNIFAQVPQQELVEMSYPGEQMILACLFGAEPCNYRNFTSIFYPHYGNCYIFNWGMTEKALPSANPGTEFGLKLILDIGQEDYVPFLASTAGVRLMLHEQRSYPFIRDEGIYAMSGTETSIGVLVDKLQRMGEPYSPCTVNGSEVPVQNFYSDYNTTYSIQACLRSCFQDHMIRNCNCGHYLYPLPRGEKYCNNRDFPDWAHCYSDLQMSVAQRETCIGMCKESCNDTQYKMTISMADWPSEASEDWIFHVLSQERDQSTNITLSRKGIVKLNIYFQEFNYRTIEESAANNIVWLLSNLGGQFGFWMGGSVLCLIEFGEIIIDFVWITIIKLVALAKSLRQRRAQASYAGPPPTVAELVEAHTNFGFQPDTAPRSPNTGPYPSEQALPIPGTPPPNYDSLRLQPLDVIESDSEGDAI

SEQ ID NO: 770779 - protein, 694 aa, Homo sapiens; identical to SEQ ID NO: 770777

SEQ ID NO: 770780 - protein, 176 aa, Homo sapiens
KGIVKLNIYFLLQGDIGALVPLLSRKGIVKLNIYFQEFNYRTIEESAANNIVWLLSNLGGQFGFWMGGSVLCLIEFGEIIIDFVWITIIKLVALAKSLRQRRAQASYAGPPPTVAELVEAHTNFGFQPDTAPRSPNTGPYPSEQALPIPGTPPPNYDSLRLQPLDVIESDSEGDAI

SEQ ID NO: 770781 - protein, 136 aa, Homo sapiens
RYWHFWQGRWLREESGDQAGVQWHDLGLLQPLCSRFKLFSRLSLPSSWDYRCPPPRLANFCIFSRDKVLPCWPGWFKLLTSGDLPASASLSAGIAGVSHRALPRILTVKCCCFNLEILRTELDEFVLIFTSVFFSF

SEQ ID NO: 770782 - protein, 127 aa, Homo sapiens
VGARVGGSRAAPGSPPPRLRLPKRGRSAAPGCSTWRAEHRAGSPRGRAVGGADCGKKARGVAAARSGAGAPPLAAALTCRLVSPRRRGSLRFGWRGAGRAGSQRVCGGRGRDPTTGSPPGAALLPLP

SEQ ID NO: 770783 - protein, 102 aa, Homo sapiens
LPPISNPTSPAASLFTIPRIRPLLSTPTAAAPKEATSSLTEIVQQPLPPFTFACGHSPHMARECVLLKPARSRSSSTQNAPLAPTAPRVKAQTLQMTQSPTR

SEQ ID NO: 770784 - protein, 93 aa, Homo sapiens
QGTMQEMEEGPQEPVPQPAWSSEPQKRDTQGFARADGSTAGCAGHHFITLALSYLICKKGNKWYLPARVVLRLTVAGIASLVNTQEPLSSLWL

SEQ ID NO: 770785 - protein, 80 aa, Homo sapiens
EPFICCVTCAPSYGHVRRRIEDGQRACFTCDQSLTLLCDAIPYGVYQEQNSQFNRWFPQYLKRCGAKLETVQDDYTLLLI

SEQ ID NO: 770786 - protein, 241 aa, Homo sapiens
EEPHLNLGSLNDSLFGSDNIKIESLITKKTVDHTVEEQQTEKVKLITENLSKLPNADSECLSFVGCSTSGTNSGNGTNGLLEGSPPSPFFKFQGEMIVNDLYVPSSPILAPVRSRSKLVSRPSRSFLLRHRPVPEIPGSTKGVSGSYFRERRNVATSTEKSVAWQNSNEENSSSIFPYGETFLFQRLENSKKRSIKNEFLTQGEALKGEAATATNSFIIKSSIYDNRKEKISEDKVEDIWI

SEQ ID NO: 770787 - protein, 1564 aa, Homo sapiens
SKALLQLWQRYKDYSKQCASTVQQQEDRTNELLKAATNKDIADDEVATWIQDCNDLLKGLGTVKDSLFVLHELGEQLKQQVDASAASAIQSDQLSLSQHLCALEQALCKQQTSLQAGVLDYETFAKSLEALEAWIVEAEEILQGQDPSHSSDLSTIQERMEELKGQMLKFSSMAPDLDRLNELGYRLPLNDKEIKRMQNLNRHWSLISSQTTERFSKLQSFLLQHQTFLEKCETWMEFLVQTEQKLAVEISGNYQHLLEQQRAHELFQAEMFSRQQILHSIIIDGQRLLEQGQVDDRDEFNLKLTLLSNQWQGVIRRAQQRRGIIDSQIRQWQRYREMAEKLRKWLVEVSYLPMSGLGSVPIPLQQARTLFDEVQFKEKVFLRQQGSYILTVEAGKQLLLSADSGAEAALQAELAEIQEKWKSASMRLEEQKKKLAFLLKDWEKCEKGIADSLEKLRTFKKKLSQSLPDHHEELHAEQMRCKELENAVGSWTDDLTQLSLLKDTLSAYISADDISILNERVELLQRQWEELCHQLSLRRQQIGERLNEWAVFSEKNKELCEWLTQMESKVSQNGDILIEEMIEKLKKDYQEEIAIAQENKIQLQQMGERLAKASHESKASEIEYKLGKVNDRWQHLLDLIAARVKKLKETLVAVQQLDKNMSSLRTWLAHIESELAKPIVYDSCNSEEIQRKLNEQQELQRDIEKHSTGVASVLNLCEVLLHDCDACATDAECDSIQQATRNLDRRWRNICAMSMERRLKIEETWRLWQKFLDDYSRFEDWLKSSERTAAFPSSSGVIYTVAKEELKKFEAFQRQVHECLTQLELINKQYRRLARENRTDSACSLKQMVHEGNQRWDNLQKRVTSILRRLKHFIGQREEFETARDSILVWLTEMDLQLTNIEHFSECDVQAKIKQLKAFQQEISLNHNKIEQIIAQGEQLIEKSEPLDAAIIEEELDELRRYCQEVFGRVERYHKKLIRLPLPDDEHDLSDRELELEDSAALSDLHWHDRSADSLLSPQPSSNLSLSLAQPLRSERSGRDTPASVDSIPLEWDHDYDLSRDLESAMSRALPSEDEEGQDDKDFYLRGAVGLSGDHSALESQIRQLGKALDDSRFQIQQTENIIRSKTPTGPELDTSYKGYMKLLGECSSSIDSVKRLEHKLKEEEESLPGFVNLHSTETQTAGVIDRWELLQAQALSKELRMKQNLQKWQQFNSDLNSIWAWLGDTEEELEQLQRLELSTDIQTIELQIKKLKELQKAVDHRKAIILSINLCSPEFTQADSKESRDLQDRLSQMNGRWDRVCSLLEEWRGLLQDALMQCQGFHEMSHGLLLMLENIDRRKNEIVPIDSNLDAEILQDHHKQLMQIKHELLESQLRVASLQDMSCQLLVNAEGTDCLEAKEKVHVIGNRLKLLLKEVSRHIKELEKLLDVSSSQQDLSSWSSADELDTSGSVSPTSGRSTPNRQKTPRGKCSLSQPGPSVSSPHSRSTKGGSDSSLSEPGPGRSGRGFLFRVLRAALPLQLLLLLLIGLACLVPMSEEDYSCALSNNFARSFHPMLRYTNGPPPL

SEQ ID NO: 770788 - protein, 1476 aa, Homo sapiens
SKALLQLWQRYKDYSKQCASTVQQQEDRTNELLKAATNKDIADDEVATWIQDCNDLLKGLGTVKDSLFVLHELGEQLKQQVDASAASAIQSDQLSLSQHLCALEQALCKQQTSLQAGVLDYETFAKSLEALEAWIVEAEEILQGQDPSHSSDLSTIQERMEELKGQMLKFSSMAPDLDRLNELGYRLPLNDKEIKRMQNLNRHWSLISSQTTERFSKLQSFLLQHQTFLEKCETWMEFLVQTEQKLAVEISGNYQHLLEQQRAHELFQAEMFSRQQILHSIIIDGQRLLEQGQVDDRDEFNLKLTLLSNQWQGVIRRAQQRRGIIDSQIRQWQRYREMAEKLRKWLVEVSYLPMSGLGSVPIPLQQARTLFDEVQFKEKVFLRQQGSYILTVEAGKQLLLSADSGAEAALQAELAEIQEKWKSASMRLEEQKKKLAFLLKDWEKCEKGIADSLEKLRTFKKKLSQSLPDHHEELHAEQMRCKELENAVGSWTDDLTQLSLLKDTLSAYISADDISILNERVELLQRQWEELCHQLSLRRQQIGERLNEWAVFSEKNKELCEWLTQMESKVSQNGDILIEEMIEKLKKDYQEEIAIAQENKIQLQQMGERLAKASHESKASEIEYKLGKVNDRWQHLLDLIAARVKKLKETLVAVQQLDKNMSSLRTWLAHIESELAKPIVYDSCNSEEIQRKLNEQQELQRDIEKHSTGVASVLNLCEVLLHDCDACATDAECDSIQQATRNLDRRWRNICAMSMERRLKIEETWRLWQKFLDDYSRFEDWLKSSERTAAFPSSSGVIYTVAKEELKKFEAFQRQVHECLTQLELINKQYRRLARENRTDSACSLKQMVHEGNQRWDNLQKRVTSILRRLKHFIGQREEFETARDSILVWLTEMDLQLTNIEHFSECDVQAKIKQLKAFQQEISLNHNKIEQIIAQGEQLIEKSEPLDAAIIEEELDELRRYCQEVFGRVERYHKKLIRLPLPDDEHDLSDRELELEDSAALSDLHWHDRSADSLLSPQPSSNLSLSLAQPLRSERSGRDTPASVDSIPLEWDHDYDLSRDLESAMSRALPSEDEEGQDDKDFYLRGAVGLSGDHSALESQIRQLGKALDDSRFQIQQTENIIRSKTPTGPELDTSYKGYMKLLGECSSSIDSVKRLEHKLKEEEESLPGFVNLHSTETQTAGVIDRWELLQAQALSKELRMKQNLQKWQQFNSDLNSIWAWLGDTEEELEQLQRLELSTDIQTIELQIKKLKELQKAVDHRKAIILSINLCSPEFTQADSKESRDLQDRLSQMNGRWDRVCSLLEEWRGLLQDALMQCQGFHEMSHGLLLMLENIDRRKNEIVPIDSNLDAEILQDHHKQLMQIKHELLESQLRVASLQDMSCQLLVNAEGTDCLEAKEKVHVIGNRLKLLLKEVSRHIKELEKLLDVSSSQQDLSSWSSADELDTSGSVSPTSGRSTPNRQKTVHKRWLRFLPF

SEQ ID NO: 770789 - protein, 143 aa, Homo sapiens
GQCQSGTERLSVNESQEPRVFVEYWHSGSVSPTSGRSTPNRQKTPRGKCSLSQPGPSVSSPHSRSTKGGSDSSLSEPGPGRSGRGFLFRVLRAALPLQLLLLLLIGLACLVPMSEEDYSCALSNNFARSFHPMLRYTNGPPPL

SEQ ID NO: 770790 - protein, 98 aa, Homo sapiens
VRGKIRFSHIFHTKRGCGASTKGGSDSSLSEPGPGRSGRGFLFRVLRAALPLQLLLLLLIGLACLVPMSEEDYSCALSNNFARSFHPMLRYTNGPPPL

SEQ ID NO: 770791 - protein, 1468 aa, Homo sapiens
SKALLQLWQRYKDYSKQCASTVQQQEDRTNELLKAATNKDIADDEVATWIQDCNDLLKGLGTVKDSLFVLHELGEQLKQQVDASAASAIQSDQLSLSQHLCALEQALCKQQTSLQAGVLDYETFAKSLEALEAWIVEAEEILQGQDPSHSSDLSTIQERMEELKGQMLKFSSMAPDLDRLNELGYRLPLNDKEIKRMQNLNRHWSLISSQTTERFSKLQSFLLQHQTFLEKCETWMEFLVQTEQKLAVEISGNYQHLLEQQRAHELFQAEMFSRQQILHSIIIDGQRLLEQGQVDDRDEFNLKLTLLSNQWQGVIRRAQQRRGIIDSQIRQWQRYREMAEKLRKWLVEVSYLPMSGLGSVPIPLQQARTLFDEVQFKEKVFLRQQGSYILTVEAGKQLLLSADSGAEAALQAELAEIQEKWKSASMRLEEQKKKLAFLLKDWEKCEKGIADSLEKLRTFKKKLSQSLPDHHEELHAEQMRCKELENAVGSWTDDLTQLSLLKDTLSAYISADDISILNERVELLQRQWEELCHQLSLRRQQIGERLNEWAVFSEKNKELCEWLTQMESKVSQNGDILIEEMIEKLKKDYQEEIAIAQENKIQLQQMGERLAKASHESKASEIEYKLGKVNDRWQHLLDLIAARVKKLKETLVAVQQLDKNMSSLRTWLAHIESELAKPIVYDSCNSEEIQRKLNEQQELQRDIEKHSTGVASVLNLCEVLLHDCDACATDAECDSIQQATRNLDRRWRNICAMSMERRLKIEETWRLWQKFLDDYSRFEDWLKSSERTAAFPSSSGVIYTVAKEELKKFEAFQRQVHECLTQLELINKQYRRLARENRTDSACSLKQMVHEGNQRWDNLQKRVTSILRRLKHFIGQREEFETARDSILVWLTEMDLQLTNIEHFSECDVQAKIKQLKAFQQEISLNHNKIEQIIAQGEQLIEKSEPLDAAIIEEELDELRRYCQEVFGRVERYHKKLIRLPLPDDEHDLSDRELELEDSAALSDLHWHDRSADSLLSPQPSSNLSLSLAQPLRSERSGRDTPASVDSIPLEWDHDYDLSRDLESAMSRALPSEDEEGQDDKDFYLRGAVGLSGDHSALESQIRQLGKALDDSRFQIQQTENIIRSKTPTGPELDTSYKGYMKLLGECSSSIDSVKRLEHKLKEEEESLPGFVNLHSTETQTAGVIDRWELLQAQALSKELRMKQNLQKWQQFNSDLNSIWAWLGDTEEELEQLQRLELSTDIQTIELQIKKLKELQKAVDHRKAIILSINLCSPEFTQADSKESRDLQDRLSQMNGRWDRVCSLLEEWRGLLQDALMQCQGFHEMSHGLLLMLENIDRRKNEIVPIDSNLDAEILQDHHKQLMQIKHELLESQLRVASLQDMSCQLLVNAEGTDCLEAKEKVHVIGNRLKLLLKEVSRHIKELEKLLDVSSSQQDLSSWSSADELDTSGSVSPTSGRSTPNRQKTKCW

SEQ ID NO: 770792 - protein, 1495 aa, Homo sapiens
SKALLQLWQRYKDYSKQCASTVQQQEDRTNELLKAATNKDIADDEVATWIQDCNDLLKGLGTVKDSLFVLHELGEQLKQQVDASAASAIQSDQLSLSQHLCALEQALCKQQTSLQAGVLDYETFAKSLEALEAWIVEAEEILQGQDPSHSSDLSTIQERMEELKGQMLKFSSMAPDLDRLNELGYRLPLNDKEIKRMQNLNRHWSLISSQTTERFSKLQSFLLQHQTFLEKCETWMEFLVQTEQKLAVEISGNYQHLLEQQRAHELFQAEMFSRQQILHSIIIDGQRLLEQGQVDDRDEFNLKLTLLSNQWQGVIRRAQQRRGIIDSQIRQWQRYREMAEKLRKWLVEVSYLPMSGLGSVPIPLQQARTLFDEVQFKEKVFLRQQGSYILTVEAGKQLLLSADSGAEAALQAELAEIQEKWKSASMRLEEQKKKLAFLLKDWEKCEKGIADSLEKLRTFKKKLSQSLPDHHEELHAEQMRCKELENAVGSWTDDLTQLSLLKDTLSAYISADDISILNERVELLQRQWEELCHQLSLRRQQIGERLNEWAVFSEKNKELCEWLTQMESKVSQNGDILIEEMIEKLKKDYQEEIAIAQENKIQLQQMGERLAKASHESKASEIEYKLGKVNDRWQHLLDLIAARVKKLKETLVAVQQLDKNMSSLRTWLAHIESELAKPIVYDSCNSEEIQRKLNEQQELQRDIEKHSTGVASVLNLCEVLLHDCDACATDAECDSIQQATRNLDRRWRNICAMSMERRLKIEETWRLWQKFLDDYSRFEDWLKSSERTAAFPSSSGVIYTVAKEELKKFEAFQRQVHECLTQLELINKQYRRLARENRTDSACSLKQMVHEGNQRWDNLQKRVTSILRRLKHFIGQREEFETARDSILVWLTEMDLQLTNIEHFSECDVQAKIKQLKAFQQEISLNHNKIEQIIAQGEQLIEKSEPLDAAIIEEELDELRRYCQEVFGRVERYHKKLIRLPLPDDEHDLSDRELELEDSAALSDLHWHDRSADSLLSPQPSSNLSLSLAQPLRSERSGRDTPASVDSIPLEWDHDYDLSRDLESAMSRALPSEDEEGQDDKDFYLRGAVGLSGDHSALESQIRQLGKALDDSRFQIQQTENIIRSKTPTGPELDTSYKGYMKLLGECSSSIDSVKRLEHKLKEEEESLPGFVNLHSTETQTAGVIDRWELLQAQALSKELRMKQNLQKWQQFNSDLNSIWAWLGDTEEELEQLQRLELSTDIQTIELQIKKLKELQKAVDHRKAIILSINLCSPEFTQADSKESRDLQDRLSQMNGRWDRVCSLLEEWRGLLQDALMQCQGFHEMSHGLLLMLENIDRRKNEIVPIDSNLDAEILQDHHKQLMQIKHELLESQLRVASLQDMSCQLLVNAEGTDCLEAKEKVHVIGNRLKLLLKEVSRHIKELEKLLDVSSSQQDLSSWSSADELDTSGSVSPTSGRSTPNRQKTQTAPRGSFSARWLQSHSGRGGGLGEAVDDC

SEQ ID NO: 770793 - protein, 1295 aa, Homo sapiens
SKALLQLWQRYKDYSKQCASTVQQQEDRTNELLKAATNKDIADDEVATWIQDCNDLLKGLGTVKDSLFVLHELGEQLKQQVDASAASAIQSDQLSLSQHLCALEQALCKQQTSLQAGVLDYETFAKSLEALEAWIVEAEEILQGQDPSHSSDLSTIQERMEELKGQMLKFSSMAPDLDRLNELGYRLPLNDKEIKRMQNLNRHWSLISSQTTERFSKLQSFLLQHQTFLEKCETWMEFLVQTEQKLAVEISGNYQHLLEQQRAHELFQAEMFSRQQILHSIIIDGQRLLEQGQVDDRDEFNLKLTLLSNQWQGVIRRAQQRRGIIDSQIRQWQRYREMAEKLRKWLVEVSYLPMSGLGSVPIPLQQARTLFDEVQFKEKVFLRQQGSYILTVEAGKQLLLSADSGAEAALQAELAEIQEKWKSASMRLEEQKKKLAFLLKDWEKCEKGIADSLEKLRTFKKKLSQSLPDHHEELHAEQMRCKELENAVGSWTDDLTQLSLLKDTLSAYISADDISILNERVELLQRQWEELCHQLSLRRQQIGERLNEWAVFSEKNKELCEWLTQMESKVSQNGDILIEEMIEKLKKDYQEEIAIAQENKIQLQQMGERLAKASHESKASEIEYKLGKVNDRWQHLLDLIAARVKKLKETLVAVQQLDKNMSSLRTWLAHIESELAKPIVYDSCNSEEIQRKLNEQQELQRDIEKHSTGVASVLNLCEVLLHDCDACATDAECDSIQQATRNLDRRWRNICAMSMERRLKIEETWRLWQKFLDDYSRFEDWLKSSERTAAFPSSSGVIYTVAKEELKKFEAFQRQVHECLTQLELINKQYRRLARENRTDSACSLKQMVHEGNQRWDNLQKRVTSILRRLKHFIGQREEFETARDSILVWLTEMDLQLTNIEHFSECDVQAKIKQLKAFQQEISLNHNKIEQIIAQGEQLIEKSEPLDAAIIEEELDELRRYCQEVFGRVERYHKKLIRLPLPDDEHDLSDRELELEDSAALSDLHWHDRSADSLLSPQPSSNLSLSLAQPLRSERSGRDTPASVDSIPLEWDHDYDLSRDLESAMSRALPSEDEEGQDDKDFYLRGAVGLSGDHSALESQIRQLGKALDDSRFQIQQTENIIRSKTPTGPELDTSYKGYMKLLGECSSSIDSVKRLEHKLKEEEESLPGFVNLHSTETQTAGVIDRWELLQAQALSKELRMKQNLQKWQQFNSDLNSIWAWLGDTEEELEQLQRLELSTDIQTIELQIKKLKVAAPCLSHGGQTESHRVNDRADGTSSSSCSYTAAEKGSNKNE

SEQ ID NO: 770794 - protein, 604 aa, Homo sapiens
  misc_feature (599)..(599): Xaa can be any naturally occurring amino acid
SKALLQLWQRYKDYSKQCASTVQQQEDRTNELLKAATNKDIADDEVATWIQDCNDLLKGLGTVKDSLFVLHELGEQLKQQVDASAASAIQSDQLSLSQHLCALEQALCKQQTSLQAGVLDYETFAKSLEALEAWIVEAEEILQGQDPSHSSDLSTIQERMEELKGQMLKFSSMAPDLDRLNELGYRLPLNDKEIKRMQNLNRHWSLISSQTTERFSKLQSFLLQHQTFLEKCETWMEFLVQTEQKLAVEISGNYQHLLEQQRAHELFQAEMFSRQQILHSIIIDGQRLLEQGQVDDRDEFNLKLTLLSNQWQGVIRRAQQRRGIIDSQIRQWQRYREMAEKLRKWLVEVSYLPMSGLGSVPIPLQQARTLFDEVQFKEKVFLRQQGSYILTVEAGKQLLLSADSGAEAALQAELAEIQEKWKSASMRLEEQKKKLAFLLKDWEKCEKGIADSLEKLRTFKKKLSQSLPDHHEELHAEQMRCKELENAVGSWTDDLTQLSLLKDTLSAYISADDISILNERVELLQRQWEELCHQLSLRRQQIGERLNEWAVFSEKNKELCEWLTQMESKVSQNGDILIEEMIEKLKKDFKRNWLCSRDXFQFFL

SEQ ID NO: 770795 - protein, 67 aa, Homo sapiens
KDYSKQCASTVQQQEDRTNELLKAATNKDIADDEVATWIQDCNVCSGATLFSPHALLRLPKFSFWSV

SEQ ID NO: 770796 - protein, 189 aa, Homo sapiens
SKALLQLWQRYKDYSKQCASTVQQQEDRTNELLKAATNKDIADDEVATWIQDCNDLLKGLGTVKDSLFVLHELGEQLKQQVDASAASAIQSDQLSLSQHLCALEQALCKQQTSLQAGVLDYETFAKSLEALEAWIVEAEEILQGQDPSHSSDLSTIQERMEELKGQMLKFSSMAPDLDRLERNRYRARF

SEQ ID NO: 770797 - protein, 828 aa, Homo sapiens
MYSALPSEDEEGQDDKDFYLRGAVGLSGDHSALESQIRQLGKALDDSRFSETAAFPSSSGVIYTVAKEELKKFEAFQRQVHECLTQLELINKQYRRLARENRTDSACSLKQMVHEGNQRWDNLQKRVTSILRRLKHFIGQREEFETARDSILVWLTEMDLQLTNIEHFSECDVQAKIKQLKAFQQEISLNHNKIEQIIAQGEQLIEKSEPLDAAIIEEELDELRRYCQEVFGRVERYHKKLIRLPLPDDEHDLSDRELELEDSAALSDLHWHDRSADSLLSPQPSSNLSLSLAQPLRSERSGRDTPASVDSIPLEWDHDYDLSRDLESAMSRALPSEDEEGQDDKDFYLRGAVGLSGDHSALESQIRQLGKALDDSRFQIQQTENIIRSKTPTGPELDTSYKGYMKLLGECSSSIDSVKRLEHKLKEEEESLPGFVNLHSTETQTAGVIDRWELLQAQALSKELRMKQNLQKWQQFNSDLNSIWAWLGDTEEELEQLQRLELSTDIQTIELQIKKLKELQKAVDHRKAIILSINLCSPEFTQADSKESRDLQDRLSQMNGRWDRVCSLLEEWRGLLQDALMQCQGFHEMSHGLLLMLENIDRRKNEIVPIDSNLDAEILQDHHKQLMQIKHELLESQLRVASLQDMSCQLLVNAEGTDCLEAKEKVHVIGNRLKLLLKEVSRHIKELEKLLDVSSSQQDLSSWSSADELDTSGSVSPTSGRSTPNRQKTPRGKCSLSQPGPSVSSPHSRSTKGGSDSSLSEPGPGRSGRGFLFRVLRAALPLQLLLLLLIGLACLVPMSEEDYSCALSNNFARSFHPMLRYTNGPPPL

SEQ ID NO: 770798 - protein, 183 aa, Homo sapiens [sequence omitted]

SEQ ID NO: 770799 - protein, 956 aa, Homo sapiens
SKALLQLWQRYKDYSKQCASTVQQQEDRTNELLKAATNKDIADDEVATWIQDCNDLLKGLGTVKDSLFVLHELGEQLKQQVDASAASAIQSDQLSLSQHLCALEQALCKQQTSLQAGVLDYETFAKSLEALEAWIVEAEEILQGQDPSHSSDLSTIQERMEELKGQMLKFSSMAPDLDRLNELGYRLPLNDKEIKRMQNLNRHWSLISSQTTERFSKLQSFLLQHQTFLEKCETWMEFLVQTEQKLAVEISGNYQHLLEQQRAHELFQAEMFSRQQILHSIIIDGQRLLEQGQVDDRDEFNLKLTLLSNQWQGVIRRAQQRRGIIDSQIRQWQRYREMAEKLRKWLVEVSYLPMSGLGSVPIPLQQARTLFDEVQFKEKVFLRQQGSYILTVEAGKQLLLSADSGAEAALQAELAEIQEKWKSASMRLEEQKKKLAFLLKDWEKCEKGIADSLEKLRTFKKKLSQSLPDHHEELHAEQMRCKELENAVGSWTDDLTQLSLLKDTLSAYISADDISILNERVELLQRQWEELCHQLSLRRQQIGERLNEWAVFSEKNKELCEWLTQMESKVSQNGDILIEEMIEKLKKDYQEEIAIAQENKIQLQQMGERLAKASHESKASEIEYKLGKVNDRWQHLLDLIAARVKKLKETLVAVQQLDKNMSSLRTWLAHIESELAKPIVYDSCNSEEIQRKLNEQQELQRDIEKHSTGVASVLNLCEVLLHDCDACATDAECDSIQQATRNLDRRWRNICAMSMERRLKIEETWRLWQKFLDDYSRFEDWLKSSERTAAFPSSSGVIYTVAKEELKKFEAFQRQVHECLTQLELINKQYRRLARENRTDSACSLKQMVHEGNQRWDNLQKRVTSILRRLKHFIGQREEFETARDSILVWLTEMDLQLTNIEHFSECDVQAKIKQLKAFQQEISLNHNKIEQIIAQGEQLIGRYCQEVFGRVEDKQ

SEQ ID NO: 770800 - protein, 1564 aa, Homo sapiens; identical to SEQ ID NO: 770787

SEQ ID NO: 770801 - protein, 1152 aa, Homo sapiens
SKALLQLWQRYKDYSKQCASTVQQQEDRTNELLKAATNKDIADDEVATWIQDCNDLLKGLGTVKDSLFVLHELGEQLKQQVDASAASAIQSDQLSLSQHLCALEQALCKQQTSLQAGVLDYETFAKSLEALEAWIVEAEEILQGQDPSHSSDLSTIQERMEELKGQMLKFSSMAPDLDRLNELGYRLPLNDKEIKRMQNLNRHWSLISSQTTERFSKLQSFLLQHQTFLEKCETWMEFLVQTEQKLAVEISGNYQHLLEQQRAHELFQAEMFSRQQILHSIIIDGQRLLEQGQVDDRDEFNLKLTLLSNQWQGVIRRAQQRRGIIDSQIRQWQRYREMAEKLRKWLVEVSYLPMSGLGSVPIPLQQARTLFDEVQFKEKVFLRQQGSYILTVEAGKQLLLSADSGAEAALQAELAEIQEKWKSASMRLEEQKKKLAFLLKDWEKCEKGIADSLEKLRTFKKKLSQSLPDHHEELHAEQMRCKELENAVGSWTDDLTQLSLLKDTLSAYISADDISILNERVELLQRQWEELCHQLSLRRQQIGERLNEWAVFSEKNKELCEWLTQMESKVSQNGDILIEEMIEKLKKDYQEEIAIAQENKIQLQQMGERLAKASHESKASEIEYKLGKVNDRWQHLLDLIAARVKKLKETLVAVQQLDKNMSSLRTWLAHIESELAKPIVYDSCNSEEIQRKLNEQQELQRDIEKHSTGVASVLNLCEVLLHDCDACATDAECDSIQQATRNLDRRWRNICAMSMERRLKIEETWRLWQKFLDDYSRFEDWLKSSERTAAFPSSSGVIYTVAKEELKKFEAFQRQVHECLTQLELINKQYRRLARENRTDSACSLKQMVHEGNQRWDNLQKRVTSILRRLKHFIGQREEFETARDSILVWLTEMDLQLTNIEHFSECDVQAKIKQLKAFQQEISLNHNKIEQIIAQGEQLIEKSEPLDAAIIEEELDELRRYCQEVFGRVERYHKKLIRLPLPDDEHDLSDRELELEDSAALSDLHWHDRSADSLLSPQPSSNLSLSLAQPLRSERSGRDTPASVDSIPLEWDHDYDLSRDLESAMSRALPSEDEEGQDDKDFYLRGAVGLSGRKEPLQFASLKESQRELILPWKHDSYPESFASFFHAGKLYLSEHLDMNVIIKCKIWCGR

SEQ ID NO: 770802 - protein, 388 aa, Homo sapiens
LPPPARAPPPPSMDDPDCDSTWEEDEEDAEDAEDEDCEDGEAAGARDADAGDEDEESEEPRAARPSSFQSRMTGSRNWRATRDMCRYRHNYPDLVERDCNGDTPNLSFYRNEIRFLPNGCFIEDILQNWTDNYDLLEDNHSYIQWLFPLREPGVNWHAKPLTLREVEVFKSSQEIQERLVRAYELMLGFYGIRLEDRGTGTVGRAQNYQKRFQNLNWRSHNNLRITRILKSLGELGLEHFQAPLVRFFLEETLVRRELPGVRQSALDYFMFAVRCRHQRRQLVHFAWEHFRPRCKFVWGPQDKLRRFKPSSLPHPLEGSRKVEEEGSPGDPDHEASTQVGPVGQSIARVGAGWTRGPSHGAWSPRMRDPWRGARGMRQGATGKIGRSP

SEQ ID NO: 770803 - protein, 388 aa, Homo sapiens; identical to SEQ ID NO: 770802

SEQ ID NO: 770804 - protein, 531 aa, Homo sapiens
MTGSRNWRATRDMCRYRHNYPVRTCPCPGTQNPPASCSSQAECPRFYWKAGLACCARATVLGRTLPGAQPGIDSEPCPSPLAGDRGHPPTFLSFSTPSPCKHGHSASLVMHTCGVRDTAHTAPHPHASPVSCRLSSAITLHTPESRKPLCCLQGAEEGTCQAWPGWRNGEGGSLGLGGSCCPLNGPHLQSEEPGGLLGYWASLEVCRCASPKDTEEPQGSLCLMDPCCPLSLALQDLVERDCNGDTPNLSFYRNEIRFLPNGCFIEDILQNWTDNYDLLEDNHSYIQWLFPLREPGVNWHAKPLTLREVEVFKSSQEIQERLVRAYELMLGFYGIRLEDRGTGTVGRAQNYQKRFQNLNWRSHNNLRITRILKSLGELGLEHFQAPLVRFFLEETLVRRELPGVRQSALDYFMFAVRCRHQRRQLVHFAWEHFRPRCKFVWGPQDKLRRFKPSSLPHPLEGSRKVEEEGSPGDPDHEASTQVGPVGQSIARVGAGWTRGPSHGAWSPRMRDPWRGARGMRQGATGKIGRSP

SEQ ID NO: 770805 - protein, 79 aa, Homo sapiens
RIQRPLNSSPRLRLHLGGGRGGCGGRGGRGLRGRRGRRREGRGRRGRGRGVGGAAGGAAQLVPVQNDRVQKLASHEGHV

SEQ ID NO: 770806 - protein, 388 aa, Homo sapiens; identical to SEQ ID NO: 770802

SEQ ID NO: 770807 - protein, 392 aa, Homo sapiens
MTGARVRCTMWTLELTNSHPDCDSTWEEDEEDAEDAEDEDCEDGEAAGARDADAGDEDEESEEPRAARPSSFQSRMTGSRNWRATRDMCRYRHNYPDLVERDCNGDTPNLSFYRNEIRFLPNGCFIEDILQNWTDNYDLLEDNHSYIQWLFPLREPGVNWHAKPLTLREVEVFKSSQEIQERLVRAYELMLGFYGIRLEDRGTGTVGRAQNYQKRFQNLNWRSHNNLRITRILKSLGELGLEHFQAPLVRFFLEETLVRRELPGVRQSALDYFMFAVRCRHQRRQLVHFAWEHFRPRCKFVWGPQDKLRRFKPSSLPHPLEGSRKVEEEGSPGDPDHEASTQVGPVGQSIARVGAGWTRGPSHGAWSPRMRDPWRGARGMRQGATGKIGRSP

SEQ ID NO: 770808 - protein, 377 aa, Homo sapiens
MVTSPDCDSTWEEDEEDAEDAEDEDCEDGEAAGARDADAGDEDEESEEPRAARPSSFQSRMTGSRNWRATRDMCRYRHNYPDLVERDCNGDTPNLSFYRNEIRFLPNGCFIEDILQNWTDNYDLLEDNHSYIQWLFPLREPGVNWHAKPLTLREVEVFKSSQEIQERLVRAYELMLGFYGIRLEDRGTGTVGRAQNYQKRFQNLNWRSHNNLRITRILKSLGELGLEHFQAPLVRFFLEETLVRRELPGVRQSALDYFMFAVRCRHQRRQLVHFAWEHFRPRCKFVWGPQDKLRRFKPSSLPHPLEGSRKVEEEGSPGDPDHEASTQVGPVGQSIARVGAGWTRGPSHGAWSPRMRDPWRGARGMRQGATGKIGRSP

SEQ ID NO: 770809 - protein, 312 aa, Homo sapiens
SGVDLEDPVGVRVKLPDLVERDCNGDTPNLSFYRNEIRFLPNGCFIEDILQNWTDNYDLLEDNHSYIQWLFPLREPGVNWHAKPLTLREVEVFKSSQEIQERLVRAYELMLGFYGIRLEDRGTGTVGRAQNYQKRFQNLNWRSHNNLRITRILKSLGELGLEHFQAPLVRFFLEETLVRRELPGVRQSALDYFMFAVRCRHQRRQLVHFAWEHFRPRCKFVWGPQDKLRRFKPSSLPHPLEGSRKVEEEGSPGDPDHEASTQVGPVGQSIARVGAGWTRGPSHGAWSPRMRDPWRGARGMRQGATGKIGRSP

SEQ ID NO: 770810 - protein, 388 aa, Homo sapiens; identical to SEQ ID NO: 770802

SEQ ID NO: 770811 - protein, 314 aa, Homo sapiens
  misc_feature (307)..(307): Xaa can be any naturally occurring amino acid
LPPPARAPPPPSMDDPDCDSTWEEDEEDAEDAEDEDCEDGEAAGARDADAGDEDEESEEPRAARPSSFQSRMTGSRNWRATRDMCRYRHNYPDLVERDCNGDTPNLSFYRNEIRFLPNGCFIEDILQNWTDNYDLLEDNHSYIQWLFPLREPGVNWHAKPLTLREVEVFKSSQEIQERLVRAYELMLGFYGIRLEDRGTGTVGRAQNYQKRFQNLNWRSHNNLRITRILKSLGELGLEHFQAPLVRFFLEETLVRRELPGVRQSALDYFMFAVRCRHQRRQLVHFAWEHFRPRCKFVWGPLTRGSMXWPHNGMV

SEQ ID NO: 770812 - protein, 317 aa, Homo sapiens
MTGSRNWRATRDMCRYRHNYPDLVERDCNGDTPNLSFYRNEIRFLPNGCFIEDILQNWTDNYDLLEDNHSYIQWLFPLREPGVNWHAKPLTLREVEVFKSSQEIQERLVRAYELMLGFYGIRLEDRGTGTVGRAQNYQKRFQNLNWRSHNNLRITRILKSLGELGLEHFQAPLVRFFLEETLVRRELPGVRQSALDYFMFAVRCRHQRRQLVHFAWEHFRPRCKFVWGPQDKLRRFKPSSLPHPLEGSRKVEEEGSPGDPDHEASTQVGPVGQSIARVGAGWTRGPSHGAWSPRMRDPWRGARGMRQGATGKIGRSP

SEQ ID NO: 770813 - protein, 317 aa, Homo sapiens; identical to SEQ ID NO: 770812

SEQ ID NO: 770814 - protein, 317 aa, Homo sapiens; identical to SEQ ID NO: 770812

SEQ ID NO: 770815 - protein, 395 aa, Homo sapiens
EEEYRSVLVLFRARARMSSYYGPDCDSTWEEDEEDAEDAEDEDCEDGEAAGARDADAGDEDEESEEPRAARPSSFQSRMTGSRNWRATRDMCRYRHNYPDLVERDCNGDTPNLSFYRNEIRFLPNGCFIEDILQNWTDNYDLLEDNHSYIQWLFPLREPGVNWHAKPLTLREVEVFKSSQEIQERLVRAYELMLGFYGIRLEDRGTGTVGRAQNYQKRFQNLNWRSHNNLRITRILKSLGELGLEHFQAPLVRFFLEETLVRRELPGVRQSALDYFMFAVRCRHQRRQLVHFAWEHFRPRCKFVWGPQDKLRRFKPSSLPHPLEGSRKVEEEGSPGDPDHEASTQVGPVGQSIARVGAGWTRGPSHGAWSPRMRDPWRGARGMRQGATGKIGRSP

SEQ ID NO: 770816 - protein, 388 aa, Homo sapiens
  misc_feature (7)..(7): Xaa can be any naturally occurring amino acid
MTRGAFXDKSLVLVRPDCDSTWEEDEEDAEDAEDEDCEDGEAAGARDADAGDEDEESEEPRAARPSSFQSRMTGSRNWRATRDMCRYRHNYPDLVERDCNGDTPNLSFYRNEIRFLPNGCFIEDILQNWTDNYDLLEDNHSYIQWLFPLREPGVNWHAKPLTLREVEVFKSSQEIQERLVRAYELMLGFYGIRLEDRGTGTVGRAQNYQKRFQNLNWRSHNNLRITRILKSLGELGLEHFQAPLVRFFLEETLVRRELPGVRQSALDYFMFAVRCRHQRRQLVHFAWEHFRPRCKFVWGPQDKLRRFKPSSLPHPLEGSRKVEEEGSPGDPDHEASTQVGPVGQSIARVGAGWTRGPSHGAWSPRMRDPWRGARGMRQGATGKIGRSP

SEQ ID NO: 770817 - protein, 317 aa, Homo sapiens; identical to SEQ ID NO: 770812

SEQ ID NO: 770818 - protein, 429 aa, Homo sapiens
LPPPARAPPPPSMDDPDCDSTWEEDEEDAEDAEDEDCEDGEAAGARDADAGDEDEAARQGARGLAAGPNASVRSLHDIEQGFHDMLGDAHEGDLCVTRIQGSEDNPGNHGWDREDRAMWGGRRLKSHEFFYERNEIQGSRAARGAVVIRGTFSYQQSWERDQTIEAPLRGLVHSLHSSWLFPLRDPWSATGVAIAPHGSGGVEGVQKMVFKSSQEIQERLVRAYELMLGFYGIRLEDRGTGTVGRAQNYQKRFQNLNWRSHNNLRITRILKSLGELGLEHFQAPLVRFFLEETLVRRELPGVRQSALDYFMFAVRCRHQRRQLVHFAWEHFRPRCKFVWGPQDKLRRFKPSSLPHPLEGSRKVEEEGSPGDPDHEASTQVGPVGQSIARVGAGWTRGPSHGAWSPRMRDPWRGARGMRQGATGKIGRSP

SEQ ID NO: 770819 - protein, 323 aa, Homo sapiens
RRPPARPPARPPPARPPARPPAARPPARPPARRPPARPPARPPPARPPARPPAARPPARPPARRPPARPPARPPPARPPARPPAARPPARPPARRPPARPPARPPPARPPARPPAARPPARPPARRPPARPPARPPPARPPARPPAARPPARPPARRPPARPPARPPPARPPARPPAARPPARPPARRPPARPPARPPPARPPARPPAARPPARPPARRPPARPPARPPPPAQAPARQDLQGTSQPRAHRRPQAPARQDLQGMSQPRRGRQQSCRTQRWSLLPSLGSLKERSARRRLGPPVPAAGAGASGAAAGSPQALLRDP

SEQ ID NO: 770820 - protein, 365 aa, Homo sapiens
GRSRCPGPGARGGTMSPRSCLRSLRLLVFAVFSAAASNWLYLAKLSSVGSISEEETCEKLKGLIQRQVQMCKRNLEVMDSVRRGAQLAIEECQYQFRNRRWNCSTLDSLPVFGKVVTQGTREAAFVYAISSAGVAFAVTRACSSGELEKCGCDRTVHGVSPQGFQWSGCSDNIAYGVAFSQSFVDVRERSKGASSSRALMNLHNNEAGRKAILTHMRVECKCHGVSGSCEVKTCWRAVPPFRQVGHALKEKFDGATEVEPRRVGSSRALVPRNAQFKPHTDEDLVYLEPSPDFCEQDMRSGVLGTRGRTCNKTSKAIDGCELLCCGRGFHTAQVELAERCSCKFHWCCFVKCRQCQRLVELHTCR

SEQ ID NO: 770821 - protein, 177 aa, Homo sapiens
GRSRCPGPGARGGTMSPRSCLRSLRLLVFAVFSAAASNWLYLAKLSSVGSISEEETCEKLKGLIQRQVQMCKRNLEVMDSVRRGAQLAIEECQYQFRNRRWNCSTLDSLPVFGKVVTQGGKAWHGGDSGCHLLTESRSGERTQRRKEGGSLGQCWPEAIVGTQDPMRSPPYLWGRNQ

SEQ ID NO: 770822 - protein, 273 aa, Homo sapiens
HVCNSTSRWNCSTLDSLPVFGKVVTQGTREAAFVYAISSAGVAFAVTRACSSGELEKCGCDRTVHGVSPQGFQWSGCSDNIAYGVAFSQSFVDVRERSKGASSSRALMNLHNNEAGRKAILTHMRVECKCHGVSGSCEVKTCWRAVPPFRQVGHALKEKFDGATEVEPRRVGSSRALVPRNAQFKPHTDEDLVYLEPSPDFCEQDMRSGVLGTRGRTCNKTSKAIDGCELLCCGRGFHTAQVELAERCSCKFHWCCFVKCRQCQRLVELHTCR

SEQ ID NO: 770823 - protein, 343 aa, Homo sapiens
MWPNGSSLGPCFRPTNITLEERRLIASPWFAASFCVVGLASNLLALSVLAGARQGGSHTRSSFLTFLCGLVLTDFLGLLVTGTIVVSQHAALFEWHAVDPGCRLCRFMGVVMIFFGLSPLLLGAAMASERYLGITRPFSRPAVASQRRAWATVGLVWAAALALGLLPLLGVGRYTVQYPGSWCFLTLGAESGDVAFGLLFSMLGGLSVGLSFLLNTVSVATLCHVYHGQEAAQQRPRDSEVEMMAQLLGIMVVASVCWLPLLVFIAQTVLRNPPAMSPAGQLSRTTEKELLIYLRVATWNQILDPWVYILFRRAVLRRLQPRLSTRPRSLSLQPQLTQRSGLQ

SEQ ID NO: 770824 - protein, 284 aa, Homo sapiens
MWPNGSSLGPCFRPTNITLEERRLIASPWFAASFCVVGLASNLLALSVLAGARQGGSHTRSSFLTFLCGLVLTDFLGLLVTGTIVVSQHAALFEWHAVDPGCRLCRFMGVVMIFFGLSPLLLGAAMASERYLGITRPFSRPAVASQRRAWATVGLVWAAALALGLLPLLGVGRYTVQYPGSWCFLTLGAESGDVAFGLLFSMLGGLSVGLSFLLNTVSVATLCHVYHGQEAAQQRPRDSEVEMMAQLLGIMVVASVCWLPLLLCPPHAVTPRTQFPSPDWTVSL

SEQ ID NO: 770825 - protein, 407 aa, Homo sapiens
MWPNGSSLGPCFRPTNITLEERRLIASPWFAASFCVVGLASNLLALSVLAGARQGGSHTRSSFLTFLCGLVLTDFLGLLVTGTIVVSQHAALFEWHAVDPGCRLCRFMGVVMIFFGLSPLLLGAAMASERYLGITRPFSRPAVASQRRAWATVGLVWAAALALGLLPLLGVGRYTVQYPGSWCFLTLGAESGDVAFGLLFSMLGGLSVGLSFLLNTVSVATLCHVYHGQEAAQQRPRDSEVEMMAQLLGIMVVASVCWLPLLVFIAQTVLRNPPAMSPAGQLSRTTEKELLIYLRVATWNQILDPWVYILFRRAVLRRLQPRLSTRPRRSLTLWPSLEYSGTISAHCNLRLPGSSDSRASASRAAGITGVSHCARPCMLFDPEFDLLAGVQLLPFEPPTGKALSRKD

SEQ ID NO: 770826 - protein, 665 aa, Homo sapiens
MDRPAAAAAAGCEGGGGPNPGPAGGRRPPRAAGGATAGSRQPSVETLDSPTGSHVEWCKQLIAATISSQISGSVTSENVSRDYKALRDGNKLAQMEEAPLFPGESIKAIVKDVMYICPFMGAVSGTLTVTDFKLYFKNVERDPHFILDVPLGVISRVEKIGAQSHGDNSCGIEIVCKDMRNLRLAYKQEEQSKLGIFENLNKHAFPLSNGQALFAFSYKEKFPINGWKVYDPVSEYKRQGLPNESWKISKINSNYEFCDTYPAIIVVPTSVKDDDLSKVAAFRAKGRVPVLSWIHPESQATITRCSQPLVGPNDKRCKEDEKYLQTIMDANAQSHKLIIFDARQNSVADTNKTKGGGYESESAYPNAELVFLEIHNIHVMRESLRKLKEIVYPSIDEARWLSNVDGTHWLEYIRMLLAGAVRIADKIESGKTSVVVHCSDGWDRTAQLTSLAMLMLDSYYRTIKGFETLVEKEWISFGHRFALRVGHGNDNHADADRSPIFLQFVDCVWQMTRQFPSAFEFNELFLITILDHLYSCLFGTFLCNCEQQRFKEDVYTKTISLWSYINSQLDEFSNPFFVNYENHVLYPVASLSHLELWVNYYVRWNPRMRPQMPIHQNLKELLAVRAELQKRVEGLQREVATRAVSSSSERGSSPSHSATSVHTSV

SEQ ID NO: 770827 - protein, 665 aa, Homo sapiens; identical to SEQ ID NO: 770826

SEQ ID NO: 770828 - protein, 573 aa, Homo sapiens
MEAQVYGSSCYFGLFLSVKDVMYICPFMGAVSGTLTVTDFKLYFKNVERDPHFILDVPLGVISRVEKIGAQSHGDNSCGIEIVCKDMRNLRLAYKQEEQSKLGIFENLNKHAFPLSNGQALFAFSYKEKFPINGWKVYDPVSEYKRQGLPNESWKISKINSNYEFCDTYPAIIVVPTSVKDDDLSKVAAFRAKGRVPVLSWIHPESQATITRCSQPLVGPNDKRCKEDEKYLQTIMDANAQSHKLIIFDARQNSVADTNKTKGGGYESESAYPNAELVFLEIHNIHVMRESLRKLKEIVYPSIDEARWLSNVDGTHWLEYIRMLLAGAVRIADKIESGKTSVVVHCSDGWDRTAQLTSLAMLMLDSYYRTIKGFETLVEKEWISFGHRFALRVGHGNDNHADADRSPIFLQFVDCVWQMTRQFPSAFEFNELFLITILDHLYSCLFGTFLCNCEQQRFKEDVYTKTISLWSYINSQLDEFSNPFFVNYENHVLYPVASLSHLELWVNYYVRWNPRMRPQMPIHQNLKELLAVRAELQKRVEGLQREVATRAVSSSSERGSSPSHSATSVHTSV

SEQ ID NO: 770829 - protein, 544 aa, Homo sapiens
MHQTALTHLAIEALFSLIPPDPHFILDVPLGVISRVEKIGAQSHGDNSCGIEIVCKDMRNLRLAYKQEEQSKLGIFENLNKHAFPLSNGQALFAFSYKEKFPINGWKVYDPVSEYKRQGLPNESWKISKINSNYEFCDTYPAIIVVPTSVKDDDLSKVAAFRAKGRVPVLSWIHPESQATITRCSQPLVGPNDKRCKEDEKYLQTIMDANAQSHKLIIFDARQNSVADTNKTKGGGYESESAYPNAELVFLEIHNIHVMRESLRKLKEIVYPSIDEARWLSNVDGTHWLEYIRMLLAGAVRIADKIESGKTSVVVHCSDGWDRTAQLTSLAMLMLDSYYRTIKGFETLVEKEWISFGHRFALRVGHGNDNHADADRSPIFLQFVDCVWQMTRQFPSAFEFNELFLITILDHLYSCLFGTFLCNCEQQRFKEDVYTKTISLWSYINSQLDEFSNPFFVNYENHVLYPVASLSHLELWVNYYVRWNPRMRPQMPIHQNLKELLAVRAELQKRVEGLQREVATRAVSSSSERGSSPSHSATSVHTSV

SEQ ID NO: 770830 - protein, 586 aa, Homo sapiens
MQFSNRPPSSTGIASSTPCSLQTSPVKILPMKDVMYICPFMGAVSGTLTVTDFKLYFKNVERDPHFILDVPLGVISRVEKIGAQSHGDNSCGIEIVCKDMRNLRLAYKQEEQSKLGIFENLNKHAFPLSNGQALFAFSYKEKFPINGWKVYDPVSEYKRQGLPNESWKISKINSNYEFCDTYPAIIVVPTSVKDDDLSKVAAFRAKGRVPVLSWIHPESQATITRCSQPLVGPNDKRCKEDEKYLQTIMDANAQSHKLIIFDARQNSVADTNKTKGGGYESESAYPNAELVFLEIHNIHVMRESLRKLKEIVYPSIDEARWLSNVDGTHWLEYIRMLLAGAVRIADKIESGKTSVVVHCSDGWDRTAQLTSLAMLMLDSYYRTIKGFETLVEKEWISFGHRFALRVGHGNDNHADADRSPIFLQFVDCVWQMTRQFPSAFEFNELFLITILDHLYSCLFGTFLCNCEQQRFKEDVYTKTISLWSYINSQLDEFSNPFFVNYENHVLYPVASLSHLELWVNYYVRWNPRMRPQMPIHQNLKELLAVRAELQKRVEGLQREVATRAVSSSSERGSSPSHSATSVHTSV

SEQ ID NO: 770831 - protein, 586 aa, Homo sapiens; identical to SEQ ID NO: 770830

SEQ ID NO: 770832 - protein, 506 aa, Homo sapiens
MDRPAAAAAAGCEGGGGPNPGPAGGRRPPRAAGGATAGSRQPSVETLDSPTGSHVEWCKQLIAATISSQISGSVTSENVSRDYKALRDGNKLAQMEEAPLFPGESIKAIVKDVMYICPFMGAVSGTLTVTDFKLYFKNVERDPHFILDVPLGVISRVEKIGAQSHGDNSCGIEIVCKDMRNLRLAYKQEEQSKLGIFENLNKHAFPLSNGQALFAFSYKEKFPINGWKVYDPVSEYKRQGLPNESWKISKINSNYEFCDTYPAIIVVPTSVKDDDLSKVAAFRAKGRVPVLSWIHPESQATITRCSQPLVGPNDKRCKEDEKYLQTIMDANAQSHKLIIFDARQNSVADTNKMLLAGAVRIADKIESGKTSVVVHCSDGWDRTAQLTSLAMLMLDSYYRTIKGFETLVEKEWISFGHRFALRVGHGNDNHADADRSPIFLQFVDCVWQMTRQFPSAFEFNELFLITILDHLYSCLFGTFLCNCEQQRFKEAWGAGTQRARGSLRSR

SEQ ID NO: 770833 - protein, 267 aa, Homo sapiens
MDRPAAAAAAGCEGGGGPNPGPAGGRRPPRAAGGATAGSRQPSVETLDSPTGSHVEWCKQLIAATISSQISGSVTSENVSRDYKALRDGNKLAQMEEAPLFPGESIKAIVKDVMYICPFMGAVSGTLTVTDFKLYFKNVERDPHFILDVPLGVISRVEKIGAQSHGDNSCGIEIVCKDMRNLRLAYKQEEQSKLGIFENLNKHAFPLSNGQALFAFSYKEKFPINGWKVYDPVSEYKRQGLPNESWKISSVVLARSYLKALEMESAD

SEQ ID NO: 770834 - protein, 568 aa, Homo sapiens
MDRPAAAAAAGCEGGGGPNPGPAGGRRPPRAAGGATAGSRQPSVETLDSPTGSHVEWCKQLIAATISSQISGSVTSENVSRDYKALRDGNKLAQMEEAPLFPGESIKAIVKDVMYICPFMGAVSGTLTVTDFKLYFKNVERDPHFILDVPLGVISRVEKIGAQSHGDNSCGIEIVCKDMRNLRLAYKQEEQSKLGIFENLNKHAFPLSNGQALFAFSYKEKFPINGWKVYDPVSEYKRQGLPNESWKISKINSNYEFCDTYPAIIVVPTSVKDDDLSKVAAFRAKGRVPVLSWIHPESQATITRCSQPLVGPNDKRCKEDEKYLQTIMDANAQSHKLIIFDARQNSVADTNKTKGGGYESESAYPNAELVFLEIHNIHVMRESLRKLKEIVYPSIDEARWLSNVDGTHWLEYIRMLLAGAVRIADKIESGKTSVVVHCSDGWDRTAQLTSLAMLMLDSYYRTIKGFETLVEKEWISFGHRFALRVGHGNDNHADADRSPIFLQFVDCVWQMTRQFPSAFEFNELFLITILDHLYSCLFGTFLCNCEQQRFKEAWGAGTQRARGSLRSR

SEQ ID NO: 770835 - protein, 586 aa, Homo sapiens; identical to SEQ ID NO: 770830

SEQ ID NO: 770836 - protein, 363 aa, Homo sapiens
MDRPAAAAAAGCEGGGGPNPGPAGGRRPPRAAGGATAGSRQPSVETLDSPTGSHVEWCKQLIAATISSQISGSVTSENVSRDYKALRDGNKLAQMEEAPLFPGESIKAIVKDVMYICPFMGAVSGTLTVTDFKLYFKNVERDPHFILDVPLGVISRVEKIGAQSHGDNSCGIEIVCKDMRNLRLAYKQEEQSKLGIFENLNKHAFPLSNGQALFAFSYKEKFPINGWKVYDPVSEYKRQGLPNESWKISKINSNYEFCDTYPAIIVVPTSVKDDDLSKVAAFRAKGRVPVLSWIHPESQATITRCSQPLVGPNDKRCKEDEKYLQTIMDANAQSHKLIIFDARQNSVADTNKLWYQDTASLME

SEQ ID NO: 770837 - protein, 506 aa, Homo sapiens; identical to SEQ ID NO: 770832

SEQ ID NO: 770838 - protein, 286 aa, Homo sapiens
MRESLRKLKEIVYPSIDEARWLSNVDGTHWLEYIRMLLAGAVRIADKIESGKTSVVVHCSDGWDRTAQLTSLAMLMLDSYYRTIKGFETLVEKEWISFGHRFALRVGHGNDNHADADRSPIFLQFVDCVWQMTRQFPSAFEFNELFLITILDHLYSCLFGTFLCNCEQQRFKEDVYTKTISLWSYINSQLDEFSNPFFVNYENHVLYPVASLSHLELWVNYYVRWNPRMRPQMPIHQNLKELLAVRAELQKRVEGLQREVATRAVSSSSERGSSPSHSATSVHTSV

SEQ ID NO: 770839 - protein, 586 aa, Homo sapiens; identical to SEQ ID NO: 770830

SEQ ID NO: 770840 - protein, 79 aa, Homo sapiens
QQHFHVETLWQEDGLIMQLCLCSLQMPIHQNLKELLAVRAELQKRVEGLQREVATRAVSSSSERGSSPSHSATSVHTSV

SEQ ID NO: 770841 - protein, 204 aa, Homo sapiens
MVTARAPSWPKKSSKAFGARALSSFLNRNKDRGRARWLTPVIPAFWEVEADGLLEVMSSRPAWPTRWSLAPMLECSGVISADCNLRLPGSSDSPASASGVAGITAKISRRCMQEELNFRGHRLIFNTWQFTKQRRGVAMLPRLVSNSGAQAICLPRPFKVLRLQPEEERGNPGEKHLEFKLREEDTESQLRTQTGRRKIIFPSL

SEQ ID NO: 770842 - protein, 823 aa, Homo sapiens [sequence omitted]

SEQ ID NO: 770843 - protein, 641 aa, Homo sapiens
MGGRVFLVFLAFCVWLTLPGAETQDSRGCARWCPQDSSCVNATACRCNPGFSSFSEIITTPMETCDDINECATLSKVSCGKFSDCWNTEGSYDCVCSPGYEPVSGAKTFKNESENTCQDVDECQQNPRLCKSYGTCVNTLGSYTCQCLPGFKLKPEDPKLCTDVDECSSGQHQCDSSTVCFNTVGSYSCRCRPGWKPRHGIPNNQKDTVCEDMTFSTWTPPPGVHSQTLSRFFDKVQDLGRDYKPGLANNTIQSILQALDELLEAPGDLETLPRLQQHCVASHLLDGLEDVLRGLSKNLSNGLLNFSYPAGTELSLEVQKQVDRSVTLRQNQAVMQLDWNQAQKSVTQEEDPVLTVITYMGLSVSLLCLLLAALTFLLCKAIQNTSTSLHLQLSLCLFLAHLLFLVAIDQTGHKVLCSIIAGTLHYLYLATFTWMLLEALYLFLTARNLTVVNYSSINRFMKKLMFPVGYGVPAVTVAISAASRPHLYGTPSRCWLQPEKGFIWGFLGPVCAIFSVNLVLFLVTLWILKNRLSSLNSEVSTLRNTRMLAFKATAQLFILGCTWCLGILQVGPAARVMAYLFTIINSLQGVFIFLVYCLLSQQVREQYGKWSKGIRKLKTESEMHTLSSSAKADTSKPSTVN

SEQ ID NO: 770844 - protein, 763 aa, Homo sapiens
MGGRVFLVFLAFCVWLTLPGAETQDSRGCARWCPQDSSCVNATACRCNPGFSSFSEIITTPMETCDDINECATLSKVSCGKFSDCWNTEGSYDCVCSPGYEPVSGAKTFKNESENTCQDVDECQQNPRLCKSYGTCVNTLGSYTCQCLPGFKLKPEDPKLCTDVDECSSGQHQCDSSTVCFNTVGSYSCRCRPGWKPRHGIPNNQKDTVCEDMTFSTWTPPPGVHSQTLSRFFDKVQDLGRDYKPGLANNTIQSILQALDELLEAPGDLETLPRLQQHCVASHLLDGLEDVLRGLSKNLSNGLLNFSYPAGTELSLEVQKQVDRSVTLRQNQAVMQLDWNQAQKSGDPGMGKLLAEAPLVLEPEKQMLLHETHQGLLQDGSPILLSDVISAFLSNNDTQNLSSPVTFTFSHRSVIPRQKVLCVFWEHGQNGCGHWATTGCSTIGTRDTSTICRCTHLSSFAVLMAHYDVQEEDPVLTVITYMGLSVSLLCLLLAALTFLLCKAIQNTSTSLHLQLSLCLFLAHLLFLVAIDQTGHKVLCSIIAGTLHYLYLATFTWMLLEALYLFLTARNLTVVNYSSINRFMKKLMFPVGYGVPAVTVAISAASRPHLYGTPSRCWLQPEKGFIWGFLGPVCAIFSVNLVLFLVTLWILKNRLSSLNSEVSTLRNTRMLAFKATAQLFILGCTWCLGILQVGPAARVMAYLFTIINSLQGVFIFLVYCLLSQQVREQYGKWSKGIRKLKTESEMHTLSSSAKADTSKPSTVN

SEQ ID NO: 770845 - protein, 94 aa, Homo sapiens
EDPVLTVITYMGLSVSLLCLLLAALTFLLCKAIQNTSTSLHLQLSLCLFLAHLLFLVAIDQTGHKVLTAVFQRAPFLDAGHAGSWNDAAFDSLI

SEQ ID NO: 770846 - protein, 154 aa, Homo sapiens
MWFSLEKWVPESSKLSSFAVLMAHYDVQEEDPVLTVITYMGLSVSLLCLLLAALTFLLCKAIQNTSTSLHLQLSLCLFLAHLLFLVAIDQTGHKVLCSIIAGTLHYLYLATFTWMLLEALYLFLTARNLTVVNYSSINRFMKKLMFPVGYPVNN

SEQ ID NO: 770847 - protein, 763 aa, Homo sapiens; identical to SEQ ID NO: 770844

SEQ ID NO: 770848 - protein, 776 aa, Homo sapiens
MGGRVFLVFLAFCVWLTLPGAETQDSRGCARWCPQDSSCVNATACRCNPGFSSFSEIITTPMETCDDINECATLSKVSCGKFSDCWNTEGSYDCVCSPGYEPVSGAKTFKNESENTCQDVDECQQNPRLCKSYGTCVNTLGSYTCQCLPGFKLKPEDPKLCTDVDECSSGQHQCDSSTVCFNTVGSYSCRCRPGWKPRHGIPNNQKDTVCEDMTFSTWTPPPGVHSQTLSRFFDKVQDLGRDYKPGLANNTIQSILQALDELLEAPGDLETLPRLQQHCVASHLLDGLEDVLRGLSKNLSNGLLNFSYPAGTELSLEVQKQVDRSVTLRQNQAVMQLDWNQAQKSGDPGMGKLLAEAPLVLEPEKQMLLHETHQGLLQDGSPILLSDVISAFLSNNDTQNLSSPVTFTFSHRSVIPRQKVLCVFWEHGQNGCGHWATTGCSTIGTRDTSTICRCTHLSSFAVLMAHYDVQEEDPVLTVITYMGLSVSLLCLLLAALTFLLCKAIQNTSTSLHLQLSLCLFLAHLLFLVAIDQTGHKVLCSIIAGTLHYLYLATFTWMLLEALYLFLTARNLTVVNYSSINRFMKKLMFPVGYGVPAVTVAISAASRPHLYGTPSRCWLQPEKGFIWGFLGPVCAIFSVNLVLFLVTLWILKNRLSSLNSEVSTLRNTRMLAFKATAQLFILGCTWCLGILQVGPAARVMAYLFTIINSLQGVFIFLVYCLLSQQVREQYGKWSKGIRKLKTESEMHTLSSSAKADTSKPSTVRSRIAPEHFTNRPT

SEQ ID NO: 770849 - protein, 1261 aa, Homo sapiens
GAPTVTSVEETKPRQGARPGRGSPGLVGAPARAEGPSDPRAAAAAAAASQQVRAASLSAPLPRIRDPPGHLSSAGAAVWPPASMRFGSKMMPMFLTVYLSNNEQHFTEVPVTPETICRDVVDLCKEPGESDCHLAEVWCGSVEIEFHHVGQDGLDLLTLCSACLGLPKCWITGVSHHDQPLVFKKERPVADNERMFDVLQRFGSQRNEVRFFLRHERPPGRDIVSGPRSQDPSLKRNGVKVPGEYRRKENGVNSPRMDLTLAELQEMASRQQQQIEAQQQLLATKEQRLKFLKQQDQRQQQQVAEQEKLKRLKEIAENQEAKLKKVRALKGHVEQKRLSNGKLVEEIEQMNNLFQQKQRELVLAVSKVEELTRQLEMLKNGRIDSHHDNQSAVAELDRLYKELQLRNKLNQEQNAKLQQQRECLNKRNSEVAVMDKRVNELRDRLWKKKAALQQKENLPVSSDGNLPQQAASAPSRVAAVGPYIQSSTMPRMPSRPELLVKPALPDGSLVIQASEGPMKIQTLPNMRSGAASQTKGSKIHPVGPDWSPSNADLFPSQGSASVPQSTGNALDQVDDGEVPLREKEKKVRPFSMFDAVDQSNAPPSFGTLRKNQSSEDILRDAQVANKNVAKVPPPVPTKPKQINLPYFGQTNQPPSDIKPDGSSQQLSTVVPSMGTKPKPAGQQPRVLLSPSIPSVGQDQTLSPGSKQESPPAAAVRPFTPQPSKDTLLPPFRKPQTVAASSIYSMYTQQQAPGKNFQQAVQSALTKTHTRGPHFSSVYGKPVIAAAQNQQQHPENIYSNSQGKPGSPEPETEPVSSVQENHENERIPRPLSPTKLLPFLSNPYRNQSDADLEALRKKLSNAPRPLKKRSSITEPEGPNGPNIQKLLYQRTTIAAMETISVPSYPSKSASVTASSESPVEIQNPYLHVEPEKEVVSLVPESLSPEDVGNASTENSDMPAPSPGLDYEPEGVPDNSPNLQNNPEEPNPEAPHVLDVYLEEYPPYPPPPYPSGEPEGPGEDSVSMRPPEITGQVSLPPGKRTNLRKTGSERIAHGMRVKFNPLALLLDSSLEGEFDLVQRIIYEVDDPSLPNDEGITALHNAVCAGHTEIVKFLVQFGVNVNAADSDGWTPLHCAASCNNVQVCKFLVESGAAVFAMTYSDMQTAADKCEEMEEGYTQCSQFLYGVQEKMGIMNKGVIYALWDYEPQNDDELPMKEGDCMTIIHREDEDEIEWWWARLNDKEGYVPRNLLGLYPRIKPRQRSLA

SEQ ID NO: 770850 - protein, 1217 aa, Homo sapiens
GAPTVTSVEETKPRQGARPGRGSPGLVGAPARAEGPSDPRAAAAAAAASQQVRAASLSAPLPRIRDPPGHLSSAGAAVWPPASMRFGSKMMPMFLTVYLSNNEQHFTEVPVTPETICRDVVDLCKEPGESDCHLAEVWCGSERPVADNERMFDVLQRFGSQRNEVRFFLRHERPPGRDIVSGPRSQDPSLKRNGVKVPGEYRRKENGVNSPRMDLTLAELQEMASRQQQQIEAQQQLLATKEQRLKFLKQQDQRQQQQVAEQEKLKRLKEIAENQEAKLKKVRALKGHVEQKRLSNGKLVEEIEQMNNLFQQKQRELVLAVSKVEELTRQLEMLKNGRIDSHHDNQSAVAELDRLYKELQLRNKLNQEQNAKLQQQRECLNKRNSEVAVMDKRVNELRDRLWKKKAALQQKENLPVSSDGNLPQQAASAPSRVAAVGPYIQSSTMPRMPSRPELLVKPALPDGSLVIQASEGPMKIQTLPNMRSGAASQTKGSKIHPVGPDWSPSNADLFPSQGSASVPQSTGNALDQVDDGEVPLREKEKKVRPFSMFDAVDQSNAPPSFGTLRKNQSSEDILRDAQVANKNVAKVPPPVPTKPKQINLPYFGQTNQPPSDIKPDGSSQQLSTVVPSMGTKPKPAGQQPRVLLSPSIPSVGQDQTLSPGSKQESPPAAAVRPFTPQPSKDTLLPPFRKPQTVAASSIYSMYTQQQAPGKNFQQAVQSALTKTHTRGPHFSSVYGKPVIAAAQNQQQHPENIYSNSQGKPGSPEPETEPVSSVQENHENERIPRPLSPTKLLPFLSNPYRNQSDADLEALRKKLSNAPRPLKKRSSITEPEGPNGPNIQKLLYQRTTIAAMETISVPSYPSKSASVTASSESPVEIQNPYLHVEPEKEVVSLVPESLSPEDVGNASTENSDMPAPSPGLDYEPEGVPDNSPNLQNNPEEPNPEAPHVLDVYLEEYPPYPPPPYPSGEPEGPGEDSVSMRPPEITGQVSLPPGKRTNLRKTGSERIAHGMRVKFNPLALLLDSSLEGEFDLVQRIIYEVDDPSLPNDEGITALHNAVCAGHTEIVKFLVQFGVNVNAADSDGWTPLHCAASCNNVQVCKFLVESGAAVFAMTYSDMQTAADKCEEMEEGYTQCSQFLYGVQEKMGIMNKGVIYALWDYEPQNDDELPMKEGDCMTIIHREDEDEIEWWWARLNDKEGYVPRNLLGLYPRIKPRQRSLA

SEQ ID NO: 770851 - protein, 181 aa, Homo sapiens
GAPTVTSVEETKPRQGARPGRGSPGLVGAPARAEGPSDPRAAAAAAAASQQVRAASLSAPLPRIRDPPGHLSSAGAAVWPPASMRFGSKMMPMFLTVYLSNNEQHFTEVPVTPETICRDVVDLCKEPGESDCHLAEVWCGSERPVADNERMFDVLQRFGSQRNEVRFFLRHERPPGRDIGR

SEQ ID NO: 770852 - protein, 1067 aa, Homo sapiens
MFDVLQRFGSQRNEVRFFLRHERPPGRDIVSGPRSQDPSLKRNGVKVPGEYRRKENGVNSPRMDLTLAELQEMASRQQQQIEAQQQLLATKEQRLKFLKQQDQRQQQQVAEQEKLKRLKEIAENQEAKLKKVRALKGHVEQKRLSNGKLVEEIEQMNNLFQQKQRELVLAVSKVEELTRQLEMLKNGRIDSHHDNQSAVAELDRLYKELQLRNKLNQEQNAKLQQQRECLNKRNSEVAVMDKRVNELRDRLWKKKAALQQKENLPVSSDGNLPQQAASAPSRVAAVGPYIQSSTMPRMPSRPELLVKPALPDGSLVIQASEGPMKIQTLPNMRSGAASQTKGSKIHPVGPDWSPSNADLFPSQGSASVPQSTGNALDQVDDGEVPLREKEKKVRPFSMFDAVDQSNAPPSFGTLRKNQSSEDILRDAQVANKNVAKVPPPVPTKPKQINLPYFGQTNQPPSDIKPDGSSQQLSTVVPSMGTKPKPAGQQPRVLLSPSIPSVGQDQTLSPGSKQESPPAAAVRPFTPQPSKDTLLPPFRKPQTVAASSIYSMYTQQQAPGKNFQQAVQSALTKTHTRGPHFSSVYGKPVIAAAQNQQQHPENIYSNSQGKPGSPEPETEPVSSVQENHENERIPRPLSPTKLLPFLSNPYRNQSDADLEALRKKLSNAPRPLKKRSSITEPEGPNGPNIQKLLYQRTTIAAMETISVPSYPSKSASVTASSESPVEIQNPYLHVEPEKEVVSLVPESLSPEDVGNASTENSDMPAPSPGLDYEPEGVPDNSPNLQNNPEEPNPEAPHVLDVYLEEYPPYPPPPYPSGEPEGPGEDSVSMRPPEITGQVSLPPGKRTNLRKTGSERIAHGMRVKFNPLALLLDSSLEGEFDLVQRIIYEVDDPSLPNDEGITALHNAVCAGHTEIVKFLVQFGVNVNAADSDGWTPLHCAASCNNVQVCKFLVESGAAVFAMTYSDMQTAADKCEEMEEGYTQCSQFLYGVQEKMGIMNKGVIYALWDYEPQNDDELPMKEGDCMTIIHREDEDEIEWWWARLNDKEGYVPRNLLGLYPRIKPRQRSLA

SEQ ID NO: 770853 - protein, 773 aa, Homo sapiens
MPRMPSRPELLVKPALPDGSLVIQASEGPMKIQTLPNMRSGAASQTKGSKIHPVGPDWSPSNADLFPSQGSASVPQSTGNALDQVDDGEVPLREKEKKVRPFSMFDAVDQSNAPPSFGTLRKNQSSEDILRDAQVANKNVAKVPPPVPTKPKQINLPYFGQTNQPPSDIKPDGSSQQLSTVVPSMGTKPKPAGQQPRVLLSPSIPSVGQDQTLSPGSKQESPPAAAVRPFTPQPSKDTLLPPFRKPQTVAASSIYSMYTQQQAPGKNFQQAVQSALTKTHTRGPHFSSVYGKPVIAAAQNQQQHPENIYSNSQGKPGSPEPETEPVSSVQENHENERIPRPLSPTKLLPFLSNPYRNQSDADLEALRKKLSNAPRPLKKRSSITEPEGPNGPNIQKLLYQRTTIAAMETISVPSYPSKSASVTASSESPVEIQNPYLHVEPEKEVVSLVPESLSPEDVGNASTENSDMPAPSPGLDYEPEGVPDNSPNLQNNPEEPNPEAPHVLDVYLEEYPPYPPPPYPSGEPEGPGEDSVSMRPPEITGQVSLPPGKRTNLRKTGSERIAHGMRVKFNPLALLLDSSLEGEFDLVQRIIYEVDDPSLPNDEGITALHNAVCAGHTEIVKFLVQFGVNVNAADSDGWTPLHCAASCNNVQVCKFLVESGAAVFAMTYSDMQTAADKCEEMEEGYTQCSQFLYGVQEKMGIMNKGVIYALWDYEPQNDDELPMKEGDCMTIIHREDEDEIEWWWARLNDKEGYVPRNLLGLYPRIKPRQRSLA

SEQ ID NO: 770854 - protein, 1217 aa, Homo sapiens; identical to SEQ ID NO: 770850

SEQ ID NO: 770855 - protein, 617 aa, Homo sapiens
GAPTVTSVEETKPRQGARPGRGSPGLVGAPARAEGPSDPRAAAAAAAASQQVRAASLSAPLPRIRDPPGHLSSAGAAVWPPASMRFGSKMMPMFLTVYLSNNEQHFTEVPVTPETICRDVVDLCKEPGESDCHLAEVWCGSERPVADNERMFDVLQRFGSQRNEVRFFLRHERPPGRDIVSGPRSQDPSLKRNGVKVPGEYRRKENGVNSPRMDLTLAELQEMASRQQQQIEAQQQLLATKEQRLKFLKQQDQRQQQQVAEQEKLKRLKEIAENQEAKLKKVRALKGHVVSLVPESLSPEDVGNASTENSDMPAPSPGLDYEPEGVPDNSPNLQNNPEEPNPEAPHVLDVYLEEYPPYPPPPYPSGEPEGPGEDSVSMRPPEITGQVSLPPGKRTNLRKTGSERIAHGMRVKFNPLALLLDSSLEGEFDLVQRIIYEVDDPSLPNDEGITALHNAVCAGHTEIVKFLVQFGVNVNAADSDGWTPLHCAASCNNVQVCKFLVESGAAVFAMTYSDMQTAADKCEEMEEGYTQCSQFLYGVQEKMGIMNKGVIYALWDYEPQNDDELPMKEGDCMTIIHREDEDEIEWWWARLNDKEGYVPRNLLGLYPRIKPRQRSLA

SEQ ID NO: 770856 - protein, 1217 aa, Homo sapiens; identical to SEQ ID NO: 770850

SEQ ID NO: 770857 - protein, 498 aa, Homo sapiens
GAPTVTSVEETKPRQGARPGRGSPGLVGAPARAEGPSDPRAAAAAAAASQQVRAASLSAPLPRIRDPPGHLSSAGAAVWPPASMRFGSKMMPMFLTVYLSNNEQHFTEVPVTPETICRDVVDLCKEPGESDCHLAEVWCGSERPVADNERMFDVLQRFGSQRNEVRFFLRHERPPGRDIVSGPRSQDPSLKRNGVKVPGEYRRKENGVNSPRMDLTLAELQEMASRQQQQIEAQQQLLATKEQRLKFLKQQDQRQQQQVAEQEKLKRLKEIAENQEAKLKKVRALKGHVEQKRLSNGKLVEEIEQMNNLFQQKQRELVLAVSKVEELTRQLEMLKNGRIDSHHDNQSAVAELDRLYKELQLRNKLNQEQNAKLQQQRECLNKRNSEVAVMDKRVNELRDRLWKKKAALQQKENLPVSSDGNLPQQAASAPSRVAAVGPYIQSSTMPRMPSRPELLVKPALPDGSLVIQASEGPMKIQTLPNMRSGAASQTKGKKSCTA

SEQ ID NO: 770858 - protein, 160 aa, Homo sapiens
GNVSTAKLFVEGRDVRIRSIKKEVQVIEKQRAVVEFEVNEDDVDAHWYKDGIEINFQVQERHKYVVERRIHRMFISETRQSDAGEYTFVAGRNRSSVTLYVNAPEPPQVLQELQPVTVQSGKPARFCAMISGRPQPKISWYKEEQLLSTGFKCKFLHDGQ

SEQ ID NO: 770859 - protein, 128 aa, Homo sapiens
KIWHPFTIKTLSKVGIQGTYLNIIKAIYDKPTTSIIMNEEKLQAFPLRTGTRQGCPISPPLFSIVLEVLARAIRQEKEIKGIQISKEKVKLSLFAVDIIYLENPKDDSRKLLELIEEFGKVSGYNIKV

SEQ ID NO: 770860 - protein, 240 aa, Homo sapiens
MALRPHHGPAVGGLLLEHSKLRSVSVDLNVDPSLQIDIPDALSERDKVKFTVHTKTTLPTFQIQSFLLQGNMRTLCDYMTLLLKQQTMLGLFISTWFLKKAPIWWAPQKESSRENIVERSVKGSSDPREECAKMKQELEAEYLAVFKKTVSSHEVFLQRLSSHPVLSKDRNFHVFLEYDQDLMLGGQNTKEMFGGFFKSVVNSADEVLFTGVKEVDDFFEQEKNFLINYYNRIKDSCVES

SEQ ID NO: 770861 - protein, 123 aa, Homo sapiens
LSYKIPIKYLRVFHPYHFELVKPTESGKADEATAKTQLYATVVRKSSFIPRYIGCNHMALEIFLRGVNEPLANNPNPIVVIARVVPNYKEFKVSQANRDLASVGLPITPLSFPIPSMMNFDVP

SEQ ID NO: 770862 - protein, 67 aa, Homo sapiens
RLRAEKLSGAVAQSDFVPPPGAFLHSLPRSRTNKDLQIRVQTPRVVGSVGGSEESLEGTQRVSRPSQ

SEQ ID NO: 770863 - protein, 105 aa, Homo sapiens
MEVSMAPSGFVDGNTFIQEIKSRCNLRPEENKLSSLILDILPFEVSRDDLTGNVLLGKCVNGSGVQRQDLDGNRYGQQLKLCVHESSLLREFKIRQDEALEVSVS

SEQ ID NO: 770864 - protein, 86 aa, Homo sapiens
KGHKSLPSWSLPSNKERQRVRNKQTKICELTQSVGGCQVLWEKRGACQGESRQEGILERPRKMVTFDLHIHQPPAQSICQRQTEEG

SEQ ID NO: 770865 - protein, 116 aa, Homo sapiens
  misc_feature (55)..(55): Xaa can be any naturally occurring amino acid
  misc_feature (110)..(110): Xaa can be any naturally occurring amino acid
LCRSERKDSSFLESGIKTASKLALSMAPKGNSVLHLPLWVCPDCRRTVEKEERHXGLDQPVSQDFLLHSSLGGSQPEAGSGGRLALGAQTLPSDTACSCEACSERREISXEADREP

SEQ ID NO: 770866 - protein, 107 aa, Homo sapiens
WLLLLFVVVETGFCYIAVLLYCLGWSCLEPLGENDPPTLASQSVGKTSMSHCAQAGESFLMPHIPAHHSANEVQVGLTIALRINVSLAPCSFPCAVSGCIFFFYPTL

SEQ ID NO: 770867 - protein, 103 aa, Homo sapiens [sequence omitted]

SEQ ID NO: 770868 - protein, 52 aa, Homo sapiens
MRSMEQILELLVLEEFLTILSQDIHSRVQKLQRASCEEAVTLLKYMYDFKRE

SEQ ID NO: 770869 - protein, 207 aa, Homo sapiens
MSAAAAAAAVDSGGWCIVLGTGGAEETSAISFCTVIFVLETPERKTGPDAPPGAIPPSPPPQPKAPVAPAFESEPLGSRRLLGEETLAAAGAGATRLRAGRRRGARYGEPSNEARAGAQRRRVLAEHGRGAAAAVAAGAQGPLHHWQPWSPSIFLPQGRRLDSAHVLGEEGAGTRASPEGGGTCARAEGATLSYPLPPQPALPHPAA

SEQ ID NO: 770870 - protein, 213 aa, Homo sapiens
MPTFSGQLRSRLSPLLPPRRRPLQSPPGRSARRQRQANVAFPSPPPGPPPPPASPELSVAQTSPPGPARPSPRAPQTLSNPLGSRRLLGEETLAAAGAGATRLRAGRRRGARYGEPSNEARAGAQRRRVLAEHGRGAAAAVAAGAQGPLHHWQPWSPSIFLPQGRRLDSAHVLGEEGAGTRASPEGGGTCARAEGATLSYPLPPQPALPHPAA

SEQ ID NO: 770871 - protein, 384 aa, Homo sapiens
MTNSSSTSTSSTTGGSLLLLCEEEESWAGRRIPVSLLYSGLAIGGTLANGMVIYLVSSFRKLQTTSNAFIVNGCAADLSVCALWMPQEAVLGLLPTGSAEPPADWDGAGGSYRLLRGGLLGLGLTVSLLSHCLVALNRYLLITRAPATYQALYQRRHTAGMLALSWALALGLVLLLPPWAPRPGAAPPRIHYPALLAAAALLAQTALLLHCYLGIVRRVRVSVKRVSVLNFHLLHQLPGCAAAAAAFPGAQHAPGPGGAAHPAQAQPLPPALHPRRAQRRLSGLSVLLLCCVFLLATQPLVWVSLASGFSLPVPWGVHAASWLLCCALSALNPLLYTWRNEEFRRSVRSVLPGVGDAAAAAVAATAVPAVSQAQLGTRAAGQHW

SEQ ID NO: 770872 - protein, 69 aa, Homo sapiens
STLLYLTYLSDQQQNKVDGCGSSCCQSSCCKPCCCQSSCCVPVCCQSSCCKPCCCQSNCCVPVCCQCKI

SEQ ID NO: 770873 - protein, 179 aa, Homo sapiens
AAVAAPEAVAPAVGAVAPAVGVVALAVGAVAPAVGAVALAVGAAAPAVGDVAPDVMCLSAAASPCAPGCQPVPAPAVAPVGAPRGAVAPVGVPRGAVVLVAAPSPAVVSPVAAPQAVDHPAASPAAASPAAASPAAVSPCAASPAAASPVAASPTVVSLCAASVRSEALDPDLQVSPVW

SEQ ID NO: 770874 - protein, 162 aa, Homo sapiens
SCLPAWRSYSTPQDFKREIPPGLSHREESDFLRLFQSGPFGASLLEFAGGPLLTLFAWVSPAEAAKQQRLLPVLSSRSFDPVGHLSDASQSSPVSGVCRSKLEGCGARQEGKKSLSSWKLNCTDKGGKCQGVNNSVSVASSCPLPETEIQPICTFILRVAPL

SEQ ID NO: 770875 - protein, 162 aa, Homo sapiens; identical to SEQ ID NO: 770874

SEQ ID NO: 770876 - protein, 72 aa, Homo sapiens
CVLQPVGFFWLLWPTTPAAGLEACRTDTHSPEQPSTNDLQDWVDKYPSSLTLQHHEKSFSPVNGHSHLWVHD

SEQ ID NO: 770877 - protein, 411 aa, Homo sapiens
MDAALLHSLLEANCSLALAEELLLDGWGPPLDPEGPYSYCNTTLDQIGTCWPRSAAGALVERPCPEYFNGVKYNTTRNAYRECLENGTWASKINYSQCEPILDDKQRKYDLHYRIALVVNYLGHCVSVAALVAAFLLFLALRSIRCLRNVIHWNLITTFILRNVMWFLLQLVDHEVHESNEVWCRCITTIFNYFVVTNFFWMFVEGCYLHTAIVMTYSTERLRKCLFLFIGWCIPFPIIVAWAIGKLYYENEQCWFGKEPGDLVDYIYQGPIILVLLINFVFLFNIVRILMTKLRASTTSETIQYRKAVKATLVLLPLLGITYMLFFVNPGEDDLSQIMFIYFNSFLQSFQGFFVSVFYCFFNGEVRSAVRKRWHRWQDHHSLRVPMARAMSIPTSPTRISFHSIKQTAAV

SEQ ID NO: 770878 - protein, 411 aa, Homo sapiens; identical to SEQ ID NO: 770877

SEQ ID NO: 770879 - protein, 397 aa, Homo sapiens
MGREPWPEDRDLGFPQLFCQGPYSYCNTTLDQIGTCWPRSAAGALVERPCPEYFNGVKYNTTRNAYRECLENGTWASKINYSQCEPILDDKQRKYDLHYRIALVVNYLGHCVSVAALVAAFLLFLALRSIRCLRNVIHWNLITTFILRNVMWFLLQLVDHEVHESNEVWCRCITTIFNYFVVTNFFWMFVEGCYLHTAIVMTYSTERLRKCLFLFIGWCIPFPIIVAWAIGKLYYENEQCWFGKEPGDLVDYIYQGPIILVLLINFVFLFNIVRILMTKLRASTTSETIQYRKAVKATLVLLPLLGITYMLFFVNPGEDDLSQIMFIYFNSFLQSFQGFFVSVFYCFFNGEVRSAVRKRWHRWQDHHSLRVPMARAMSIPTSPTRISFHSIKQTAAV

SEQ ID NO: 770880 - protein, 211 aa, Homo sapiens
MGREPWPEDRDLGFPQLFCQGPYSYCNTTLDQIGTCWPRSAAGALVERPCPEYFNGVKYNTTRNAYRECLENGTWASKINYSQCEPILDDKQRKYDLHYRIALVVNYLGHCVSVAALVAAFLLFLALRSIRCLRNVIHWNLITTFILRNVMWFLLQLVDHEVHESNEVWCRCITTIFNYFVAAPPLESPQCRSRKDPGPRGRYCGVVEKVE

SEQ ID NO: 770881 - protein, 123 aa, Homo sapiens
MRGPSGPPGLLYVPHLLLCLLCLLPPPLQYAAGQSQMPKDQPLWALLEQYCHTIMTLTNLSGSGLPLIMKGLAGRPLPIPSSHDGSQLGWHSGVQEGDDPSAFQLQGNWQKVVNILWLPWLQV

SEQ ID NO: 770882 - protein, 438 aa, Homo sapiens
MRGPSGPPGLLYVPHLLLCLLCLLPPPLQYAAGQSQMPKDQPLWALLEQYCHTIMTLTNLSGPYSYCNTTLDQIGTCWPRSAAGALVERPCPEYFNGVKYNTTRNAYRECLENGTWASKINYSQCEPILDDKQRKYDLHYRIALVVNYLGHCVSVAALVAAFLLFLALRSIRCLRNVIHWNLITTFILRNVMWFLLQLVDHEVHESNEVWCRCITTIFNYFVVTNFFWMFVEGCYLHTAIVMTYSTERLRKCLFLFIGWCIPFPIIVAWAIGKLYYENEQCWFGKEPGDLVDYIYQGPIILVLLINFVFLFNIVRILMTKLRASTTSETIQYRKAVKATLVLLPLLGITYMLFFVNPGEDDLSQIMFIYFNSFLQSFQGFFVSVFYCFFNGEVRSAVRKRWHRWQDHHSLRVPMARAMSIPTSPTRISFHSIKQTAAV

SEQ ID NO: 770883 - protein, 521 aa, Homo sapiens
LPSRAGWGGAGQGVTTVLGSRLQSLTPSHYWHEGSLRAPRPPLRPTPPPLPALPPPTAAPIRSRAEPDAQRPAPVGTSGAVLPHHHDPHQPLSHAGRALPLPLRTRLRDAMDAALLHSLLEANCSLALAEELLLDGWGPPLDPEGPYSYCNTTLDQIGTCWPRSAAGALVERPCPEYFNGVKYNTTRNAYRECLENGTWASKINYSQCEPILDDKQRKYDLHYRIALVVNYLGHCVSVAALVAAFLLFLALRSIRCLRNVIHWNLITTFILRNVMWFLLQLVDHEVHESNEVWCRCITTIFNYFVVTNFFWMFVEGCYLHTAIVMTYSTERLRKCLFLFIGWCIPFPIIVAWAIGKLYYENEQCWFGKEPGDLVDYIYQGPIILVLLINFVFLFNIVRILMTKLRASTTSETIQYRKAVKATLVLLPLLGITYMLFFVNPGEDDLSQIMFIYFNSFLQSFQGFFVSVFYCFFNGEVRSAVRKRWHRWQDHHSLRVPMARAMSIPTSPTRISFHSIKQTAAV

SEQ ID NO: 770884 - protein, 397 aa, Homo sapiens; identical to SEQ ID NO: 770879

SEQ ID NO: 770885 - protein, 252 aa, Homo sapiens
LPSRAGWGGAGQGVTTVLGSRLQSLTPSHYWHEGSLRAPRPPLRPTPPPLPALPPPTAAPIRPYSYCNTTLDQIGTCWPRSAAGALVERPCPEYFNGVKYNTTRNAYRECLENGTWASKINYSQCEPILDDKQRKYDLHYRIALVVNYLGHCVSVAALVAAFLLFLALRSIRCLRNVIHWNLITTFILRNVMWFLLQLVDHEVHESNEVWCRCITTIFNYFVAAPPLESPQCRSRKDPGPRGRYCGVVEKVE

SEQ ID NO: 770886 - protein, 107 aa, Homo sapiens
LACFNFLRYYKIKYYSYCLIHSIQRYFIIQTVDPTGTGHGGESIFGLGLYGDQASFFETENVPRIKHKKKGTMSMVNNDSDQHGSQFLITTGENLDYLDGTIQYLVR

SEQ ID NO: 770887 - protein, 31 aa, Homo sapiens
MGSEAQFPVLPAAAVFLRDFLGPSVFQVVDS

SEQ ID NO: 770888 - protein, 91 aa, Homo sapiens
MLSEGQVSLRSEELKGWNVSWWASAGSGVTASLEASFPNSLWEPPGDSGMSLPGAWVTVQDPRHTWVETLLSPSLGVTSILEPQLPHLGGY

SEQ ID NO: 770889 - protein, 133 aa, Homo sapiens
TEAAAAMLEEGKEPPGPAHPADALDLEGAELGVARRSGRADGARVGLVSLGTGSKNNYLKQEAQSPPTLAGITLDRTEEEPPSGTLLSAMDGTLLSAMDGTLLSAMDVSSPGPRGAESVPLKKPSAGPLSAPR

SEQ ID NO: 770890 - protein, 102 aa, Homo sapiens
MHTHAHSLSWAHAYPHTHSCTFPGNGITFQIDSDSNGSLLNTFMQAAIQGDPQQNINDEELPSWGPVESTLQSSLGFCGHRVHLWMFVAHSPCLVCSGSPGT

SEQ ID NO: 770891 - protein, 102 aa, Homo sapiens
MPRARSLIHPIPFHISLTVLLYICWAECHLCAPALPACTSHTEKAVASSSWRETPSQLPRHEQVCFGTTWETRSRRGKLFLICHRPALPQATSPYPSHVARA

SEQ ID NO: 770892 - protein, 256 aa, Homo sapiens
MPRAEPRATLGEQEKAGLPLGAWRLYLLRHFRKQTELRRSGSRDVTGALLVAAAVASEAVGSLRVAEGGPNTLLLQVLRSWPWCNKELKTMEERKVKRRSPKSFSAHCTQVVNAKKNAIPVSKSTGFSNPASQSTSQRPKLKRVMKEKTKPQGGEGKGAQSTPIQHSFLTDVSDVQEMERGLLSLLNDFHSGGMQEKLARLNLELYGELEELPEDKRKTASDSNLDRLLSDLEELNSSIQKLHLADAQDVPNTSAS

SEQ ID NO: 770893 - protein, 274 aa, Homo sapiens
MPRAEPRATLGEQEKAGLPLGAWRLYLLRHFRKQTELRRSGSRDVTGALLVAAAVASEAVGSLRVAEGGPNTLLLQVLRSWPWCNKELKTMEERKVKRRSPKSFSAHCTQVVNAKKNAIPVSKSTGFSNPASQSTSQRPKLKRVMKEKTKPQGGEGKGAQSTPIQHSFLTDVSDVQEMERGLLSLLNDFHSGKLQAFGNECSIEQMEHVRGMQEKLARLNLELYGELEELPEDKRKTASDSNLDRLLSDLEELNSSIQKLHLADAQDVPNTSAS

SEQ ID NO: 770894 - protein, 274 aa, Homo sapiens; identical to SEQ ID NO: 770893

SEQ ID NO: 770895 - protein, 259 aa, Homo sapiens
MRIWWLLLAIEICTGNINSQDTCRQGHPGIPGNPGHNGLPGRDGRDGAKGDKGDAGEPGRPGSPGKDGTSGEKGERGADGKVEAKGIKGDQGSRGSPGKHGPKGLAGPMGEKGLRGETGPQGQKGNKGDVGPTGPEGPRGNIGPLGPTGLPGPMGPIGKPGPKGEAGPTGPQGEPGVRGIRGWKGDRGEKGKIGETLVLPKSAFTVGLTVLSKFPSSDMPIKFDKILYNEFNHYDTAAGKFTCHIAGVYYFTYHITVFS

SEQ ID NO: 770896 - protein, 121 aa, Homo sapiens
MSEQRDTAMAAAGQRIRSVRETRSPAPGTQFGSPSPPCRAGSPGAGSGEKRTAAPPHRASFHPLWYMALPRSPTSRHTFTVSPGSRSPETVPAAPNHCSAAPTSATDSPSLLGETLQCLGC

SEQ ID NO: 770897 - protein, 121 aa, Homo sapiens; identical to SEQ ID NO: 770896

SEQ ID NO: 770898 - protein, 342 aa, Homo sapiens
MNNAGHGPTRRLRGLGVLAGVALLAALWLLWLLGSAPRGTPAPQPTITILVWHWPFTDQPPELPSDTCTRYGIARCHLSANRSLLASADAVVFHHRELQTRRSHLPLAQRPRGQPWVWASMESPSHTHGLSHLRGIFNWVLSYRRDSDIFVPYGRLEPHWGPSPPLPAKSRVAAWVVSNFQERQLRARLYRQLAPHLRVDVFGRANGRPLCASCLVPTVAQYRFYLSFENSQHRDYITEKFWRNALVAGTVPVVLGPPRATYEAFVPADAFVHVDDFGSARELAAFLTGMNESRYQRFFAWRDRLRVRLFTDWRERFCAICDRYPHLPRSQVYEDLEGWFQA

SEQ ID NO: 770899 - protein, 48 aa, Homo sapiens
METGRREQVIEDVGTENGHSSPYPRLLAFLHSLNESILMKQLHLPRIL

SEQ ID NO: 770900 - protein, 54 aa, Homo sapiens
MPLHSSLGDTAKKKTTKLDLYLTVSIQISSRGKIYHKITQKFLYLWCGTVFSKL

SEQ ID NO: 770901 - protein, 76 aa, Homo sapiens
ACGPRTQRDMVGCGVRAGTPHTARCTYTGAACRERGTRRDAGCRSGAHGAGFHGAARARVYVVGGGPGATVTQGPE

SEQ ID NO: 770902 - protein, 122 aa, Homo sapiens
MWTGALPGGLEAEGRGGGCHGPQGAVGRWEPSCCTPGTVRENPGDLGESWARVGIFDGEGSESRDVLWWWGASGQVPEDPGELMNTGLAGCQGRAEGAVVASRQGALPGLEGGVGLLECCSH

SEQ ID NO: 770903 - protein, 165 aa, Homo sapiens
STSQLPAAISPSVRGGVGPSGSPCSNSALPGPDGSLDLPTCWSRPSGGSEAAKPSPAPLHFQAPKRPPASASMEEQAWVPVAQPRRGQFPQMAQKALGGNNRGLLAERRTGGNRGKAHATSTLGTMPPRPGLPRAGCELAVLAVSRWEGPHWVPVVLSPASTSHL

SEQ ID NO: 770904 - protein, 341 aa, Homo sapiens
MRKNHACFVETPNLAGEGMSDRPTARRWGKCGPLCTRENIMVAFKGVWTQAFWKAVTAEFLAMLIFVLLSLGSTINWGGTEKPLPVDMVLISLCFGLSIATMVQCFGHISGGHINPAVTVAMVCTRKISIAKSVFYIAAQCLGAIIGAGILYLVTPPSVVGGLGVTMVHGNLTAGHGLLVELIITFQLVFTIFASCDSKRTDVTGSIALAIGFSVAIGHLFAINYTGASMNPARSFGPAVIMGNWENHWIYWVGPIIGAVLAGALYEYVFCPDVEFKRRFKEAFSKAAQQTKGSYMEVEDNRSQVETDDLILKPGVVHVIDVDRGEEKKGKDQSGEVLSSV

SEQ ID NO: 770905 - protein, 323 aa, Homo sapiens
MSDRPTARRWGKCGPLCTRENIMVAFKGVWTQAFWKAVTAEFLAMLIFVLLSLGSTINWGGTEKPLPVDMVLISLCFGLSIATMVQCFGHISGGHINPAVTVAMVCTRKISIAKSVFYIAAQCLGAIIGAGILYLVTPPSVVGGLGVTMVHGNLTAGHGLLVELIITFQLVFTIFASCDSKRTDVTGSIALAIGFSVAIGHLFAINYTGASMNPARSFGPAVIMGNWENHWIYWVGPIIGAVLAGALYEYVFCPDVEFKRRFKEAFSKAAQQTKGSYMEVEDNRSQVETDDLILKPGVVHVIDVDRGEEKKGKDQSGEVLSSV

SEQ ID NO: 770906 - protein, 59 aa, Homo sapiens
VSGARDTHASSIHFSALCCRFTAVQLFKRYKPVMWPKLFCRLCSLQESDARRPEGCMAL

SEQ ID NO: 770907 - protein, 168 aa, Homo sapiens
MAEPWGNELASAAARGDLEQLTSLLQNNVNVNAQNGFGRTALQVMKLGNPEIARRLLLRGANPDLKDRTGFAVIHDAARAGFLDTLQTLLEFQADVNIEDNEGNLPLHLAAKEGHLRVVEFLVKHTASNVGHRNHKGDTACDLARLYGRNEVVSLMQANGAGGATNLQ

SEQ ID NO: 770908 - protein, 189 aa, Homo sapiens
MRSEKREKKPAPSLRGNRSSNCFSEKSSKGGSEGKKQKRGRHASACRGERSRDRRSRGGSATKETVTGSGAAKEEAVLPGSAPGHSWLAAALSAAKGHRPGTARGGKVAPGAEAAERSPRRRPDWLPRNCGDSPYSELGLRFPGLSPSPEAPTKPGKEGKDSGGSSSMSAYSRKPVIWPGSMGGMRLLA

SEQ ID NO: 770909 - protein, 168 aa, Homo sapiens; identical to SEQ ID NO: 770907

SEQ ID NO: 770910 - protein, 168 aa, Homo sapiens; identical to SEQ ID NO: 770907

SEQ ID NO: 770911 - protein, 168 aa, Homo sapiens; identical to SEQ ID NO: 770907

SEQ ID NO: 770912 - protein, 168 aa, Homo sapiens; identical to SEQ ID NO: 770907

SEQ ID NO: 770913 - protein, 168 aa, Homo sapiens; identical to SEQ ID NO: 770907

SEQ ID NO: 770914 - protein, 176 aa, Homo sapiens
EEVALVPRLSQQPSRLGVVAVQHLQLHDKGNLYVPLQKAPKRFLGFQGPEQPHGLQPPKAAAQHGRALQVQLAAGVGAVAEEPSLLVAQGRARSVSSGSEARPRMVMRTGLSRQPRPAGSRISVADISELERGILRSRPEARPRSWQVRRLSRGRPASPGAGSGRWLSSPRKRLGL

SEQ ID NO: 770915 - protein, 105 aa, Homo sapiens [sequence omitted]

SEQ ID NO: 770916 - protein, 107 aa, Homo sapiens
MANVLAFKWQHYISKENVIKHAFAASWKRVLCKHGRSSSESNSLPTPQATKGMKSKDGQRFLAHHLSKRDEAQSFRLLCPALNLANRTSAFCSPSRTPAIPGKDYRQ

SEQ ID NO: 770917 - protein, 66 aa, Homo sapiens
AEQLAAVQRGRRAVTGAPCRACCAQASAVRAEVGRFLEVDEVVGGGRFVGRVFRLQAQQLRPRSAV

SEQ ID NO: 770918 - protein, 74 aa, Homo sapiens
HVPRWYRSCDCKHIRGHRVHHVHGSEQYSDYSYRPTPPNIPVSRYGQPFQLSRIVLESYVRYQHSDSSSIVLES

SEQ ID NO: 770919 - protein, 144 aa, Homo sapiens
MPGAPSYHRVSSYAVPSAWNAVPRPVCQVSSFLVRSQLEDASLAILPHLSRVWVQELGCAVPSGSTHSVWCSHSQLHLLLAWRTETESALLDAVSASAWCLVHSRRSRKSRAGGAPPPSPKEKTEANVLLGEAEAPRPAPGSPS

SEQ ID NO: 770920 - protein, 109 aa, Homo sapiens
APEFLDRWPLFDTLDSNLLTFFQLASVHSILTTAMVGFYMIPICVSTWSPQPGALSCLFLAFDVPPFPVINLSFPTAQQYMTDTRIKHPVRASSSVSPLVSIPRGLPLW

SEQ ID NO: 770921 - protein, 53 aa, Homo sapiens
MERRSRLKEQRCGNSKAWRPSKAASPLEGCSHRRRGWGWRGQGPREGLGSKVI

SEQ ID NO: 770922 - protein, 89 aa, Homo sapiens
YSGKCFQGPPGFGWSPWRGGSGAEFRDPSISQVSPSIFPSGTVSEQVCPGEVVSTVSEQVCPGEVVSTVCEQVWLLQVEVGICGHLGAH

SEQ ID NO: 770923 - protein, 235 aa, Homo sapiens
NGPPAMGAAAPAESADLGNFWKAGEPLLQGPDALAAPMSRSPSTPQTTPSPQGRQSPWPLRSLTQSHIQYFQWGRPVPSTHLIEVRPTQDPAKPQRVVSEGWRRPALPGETALGRDLSCAWEGCMKGGLCRAWNPGRTWSPVTIGIAPPERQESPWRSPGQRARPAGRPAAQELLDPCTRETLLGALSQCPKGSARFDGPLWFEVSDSKGGRRNLQPRPSAFKPLSKNGAVASFV

SEQ ID NO: 770924 - protein, 485 aa, Homo sapiens
MDPTALVEAIVEEVACPICMTFLREPMSIDCGHSFCHSCLSGLWEIPGESQNWGYTCPLCRAPVQPRNLRPNWQLANVVEKVRLLRLHPGMGLKGDLCERHGEKLKMFCKEDVLIMCEACSQSPEHEAHSVVPMEDVAWEYKWELHEALEHLKKEQEEAWKLEVGERKRTATWKIQVETRKQSIVWEFEKYQRLLEKKQPPHRQLGAEVAAALASLQREAAETMQKLELNHSELIQQSQVLWRMIAELKERSQRPVRWMLQDIQEVLNRSKSWSLQQPEPISLELKTDCRVLGLREILKTYAADVRLDPDTAYSRLIVSEDRKRVHYGDTNQKLPDNPERFYRYNIVLGSQCISSGRHYWEVEVGDRSEWGLGVCKQNVDRKEVVYLSPHYGFWVIRLRKGNEYRAGTDEYPILSLPVPPRRVGIFVDYEAHDISFYNVTDCGSHIFTFPRYPFPGRLLPYFSPCYSIGTNNTAPLAICSLDGED

SEQ ID NO: 770925 - protein, 98 aa, Homo sapiens
PPRPCYSTMTGHNEDTESAEGQAAVHLSHHTQVKLQLMLAHLLEKSLCQQHFRISYSEDNSFSEEGTVTAGGHLCFRPCGTPGTLTLGEDVVSGHTNA

SEQ ID NO: 770926 - protein, 165 aa, Homo sapiens
GKLHTCPTLHLAGRPFATGVHSRPQTSQLPAPRAPDHTAPAPGTPDQPPAPGAPDQPLRLEPQTTQPPEPRAPDQPLHPEPQPTQPPALGAPDHTAPAPGAPDQPLCPEPQDRRRLPCSWHTVVLGKEPVGHTAVCQAGAGAGAPGSPRGGEMELPPWSWAPTST

SEQ ID NO: 770927 - protein, 391 aa, Homo sapiens
MSELRLCCDLLVQQVDKTKEVTTTGVSNSEEGIDVGTLLKSTCNTFLKTLEECMQIANAAFTSELLYHTPPGSPQLAMLKSSKMKHPIIPIHNSLERQTELSTCENGSLNMEINGEEEILMKNKNSLYLKSAEIDCSISSEENTDDNITVQGEIMKEDRMENLKNHDNNLSQSGSDSSCSPECLWEEGKEVIPTFFSTMNTSFSDIELLEDSGIPTEAFLASCCAVVPVLDKLGPTVFAPVKMDLVENIKKVNQKYITNKEEFTTLQKIVLHEVEADVAQVRNSATEALLWLKRGLKFLKGFLTEVKNGEKDIQTALNNAYGKTLRQHHGWVVRGVFALALRATPSYEDFVAALTVKEGDHRKEAFSIGMQRDLSLYLPAMKKQMAILDAL

SEQ ID NO: 770928 - protein, 391 aa, Homo sapiens; identical to SEQ ID NO: 770927

SEQ ID NO: 770929 - protein, 391 aa, Homo sapiens; identical to SEQ ID NO: 770927

SEQ ID NO: 770930 - protein, 85 aa, Homo sapiens
QVASRRAVSRDEFPSPCPAHHCPALWALRLTERDLPHPGTLWIEATQRQSLDDQGGPTRSERQWRFCQGRPQRPSSEKKNVLASR

SEQ ID NO: 770931 - protein, 344 aa, Homo sapiens
KKLKELNQRIGKTECRNKHEGIADKLLAKIAKLQRRIKTVLLFQRNCLKPNMLSSNGASKVANSEAMILDKNLESVNSPIEKSSVNYEPSNPSEKGSKKINLSSDQNKSVSESNNDDVMLISVESPNLTTPTTSNPTDTRKITSGNSSNSPNAEVMAVQKKLDSIIDLTKEGLSNCNTESPVSPLESHSKAASNSKETTPLAQNAVQVPESFEHLPPLPEPPAPLPELVDKTRDTLPPQKPELKVKRVFRPNGIALTWNITKINPKCAPVESYHLFLCHENSNNKLIWKKIGEIKALPLPMACTLSQFLASNRYYFTVQSKDIFGRYGPFCDIKSIPGFSENLT

SEQ ID NO: 770932 - protein, 26 aa, Homo sapiens
MSIPDEMLHQNSSGLASSENGPARFA

SEQ ID NO: 770933 - protein, 26 aa, Homo sapiens
MSIPDEMLHQNSSGLASSENGPARFA

SEQ ID NO: 770934 - protein, 26 aa, Homo sapiens
MSIPDEMLHQNSSGLASSENGPARFA

SEQ ID NO: 770935 - protein, 26 aa, Homo sapiens
MSIPDEMLHQNSSGLASSENGPARFA

SEQ ID NO: 770936 - protein, 26 aa, Homo sapiens
MSIPDEMLHQNSSGLASSENGPARFA

SEQ ID NO: 770937 - protein, 375 aa, Homo sapiens
LHNPHCPHIPAVPPRWPRSLPVPASLSHQPEAAPAACAPGSTMTDQAFVTLTTNDAYAKGALVLGSSLKQHRTTRRLVVLATPQVSDSMRKVLETVFDEVIMVDVLDSGDSAHLTLMKRPELGVTLTKLHCWSLTQYSKCVFMDADTLVLANIDDLFDREELSAAPDPGWPDCFNSGVFVYQPSVETYNQLLHLASEQGSFDGGDQGILNTFFSSWATTDIRKHLPFIYNLSSISIYSYLPAFKVFGASAKVVHFLGRVKPWNYTYDPKTKSVKSEAHDPNMTHPEFLILWWNIFTTNVLPLLQQFGLVKDTCSYVNVEDVSGAISHLSLGEIPAMAQPFVSSEERKERWEQGQADYMGADSFDNIKRKLDTYLQ

SEQ ID NO: 770938 - protein, 253 aa, Homo sapiens
GRRGTRSPAGHRPCRPRSWEDADGSESVRGHVTAAIRAHGADARFPAVPPRWPRSLPVPASLSHQPEAAPAACAPGSTMTGTAAQPAAASPGTPASCPAAASLLLRPQPRSVPGRTKPPQSCWLAAAGRVSACVSCRPAAPQSAGMGQPGRARALGRSSRSCFRLLVLPLALTAKGRRAEQLRRGRVGVGSRFPWGFQAGVRGAAASWGAAPASGGPEPQEAGAPRRGYCGLRPAPPPPAPAPAATLSLFLGL

SEQ ID NO: 770939 - protein, 287 aa, Homo sapiens [sequence omitted]

SEQ ID NO: 770940 - protein, 411 aa, Homo sapiens
GRRGTRSPAGHRPCRPRSWEDADGSESVRGHVTAAIRAHGADARFPAVPPRWPRSLPVPASLSHQPEAAPAACAPGSTMTDQAFVTLTTNDAYAKGALVLGSSLKQHRTTRRLVVLATPQVSDSMRKVLETVFDEVIMVDVLDSGDSAHLTLMKRPELGVTLTKLHCWSLTQYSKCVFMDADTLVLANIDDLFDREELSAAPDPGWPDCFNSGVFVYQPSVETYNQLLHLASEQGSFDGGDQGILNTFFSSWATTDIRKHLPFIYNLSSISIYSYLPAFKVFGASAKVVHFLGRVKPWNYTYDPKTKSVKSEAHDPNMTHPEFLILWWNIFTTNVLPLLQQFGLVKDTCSYVNVEDVSGAISHLSLGEIPAMAQPFVSSEERKERWEQGQADYMGADSFDNIKRKLDTYLQ

SEQ ID NO: 770941 - protein, 427 aa, Homo sapiens
GRRGTRSPAGHRPCRPRSWEDADGSESVRGHVTAAIRAHGADARFPAVPPRWPRSLPVPASLSHQPEAAPAACAPGSTMTDQAFVTLTTNDAYAKGALVLGSSLKQHRTTRRLVVLATPQVSDSMRKVLETVFDEVIMVDVLDSGDSAHLTLMKRPELGVTLTKLHCWSLTQYSKCVFMDADTLVLANIDDLFDREELSAAPDPGWPDCFNSGVFVYQPSVETYNQLLHLASEQGSFDEKQIGPVSDKCIHGYQGGDQGILNTFFSSWATTDIRKHLPFIYNLSSISIYSYLPAFKVFGASAKVVHFLGRVKPWNYTYDPKTKSVKSEAHDPNMTHPEFLILWWNIFTTNVLPLLQQFGLVKDTCSYVNVEDVSGAISHLSLGEIPAMAQPFVSSEERKERWEQGQADYMGADSFDNIKRKLDTYLQ

SEQ ID NO: 770942 - protein, 275 aa, Homo sapiens
GRRGTRSPAGHRPCRPRSWEDADGSESVRGHVTAAIRAHGADARFPAVPPRWPRSLPVPASLSHQPEAAPAACAPGSTMTDQAFVTLTTNDAYAKGALVLGSSLKQHRTTRRLVVLATPQVSDSMRKVLETVFDEVIMVDVLDSGDSAHLTLMKRPELGVTLTKLHCWSLTQYSKCVFMDADTLVLANIDDLFDREELSAAPDPGWPDCFNSGVFVYQPSVETYNQLLHLASEQGSFDGLVQVPKLCISWDESNHGIILMIPKQKVSKVRPMIPT

SEQ ID NO: 770943 - protein, 138 aa, Homo sapiens
FDGDSPRRFGASAKVVHFLGRVKPWNYTYDPKTKSVKSEAHDPNMTHPEFLILWWNIFTTNVLPLLQQFGLVKDTCSYVNVEDVSGAISHLSLGEIPAMAQPFVSSEERKERWEQGQADYMGADSFDNIKRKLDTYLQ

SEQ ID NO: 770944 - protein, 143 aa, Homo sapiens
  misc_feature (11)..(11): Xaa can be any naturally occurring amino acid
GLLATAESDEXYTFGASAKVVHFLGRVKPWNYTYDPKTKSVKSEAHDPNMTHPEFLILWWNIFTTNVLPLLQQFGLVKDTCSYVNVEDVSGAISHLSLGEIPAMAQPFVSSEERKERWEQGQADYMGADSFDNIKRKLDTYLQ

SEQ ID NO: 770945 - protein, 357 aa, Homo sapiens
GRRGTRSPAGHRPCRPRSWEDADGSESVRGHVTAAIRAHGADARFPAVPPRWPRSLPVPASLSHQPEAAPAACAPGSTMTDQAFVTLTTNDAYAKGALVLGSSLKQHRTTRRLVVLATPQVSDSMRKVLETVFDEVIMVDVLDSGDSAHLTLMKRPELGVTLTKLHCWSLTQYSKCVFMDADTLVLANIDDLFDREELSAAPDPGWPDCFNSGVFVYQPSVETYNQLLHLASEQGSFDGGDQGILNTFFSSWATTDIRKHLPFIYNLSSISIYSYLPAFKVKMSQEPYHICPLGRSQLWHSRLYPRKNGRNDGNRARLIIWEQIPLTTSRGNLTLTSSRNTAFFCEHIHFTSLVSDT

SEQ ID NO: 770946 - protein, 125 aa, Homo sapiens
HPSPASASQVAVITGLVQVPKLCISWDESNHGIILMIPKQWWNIFTTNVLPLLQQFGLVKDTCSYVNVEDVSGAISHLSLGEIPAMAQPFVSSEERKERWEQGQADYMGADSFDNIKRKLDTYLQ

SEQ ID NO: 770947 - protein, 145 aa, Homo sapiens
TPFSCLSLPSSCDYRFGASAKVVHFLGRVKPWNYTYDPKTKSVKSEAHDPNMTHPEFLILWWNIFTTNVLPLLQQFGLVKDTCSYVNVEDVSGAISHLSLGEIPAMAQPFVSSEERKERWEQGQADYMGADSFDNIKRKLDTYLQ

SEQ ID NO: 770948 - protein, 340 aa, Homo sapiens
GRRGTRSPAGHRPCRPRSWEDADGSESVRGHVTAAIRAHGADARFPAVPPRWPRSLPVPASLSHQPEAAPAACAPGSTMTDQAFVTLTTNDAYAKGALVLGSSLKQHRTTRRLVVLATPQVSDSMRKVLETVFDEVIMVDVLDSGDSAHLTLMKRPELGVTLTKLHCWSLTQYSKCVFMDADTLVLANIDDLFDREELSAAPDPGWPDCFNSGVFVYQPSVETYNQLLHLASEQGSFDGGDQGILNTFFSSWATTDIRKHLPFIYNLSSISIYSYLPAFKVFGASAKVVHFLGRVKPWNYTYDPKTVVEHLYHQRFTSASTIWPCQRHLLICKCGRFCFF

SEQ ID NO: 770949 - protein, 293 aa, Homo sapiens
GRRGTRSPAGHRPCRPRSWEDADGSESVRGHVTAAIRAHGADARFPAVPPRWPRSLPVPASLSHQPEAAPAACAPGSTMTDQAFVTLTTNDAYAKGALVLGSSLKQHRTTRRLVVLATPQVSDSMRKVLETVFDEVIMVDVLDSGDSAHLTLMKRPELGVTLTKLHCWSLTQYSKCVFMDADTLVLANIDDLFDREELSAAPDPGWPDCFNSGVFVYQPSVETYNQLLHLASEQGSFDGGDQGILNTFFSSWATTDIRKHLPFIYNLSSISIYSYLPAFKVAARVSECNSPFR

SEQ ID NO: 770950 - protein, 269 aa, Homo sapiens
GRRGTRSPAGHRPCRPRSWEDADGSESVRGHVTAAIRAHGADARFPAVPPRWPRSLPVPASLSHQPEAAPAACAPGSTMTDQAFVTLTTNDAYAKGALVLGSSLKQHRTTRRLVVLATPQVSDSMRKVLETVFDEVIMVDVLDSGDSAHLTLMKRPELGVTLTKLHCWSLTQYSKCVFMDADTLVLANIDDLFDREELSAAPDPGWPDCFNSGVFVYQPSVETYNQLLHLASEQGSFDGGDQGILNTFFSSWATTDISAFKVLVQCPSC

SEQ ID NO: 770951 - protein, 411 aa, Homo sapiens; identical to SEQ ID NO: 770940

SEQ ID NO: 770952 - protein, 411 aa, Homo sapiens; identical to SEQ ID NO: 770940

SEQ ID NO: 770953 - protein, 411 aa, Homo sapiens; identical to SEQ ID NO: 770940

SEQ ID NO: 770954 - protein, 411 aa, Homo sapiens; identical to SEQ ID NO: 770940

SEQ ID NO: 770955 - protein, 411 aa, Homo sapiens; identical to SEQ ID NO: 770940

SEQ ID NO: 770956 - protein, 143 aa, Homo sapiens
HAATTLLIFHRYRFGASAKVVHFLGRVKPWNYTYDPKTKSVKSEAHDPNMTHPEFLILWWNIFTTNVLPLLQQFGLVKDTCSYVNVEDVSGAISHLSLGEIPAMAQPFVSSEERKERWEQGQADYMGADSFDNIKRKLDTYLQ

SEQ ID NO: 770957 - protein, 142 aa, Homo sapiens
VAAVTLLYPPLRFGASAKVVHFLGRVKPWNYTYDPKTKSVKSEAHDPNMTHPEFLILWWNIFTTNVLPLLQQFGLVKDTCSYVNVEDVSGAISHLSLGEIPAMAQPFVSSEERKERWEQGQADYMGADSFDNIKRKLDTYLQ

SEQ ID NO: 770958 - protein, 428 aa, Homo sapiens
GRRGTRSPAGHRPCRPRSWEDADGSESVRGHVTAAIRAHGADARFPAVPPRWPRSLPVPASLSHQPEAAPAACAPGSTMTDQAFVTLTTNDAYAKGALVLGSSLKQHRTTRRLVVLATPQVSDSMRKVLETVFDEVIMVDVLDSGDSAHLTLMKRPELGVTLTKLHCWSLTQYSKCVFMDADTLVLANIDDLFDREELSAAPDPGWPDCFNSGVFVYQPSVETYNQLLHLASEQGSFDGGDQGILNTFFSSWATTDIRKHLPFIYNLSSISIYSYLPAFKVFGASAKVVHFLGRVKPWNYTYDPKTKSVKSEAHDPNMTHPEFLILWWNIFTTNVLPLLQQFGLVKDTCSYVNVLSDLVYTLAFSCGFCRKEDVSGAISHLSLGEIPAMAQPFVSSEERKERWEQGQADYMGADSFDNIKRKLDTYLQ

SEQ ID NO: 770959 - protein, 428 aa, Homo sapiens; identical to SEQ ID NO: 770958

SEQ ID NO: 770960 - protein, 241 aa, Homo sapiens
GRRGTRSPAGHRPCRPRSWEDADGSESVRGHVTAAIRAHGADARFPAVPPRWPRSLPVPASLSHQPEAAPAACAPGSTMTDQAFVTLTTNDAYAKGALVLGSSLKQHRTTRRLVVLATPQVSDSMRKVLETVFDEVIMVDVLDSGDSAHLTLMKRPELGVTLTKLHCWSLTQYSKCVFMDADTLVLANIDDLFDREELSAAPDPGWPDCFNSGVFVYQPSVETYNQLLHLASEQGSFDGNK

SEQ ID NO: 770961 - protein, 293 aa, Homo sapiens; identical to SEQ ID NO: 770949

SEQ ID NO: 770962 - protein, 121 aa, Homo sapiens
MRAELIAAPRQVFFKKAKGAPQKEGGANNKTNKQAAGAARVVKTTGAAAGGKKNVATVDELFMEEERDPNSSGAEAAIMVEEANYTYETEYIKRHGRKIYNKSFARVCNDGVKTRKRIINA

SEQ ID NO: 770963 - protein, 536 aa, Homo sapiens
MILLSFVSDSNVGTGEKKVTEAWISEDENSHRTTSDRLTVMELPSPESEEVHEPRLGELLGNPEGQSLGSSPSQDRGCKQVTVTHWKIQTGETAQVCTKSGRNHILNSDLLLLQRELIEGEANPCDICGKTFTFNSDLVRHRISHAGEKPYTCDQCGKGFGQSSHLMEHQRIHTGERLYVCNVCGKDFIHYSGLIEHQRVHSGEKPFKCAQCGKAFCHSSDLIRHQRVHTRERPFECKECGKGFSQSSLLIRHQRIHTGERPYECNECGKSFIRSSSLIRHYQIHTEVKQYECKECGKAFRHRSDLIEHQRIHTGERPFECNECGKAFIRSSKLIQHQRIHTGERPYVCNECGKRFSQTSNFTQHQRIHTGEKLYECNECGKAFFLSSYLIRHQKIHTGERVYECKECGKAFLQKAHLTEHQKIHSGDRPFECKDCGKAFIQSSKLLLHQIIHTGEKPYVCSYCGKGFIQRSNFLQHQKIHTEEKLYECSQYGRDFNSTTNVKNNQRVHQEGLSLSKAPIHLGERSVDKGEHTGNL

SEQ ID NO: 770964 - protein, 314 aa, Homo sapiens
DPFNISFLRERPFECKECGKGFSQSSLLIRHQRIHTGERPYECNECGKSFIRSSSLIRHYQIHTEVKQYECKECGKAFRHRSDLIEHQRIHTGERPFECNECGKAFIRSSKLIQHQRIHTGERPYVCNECGKRFSQTSNFTQHQRIHTGEKLYECNECGKAFFLSSYLIRHQKIHTGERVYECKECGKAFLQKAHLTEHQKIHSGDRPFECKDCGKAFIQSSKLLLHQIIHTGEKPYVCSYCGKGFIQRSNFLQHQKIHTEEKLYECSQYGRDFNSTTNVKNNQRVHQEGLSLSKAPIHLGERSVDKGEHTGNL

SEQ ID NO: 770965 - protein, 496 aa, Homo sapiens
MELPSPESEEVHEPRLGELLGNPEGQSLGSSPSQDRGCKQVTVTHWKIQTGETAQVCTKSGRNHILNSDLLLLQRELIEGEANPCDICGKTFTFNSDLVRHRISHAGEKPYTCDQCGKGFGQSSHLMEHQRIHTGERLYVCNVCGKDFIHYSGLIEHQRVHSGEKPFKCAQCGKAFCHSSDLIRHQRVHTRERPFECKECGKGFSQSSLLIRHQRIHTGERPYECNECGKSFIRSSSLIRHYQIHTEVKQYECKECGKAFRHRSDLIEHQRIHTGERPFECNECGKAFIRSSKLIQHQRIHTGERPYVCNECGKRFSQTSNFTQHQRIHTGEKLYECNECGKAFFLSSYLIRHQKIHTGERVYECKECGKAFLQKAHLTEHQKIHSGDRPFECKDCGKAFIQSSKLLLHQIIHTGEKPYVCSYCGKGFIQRSNFLQHQKIHTEEKLYECSQYGRDFNSTTNVKNNQRVHQEGLSLSKAPIHLGERSVDKGEHTGNL

SEQ ID NO: 770966 - protein, 496 aa, Homo sapiens; identical to SEQ ID NO: 770965

SEQ ID NO: 770967 - protein, 338 aa, Homo sapiens
QYVMIAEPAVKLQCGKAFCHSSDLIRHQRVHTRERPFECKECGKGFSQSSLLIRHQRIHTGERPYECNECGKSFIRSSSLIRHYQIHTEVKQYECKECGKAFRHRSDLIEHQRIHTGERPFECNECGKAFIRSSKLIQHQRIHTGERPYVCNECGKRFSQTSNFTQHQRIHTGEKLYECNECGKAFFLSSYLIRHQKIHTGERVYECKECGKAFLQKAHLTEHQKIHSGDRPFECKDCGKAFIQSSKLLLHQIIHTGEKPYVCSYCGKGFIQRSNFLQHQKIHTEEKLYECSQYGRDFNSTTNVKNNQRVHQEGLSLSKAPIHLGERSVDKGEHTGNL

SEQ ID NO: 770968 - protein, 94 aa, Homo sapiens
VCHIFASFNDTFVHVTDLSGKQTICRVTGGMKVKADRDESSPYAAMLTTQDVAQRCKELGIIALHIQLRATGGNRTKTLGPGPSRPSEPLPARV

SEQ ID NO: 770969 - protein, 800 aa, Homo sapiens
RSQAGSGGSDASAAMGSGGVVHCRCAKCFCYPTKRRIRRRPRNLTILSLPEDVLFHILKWLSVEDILAVRAVHSQLKDLVDNHASVWACASFQELWPSPGNLKLFERAAEKGNFEAAVKLGIAYLYNEGLSVSDEARAEVNGLKASRFFSLAERLNVGAAPFIWLFIRPPWSVSGSCCKAVVHESLRAECQLQRTHKASILHCLGRVLSLFEDEEKQQQAHDLFEEAAHQGCLTSSYLLWESDRRTDVSDPGRCLHSFRKLRDYAAKGCWEAQLSLAKACANANQLGLEVRASSEIVCQLFQASQAVSKQQVFSVQKGLNDTMRYILIDWLVEVATMKDFTSLCLHLTVECVDRYLRRRLVPRYRLQLLGIACMVICTRFISKEILTIREAVWLTDNTYKYEDLVRMMGEIVSALEGKIRVPTVVDYKEVLLTLVPVELRTQHLCSFLCELSLLHTSLSAYAPARLAAAALLLARLTHGQTQPWTTQLWDLTGFSYEDLIPCVLSLHKKCFHDDAPKDYRQVSLTAVKQRFEDKRYGEISQEEVLSYSQLCAALGVTQDSPDPPTFLSTGEIHAFLSSPSGRRTKRKRENSLQEDRGSFVTTPTAELSSQEETLLGSFLDWSLDCCSGYEGDQESEGEKEGDVTAPSGILDVTVVYLNPEQHCCQESSDEEACPEDKGPQDPQALALDTQIPATPGPKPLVRTSREPGKDVTTSGYSSVSTASPTSSVDGGLGALPQPTSVLSLDSDSHTQPCHHQARKSCLQCRPPSPPESSVPQQQVKRINLCIHSEEEDMNLGLVRL

SEQ ID NO: 770970 - protein, 300 aa, Homo sapiens [sequence omitted]

SEQ ID NO: 770971 - protein, 800 aa, Homo sapiens; identical to SEQ ID NO: 770969

SEQ ID NO: 770972 - protein, 106 aa, Homo sapiens
MSSSFPGASVSMSVQMTHKPSTPVLRQLLSSTAALAAAQSLLGGYSTGTLHSTHPILSQLLIPQTTSPLVSNLNNQYQYTSSYSVLKPPSSPKMSLRSTFLLHCPS

SEQ ID NO: 770973 - protein, 253 aa, Homo sapiens
MKHINLSFAACGFLGIYHLGAASALCRHGKKLVKDVKAFAGASAGSLVASVLLTAPEKIEECNQFTYKFAEEIRRQSFGAVTPGYDFMARLRSGMESILPPSAHELAQNRLHVSITNAKTRENHLVSTFSSREDLIKVLLASSFVPIYAGLKLVEYKGQKWVDGGLTNALPILPVGRTVTISPFSGRLDISPQDKGQLDLYVNIAKQDIMLSLANLVRLNQALFPPSKRKMESLYQCGFDDTVKFLLKENWFE

SEQ ID NO: 770974 - protein, 132 aa, Homo sapiens
MKHINLSFAACGFLGIYHLGAASALCRHGKKLVKDVKAFAGASAGSLVASVLLTAPEKIEECNQFTYKFAEEIRRQSFGAVTPGYDFMARLRSGMESILPPSAHELAQNRLHVSITNAKTRENHLVSTFSSS

SEQ ID NO: 770975 - protein, 253 aa, Homo sapiens; identical to SEQ ID NO: 770973

SEQ ID NO: 770976 - protein, 253 aa, Homo sapiens; identical to SEQ ID NO: 770973

SEQ ID NO: 770977 - protein, 132 aa, Homo sapiens; identical to SEQ ID NO: 770974

SEQ ID NO: 770978 - protein, 66 aa, Homo sapiens
DCFFFFRSGMESILPPSAHELAQNRLHVSITNAKTRENHLVSTFSSREDLIKVTKPCFLFEEISKC

SEQ ID NO: 770979 - protein, 57 aa, Homo sapiens
EECSMREETEPCGFPGLDSSPAIVVTSGCHKKISKTGSLKQQILISHSVGVFKVQDQ

SEQ ID NO: 770980 - protein, 258 aa, Homo sapiens
MIAISAVSSALLFSLLCEASTVVLLNSTDSSPPTNNFTDIEAALKAQLDSADIPKARRKRYISQNDMIAILDYHNQVRGKVFPPAANMEYMVWDENLAKSAEAWAATCIWDHGPSYLLRFLGQNLSVRTGRYRSILQLVKPWYDEVKDYAFPYPQDCNPRCPMRCFGPMCTHYTQMVWATSNRIGCAIHTCQNMNVWGSVWRRAVYLVCNYAPKGNWIGEAPYKVGVPCSSCPPSYGGSCTDNLCFPGVTSNYLYWFK

SEQ ID NO: 770981 - protein, 188 aa, Homo sapiens
MIAISAVSSALLFSLLCEASTVVLLNSTDSSPPTNNFTDIEAALKAQLDSADIPKARRKRYISQNDMIAILDYHNQVRGKVFPPAANMEYMVWDENLAKSAEAWAATCIWDHGPSYLLRFLGQNLSVRTGRYRSILQLVKPWYDEVKDYAFPYPQDCNPRCPMRCFGPMCTHYTQVISITLLIFDSYF

SEQ ID NO: 770982 - protein, 102 aa, Homo sapiens
MILGVYADGLILIITTILFNRYYHHSSFTEEKTDELGNFARVTHLASGGARRELRWSWLQSPQPQGSAAYKFNAQPSKEALLVRALGDELHGVFHILQPDPS

SEQ ID NO: 770983 - protein, 65 aa, Homo sapiens
DRARSLFWHPVLRTLKNRIEENTGHTFNSLLCNLYRNEKDSVDWHSDDEPSLGRCRGIGGADEER

SEQ ID NO: 770984 - protein, 286 aa, Homo sapiens
MEEKRRRARVQGAWAAPVKSQAIAQPATTAKSHLHQKPGQTWKNKEHHLSDREFVFKEPQQVVRRAPEPRVIDREGVYEISLSPTGVSRVCLYPGFVDVKEADWILEQLCQDVPWKQRTGIREDITYQQPRLTAWYGELPYTYSRITMEPNPHWHPVLRTLKNRIEENTGHTFNSLLCNLYRNEKDSVDWHSDDEPSLGRCPIIASLSFGATRTFEMRKKPPPEENGDYTYVERVKIPLDHGTLLIMEGATQADWQHRVPKEYHSREPRVNLTFRTVYPDPRGAPW

SEQ ID NO: 770985 - protein, 286 aa, Homo sapiens; identical to SEQ ID NO: 770984

SEQ ID NO: 770986 - protein, 145 aa, Homo sapiens
MFPGNRGPASERWHPVLRTLKNRIEENTGHTFNSLLCNLYRNEKDSVDWHSDDEPSLGRCPIIASLSFGATRTFEMRKKPPPEENGDYTYVERVKIPLDHGTLLIMEGATQADWQHRVPKEYHSREPRVNLTFRTVYPDPRGAPW

SEQ ID NO: 770987 - protein, 153 aa, Homo sapiens [sequence omitted]

SEQ ID NO: 770988 - protein, 145 aa, Homo sapiens; identical to SEQ ID NO: 770986

SEQ ID NO: 770989 - protein, 286 aa, Homo sapiens; identical to SEQ ID NO: 770984

SEQ ID NO: 770990 - protein, 258 aa, Homo sapiens
ASSELRLIGRGQTWKNKEHHLSDREFVFKEPQQVVRRAPEPRVIDREGVYEISLSPTGVSRVCLYPGFVDVKEADWILEQLCQDVPWKQRTGIREDITYQQPRLTAWYGELPYTYSRITMEPNPHWHPVLRTLKNRIEENTGHTFNSLLCNLYRNEKDSVDWHSDDEPSLGRCPIIASLSFGATRTFEMRKKPPPEENGDYTYVERVKIPLDHGTLLIMEGATQADWQHRVPKEYHSREPRVNLTFRTVYPDPRGAPW

SEQ ID NO: 770991 - protein, 153 aa, Homo sapiens [sequence omitted]

SEQ ID NO: 770992 - protein, 143 aa, Homo sapiens
PGVCPGWTEGFPPLSRQGPSLRCEDTWLTLNSQLQGNLPAVSPPRLSRSPWRSFFVSPMARTRGRHPSLALVVVLPFVGNVLSSLPPEDPSASRPSSDAPSSRKPSRVLSSGFLHKILKLPHRPLKKIHLFEVQSHIFVRRMN

SEQ ID NO: 770993 - protein, 71 aa, Homo sapiens
LTLYATVTLASFLFLEHTGYAPMHALAISSIWNTLSPRYHMTHYITFFSSLMKRHFGLGRWLTCNPNTLGG

SEQ ID NO: 770994 - protein, 52 aa, Homo sapiens
EKALAQRSDFPSVTEAGNGRAGRTKRSLTRPASISGPHWRLNPLQSEGTTST

SEQ ID NO: 770995 - protein, 589 aa, Homo sapiens
MCGPFLKDILHLAEHQGTQSEEKPYTCGACGRDFWLNANLHQHQKEHSGGKPFRWYKDRDALMKSSKVHLSENPFTCREGGKVILGSCDLLQLQAVDSGQKPYSNLGQLPEVCTTQKLFECSNCGKAFLKSSTLPNHLRTHSEEIPFTCPTGGNFLEEKSILGNKKFHTGEIPHVCKECGKAFSHSSKLRKHQKFHTEVKYYECIACGKTFNHKLTFVHHQRIHSGERPYECDECGKAFSNRSHLIRHEKVHTGERPFECLKCGRAFSQSSNFLRHQKVHTQVRPYECSQCGKSFSRSSALIQHWRVHTGERPYECSECGRAFNNNSNLAQHQKVHTGERPFECSECGRDFSQSSHLLRHQKVHTGERPFECCDCGKAFSNSSTLIQHQKVHTGQRPYECSECRKSFSRSSSLIQHWRIHTGEKPYECSECGKAFAHSSTLIEHWRVHTKERPYECNECGKFFSQNSILIKHQKVHTGEKPYKCSECGKFFSRKSSLICHWRVHTGERPYECSECGRAFSSNSHLVRHQRVHTQERPYECIQCGKAFSERSTLVRHQKVHTRERTYECSQCGKLFSHLCNLAQHKKIHT

SEQ ID NO: 770996 - protein, 169 aa, Homo sapiens
MEGGERGGARRGWRPPRRRGTPLSPGPGDPGDEPPARPRHRAHPPCGSQAPTARPSPPARRLPRTQGLGGWGGGRPEASQPWAPPPRPGCRVHPAFPAVAAPSRAPGAEACTHRPASATPRPWLRVWSRPPPSARRPWGGVSPRRPLPARAARRPDFPRPNTGGDRGAR

SEQ ID NO: 770997 - protein, 116 aa, Homo sapiens
MERGLHHPLGHMACVEGAAAPWELRVQNQGQRGWPWGQATLGSNPDCCCATEHVPELSGPQSHAGWMSGISGLPCATKAPRAGLVQDVRPPVPHTIFLMRARATKVLCRHQHLLTW

SEQ ID NO: 770998 - protein, 67 aa, Homo sapiens
AHTPGDLKSKIKVLTRSKSGEGPVLGVRDVQLVFMFSHGLSWVCAHREHSGNSSYKSLNPIMRAPIP

SEQ ID NO: 770999 - protein, 181 aa, Homo sapiens
MPNVLLPPKESNLFKRILKCYEQKQYKNGLKFCKMILSNPKFAEHGETLAMKGLTLNCLGKKEEAYEFVRKGLRNDVKSHVCWHVYGLLQRSDKKYDEAIKCYRNALKLDKDNLQILRDLSLLQIQMRDLEGYRETRYQLLQLRPTQRASWIGYAIAYHLLKDYDMALKLLEEFRQTQQVR

SEQ ID NO: 771000 - protein, 124 aa, Homo sapiens
HLRWTDQNADFRDHAAPLGAGRKCSREQDTFPPHSLSDPPGAELLIQVPLTPGRSDAVSARGTHRAREENSGPQAPQPHNLCSNPCPPGQSLGWLRVPDLASTAPLVVGNTRSVLESMVSMDSA

SEQ ID NO: 771001 - protein, 106 aa, Homo sapiens
MAVNLQKLTCPSMHTFQPVVMYIRLMLASVFPKEARLSLFYKRENKAKMLGFSYDLQGTMQSQEKKFAGFAGLSKISGGSVLGFNQFNIGSLTYTRCVTHACNPSI

SEQ ID NO: 771002 - protein, 128 aa, Homo sapiens [sequence omitted]

SEQ ID NO: 771003 - protein, 177 aa, Homo sapiens
MGGHPDEVPQQARGLPVMLETAAAGSRAKNNRRNTRRANHPSQQETLPVGSGPEYEGPRTPEGRAPAKNHAPASRETTKVRPQHDSTVRPHAPNGNKGRKTGEQPNRRYRRDDTQSKAAEATTHNRKQHRERTGQQGDEGTDTPHKRPRTGRKHGAHNRNRERTQPRTTDTAEPPAR

SEQ ID NO: 771004 - protein, 177 aa, Homo sapiens; identical to SEQ ID NO: 771003

SEQ ID NO: 771005 - protein, 128 aa, Homo sapiens [sequence omitted]

SEQ ID NO: 771006 - protein, 316 aa, Homo sapiens
MFQNLRILELTPGVTDPERVEQGVVLRCFSLGERPSSPCHQPLPVPRSPPAQPRTAQRPPSPSCHRLRAAKLAAPGALAPSGPQKHSHLLQGHPLGWGQEPVSSWQSQSSLRPWRKGLQHTLDRGRAGHLFQAGPGWNTCPLRLHSGHMPCQDPEPGFGGLGQGQQGLCPGGVSAGGGAGPAESPGGLCWALLSRTPSPPALTLRCHVCTSSSNCKHSVVCPASSRFCKTTNTVEPLRGNLVKKDCAESCTPSYTLQGQVSSGTSSTQCCQEDLCNEKLHNAAPTLRCHVCTSSSNCKHSVVCPASSRFCKTTNTV

SEQ ID NO: 771007 - protein, 132 aa, Homo sapiens
MRGLRKRRWVRVSPTEARIQVEGSPERWLENVEGAGGHPSILKAIPMAKINSVIWIPSRHLKSYHEPDAEEETPGGSRGRPSCSHVETDAEEDPNCHEQHLSNTATHLGTDQEAVTDGRRKPEESGTTSHNE

SEQ ID NO: 771008 - protein, 109 aa, Homo sapiens
MSQMLRKRLREDPEDGPVAAMLRLTLRRTPTVTSNTCRTQPPTWGQIKKLSQMAEENLRKAGQPVTMSNFMVAMIAVITTAVSIPSTRADTQNNYTYWAYLSTLAGNNA

SEQ ID NO: 771009 - protein, 204 aa, Homo sapiens
MHRRRLALGLGFCLLAGTSLSVLWVYLENWLPVSYVPYYLPCPEILPMMMALSASATSNMKLHYKREKPLQPVVWSQYPQPKLLEHRPTQLLTLTPWLAPIVSEGTFNPELLQHIYQPLNLTIGGHGCLPWGSTLISSSPSLESAEEFFMRGYRVHYYIFTDNLQTFRGPLGPTGSQSSPSGHSHGKRIHGRWKHSRMVEGHGR

SEQ ID NO: 771010 - protein, 115 aa, Homo sapiens
IFCDGVSLCHPGWSAMVPSWFAATSASQGPRPPPSLGAEDLQASQSQELCEGLLLNSLRDLDLSGVTDEGGSERPGPGCPRGRLTLSRGGASTLSSPHQLLLVPLPSPGELPRLA

SEQ ID NO: 771011 - protein, 423 aa, Homo sapiens
MAKLTESMTNVLEGDSMDQDVESPVAIHQPKLPKQARDDLPRHISRDRTKRKIQRYVRKDGKCNVHHGNVRETYRYLTDIFTTLVDLKWRFNLLIFVMVYTVTWLFFGMIWWLIAYIRGDMDHIEDPSWTPCVTNLNGFVSAFLFSIETETTIGYGYRVITDKCPEGIILLLIQSVLGSIVNAFMVGCMFVKISQPKKRAETLVFSTHAVISMRDGKLCLMFRVGDLRNSHIVEASIRAKLIKSKQTSEGEFIPLNQTDINVGYYTGDDRLFLVSPLIISHEINQQSPFWEISKAQLPKEELEIVVILEGMVEATGMTCQARSSYITSEILWGYRFTPVLTLEDGFYEVDYNSFHETYETSTPSLSAKELAELASRAELPLSWSVSSKLNQHAELETEEEEKNLEEQTERNGDVANLENESKV

SEQ ID NO: 771012 - protein, 423 aa, Homo sapiens; identical to SEQ ID NO: 771011

SEQ ID NO: 771013 - protein, 317 aa, Homo sapiens
MSSEQKSQHCKPEEGVEAQEEALGLVGAQAPTTEEQEAAVSSSSPLVPGTLEEVPAAESAGPPQSPQGASALPTTISFTCWRQPNEGSSSQEEEGPSTSPDAESLFREALSNKVDELAHFLLRKYRAKELVTKAEMLERVIKNYKRCFPVIFGKASESLKMIFGIDVKEVDPTSNTYTLVTCLGLSYDGLLGNNQIFPKTGLLIIVLGTIAMEGDSASEEEIWEELGVMGVYDGREHTVYGEPRKLLTQDWVQENYLEYRQVPGSNPARYEFLWGPRALAETSYVKVLEHVVRVNARVRIAYPSLREAALLEEEEGV

SEQ ID NO: 771014 - protein, 317 aa, Homo sapiens; identical to SEQ ID NO: 771013

SEQ ID NO: 771015 - protein, 407 aa, Homo sapiens
TQESPRCPDVMPLTCALGVREKRAALTSRLGLAEGSGPGPVRSQGSEQTGQPEDRIPWRPQRSTKEKICLWVPIAQLLPALLPAALSRVIMSSEQKSQHCKPEEGVEAQEEALGLVGAQAPTTEEQEAAVSSSSPLVPGTLEEVPAAESAGPPQSPQGASALPTTISFTCWRQPNEGSSSQEEEGPSTSPDAESLFREALSNKVDELAHFLLRKYRAKELVTKAEMLERVIKNYKRCFPVIFGKASESLKMIFGIDVKEVDPTSNTYTLVTCLGLSYDGLLGNNQIFPKTGLLIIVLGTIAMEGDSASEEEIWEELGVMGVYDGREHTVYGEPRKLLTQDWVQENYLEYRQVPGSNPARYEFLWGPRALAETSYVKVLEHVVRVNARVRIAYPSLREAALLEEEEGV

SEQ ID NO: 771016 - protein, 103 aa, Homo sapiens
GAARRRGNLTLGEYFTSIQSSESTASSHFQQERFPFRRRFNPAAGKADWEIHFGWAISFNEAGRREAAAGPACLPVFRNLNSHLVQFIRCGTVLLCVWCARGE

SEQ ID NO: 771017 - protein, 260 aa, Homo sapiens
MGNFSQHGGRTVPPQPLKSGSIISVHQGSRCRDIGEQKAFRHVSRVLTTGWSLEEVRISSYSALCLPHPWTHPAQPRTESINSAPPMEDSLVQPQSLRFPRCPIDSPRVPRAVGKPAPLSQGPCPDCSLAARGLIAGVLGVPLWCSLSHPQPPDGLGLYSFPLPTGLGPSPDSRSEVTFVPEGAVFTVSPGPLHMLLFFCLECSSYLPTLHVKPYLGLDITSSRKLSQTSPCQGGHTVPDLPLRYQISLNCNCIYFVFSS

SEQ ID NO: 771018 - protein, 236 aa, Homo sapiens
GPSTCLGLSLSLGRGAPGDPGHLATGRRGMGGRKPDGAGRRRGVLGGVKEGERGRAWGAELRATEPGRGVQARATAFAAAGNAGSRGTQRAGEEGGGLRGRRGEGTAESAGPVGSRRGAEQILKAGGGRTFRRGRVPPDTASARYSSAEVIVLQRRVQLVRWGPRGGGCGRGSRGRDRSGGRDFRVGSPGGGVRGGRRLLLLLQLPESAEGHGSGAGRPSETALAPLGGAGGGWGM

SEQ ID NO: 771019 - protein, 132 aa, Homo sapiens
TNRPSQGTDSYQSLAPKIIYPFPFCLPSFHKSFEEAVPVFALMGLLHLFINLWPISILCSKYIYIFKLNLQLVSNFTSVYFFIIRFFHFLIFCVTTWEAEAENCLNLGGGGFSERRSSTCTLAWVTETDSVS

SEQ ID NO: 771020 - protein, 746 aa, Homo sapiens
MSNSHPLRPFTAVGEIDHVHILSEHIGALLIGEEYGDVTFVVEKKRFPAHRVILAARCQYFRALLYGGMRESQPEAEIPLQDTTAEAFTMLLKYIYTGRATLTDEKEEVLLDFLSLAHKYGFPELEDSTSEYLCTILNIQNVCMTFDVASLYSLPKLTCMCCMFMDRNAQEVLSSEGFLSLSKTALLNIVLRDSFAAPEKDIFLALLNWCKHNSKENHAEIMQAVRLPLMSLTELLNVVRPSGLLSPDAILDAIKVRSESRDMDLNYRGMLIPEENIATMKYGAQVVKGELKSALLDGDTQNYDLDHGFSRHPIDDDCRSGIEIKLGQPSIINHIRILLWDRDSRSYSYFIEVSMDELDWVRVIDHSQYLCRSWQKLYFPARVCRYIRIVGTHNTVNKIFHIVAFECMFTNKTFTLEKGLIVPMENVATIADCASVIEGVSRSRNALLNGDTKNYDWDSGYTCHQLGSGAIVVQLAQPYMIGSIRLLLWDCDDRSYSYYVEVSTNQQQWTMVADRTKVSCKSWQSVTFERQPASFIRIVGTHNTANEVFHCVHFECPEQQSSQKEENSEESGTGDTSLAGQQLDSLRCGRLVAAHYPPAQAPTHAPPTGSTNKGGSGPGVTWWARATAGNGLLPEQGSLLTAPTSAPFQGGADLAAKADTEQVFSQGQKGAALFFSIYPNQAGLKGEKMGLQSSSSPPLTPYLSNLAQAQGTGGSHRQACVGIQKWHANTQAEEKAIGPLLPGGTL

SEQ ID NO: 771021 - protein, 447 aa, Homo sapiens
MSNSHPLRPFTAVGEIDHVHILSEHIGALLIGEEYGDVTFVVEKKRFPAHRVILAARCQYFRALLYGGMRESQPEAEIPLQDTTAEAFTMLLKYIYTGRATLTDEKEEVLLDFLSLAHKYGFPELEDSTSEYLCTILNIQNVCMTFDVASLYSLPKLTCMCCMFMDRNAQEVLSSEGFLSLSKTALLNIVLRDSFAAPEKDIFLALLNWCKHNSKENHAEIMQAVRLPLMSLTELLNVVRPSGLLSPDAILDAIKVRSESRDMDLNYRGMLIPEENIATMKYGAQVVKGELKSALLDGDTQNYDLDHGFSRHPIDDDCRSGIEIKLGQPSIINHIRILLWDRDSRSYSYFIEVSMDELDWVRVIDHSQYLCRSWQKLYFPARVCRYIRIVGTHNTVNKIFHIVAFECMFTNKTFTLEKGLIGYYFGIVTLKVDTVEHLGEKRKRPHE

SEQ ID NO: 771022 - protein, 168 aa, Homo sapiens [sequence omitted]

SEQ ID NO: 771023 - protein, 746 aa, Homo sapiens; identical to SEQ ID NO: 771020

SEQ ID NO: 771024 - protein, 108 aa, Homo sapiens
LDQAIWHWLIECELHWGCCEPAWVSVTLQMQPCPGTGQWVWAGVSPVCHPGPGPLSVSAMTMVSLVGLRLCLGFLRVLCRSVDSFSCCLGNCGNEHWQVLKRACGRAI

SEQ ID NO: 771025 - protein, 70 aa, Homo sapiens
QHFWQLRSPVLQLTKLPSGARTRNAVIKRCRLEKFEQPGPRFPICEGALRLGRTWAIFVLPLAHEPLHQS

SEQ ID NO: 771026 - protein, 406 aa, Homo sapiens
MVHCAGCKRPILDRFLLNVLDRAWHVKCVQCCECKCNLTEKCFSREGKLYCKNDFFRCFGTKCAGCAQGISPSDLVRRARSKVFHLNCFTCMMCNKQLSTGEELYIIDENKFVCKEDYLSNSSVAKENSLHSATTGSDPSLSPDSQDPSQDDAKDSESANVSDKEAGSNENDDQNLGAKRRGPRTTIKAKQLETLKAAFAATPKPTRHIREQLAQETGLNMRVIQVWFQNRRSKERRMKQLSALGARRHAFFRSPRRMRPLVDRLEPGELIPNGPFSFYGDYQSEYYGPGGNYDFFPQGPPSSQAQTPVDLPFVPSSGPSGTPLGGLEHPLPGHHPSSEAQRFTDILAHPPGDSPSPEPSLPGPLHSMSAEVFGPSPPFSSLSVNGGASYGNHLSHPPEMNEAAVW

SEQ ID NO: 771027 - protein, 319 aa, Homo sapiens
MVHCAGCKRPILDRFLLNVLDRAWHVKCVQCCECKCNLTEKCFSREGKLYCKNDFFRCFGTKCAGCAQGISPSDLVRRARSKVFHLNCFTCMMCNKQLSTGEELYIIDENKFVCKEDYLSNSSVAKENSLHSATTGSDPSLSPDSQDPSQDDAKDSESARRHAFFRSPRRMRPLVDRLEPGELIPNGPFSFYGDYQSEYYGPGGNYDFFPQGPPSSQAQTPVDLPFVPSSGPSGTPLGGLEHPLPGHHPSSEAQRFTDILAHPPGDSPSPEPSLPGPLHSMSAEVFGPSPPFSSLSVNGGASYGNHLSHPPEMNEAAVW

SEQ ID NO: 771028 - protein, 169 aa, Homo sapiens [sequence omitted]

SEQ ID NO: 771029 - protein, 398 aa, Homo sapiens
MVHCAGCKRPILDRFLLNVLDRAWHVKCVQCCECKCNLTEKCFSREGKLYCKNDFFRCFGTKCAGCAQGISPSDLVRRARSKVFHLNCFTCMMCNKQLSTGEELYIIDENKFVCKEDYLSNSSVAKENSLHSATTGSDPSLSPDSQDPSQDDAKDSESANVSDKEAGSNENDDQNLGAKRRGPRTTIKAKQLETLKAAFAATPKPTRHIREQLAQETGLNMRVIQVWFQNRRSKERRMKQLSALGARRHAFFRSPRRMRPLVDRLEPGELIPNGPFSFYGASRTILLLGRPDGKGGHEIGSKSASRWDWDPRTGCRRAELGLPKGNADLSPTPTWTRIRRQTPRACAPGRRAAKRRPGQPRVRTAVGNARSRGEGGREHSRVKEVKRPRALPGQPGGF

SEQ ID NO: 771030 - protein, 129 aa, Homo sapiens
PDAVLRPRAVSAAQEFTVCSICSSTEGPWNGDGTPDAWTSGFLVAKPALISLLEQGEEPGALILQVAEQSVAKASLCTEDPNTLPSRSQEGSPASSEGGPGEKGVAGRVAGGGAASSWPHGEHPVTPNR

SEQ ID NO: 771031 - protein, 134 aa, Homo sapiens
GSWRSIVSECVRMFSVDSVKICPQRGQAHPLGWGPRWNTKGEDKQILFSGGRHPSPALGHQDSRFFGLWTQACHRGLPGLSASQPQNESYTTGFLGSTTFLPGLSLTYSFSRSPACRQPMGGLLSLHKCVGQFA

SEQ ID NO: 771032 - protein, 182 aa, Homo sapiens
PDAVLRPRAVSAAQEFTVCSICSSTEGPWNGDGTPDAWTSGFLVAKPALISLLEQGEEPGALILQVAEQSVAKASLCTDSRMEAGIMESPLQRKLSRQAGLPGTVWGCLPWGHPVGGHPAPSHPHGGPEDGSDKPTHPGSSCRTIGHSQALAPGSVWRSIPGAVKPTNRVQGALAGCHVSCL

SEQ ID NO: 771033 - protein, 141 aa, Homo sapiens
MEAGIMESPLQRKLSRQAGLPGTVWGCLPWGHPVGGHPAPSHPHGGPEDGSDKPTHPRAREHSASPRVLQERPGPAHLGETTASSVYTVQGAAHGWCSIPSTPCCIQAFPIIPITRSASNLPVTPDCGKALLAHARFLHRK

SEQ ID NO: 771034 - protein, 167 aa, Homo sapiens
GFLMTGTTGRGFTLEAHPSRRGPSRRNSEAPCPEGEAKSKERASSHQELGFLLQPGTGEGKGTRQPVVWPQEPLSATISWGLPEMSRSGQKGEREGQLCSVPKEQGTGGATDAYAAELPTGRPGSSCRTIGHSQALAPGSVWRSIPGAVKPTNRVQGALAGCHVSCL

SEQ ID NO: 771035 - protein, 295 aa, Homo sapiens
NPQALGPCGIQAAMAPSFTARIQLFLWRALGFLIGLVGRAALVLGGPKFASKTPRPVTEPLLLLSGMQLAKLIRQRKVKCIDVVQAYINRIKDVNPMINGIVKYRFEEAMKEAHAVDQKLAEKQEDEATLENKWPFLGVPLTVKEAFQLQGMPNSSGLMNRRDAIAKTDATVVALLKGAGAIPLGITNCSELCMWYESSNKIYGRSNNPYDLQHIVGGSSGGEGCTLAAACSVIGVGSDIGGSIRMPAFFNGIFGHKPSPGVGPKQKVRYPLAVGAQELVPVHWSYVPYCGRPGT

SEQ ID NO: 771036 - protein, 356 aa, Homo sapiens
RQGAAGPGGGGDPGPTGRVLLPFRAVSHHYGYGLLDAGLLVDTARTWLPTQPQRKCAVRVQSRPTPILPLIYIRENVSACAGLHNSIRSLEHVQAQLTLSYSRRGDLEISLTSPMGTRSTLVAIRPLDVSTEGYNNWVFMSTHFWDENPQGVWTLGLENKGYYFNTGTLYRYTLLLYGTAEDMTARPTGPQVTSSACVQRDTEGLCQACDGPAYILGQLCLAYCPPRFFNHTRLVTAGPGHTAAPALRVCSSCHASCYTCRGGSPRDCTSCPPSSTLDQQQGSCMGPTTPDSRPRLRAAACPHHRCPASAMVLSLLAVTLGGPVLCGMSMDLPLYAWLSRARATPTKPQVWLPAGT

SEQ ID NO: 771037 - protein, 55 aa, Homo sapiens
MALGRNERRAQEDEDLGIRGDGREEEKEEENRVDEENGSREAERDRDVKKRREES

SEQ ID NO: 771038 - protein, 68 aa, Homo sapiens
VDNKSTAQNVEGIIVSAMFKSLITRCASTTHELHSPENLVRSSPLFPQELSVSALRKVLIVVAMSKRS

SEQ ID NO: 771039 - protein, 279 aa, Homo sapiens
YVVWKQKLELKSCEMKVTTKINHHDKINGKRKTARKQKMFQRAQELRRRAEDYHKCKIPPSARKALCNWVRMAAAEHRHSSGLPYWPYLTAETLKNRMGHQPPPPTQQHSITDNSLSLKTPPECLLTPLPPSADDNLKTPPECLLTPLPPSADDNLKTPPECLLTPLPPSADDNLKTPPECLLTPLPPSAPPSAPPSADDNLKTRAECLLHPLPPSADDNLKTPSEHQLTPLPPSAPPSADDNIKTPAERLRGPLPPSADDNLKTPSERQLTPLPPSAP

SEQ ID NO: 771040 - protein, 106 aa, Homo sapiens
SFSCGPQAGCTPKSCWNSRPLPAPVVLQQQGALTLRPQTCIQEIWSGQAAASDGLEAGHWPQAAGPAKMEAGGWQQPCLWMPHMGDPKTVFKNLGLYKAGRGSSCL

SEQ ID NO: 771041 - protein, 287 aa, Homo sapiens
MSALGQITITVSRCWNTERNQTDKNPCLHGAYLQLRETVKNKSTHLKKPLMKQAPPWKDHLTFQPLHPAERKTQVWRWQSGNSSDLETTSSASPWPTGSNRDVVLNTLAESCCGLSELITAPPYAGVSIQGFSQIWVLFPFCGGTFHHNEKDVLGLQDFERLPMAEHEPISTHFPASEPIKTLDSARLRQKSGLTAVGRSYPLPVSLTLQDYLPAGTSYPPWVSSPLRAGHLPGRPVCGKELPTLCLLRAPLLLSEAPLHLARPPVVQAFHSSWTQDKNLGPAKWWG

SEQ ID NO: 771042 - protein, 123 aa, Homo sapiens
LACPIGAAGGGVRPPDPRTPVRAPPWCSRLWRARPVPGSRVRKGPPRSPAVDWREDPRLGQPSSPRPGAGIPMGKSARRGWGSWCLRPRPVSFTSVRQERWLRAGPTQLEPPSLLRDQSTGKT

SEQ ID NO: 771043 - protein, 31 aa, Homo sapiens
MALRLVADFDLGKDVLPWLRAQRAVSEASGA

SEQ ID NO: 771044 - protein, 114 aa, Homo sapiens
MAAEAPQRPKSDWAGRAQAPSLGEGGAKNGKSHPGSHRAFSLPRAPRRLGPGSQPGRFRGFLKQARGRAGEGHSAILLAPESPNAQVSNVTSATYRSNLSSFPRPCSVLLPGGP

SEQ ID NO: 771045 - protein, 101 aa, Homo sapiens
IAGGGGEGWGSGSAYIVEYWCQRVPKHQAGVRRATIPRPGSPIWYDSLISLSVNVLSFLLTSAPRDGEGNYLPWCQNFYFLLLLGFRHRESKTEQRYQKKT

SEQ ID NO: 771046 - protein, 161 aa, Homo sapiens
MVKRKETKEWCPDWEFGRETKNLSPKENIYEIRSPQQEKARVIREIRCQVERQQGHQEGHFRPAVIPFTSMQCTAHREYQWLHTGEKSCECRKCKNAFRYQSCPIQHEIIHNKEKEPECGECRKIFNSGSDLIKHQTLHESKKHSENNKCTFNHDSGITQP

SEQ ID NO: 771047 - protein, 109 aa, Homo sapiens [sequence omitted]

SEQ ID NO: 771048 - protein, 97 aa, Homo sapiens
MTSQSSVISNSCVTMERLSHMMERKAWCSQESALSEEEEDTTRPLETVTFKDVAVDLTQEEWEQMKPAQRNLYRDVMLENYSNLVTVGCQVTKPDVI

SEQ ID NO: 771049 - protein, 225 aa, Homo sapiens
MAEGLKFKDVVIYFSQKEWECLHSAQKDLYRDVMLENYGNLVLLGLSDTKPNVISLLEQKKEPWMVKRKETKEWCPDWEFGRETKNLSPKENIYEIRSPQQEKARVIREIRCQVERQQGHQEGHFRPAVIPFTSMQCTAHREYQWLHTGEKSCECRKCKNAFRYQSCPIQHEIIHNKEKEPECGECRKIFNSGSDLIKHQTLHESKKHSENNKCTFNHDSGITQP

SEQ ID NO: 771050 - protein, 208 aa, Homo sapiens
MAEGLKFKDVVIYFSQKEWECLHSAQKGLSDTKPNVISLLEQKKEPWMVKRKETKEWCPDWEFGRETKNLSPKENIYEIRSPQQEKARVIREIRCQVERQQGHQEGHFRPAVIPFTSMQCTAHREYQWLHTGEKSCECRKCKNAFRYQSCPIQHEIIHNKEKEPECGECRKIFNSGSDLIKHQTLHESKKHSENNKCTFNHDSGITQP

SEQ ID NO: 771051 - protein, 78 aa, Homo sapiens
MGHLLSKEPRNRPSQKRPRCCSWCRRRRPLLRLPRRTPAKVPPQPAAPRSRDCFFRGPCMLCFIVHSPGAPAPAGPEE

SEQ ID NO: 771052 - protein, 139 aa, Homo sapiens
RRGQGGSEMAFFNLYLLGYQNSFQNKKRNTTEETNQKEPEPTRLPPIISKDGNYSVHQNSHTRYHEAVRKVLLKTFPNQVFRIPLTDAQNFSFWWSHDPGVRPEETMPWIRSPRHCLIKSAMTRFMDHSILNDRTFSLY

SEQ ID NO: 771053 - protein, 159 aa, Homo sapiens
MFPFALLYVLSVSFRKIFILQLVGLVLTYDFTNCDFEKIKAAYLSTISKDLITYMSGTKSTEFNNTVSCSNRPHCLTEIQSLTFNPTAGCASLAKEMFAMKTKAALAIWCPGYSETQINATQAMKKRRKRKVTTNKCLEQVSQLQGLWRRFNRPLLKQQ

SEQ ID NO: 771054 - protein, 1131 aa, Homo sapiens
MFQIPVENLDNIRKVRKKVKGILVDIGLDSCKELLKDLKGFDPGEKYFHNTSWGDVSLWEPSGKKVRYRTKPYCCGLCKYSTKVLTSFKNHLHRYHEDEIDQELVIPCPNCVFASQPKVVGRHFRMFHAPVRKVQNYTVNILGETKSSRSDVISFTCLKCNFSNTLYYSMKKHVLVAHFHYLINSYFGLRTEEMGEQPKTNDTVSIEKIPPPDKYYCKKCNANASSQDALMYHILTSDIHRDLENKLRSVISEHIKRTGLLKQTHIAPKPAAHLAAPANGSAPSAPAQPPCFHLALPQNSPSPAAGQPVTVAQGAPGSLTHSPPAAGQSHMTLVSSPLPVGQNSLTLQPPAPQPVFLSHGVPLHQSVNPPVLPLSQPVGPVNKSVGTSVLPINQTVRPGVLPLTQPVGPINRPVGPGVLPVSPSVTPGVLQAVSPGVLSVSRAVPSGVLPAGQMTPAGQMTPAGVIPGQTATSGVLPTGQMVQSGVLPVGQTAPSRVLPPGQTAPLRVISAGQVVPSGLLSPNQTVSSSAVVPVNQGVNSGVLQLSQPVVSGVLPVGQPVRPGVLQLNQTVGTNILPVNQPVRPGASQNTTFLTSGSILRQLIPTGKQVNGIPTYTLAPVSVTLPVPPGGLATVAPPQMPIQLLPSGAAAPMAGSMPGMPSPPVLVNAAQSVFVQASSSAADTNQVLKQAKQWKTCPVCNELFPSNVYQVHMEVAHKHSESKSGEKLEPEKLAACAPFLKWMREKTVRCLSCKCLVSEEELIHHLLMHGLGCLFCPCTFHDIKGLSEHSRNRHLGKKKLPMDYSNRGFQLDVDANGNLLFPHLDFITILPKEKLGEREVYLAILAGIHSKSLVPVYVKVRPQAEGTPGSTGKRVSTCPFCFGPFVTTEAYELHLKERHHIMPTVHTVLKSPAFKCIHCCGVYTGNMTLAAIAVHLVRCRSAPKDSSSDLQAQPGFIHNSELLLVSGEVMHDSSFSVKRKLPDGHLGAEDQRHGEEQPPILNADAAPGPEKVTSVVPFKRQRNESRTEGPIVKDEALQILALDPKKYEGRSYEEKKQFLKDYFHKKPYPSKKEIELLSSLFWVWKIDVASFFGKRRYICMKAIKNHKPSVLLGFDMSELKNVKHRLNFEYEP

SEQ ID NO: 771055 - protein, 1131 aa, Homo sapiens; identical to SEQ ID NO: 771054

SEQ ID NO: 771056 - protein, 367 aa, Homo sapiens
DAWVDPRVRVRGRAAAPCREAARGRGQRRFLPPTWRCETGAATMFPSPALTPTPFSVKDILNLEQQQRSLAAAGELSARLEATLAPSSCMLAAFKPEAYAGPEAAAPGLPELRAELGRAPSPAKCASAFPAAPAFYPRAYSDPDPAKDPRAEKKELCALQKAVELEKTEADNAERPRARRRRKPRVLFSQAQVYELERRFKQQRYLSAPERDQLASVLKLTSTQVKIWFQNRRYKCKRQRQDQTLELVGLPPPPPPPARRIAVPVLVRDGKPCLGDSAPYAPAYGVGLNPYGYNAYPAYPGYGGAACSPGYSCTAAYPAGPSPAQPATAAANNNFVNFGVGDLNAVQSPGIPQSNSGVSTLHGIRAW

SEQ ID NO: 771057 - protein, 382 aa, Homo sapiens
LVPPLLPLVLSATCCPDTSRAGRRVRGRAAAPCREAARGRGQRRFLPPTWRCETGAATMFPSPALTPTPFSVKDILNLEQQQRSLAAAGELSARLEATLAPSSCMLAAFKPEAYAGPEAAAPGLPELRAELGRAPSPAKCASAFPAAPAFYPRAYSDPDPAKDPRAEKKELCALQKAVELEKTEADNAERPRARRRRKPRVLFSQAQVYELERRFKQQRYLSAPERDQLASVLKLTSTQVKIWFQNRRYKCKRQRQDQTLELVGLPPPPPPPARRIAVPVLVRDGKPCLGDSAPYAPAYGVGLNPYGYNAYPAYPGYGGAACSPGYSCTAAYPAGPSPAQPATAAANNNFVNFGVGDLNAVQSPGIPQSNSGVSTLHGIRAW

SEQ ID NO: 771058 - protein, 88 aa, Homo sapiens
GSYPSADRQAQAAATQKQTSHDLGSLPPANPALHPGTALNRLLLENTLQGQARWLTPVIPALWEAKVGRSRGLEFKTSLAKMVKPRLY

SEQ ID NO: 771059 - protein, 55 aa, Homo sapiens
GLTITPESTTEVELSPVVQETPTQPPKKVVAQLPVYQEVTVPTPGQDQAQHPMSP

SEQ ID NO: 771060 - protein, 95 aa, Homo sapiens
MVILGCAPLQRPLHQTLWAPDQLACCPYNFFKQLSLPTQVSLLAEGFPPAEIPEACAQSRLLSASSPNLCPQHIGGQEQVPVCGSPMQRSQIPSP

SEQ ID NO: 771061 - protein, 731 aa, Homo sapiens
SLSCTPVHPPVFRRALFVCAQPRCALCSSQLPGPAAMADIKTGIFAKNVQKRLNRAQEKVLQKLGKADETKDEQFEEYVQNFKRQEAEGTRLQRELRGYLAAIKGMQEASMKLTESLHEVYEPDWYGREDVKMVGEKCDVLWEDFHQKLVDGSLLTLDTYLGQFPDIKNRIAKRSRKLVDYDSARHHLEALQSSKRKDESRISKAEEEFQKAQKVFEEFNVDLQEELPSLWSRRVGFYVNTFKNVSSLEAKFHKEIAVLCHKLYEVMTKLGDQHADKAFTIQGAPSDSGPLRIAKTPSPPEEPSPLPSPTASPNHTLAPASPAPARPRSPSQTRKGPPVPPLPKVTPTKELQQENIISFFEDNFVPEISVTTPSQNEVPEVKKEETLLDLDFDPFKPEVTPAGSAGVTHSPMSQTLPWDLWTTSTDLVQPASGGSFNGFTQPQDTSLFTMQTDQSMICNLAESEQAPPTEPKAEEPLAAVTPAVGLDLGMDTRAEEPVEEAVIIPGADADAAVGTLVSAAEGAPGEEAEAEKATVPAGEGVSLEEAKIGTETTEGAESAQPEAEELEATVPQEKVIPSVVIEPASNHEEEGENEITIGAEPKETTEDAAPPGPTSETPELATEQKPIQDPQPTPSAPAMGAADQLASAREASQELPPGFLYKVETLHDFEAANSDELTLQRGDVVLVVPSDSEADQDAGWLVGVKESDWLQYRDLATYKGLFPENFTRRLD

SEQ ID NO: 771062 - protein, 125 aa, Homo sapiens
NGLLFSLQIFTAMPPFTLGVFQRSCTRESMLRFPQLYKITQNAKDFNTRVNKVDLRIVTSKRPCLPLFSSGHLPMRYLKLEREHLKITETVTPIPAHTASQVGYRDFFLGDEFTPHGVCSPVPVC

SEQ ID NO: 771063 - protein, 89 aa, Homo sapiens
WVWLSRCVGLRGGGRVDAAELRPEVGDRRWGTTESDVWRVRLRVGGRAGTAATREPGASWVRVTHEPAPSRGPGVCEEPWRRPPASRFF

SEQ ID NO: 771064 - protein, 30 aa, Homo sapiens
MLTGMVLISRLHDPSGSASQSAGIIGMSHC

SEQ ID NO: 771065 - protein, 1173 aa, Homo sapiens
MGDMANSSIEFHPKPQQQRDVPQAGGFGCTLAELRTLMELRGAEALQKIEEAYGDVSGLCRRLKTSPTEGLADNTNDLEKRRQIYGQNFIPPKQPKTFLQLVWEALQDVTLIILEVAAIVSLGLSFYAPPGEESEACGNVSGGAEDEGEAEAGWIEGAAILLSVICVVLVTAFNDWSKEKQFRGLQSRIEQEQKFTVIRNGQLLQVPVAALVVGDIAQVKYGDLLPADGVLIQANDLKIDESSLTGESDHVRKSADKDPMLLSGTHVMEGSGRMVVTAVGVNSQTGIIFTLLGAGGEEEEKKDKKGKQQDGAMESSQTKAKKQDGAVAMEMQPLKSAEGGEMEEREKKKANAPKKEKSVLQGKLTKLAVQIGKAGLVMSAITVIILVLYFVIETFVVEGRTWLAECTPVYVQYFVKFFIIGVTVLVVAVPEGLPLAVTISLAYSVKKMMKDNNLVRHLDACETMGNATAICSDKTGTLTTNRMTVVQSYLGDTHYKEIPAPSALTPKILDLLVHAISINSAYTTKILPPEKEGALPRQVGNKTECALLGFVLDLKRDFQPVREQIPEDKLYKVYTFNSVRKSMSTVIRMPDGGFRLFSKGASEILLKKCTNILNSNGELRGFRPRDRDDMVRKIIEPMACDGLRTICIAYRDFYAGQEPDWDNENEVVGDLTCIAVVGIEDPVRPEVPEAIRKCQRAGITVRMVTGDNINTARAIAAKCGIIQPGEDFLCLEGKEFNRRIRNEKGEIEQERLDKVWPKLRVLARSSPTDKHTLVKGIIDSTTGEQRQVVAVTGDGTNDGPALKKADVGFAMGIAGTDVAKEASDIILTDDNFTSIVKAVMWGRNVYDSISKFLQFQLTVNVVAVIVAFTGACITQDSPLKAVQMLWVNLIMDTFASLALATEPPTESLLLRKPYGRDKPLISRTMMKNILGHAVYQLAIIFTLLFVGELFFDIDSGRNAPLHSPPSEHYTIIFNTFVMMQLFNEINARKIHGERNVFDGIFSNPIFCTIVLGTFGIQIVIVQFGGKPFSCSPLSTEQWLWCLFVGVGELVWGQVIATIPTSQLKCLKEAGHGPGKDEMTDEELAEGEEEIDHAERELRRGQILWFRGLNRIQTQMEVVSTFKRSGSVQGAVRRRSSVLSQLHDVTNLSTPTHAILSAANPTSAAGNPGGESVP

SEQ ID NO: 771066 - protein, 1220 aa, Homo sapiens
MGDMANSSIEFHPKPQQQRDVPQAGGFGCTLAELRTLMELRGAEALQKIEEAYGDVSGLCRRLKTSPTEGLADNTNDLEKRRQIYGQNFIPPKQPKTFLQLVWEALQDVTLIILEVAAIVSLGLSFYAPPGEESEACGNVSGGAEDEGEAEAGWIEGAAILLSVICVVLVTAFNDWSKEKQFRGLQSRIEQEQKFTVIRNGQLLQVPVAALVVGDIAQVKYGDLLPADGVLIQANDLKIDESSLTGESDHVRKSADKDPMLLSGTHVMEGSGRMVVTAVGVNSQTGIIFTLLGAGGEEEEKKDKKGKQQDGAMESSQTKAKKQDGAVAMEMQPLKSAEGGEMEEREKKKANAPKKEKSVLQGKLTKLAVQIGKAGLVMSAITVIILVLYFVIETFVVEGRTWLAECTPVYVQYFVKFFIIGVTVLVVAVPEGLPLAVTISLAYSVKKMMKDNNLVRHLDACETMGNATAICSDKTGTLTTNRMTVVQSYLGDTHYKEIPAPSALTPKILDLLVHAISINSAYTTKILPPEKEGALPRQVGNKTECALLGFVLDLKRDFQPVREQIPEDKLYKVYTFNSVRKSMSTVIRMPDGGFRLFSKGASEILLKKCTNILNSNGELRGFRPRDRDDMVRKIIEPMACDGLRTICIAYRDFYAGQEPDWDNENEVVGDLTCIAVVGIEDPVRPEVPEAIRKCQRAGITVRMVTGDNINTARAIAAKCGIIQPGEDFLCLEGKEFNRRIRNEKGEIEQERLDKVWPKLRVLARSSPTDKHTLVKGIIDSTTGEQRQVVAVTGDGTNDGPALKKADVGFAMGIAGTDVAKEASDIILTDDNFTSIVKAVMWGRNVYDSISKFLQFQLTVNVVAVIVAFTGACITQDSPLKAVQMLWVNLIMDTFASLALATEPPTESLLLRKPYGRDKPLISRTMMKNILGHAVYQLAIIFTLLFVGELFFDIDSGRNAPLHSPPSEHYTIIFNTFVMMQLFNEINARKIHGERNVFDGIFSNPIFCTIVLGTFGIQIVIVQFGGKPFSCSPLSTEQWLWCLFVGVGELVWGQVIATIPTSQLKCLKEAGHGPGKDEMTDEELAEGEEEIDHAERELRRGQILWFRGLNRIQTQIRVVKAFRSSLYEGLEKPESKTSIHNFMATPEFLINDYTHNIPLIDDTDVDENEERLRAPPPPSPNQNNNAIDSGIYLTTHVTKSATSSVFSSSPGSPLHSVETSL

SEQ ID NO: 771067 - protein, 128 aa, Homo sapiens
MSPSQLPLQCFPPVPGARSTAWRRPSNKNLPQHMRTRTLGLTRSHTHTCTHTHIWGPAHLQNEGTTKVAEDLSGRAFARTQIHSTRVQPATGSSSGLRKTRTGRRKRRKRRTKRGRRRFFVQRRKEKK

SEQ ID NO: 771068 - protein, 1249 aa, Homo sapiens
MGDMANSSIEFHPKPQQQRDVPQAGGFGCTLAELRTLMELRGAEALQKIEEAYGDVSGLCRRLKTSPTEGLADNTNDLEKRRQIYGQNFIPPKQPKTFLQLVWEALQDVTLIILEVAAIVSLGLSFYAPPGEESEACGNVSGGAEDEGEAEAGWIEGAAILLSVICVVLVTAFNDWSKEKQFRGLQSRIEQEQKFTVIRNGQLLQVPVAALVVGDIAQVKYGDLLPADGVLIQANDLKIDESSLTGESDHVRKSADKDPMLLSGTHVMEGSGRMVVTAVGVNSQTGIIFTLLGAGGEEEEKKDKKGKQQDGAMESSQTKAKKQDGAVAMEMQPLKSAEGGEMEEREKKKANAPKKEKSVLQGKLTKLAVQIGKAGLVMSAITVIILVLYFVIETFVVEGRTWLAECTPVYVQYFVKFFIIGVTVLVVAVPEGLPLAVTISLAYSVKKMMKDNNLVRHLDACETMGNATAICSDKTGTLTTNRMTVVQSYLGDTHYKEIPAPSALTPKILDLLVHAISINSAYTTKILPPEKEGALPRQVGNKTECALLGFVLDLKRDFQPVREQIPEDKLYKVYTFNSVRKSMSTVIRMPDGGFRLFSKGASEILLKKCTNILNSNGELRGFRPRDRDDMVRKIIEPMACDGLRTICIAYRDFYAGQEPDWDNENEVVGDLTCIAVVGIEDPVRPEVPEAIRKCQRAGITVRMVTGDNINTARAIAAKCGIIQPGEDFLCLEGKEFNRRIRNEKGEIEQERLDKVWPKLRVLARSSPTDKHTLVKGIIDSTTGEQRQVVAVTGDGTNDGPALKKADVGFAMGIAGTDVAKEASDIILTDDNFTSIVKAVMWGRNVYDSISKFLQFQLTVNVVAVIVAFTGACITQDSPLKAVQMLWVNLIMDTFASLALATEPPTESLLLRKPYGRDKPLISRTMMKNILGHAVYQLAIIFTLLFVGELFFDIDSGRNAPLHSPPSEHYTIIFNTFVMMQLFNEINARKIHGERNVFDGIFSNPIFCTIVLGTFGIQIVIVQFGGKPFSCSPLSTEQWLWCLFVGVGELVWGQVIATIPTSQLKCLKEAGHGPGKDEMTDEELAEGEEEIDHAERELRRGQILWFRGLNRIQTQMEVVSTFKRSGSVQGAVRRRSSVLSQLHDIRVVKAFRSSLYEGLEKPESKTSIHNFMATPEFLINDYTHNIPLIDDTDVDENEERLRAPPPPSPNQNNNAIDSGIYLTTHVTKSATSSVFSSSPGSPLHSVETSL

SEQ ID NO: 771069 - protein, 86 aa, Homo sapiens
RTLMELRGAEALQKIEEAYGDVSGLCRRLKTSPTEGKSLSGCMPPSPAPSLQRSDLKASLAPRLARVKGHLCPSSQPFPLRGRCPG

SEQ ID NO: 771070 - protein, 1168 aa, Homo sapiens
MGDMANSSIEFHPKPQQQRDVPQAGGFGCTLAELRTLMELRGAEALQKIEEAYGDVSGLCRRLKTSPTEGLADNTNDLEKRRQIYGQNFIPPKQPKTFLQLVWEALQDVTLIILEVAAIVSLGLSFYAPPGEESEACGNVSGGAEDEGEAEAGWIEGAAILLSVICVVLVTAFNDWSKEKQFRGLQSRIEQEQKFTVIRNGQLLQVPVAALVVGDIAQVKYGDLLPADGVLIQANDLKIDESSLTGESDHVRKSADKDPMLLSGTHVMEGSGRMVVTAVGVNSQTGIIFTLLGAGGEEEEKKDKKGKQQDGAMESSQTKAKKQDGAVAMEMQPLKSAEGGEMEEREKKKANAPKKEKSVLQGKLTKLAVQIGKAGLVMSAITVIILVLYFVIETFVVEGRTWLAECTPVYVQYFVKFFIIGVTVLVVAVPEGLPLAVTISLAYSVKKMMKDNNLVRHLDACETMGNATAICSDKTGTLTTNRMTVVQSYLGDTHYKEIPAPSALTPKILDLLVHAISINSAYTTKILPPEKEGALPRQVGNKTECALLGFVLDLKRDFQPVREQIPEDKLYKVYTFNSVRKSMSTVIRMPDGGFRLFSKGASEILLKKCTNILNSNGELRGFRPRDRDDMVRKIIEPMACDGLRTICIAYRDFYAGQEPDWDNENEVVGDLTCIAVVGIEDPVRPEVPEAIRKCQRAGITVRMVTGDNINTARAIAAKCGIIQPGEDFLCLEGKEFNRRIRNEKGEIEQERLDKVWPKLRVLARSSPTDKHTLVKGIIDSTTGEQRQVVAVTGDGTNDGPALKKADVGFAMGIAGTDVAKEASDIILTDDNFTSIVKAVMWGRNVYDSISKFLQFQLTVNVVAVIVAFTGACITQDSPLKAVQMLWVNLIMDTFASLALATEPPTESLLLRKPYGRDKPLISRTMMKNILGHAVYQLAIIFTLLFVGELFFDIDSGRNAPLHSPPSEHYTIIFNTFVMMQLFNEINARKIHGERNVFDGIFSNPIFCTIVLGTFGIQIVIVQFGGKPFSCSPLSTEQWLWCLFVGVGELVWGQVIATIPTSQLKCLKEAGHGPGKDEMTDEELAEGEEEIDHAERELRRGQILWFRGLNRIQTQMEVVSTFKRSGSVQGAVRRRSSVLSQLHDVTNLSTPTHAILSAANPTSAAGSES

SEQ ID NO: 771071 - protein, 285 aa, Homo sapiens
PGSVLPRALVLKAFSSSSLDASSDSSPVASPSSPKRNFFSRHQSFTTKTEKGKPSREIKKHSMSFTFAPHKKVLTKNLSAGSGKSQDFTRDHVPRGVRKESQLAGRIVQENGCETHNQTARGFCLRPHALSVDDVFQGADWERPGSPPSYEEAMQGPAARLVASESQTVGSMTVGSMRARMLEAHCLLPPLPPAHHVEDSRHRGSKEPLPGHGLSPLPERWKQSRTVHASGDSLGHVSGPGRPELLPLRTVSESVQRNKRDCLVRRCSQPVFEADQFQYAKESYI

SEQ ID NO: 771072 - protein, 175 aa, Homo sapiens
YFSSQVKTLVEFLIDNCFEIFGENIPVHSSITSDDSLEHTDSSGMCRPCRMTQPTTATTLMWNPTAAVASALPAGSPRCPWPQLLAWIARAHRMPERSAQSPLLSPLPERWKQSRTVHASGDSLGHVSGPGRPELLPLRTVSESVQRNKRDCLVRRCSQPVFEADQFQYAKESYI

SEQ ID NO: 771073 - protein, 116 aa, Homo sapiens
YFSSQVKTLVEFLIDNCFEIFGENIPVHSSITSDDSLEHTDSSVLSPLPERWKQSRTVHASGDSLGHVSGPGRPELLPLRTVSESVQRNKRDCLVRRCSQPVFEADQFQYAKESYI

SEQ ID NO: 771074 - protein, 122 aa, Homo sapiens
MPHRQIGVSKVRAMPSPQTEAAEGRVLRLMAVGVVPRPSCPREARPGLGGGIRWFHMVQFCALATRWQPKLRDGAAVSRLAVLVPVRPGTLDQGTDGGPLPCGCPRDQPKKDAALILLHSPV

SEQ ID NO: 771075 - protein, 98 aa, Homo sapiens
RRPSYGYGKDRPVAEAGQSTGIPGCFMKGPYIQSDLQIQKELEKLKNEGDKSSLSAKGDLLGNFTDRSMVLDSSKTGSPCHVLRTGEQPGGEIYLVGN

SEQ ID NO: 771076 - protein, 101 aa, Homo sapiens
QTSLGGQAVGRSAGLAKQNICVSVYVLFICRLGQGLRGRSPQLMPSCEQQYLTFYQPLAAEEQDHNPGGSANIPSMVENVSSSSHMEFTDDGFPTSRRGTS

SEQ ID NO: 771077 - protein, 58 aa, Homo sapiens
FLGIMNDFLIDIFEHITTKAGCQVATLSAPLSPPERSRPPEPDAVWGYPQTRCIENQR

SEQ ID NO: 771078 - protein, 88 aa, Homo sapiens
MSILIRLLPVILLLVEGVQVLGILKKELKKTHKQSKEGMKGFIENESTLHSVGTGEHRGSKAALQNFGEFKYPLEDSIGYFGYALCKG

SEQ ID NO: 771079 - protein, 261 aa, Homo sapiens
MSKSGFGSYGSISAADGASGGSDQLCERDATPAIKTQRPKVRIQDVVPCNVNQLLSSTVFDPVFKVRGIIVSQVSIVGVIRGAEKASNHICYKIDDMTAKPIEARQWFGREKVKQVTPLSVGVYVKVFGILKCPTGTKSLEVLKIHVLEDMNEFTVHILETVNAHMMLDKARRDTTVESVPVSPSEVNDAGDNDESHRNFIQDEVLRLIHECPHQEGKSIHELRAQLCDLSVKAIKEAIDYLTVEGHIYPTVDREHFKSAD

SEQ ID NO: 771080 - protein, 104 aa, Homo sapiens
GKRLSMKFLTESRGQSPRLSESYSEPQEEVPYASSQGNSKQSAGRNSVTQMKMMVSHHSSMQFSKGQDRDIWLFQWCQASSRRNRGCGKGNRWQMKETRNCHYP

SEQ ID NO: 771081 - protein, 453 aa, Homo sapiens
QVNPREPSQCSGNTEYKVALLTLKRKFCLSSSALPSPAQPTQPHLFPVDHIPPCSPEPPRKGLRGPHGLPLPVAPQPPWARGSAPEAEVPTMGNHTWEGCHVDSRVDHLFPPSLYIFVIGVGLPTNCLALWAAYRQVQQRNELGVYLLNLSIADLLYICSLPLWVDYFLHHDNWIHGPGSCKLFGFIFYTNIYISIAFLCCISVDRYLAVAHPLRFARLRRVKTAVAVSSVVWATELGANSAPLFHDELFRDRYNHTFCFEKFPMEGWVAWMNLYRVFVGFLFPWALMLLSYRGILRAVRGSVSTERQEKAKIKRLALSLIAIVLVCFAPYHVLLLSRSAIYLGRPWDCGFEERVFSAYHSSLAFTSLNCVADPILYCLVNEGARSDVAKALHNLLRFLASDKPQEMANASLTLETPLTSKRNSTAKVMTGSWAATPPSQGDQVQLKMLPPAQ

SEQ ID NO: 771082 - protein, 48 aa, Homo sapiens
MLTCQVGAIVTHFTEEKTEVRQLASNLALSDSEVFILSRDVLLPPHSF

SEQ ID NO: 771083 - protein, 197 aa, Homo sapiens
MGATHGNWEVPSQMQGFHRRSPRATKCSPVPGSSQHHGLNTYWASSSGPGWGMWGHEGAQSGRQRDKCAQRAPISGCNVVLRFWLRRVSRVSYVLWSCFLSPASPCRNPSEYIATLFELSALMVYWHQQICLCMDFLYYPFLRGDASAGPMTWCTTLDTIILEQHCTLTSQGVHDFLKAKATFKTWDFSDALVLGKV

SEQ ID NO: 771084 - protein, 112 aa, Homo sapiens
  misc_feature (1)..(1): Xaa can be any naturally occurring amino acid
XKRELTLLTTTATDIMEIRTVAVRIVAIKGVESEFYLAMNEEGKLYAKKECNEDCNFKELILENHYNTYAAAKWTHNGGEMFVALNQKGIPVRGKKTKKEQKTAHFLPMAIT

SEQ ID NO: 771085 - protein, 67 aa, Homo sapiens
RISAIGRDTCHLRSHNSKPRNARAPLTCYAYRVIISRVLGLGAIQRDEPPALTWPLGREKHTATTSE

SEQ ID NO: 771086 - protein, 84 aa, Homo sapiens
MDGQVGMAARRQGLRCQPNQPDHDSRWYTVGLDLEGAEESLCHTRTPWAPEQSTGLQTRMTLNAAGPSAALLEGLLLGGWEAID

SEQ ID NO: 771087 - protein, 43 aa, Homo sapiens
AHRLGGLFCTRWATNKLTYATYLLPTAPTSLVKYGEKKAKALS

SEQ ID NO: 771088 - protein, 396 aa, Homo sapiens
RELGREESARLSTARALRLSGAARWPKHSAGESAMSENGSFANCCEAGGWAVRPGWSGAGSARPSRTPRPPWVAPALSAVLIVTTAVDVVGNLLVILSVLRNRKLRNAGNLFLVSLALADLVVAFYPYPLILVAIFYDGWALGEEHCKASAFVMGLSVIGSVFNITAIAINRYCYICHSMAYHRIYRRWHTPLHICLIWLLTVVALLPNFFVGSLEYDPRIYSCTFIQTASTQYTAAVVVIHFLLPIAVVSFCYLRIWVLVLQARRKAKPESRLCLKPSDLRSFLTMFVVFVIFAICWAPLNCIGLAVAINPQEMAPQIPEGLFVTSYLLAYFNSCLNAIVYGLLNQNFRREYKRILLALWNPRHCIQDASKGSHAEGLQSPAPPIIGVQHQADAL

SEQ ID NO: 771089 - protein, 111 aa, Homo sapiens
RELGREESARLSTARALRLSGAARWPKHSAGESAMSENGSFANCCEAGGWAVRPGWSGAGSARPSRTPRPPWVAPALSAVLIVTTAVDVVGNLLVILSVLRNRKLRNAGFW

SEQ ID NO: 771090 - protein, 632 aa, Homo sapiens
MNRYTTIRQLGDGTYGSVLLGRSIESGELIAIKKMKRKFYSWEECMNLREVKSLKKLNHANVVKLKEVIRENDHLYFIFEYMKENLYQLIKERNKLFPESAIRNIMYQILQGLAFIHKHGFFHRDLKPENLLCMGPELVKIADFGLAREIRSKPPYTDYVSTRWYRAPEVLLRSTNYSSPIDVWAVGCIMAEVYTLRPLFPGASEIDTIFKICQVLGTPKKTDWPEGYQLSSAMNFRWPQCVPNNLKTLIPNASSEAVQLLRDMLQWDPKKRPTASQALRYPYFQVGHPLGSTTQNLQDSEKPQKGILEKAGPPPYIKPVPPAQPPAKPHTRISSRQHQASQPPLHLTYPYKAEVSRTDHPSHLQEDKPSPLLFPSLHNKHPQSKITAGLEHKNGEIKPKSRRRWGLISRSTKDSDDWADLDDLDFSPSLSRIDLKNKKRQSDDTLCRFESVLDLKPSEPVGTGNSAPTQTSYQRRDTPTLRSAAKQHYLKHSRYLPGISIRNGILSNPGKEFIPPNPWSSSGLSGKSSGTMSVISKVNSVGSSSTSSSGLTGNYVPSFLKKEIGSAMQRVHLAPIPDPSPGYSSLKAMRPHPGRPFFHTQPRSTPGLIPRPPAAQPVHGRTDWASKYASRR

SEQ ID NO: 771091 - protein, 632 aa, Homo sapiens; identical to SEQ ID NO: 771090

SEQ ID NO: 771092 - protein, 632 aa, Homo sapiens; identical to SEQ ID NO: 771090

SEQ ID NO: 771093 - protein, 632 aa, Homo sapiens; identical to SEQ ID NO: 771090

SEQ ID NO: 771094 - protein, 551 aa, Homo sapiens
MKENLYQLIKERNKLFPESAIRNIMYQILQGLAFIHKHGFFHRDLKPENLLCMGPELVKIADFGLAREIRSKPPYTDYVSTRWYRAPEVLLRSTNYSSPIDVWAVGCIMAEVYTLRPLFPGASEIDTIFKICQVLGTPKKTDWPEGYQLSSAMNFRWPQCVPNNLKTLIPNASSEAVQLLRDMLQWDPKKRPTASQALRYPYFQVGHPLGSTTQNLQDSEKPQKGILEKAGPPPYIKPVPPAQPPAKPHTRISSRQHQASQPPLHLTYPYKAEVSRTDHPSHLQEDKPSPLLFPSLHNKHPQSKITAGLEHKNGEIKPKSRRRWGLISRSTKDSDDWADLDDLDFSPSLSRIDLKNKKRQSDDTLCRFESVLDLKPSEPVGTGNSAPTQTSYQRRDTPTLRSAAKQHYLKHSRYLPGISIRNGILSNPGKEFIPPNPWSSSGLSGKSSGTMSVISKVNSVGSSSTSSSGLTGNYVPSFLKKEIGSAMQRVHLAPIPDPSPGYSSLKAMRPHPGRPFFHTQPRSTPGLIPRPPAAQPVHGRTDWASKYASRR

SEQ ID NO: 771095 - protein, 292 aa, Homo sapiens
MNRYTTIRQLGDGTYGSVLLGRSIESGELIAIKKMKRKFYSWEECMNLREVKSLKKLNHANVVKLKEVIRENDHLYFIFEYMKENLYQLIKERNKLFPESAIRNIMYQILQGLAFIHKHGFFHRDLKPENLLCMGPELVKIADFGLAREIRSKPPYTDYVSTRWYRAPEVLLRSTNYSSPIDVWAVGCIMAEVYTLRPLFPGASEIDTIFKICQVLGTPKKTDWPEGYQLSSAMNFRWPQCVPNNLKTLIPNASSEAVQLLRDMLQWDPKKRPTASQVFFHFLVITFISNSE

SEQ ID NO: 771096 - protein, 632 aa, Homo sapiens; identical to SEQ ID NO: 771090

SEQ ID NO: 771097 - protein, 632 aa, Homo sapiens; identical to SEQ ID NO: 771090

SEQ ID NO: 771098 - protein, 632 aa, Homo sapiens; identical to SEQ ID NO: 771090

SEQ ID NO: 771099 - protein, 632 aa, Homo sapiens; identical to SEQ ID NO: 771090

SEQ ID NO: 771100 - protein, 130 aa, Homo sapiens
MDSELRFRTGHSGFSLRHAQSTLYLQFPESKSKAIVISVGSSSTSSSGLTGNYVPSFLKKEIGSAMQRVHLAPIPDPSPGYSSLKAMRPHPGRPFFHTQPRSTPGLIPRPPAAQPVHGRTDWASKYASRR

SEQ ID NO: 771101 - protein, 125 aa, Homo sapiens
MPHSSDSSDSSFSRSPPPGKQDSSDDVRRVQRREKNRIAAQKSRQRQTQKADTLHLESEDLEKQNAALRKEIKQLTEELKYFTSVLNSHEPLCSVLAASTPSPPEVVYSAHAFHQPHVSSPRFQP

SEQ ID NO: 771102 - protein, 253 aa, Homo sapiens
MAPKVFRQYWDIPDGTDCHRKAYSTTSIASVAALTAAAYRVTLNPPGTFLEGVAKVGQYTFTAAAVGAVFGLTTCISAHVREKPDDPLNYFLGGCAGGLTLGARTHNYGIGAAACVYFGIAASLVKMGRLEGWEVYCKTKDVSPVNCRDLQPAKNAVQNIKILVSCVMKKTTKQNTHNHPHGKHIVRAARHKRRAHQTADPLGRKRWTHLEPHRLSDDNHAGTNRQGTATKETHTNQNRNKTGVTMRVSSPQT

SEQ ID NO: 771103 - protein, 96 aa, Homo sapiens
MAPKVFRQYWDIPDGTDCHRKAYSTTSIASVAATGWDSSGPDGAGSPLPSDEESLQTGPGAVAHTCNPALRRPKWEDRLRPGVPDQPWQNSKIPIS

SEQ ID NO: 771104 - protein, 175 aa, Homo sapiens
MSARSPTTPLNYFLGGCAGGLTLGARTHNYGIGAAACVYFGIAASLVKMGRLEGWEVYCKTKDVSPVNCRDLQPAKNAVQNIKILVSCVMKKTTKQNTHNHPHGKHIVRAARHKRRAHQTADPLGRKRWTHLEPHRLSDDNHAGTNRQGTATKETHTNQNRNKTGVTMRVSSPQT

SEQ ID NO: 771105 - protein, 37 aa, Homo sapiens
ELNVRAMDRIRWKELSIWPETVPRYSGKTGRRTEWAA

SEQ ID NO: 771106 - protein, 50 aa, Homo sapiens
LSWVSSSCCCCSRCCVERQGARRPGPVRARGPLRVLAAAARPSGLAPMAV

SEQ ID NO: 771107 - protein, 356 aa, Homo sapiens
LIGTRKGPRLRSGSQRQPGAHGPSAHGSTMPALLERPKLSNAMARALHRHIMMERERKRQEEEEVDKMMEQKMKEEQERRKKKEMEERMSLEETKEQILKLEEKLLALQEEKHQLFLQLKKVLHEEEKRRRKEQSDLTTLTSAAYQQSLTVHTGTHLLSMQGSPGGHNRPGTLMAADRAKQMFGPQVLTTRHYVGSAAAFAGTPEHGQFQGSPGGAYGTAQPPPHYGPTQPAYSPSQQLRAPSAFPAVQYLSQPQPQPYAVHGHFQPTQTGFLQPGGALSLQKQMEHANQQTGFSDSSSLRPMHPQALHPAPGLLASPQLPVQMQPAGKSGFAATSQPGPRLPFIQHSQNPRFYHK

SEQ ID NO: 771108 - protein, 356 aa, Homo sapiens; identical to SEQ ID NO: 771107

SEQ ID NO: 771109 - protein, 356 aa, Homo sapiens; identical to SEQ ID NO: 771107

SEQ ID NO: 771110 - protein, 271 aa, Homo sapiens
MMEQKMKEEQERRKKKEMEERMSLEETKEQILKLEEKLLALQEEKHQLFLQLKKVLHEEEQQSLTVHTGTHLLSMQGSPGGHNRPGTLMAADRAKQMFGPQVLTTRHYVGSAAAFAGTPEHGQFQGSPGGAYGTAQPPPHYGPTQPAYSPSQQLRAPSAFPAVQYLSQPQPQPYAVHGHFQPTQTGFLQPGGALSLQKQMEHANQQTGFSDSSSLRPMHPQALHPAPGLLASPQLPVQMQPAGKSGFAATSQPGPRLPFIQHSQNPRFYHK

SEQ ID NO: 771111 - protein, 387 aa, Homo sapiens
LIGTRKGPRLRSGSQRQPGAHGPSAHGSTMPALLERPKLSNAMARALHRHIMMERERKRQEEEEVDKMMEQKMKEEQERRKKKEMEERMSLEETKEQILKLEEKLLALQEEKHQLFLQLKKVLHEEEKRRRKEQSDLTTLTSAAYQQSLTVHTGTHLLSMQGEDYKKPPDGTGLLGGHSLPFQHHEALLPFSGSPGGHNRPGTLMAADRAKQMFGPQVLTTRHYVGSAAAFAGTPEHGQFQGSPGGAYGTAQPPPHYGPTQPAYSPSQQLRAPSAFPAVQYLSQPQPQPYAVHGHFQPTQTGFLQPGGALSLQKQMEHANQQTGFSDSSSLRPMHPQALHPAPGLLASPQLPVQMQPAGKSGFAATSQPGPRLPFIQHSQNPRFYHK

SEQ ID NO: 771112 - protein, 320 aa, Homo sapiens
LIGTRKGPRLRSGSQRQPGAHGPSAHGSTMPALLERPKLSNAMARALHRHIMMERERKRQEEEEVDKMMEQKMKEEQERRKKKEMEERMSLEETKEQILKLEEKLLALQEEKHQLFLQLKKVLHEEEKRRRKEQSDLTTLTSAAYQQSLTVHTGTHLLSMQGSPGGHNRPGTLMAADRAKQMFGPQVLTTRHYVGSAAAFAGTPEHGQFQGSPGGAYGTAQPPPHYGPTQPAYSPSQQLRAPSAFPAVQYLSQPQPQPYAVHGHFQPTQTGFLQPGGALSLQKQMEHANQQTGFSDSVSMAPWEVRVRDMLRGASVCLRP

SEQ ID NO: 771113 - protein, 195 aa, Homo sapiens
LIGTRKGPRLRSGSQRQPGAHGPSAHGSTMPALLERPKLSNAMARALHRHIMMERERKRQEEEEVDKMMEQKMKEEQERRKKKEMEERMSLEETKEQILKLEEKLLALQEEKHQLFLQLKKVLHEEEKRRRKEQSDLTTLTSAAYQQSLTVHTGTHLLSMQGSPGGHNRPGTLMAADRAWDCSAPTSLWAHTASL

SEQ ID NO: 771114 - protein, 242 aa, Homo sapiens
LIGTRKGPRLRSGSQRQPGAHGPSAHGSTMPALLERPKLSNAMARALHRHIMMERERKRQEEEEVDKMMEQKMKEEQERRKKKEMEERMSLEETKEQILKLEEKLLALQEEKHQLFLQLKKVLHEEEKRRRKEQSDLTTLTSAAYQQSLTVHTGTHLLSMQGSPGGHNRPGTLMAADRAKQMFGPQVLTTRHYVGSAAAFAGTPEHGQFQGSPGGAYGTAQPPPHYGPTQPAYSPSQQLRGE

SEQ ID NO: 771115 - protein, 264 aa, Homo sapiens
MMEQKMKEEQERRKKKEMEERMSLEETKEQQLFLQLKKVLHEEEKRRRKEQSDLTTLTSAAYQQSLTVHTGTHLLSMQGSPGGHNRPGTLMAADRAKQMFGPQVLTTRHYVGSAAAFAGTPEHGQFQGSPGGAYGTAQPPPHYGPTQPAYSPSQQLRAPSAFPAVQYLSQPQPQPYAVHGHFQPTQTGFLQPGGALSLQKQMEHANQQTGFSDSALHPAPGLLASPQLPVQMQPAGKSGFAATSQPGPRLPFIQHSQNPRFYHK

SEQ ID NO: 771116 - protein, 164 aa, Homo sapiens
LIGTRKGPRLRSGSQRQPGAHGPSAHGSTMPALLERPKLSNAMARALHRHIMMERERKRQEEEEVDKMMEQKMKEEQERRKKKEMEERMSLEETKEQILKLEEKLLALQEEKHQLFLQLKKVLHEEEKRRRKEQSDLTTLTSAAYQQSLTVHTGTHLLSMQGED

SEQ ID NO: 771117 - protein, 411 aa, Homo sapiens
LIGTRKGPRLRSGSQRQPGAHGPSAHGSTMPALLERPKLSNAMARALHRHIMMERERKRQEEEEVDKMMEQKMKEEQERRKKKEMEERMSLEETKEQILKLEEKLLALQEEKHQLFLQLKKVLHEEEKRRRKEQSDLTTLTSAAYQQSLTVHTGTHLLSMQGEDYKKPPDGTGLLGGHSLPFQHHEALLPFSGSPGGHNRPGTLMAADRAKQMFGPQVLTTRHYVGSAAAFAGTPEHGQFQGSPGGAYGTAQPPPHYGPTQPAYSPSQQLRAPSAFPAVQYLSQPQPQPYAVHGHFQPTQTGFLQPGGALSLQKQMEHANQQTGFSDSPALRAQCTRPGRRAVHAPLELALLSAPRLPLCESAARQESRALQLPANLALGSPSSNTARTRDSTTSDHQIISSTPHPPPHRG

SEQ ID NO: 771118 - protein, 218 aa, Homo sapiens
LIGTRKGPRLRSGSQRQPGAHGPSAHGSTMPALLERPKLSNAMARALHRHIMMERERKRQEEEEVDKMMEQKMKEEQERRKKKEMEERMSLEETKEQILKLEEKLLALQEEKHQLFLQLKKVLHEEEKRRRKEQSDLTTLTSAAYQQSLTVHTGTHLLSMQGALGGHTRPRTLHGSCTEPHTLFGPQCLRTPHYVGVCAAFSRDTRTLDITSGVLVGG

SEQ ID NO: 771119 - protein, 164 aa, Homo sapiens; identical to SEQ ID NO: 771116

SEQ ID NO: 771120 - protein, 289 aa, Homo sapiens
MMEQKMKEEQERRKKKEMEERMSLEETKEQILKLEEKLLALQEEKHQLFLQLKKVLHEEEKRRRKEQSDLTTLTSAAYQQSLTVHTGTHLLSMQGSPGGHNRPGTLMAADRAKQMFGPQVLTTRHYVGSAAAFAGTPEHGQFQGSPGGAYGTAQPPPHYGPTQPAYSPSQQLRAPSAFPAVQYLSQPQPQPYAVHGHFQPTQTGFLQPGGALSLQKQMEHANQQTGFSDSSSLRPMHPQALHPAPGLLASPQLPVQMQPAGKSGFAATSQPGPRLPFIQHSQNPRFYHK

SEQ ID NO: 771121 - protein, 291 aa, Homo sapiens
AAQNMDAESRQEEEEVDKMMEQKMKEEQERRKKKEMEERMSLEETKEQQLFLQLKKVLHEEEKRRRKEQSDLTTLTSAAYQQSLTVHTGTHLLSMQGSPGGHNRPGTLMAADRAKQMFGPQVLTTRHYVGSAAAFAGTPEHGQFQGSPGGAYGTAQPPPHYGPTQPAYSPSQQLRAPSAFPAVQYLSQPQPQPYAVHGHFQPTQTGFLQPGGALSLQKQMEHANQQTGFSDSSSLRPMHPQALHPAPGLLASPQLPVQMQPAGKSGFAATSQPGPRLPFIQHSQNPRFYHK

SEQ ID NO: 771122 - protein, 350 aa, Homo sapiens
LIGTRKGPRLRSGSQRQPGAHGPSAHGSTMPALLERPKLSNAMARALHRHIMMERERKRQEEEEVDKMMEQKMKEEQERRKKKEMEERMSLEETKEQILKLEEKLLALQEEKHQLFLQLKKVLHEEEKRRRKEQSDLTTLTSAAYQQSLTVHTGTHLLSMQGSPGGHNRPGTLMAADRAKQMFGPQVLTTRHYVGSAAAFAGTPEHGQFQGSPGGAYGTAQPPPHYGPTQPAYSPSQQLRAPSAFPAVQYLSQPQPQPYAVHGHFQPTQTGFLQPGGALSLQKQMEHANQQTGFSDSSSLRPMHPQALHPAPGLLASPQLPVQMQPAGKVRMVIEFTCQNPYTRDPEKQD

SEQ ID NO: 771123 - protein, 347 aa, Homo sapiens
LIGTRKGPRLRSGSQRQPGAHGPSAHGSTMPALLERPKLSNAMARALHRHIMMERERKRQEEEEVDKMMEQKMKEEQERRKKKEMEERMSLEETKEQILKLEEKLLALQEEKHQLFLQLKKVLHEEEKRRRKEQSDLTTLTSAAYQQSLTVHTGTHLLSMQGSPGGHNRPGTLMAADRAKQMFGPQVLTTRHYVGSAAAFAGTPEHGQFQGSPGGAYGTAQPPPHYGPTQPAYSPSQQLRAPSAFPAVQYLSQPQPQPYAVHGHFQPTQTGFLQPGGALSLQKQMEHANQQTGFSDSALHPAPGLLASPQLPVQMQPAGKSGFAATSQPGPRLPFIQHSQNPRFYHK

SEQ ID NO: 771124 - protein, 311 aa, Homo sapiens
LIGTRKGPRLRSGSQRQPGAHGPSAHGSTMPALLERPKLSNAMARALHRHIMMERERKRQEEEEVDKMMEQKMKEEQERRKKKEMEERMSLEETKEQILKLEEKLLALQEEKHQLFLQLKKVLHEEEKRRRKEQSDLTTLTSAAYQQSLTVHTGTHLLSMQGSPGGHNRPGTLMAADRAKQMFGPQVLTTRHYVGSAAAFAGTPEHGQFQGSPGGAYGTAQPPPHYGPTQPAYSPSQQLRAPSAFPAVQYLSQPQPQPYAVHGHFQPTQTGFLQPGGALSLQKQMEHANQQTGFSDSSLCAPCVDNRAELI

SEQ ID NO: 771125 - protein, 242 aa, Homo sapiens; identical to SEQ ID NO: 771114

SEQ ID NO: 771126 - protein, 385 aa, Homo sapiens
LIGTRKGPRLRSGSQRQPGAHGPSAHGSTMPALLERPKLSNAMARALHRHIMMERERKRQEEEEVDKMMEQKMKEEQERRKKKEMEERMSLEETKEQILKLEEKLLALQEEKHQLFLQLKKVLHEEEKRRRKEQSDLTTLTSAAYQQSLTVHTGTHLLSMQGSPGGHNRPGTLMAADRAKQMFGPQVLTTRHYVGSAAAFAGTPEHGQFQGSPGGAYGTAQPPPHYGPTQPAYSPSQQLRAPSAFPAVQYLSQPQPQPYAVHGHFQPTQTGDNIHAGALALRSSPPCFILISHAPLPHLGFLQPGGALSLQKQMEHANQQTGFSDSSSLRPMHPQALHPAPGLLASPQLPVQMQPAGKSGFAATSQPGPRLPFIQHSQNPRFYHK

SEQ ID NO: 771127 - protein, 953 aa, Homo sapiens
MAETLPGSGDSGPGTASLGPGVAETGTRRLSELRVIDLRAELKKRNLDTGGNKSVLMERLKKAVKEEGQDPDEIGIELEATSKKSAKRCVKGLKMEEEGTEDNGLEDDSRDGQEDMEASLENLQNMGMMDMSVLDETEVANSSAPDFGEDGTDGLLDSFCDSKEYVAAQLRQLPAQPPEHAVDGEGFKNTLETSSLNFKVTPDIEESLLEPENEKILDILGETCKSEPVKEESSELEQPFAQDTSSVGPDRKLAEEEDLFDSAHPEEGDLDLASESTAHAQSSKADSLLAVVKREPAEQPGDGERTDCEPVGLEPAVEQSSAASELAEASSEELAEAPTEAPSPEARDSKEDGRKFDFDACNEVPPAPKESSTSEGADQKMSSFKEEKDIKPIIKDEKGRVGSGSGRNLWVSGLSSTTRATDLKNLFSKYGKVVGAKVVTNARSPGARCYGFVTMSTSDEATKCISHLHRTELHGRMISVEKAKNEPAGKKLSDRKECEVKKEKLSSVDRHHSVEIKIEKTVIKKEEKIEKKEEKKPEDIKKEEKDQDELKPGPTNRSRVTKSGSRGMERTVVMDKSKGEPVISVKTTSRSKERSSKSQDRKSESKEKRDILSFDKIKEQRERERQRQREREIRETERRREREQREREQRLEAFHERKEKARLQRERLQLECQRQRLERERMERERLERERMRVERERRKEQERIHREREELRRQQEQLRYEQERRPGRRPYDLDRRDDAYWPEGKRVAMEDRYRADFPRPDHRFHDFDHRDRGQYQDHAIDRREGSRPMMGDHRDGQHYGDDRHGHGGPPERHGRDSRDGWGGYGSDKRLSEGRGLPPPPRGGRDWGEHNQRLEEHQARAWQGAMDAGAASREHARWQGGERGLSGPSGPGHMASRGGVAGRGGFAQGGHSQGHVVPGGGLEGGGVASQDRGSRVPHPHPHPPPYPHFTRRY

SEQ ID NO: 771128 - protein, 274 aa, Homo sapiens
WLCFLLGLGVMPKNLPLVPGRVGSGSGRNLWVSGLSSTTRATDLKNLFSKYGKVVGAKVVTNARSPGARCYGFVTMSTSDEATKCISHLHRTELHGRMISVEKAKNEPAGKKLSDRKECEVKKEKLSSVDRHHSVEIKIEKTVIKKEEKIEKKEEKKPEDIKKEEKDQDELKPGPTNRSRVTKSAKQTELDADRRDAIHSTRQSPSISVTTTTQVPTREAPRAPGIAKSEQQQHTETTILVAPPPTPRNPQGREKRQQASREPGDSADTGHGPP

SEQ ID NO: 771129 - protein, 573 aa, Homo sapiens
MSSFKEEKDIKPIIKDEKGRVGSGSGRNLWVSGLSSTTRATDLKNLFSKYGKVVGAKVVTNARSPGARCYGFVTMSTSDEATKCISHLHRTELHGRMISVEKAKNEPAGKKLSDRKECEVKKEKLSSVDRHHSVEIKIEKTVIKKEEKIEKKEEKKPEDIKKEEKDQDELKPGPTNRSRVTKSGSRGMERTVVMDKSKGEPVISVKTTSRSKERSSKSQDRKSESKEKRDILSFDKIKEQRERERQRQREREIRETERRREREQREREQRLEAFHERKEKARLQRERLQLECQRQRLERERMERERLERERMRVERERRKEQERIHREREELRRQQEQLRYEQERRPGRRPYDLDRRDDAYWPEGKRVAMEDRYRADFPRPDHRFHDFDHRDRGQYQDHAIDRREGSRPMMGDHRDGQHYGDDRHGHGGPPERHGRDSRDGWGGYGSDKRLSEGRGLPPPPRGGRDWGEHNQRLEEHQARAWQGAMDAGAASREHARWQGGERGLSGPSGPGHMASRGGVAGRGGFAQGGHSQGHVVPGGGLEGGGVASQDRGSRVPHPHPHPPPYPHFTRRY

SEQ ID NO: 771130 - protein, 499 aa, Homo sapiens
MSTSDEATKCISHLHRTELHGRMISVEKAKNEPAGKKLSDRKECEVKKEKLSSVDRHHSVEIKIEKTVIKKEEKIEKKEEKKPEDIKKEEKDQDELKPGPTNRSRVTKSGSRGMERTVVMDKSKGEPVISVKTTSRSKERSSKSQDRKSESKEKRDILSFDKIKEQRERERQRQREREIRETERRREREQREREQRLEAFHERKEKARLQRERLQLECQRQRLERERMERERLERERMRVERERRKEQERIHREREELRRQQEQLRYEQERRPGRRPYDLDRRDDAYWPEGKRVAMEDRYRADFPRPDHRFHDFDHRDRGQYQDHAIDRREGSRPMMGDHRDGQHYGDDRHGHGGPPERHGRDSRDGWGGYGSDKRLSEGRGLPPPPRGGRDWGEHNQRLEEHQARAWQGAMDAGAASREHARWQGGERGLSGPSGPGHMASRGGVAGRGGFAQGGHSQGHVVPGGGLEGGGVASQDRGSRVPHPHPHPPPYPHFTRRY

SEQ ID NO: 771131 - protein, 499 aa, Homo sapiens; identical to SEQ ID NO: 771130

SEQ ID NO: 771132 - protein, 574 aa, Homo sapiens
WLCFLLGLGVMPKNLPLVPGRVGSGSGRNLWVSGLSSTTRATDLKNLFSKYGKVVGAKVVTNARSPGARCYGFVTMSTSDEATKCISHLHRTELHGRMISVEKAKNEPAGKKLSDRKECEVKKEKLSSVDRHHSVEIKIEKTVIKKEEKIEKKEEKKPEDIKKEEKDQDELKPGPTNRSRVTKSGSRGMERTVVMDKSKGEPVISVKTTSRSKERSSKSQDRKSESKEKRDILSFDKIKEQRERERQRQREREIRETERRREREQREREQRLEAFHERKEKARLQRERLQLECQRQRLERERMERERLERERMRVERERRKEQERIHREREELRRQQEQLRYEQERRPGRRPYDLDRRDDAYWPEGKRVAMEDRYRADFPRPDHRFHDFDHRDRGQYQDHAIDRREGSRPMMGDHRDGQHYGDDRHGHGGPPERHGRDSRDGWGGYGSDKRLSEGRGLPPPPRGGRDWGEHNQRLEEHQARAWQGAMDAGAASREHARWQGGERGLSGPSGPGHMASRGGVAGRGGFAQGGHSQGHVVPGGGLEGGGVASQDRGSRVPHPHPHPPPYPHFTRRY

SEQ ID NO: 771133 - protein, 662 aa, Homo sapiens
MAETLPGSGDSGPGTASLGPGVAETGTRRLSELRVIDLRAELKKRNLDTGGNKSVLMERLKKAVKEEGQDPDEIGIELEATSKKSAKRCVKGLKMEEEGTEDNGLEDDSRDGQEDMEASLENLQNMGMMDMSVLDETEVANSSAPDFGEDGTDGLLDSFCDSKEYVAAQLRQLPAQPPEHAVDGEGFKNTLETSSLNFKVTPDIEESLLEPENEKILDILGETCKSEPVKEESSELEQPFAQDTSSVGPDRKLAEEEDLFDSAHPEEGDLDLASESTAHAQSSKADSLLAVVKREPAEQPGDGERTDCEPVGLEPAVEQSSAASELAEASSEELAEAPTEAPSPEARDSKEDGRKFDFDACNEVPPAPKESSTSEGADQKMSSPRKMTRDTEEGVSKRGKRVAGVVVEIYWVSGLSSYRARDYYVFEGILVQAKYGKVVGRRIGLGPQMSGSPDSSLFWLRPWMSDRHVQIGRLNMPEPAGINREVHGTMHDSAWRNAHRMNLVGPENPAEKEKNSERGRQEKSTTLGTICIILRGCAYTRAETKTEGSDTGDNRTRDDNAADHKERKGGHLRPEQRAQNTNRGPREAHGYSTGAPPGSHLEQRPPRAGRQAPQDAGGHAARLSQKPPRAKEKTTAATRQSPQPAQQLHTPRYSKHEQNSNA

SEQ ID NO: 771134 - protein, 204 aa, Homo sapiens
MEDRYRADFPRPDHRFHDFDHRDRGQYQDHAIDRREGSRPMMGDHRDGQHYGDDRHGHGGPPERHGRDSRDGWGGYGSDKRLSEGRGLPPPPRGGRDWGEHNQRLEEHQARAWQGAMDAGAASREHARWQGGERGLSGPSGPGHMASRGGVAGRGGFAQGGHSQGHVVPGGGLEGGGVASQDRGSRVPHPHPHPPPYPHFTRRY

SEQ ID NO: 771135 - protein, 187 aa, Homo sapiens
MCSRAWCCLNGIFSFCRREGSRPMMGDHRDGQHYGDDRHGHGGPPERHGRDSRDGWGGYGSDKRLSEGRGLPPPPRGGRDWGEHNQRLEEHQARAWQGAMDAGAASREHARWQGGERGLSGPSGPGHMASRGGVAGRGGFAQGGHSQGHVVPGGGLEGGGVASQDRGSRVPHPHPHPPPYPHFTRRY

SEQ ID NO: 771136 - protein, 388 aa, Homo sapiens [sequence omitted]

SEQ ID NO: 771137 - protein, 141 aa, Homo sapiens
MGLAAFLHGHCDCLATWDSGQLDSDFHLPEGGRDWGEHNQRLEEHQARAWQGAMDAGAASREHARWQGGERGLSGPSGPGHMASRGGVAGRGGFAQGGHSQGHVVPGGGLEGGGVASQDRGSRVPHPHPHPPPYPHFTRRY

SEQ ID NO: 771138 - protein, 222 aa, Homo sapiens [sequence omitted]

SEQ ID NO: 771139 - protein, 219 aa, Homo sapiens [sequence omitted]

SEQ ID NO: 771140 - protein, 953 aa, Homo sapiens; identical to SEQ ID NO: 771127

SEQ ID NO: 771141 - protein, 825 aa, Homo sapiens
MAETLPGSGDSGPGTASLGPGVAETGTRRLSELRVIDLRAELKKRNLDTGGNKSVLMERLKKAVKEEGQDPDEIGIELEATSKKSAKRCVKGLKMEEEGTEDNGLEDDSRDGQEDMEASLENLQNMGMMDMSVLDETEVANSSAPDFGEDGTDGLLDSFCDSKEYVAAQLRQLPAQPPEHAVDGEGFKNTLETSSLNFKVTPDIEESLLEPENEKILDILGETCKSEPVKEESSELEQPFAQDTSSVGPDRKLAEEEDLFDSAHPEEGDLDLASESTAHAQSSKADSLLAVVKREPAEQPGDGERTDCEPVGLEPAVEQSSAASELAEASSEELAEAPTEAPSPEARDSKEDGRKFDFDACNEVPPAPKESSTSEGADQKMSSFKEEKDIKPIIKDEKGRVGSGSGRNLWVSGLSSTTRATDLKNLFSKYGKVVGAKVVTNARSPGARCYGFVTMSTSDEATKCISHLHRTELHGRMISVEKAKNEPAGKKLSDRKECEVKKEKLSSVDRHHSVEIKIEKTVIKKEEKIEKKEEKKPEDIKKEEKDQDELKPGPTNRSRVTKSGSRGMERTVVMDKSKGEPVISVKTTSRSKERSSKSQDRKSESKEKRDILSFDKIKEQRERERQRQREREIRETERRREREQREREQRLEAFHERKEKARLQRERLQLECQRQRLERERMERERLERERMRVERERRKEQERIHREREELRRQQEQLRYEQERRPGRRPYDLDRRDDAYWPEGKRVAMEDRYRADFPRPDHRFHDFDHRDRGQYQDHAIDRREGSRPMMGDHRDGQVSRAPMPSPGATVLLCRHSGPFLARRP

SEQ ID NO: 771142 - protein, 573 aa, Homo sapiens; identical to SEQ ID NO: 771129

SEQ ID NO: 771143 - protein, 113 aa, Homo sapiens
MLGLEEWNLCNSGLVNGNTSLTVNHIPDRHGQVKTNSSRWPDSTCLQYSIEAHRTLEIKGNITNTAETQGLVVVCLREKHPEETISNISLLLEYILSSDGQSYNWVYSRNFFL

SEQ ID NO: 771144 - protein, 183 aa, Homo sapiens
VSAEPLASSASSHPGMSDNAPASLESGSSSTPTNCSTSSAIPQPGAATKPWRSKSLSVKHSATVSMLSVKPPGPEAPRPTPEAMKPAPNNQKSMLEKLKLFNSKGGSKAGEGPGSRDTSCERLETLPSFEESEELEAASRMLTTVGPASSSPKIALKGIAQRTFSRALTNKKSSLKGNEKEKE

SEQ ID NO: 771145 - protein, 259 aa, Homo sapiens
GSRPWLRGSGESGLQAGSLPLPGAGAGPQPACVRDKRTPSLSSLESPSAAGWRKGPWAQPIVSGVYGHGSGRGKGQSSLHPQFIPGPGPCRHALGSCGKTVRAPGQTSSPGIWVPEMAEVAEWGGMAQLGALASGKELSTVHLQCVRFSWETRAQLVVSWGKWVILPWEEPPGPLGKCTRCLQRPGLGSWVGAGGPSVLRVPAPGPSLPWAKPARASLSSACPAGHLWASLETSGVGCGGVILPWLGIPLVAVPLPAAP

SEQ ID NO: 771146 - protein, 158 aa, Homo sapiens
RKGAWAGDGVKCRQEIRLIKKRLHLPRTTLSPFAAGALPAANPTWNLAPCDVSLILGHGSPGSPFQPGSLRWCWLVSPVCWGQLRPASAPAGLPGQPRGDGRAWRSSLDDPSHHFNIIRNLTGFCKKAQSPCFLAFLFKSTHLHLLPKALEVLQTASF

SEQ ID NO: 771147 - protein, 89 aa, Homo sapiens
EGLKAVVAKLGLRRTARATTSLSLRVPSFPVSERLSRRTLWTCSDGGRELVWNSPLFPRFPRLQIRRGRFAPVAWPPCPLSLAVLDRKC

SEQ ID NO: 771148 - protein, 174 aa, Homo sapiens
MSRTGLPVCPWAAVSPVARRRGEQNPAASGAAWGWVLPAVCLCALWVCVCVSVCLCVCARTRVCVPTTVSYVSVSLSLPSRSFRRPLFLSLSVCVCMRLGTHVPCAPEAGFLARRPFFWSASPRVSAWVLWPVGNRFPGGSGLGVCEGLGNVGICVGAAGVFIPSPPGAASLLA

SEQ ID NO: 771149 - protein, 42 aa, Homo sapiens
MPGAGCGSGLAPLSISPAGNKSRTTAGKQDQRPEIPHFGRTM

SEQ ID NO: 771150 - protein, 234 aa, Homo sapiens
  misc_feature (9)..(9): Xaa can be any naturally occurring amino acid
AGWYAPGLXIQLRREAARAGSFLFPKCRQSPRSHGQPFRQLRSHWQAPRQDGRPRREEDDVPPEEKRLRLGLEGGSAQPEDCEDGKDAPRPGREETGTQTGGDGRGDLLCLPYSLVEGQDYKSENSTLLPGAKNSLQDSVSRSILLNRLDFETTFASFSASLVSVINHREWFLPETDLAGELTGFEGNKFSRALAQFLSLGPYSQPLVHGVRAVFCPLKKTRPTWWTDPGHSGW

SEQ ID NO: 771151 - protein, 197 aa, Homo sapiens
MPPLWPCGACALCLGALGTGSLDAVMVLVEHADAWSPCGCSEMHVMLVVPSILEPPGVGLLLPETWLQGGCHSRLPAPVCTMSDERRLPGSAVGWLVCGGLSLLANAWGILSVGAKQKKWKPLEFLLCTLAATHMLNVAVPIATYSVVQLRRQRPDFEWNEGLCKVFVSTFYTLTLATCFSVTSLSYHRMWMVCWPV

SEQ ID NO: 771152 - protein, 70 aa, Homo sapiens
SLHAGSHLPALQPYLQLTAISKYLINSRCQTRSGSFLRDQYGGAPSEQAGGEEVGMGREETCSWNLVSWV

SEQ ID NO: 771153 - protein, 52 aa, Homo sapiens
SCVSSSPEGPSCTCSIPEGPSRTCSIPEGPSHTCSIPEGLSCVSFSPKGLSR

SEQ ID NO: 771154 - protein, 104 aa, Homo sapiens
CGNTAWLSAAFGQGQLPGTAGLRGHDPGPGNTVRPGHAARPQRGGLLRRPTTFLRVGSQGRANSMPAVSSGGPSLPGTLPVPASCLGQAGSSLTALVPGLLPRA

SEQ ID NO: 771155 - protein, 122 aa, Homo sapiens
AGVLYTSSHSTLTTTPRNKINTTTLLEEEAETCQVVRDKPSRELHPSLNSTGNPKKGNLKSFLVGELGAFHQQGAVVKDTWRIPAPWTGCSPSTFLSVTWGDGQARWLTPVIPALWEAEAGG

SEQ ID NO: 771156 - protein, 71 aa, Homo sapiens
KTATSPRSCLPFLRKPRADDWPYGYKTHNPLRGTPTRASLKDYGVQCSTEWDITFCWEDPLPNQGSIWSES

SEQ ID NO: 771157 - protein, 148 aa, Homo sapiens
MWLGRRALCALVLLLACASLGLLYASTRDAPGLRVPLAPWAPPQSPRRPELPDLAPEPRYAHIPVRIKEQVVGLLAWNNCSCESSGGGLPLPFQKQVRAIDLTKAFDPAELRAASATREQEFQAFLSRSQSPADQLLIAPANSPLQYP

SEQ ID NO: 771158 - protein, 267 aa, Homo sapiens
MLTYILSFLPLSDQKEASLVSWAWYRAAQNALREQPGLTSLDLSGCSELTDGALLAVSRGLRHLRRLSLGKLQRLTDAGCTALGGLQELQSLDMAEGGTGPGPGLYARGSIPAGLPQPGPLLFIEGCLSALHDPSTGLSLRVLDLSSCVALTTGPCRPSAPTSPPLSPAPGVVQRSSVTGGFGGPGGRPVPGDPGVGTLEVLRGTRVAPGNQTAPPAPPKVLCRSNSKGKTSGTEPEKGKGLFPQAGPELEHQASGTKGRRQKHTGP

SEQ ID NO: 771159 - protein, 208 aa, Homo sapiens
MIWLRNRRCLEPLQGTPKWVPVLGELQKTLQKGEYLPLRPLPMFESNFVQVTHQGGPVFVNHRTNRLAMGVAASLPGLVLPDILLIGQPAEDRDCSGLVLTRMIPWTSSTSAVHDLSAWRLKLRLVSGRQYYLALDAPDNEVGFLFHCWVRLINLLQEPAPTWTPRTTRTAPLDMPLAEAPASTWHLQDQPISRHAVQGLLSATFRID

SEQ ID NO: 771160 - protein, 135 aa, Homo sapiens
LAGGRAAGKDMPKASFGDGGSSCACMHSDTLSLKKAGTHGPSRSLGCGTGGTPHPQQYHLALLQFPRMEDVTTLPPGSSATLSSSSSSSAEADESQVPSPTWERGRPQAWCWAVRWLPAFLLHFACSIILKETLG

SEQ ID NO: 771161 - protein, 143 aa, Homo sapiens [sequence omitted]

SEQ ID NO: 771162 - protein, 88 aa, Homo sapiens
DACLSQRWVVGIHMKQGIASHGQRSMDAAVLRVAAPPDAGCGFHHTQEQLALEVSHVTCLPGRPLAELSMVVGCQQGVCFAKSFADLP

SEQ ID NO: 771163 - protein, 122 aa, Homo sapiens
SLDLSGIDSCEMSDSGSQVPDSLPSTPSPVESTKSFSVHSDRESSITNDMGFSDDFSLLESQERCEEELLQLLTHILNYVMCKGLEKSDDDTWIERGQVFSALSKPGISSELLRPSDEIKLT

SEQ ID NO: 771164 - protein, 377 aa, Homo sapiens
MSEVKSRKKSGPKGAPAAEPGKRSEGGKTPVARSSGGGGWADPRTCLSLLSLGTCLGLAWFVFQQSEKFAKVENQYQLLKLETNEFQQLQSKISLISEKLESTESILQEATSSMSLMTQFEQEVSNLQDIMHDIQNNEEVLTQRMQSLNEKFQNITDFWKRSLEEMNINTDIFKSEAKHIHSQVTVQINSAEQEIKLLTERLKDLEDSTLRNIRTVKRQEEEDLLRVEEQLGSDTKAIEKLEEEQHALFARDEDLTNKLSDYEPKVEECKTHLPTIESAIHSVLRVSQDLIETEKKMEDLTMQMFNMEDDMLKAVSEIMEMQKTLEGIQYDNSILKMQNELDILKEKVHDFIAYSSTGEKGTLKEYNIENKGIGGDF

SEQ ID NO: 771165 - protein, 244 aa, Homo sapiens
MEQLKSFQIIAHLKRLQEEINEVKTWSNRITEKQDILNNSLTTLSQDITKVDQSTTSMAKDVGLKITSVKTDIRRISGLVTDVISLTDSVQELENKIEKVEKNTVKNIGDLLSSSIDRTATLRKTASENSQRINSVKKTLTELKSDFDKHTDRFLSLEGDRAKVLKTVTFANDLKPKVYNLKKDFSRLEPLVNDLTLRIGRLVTDLLQREKEIAFLSEKISNLTIVQAEIKDIKDEIAHISDMN

SEQ ID NO: 771166 - protein, 350 aa, Homo sapiens
MSEVKSRKKSGPKGAPAAEPGKRSEGGKTPVARSSGGGGWADPRTCLSLLSLGTCLGLAWFVFQQSEKFAKVENQYQLLKLETNEFQQLQSKISLISEKWQKSEAIMEQLKSFQIIAHLKRLQEEINEVKTWSNRITEKQDILNNSLTTLSQDITKVDQSTTSMAKDVGLKITSVKTDIRRISGLVTDVISLTDSVQELENKIEKVEKNTVKNIGDLLSSSIDRTATLRKTASENSQRINSVKKTLTELKSDFDKHTDRFLSLEGDRAKVLKTVTFANDLKPKVYNLKKDFSRLEPLVNDLTLRIGRLVTDLLQREKEIAFLSEKISNLTIVQAEIKDIKDEIAHISDMN

SEQ ID NO: 771167 - protein, 244 aa, Homo sapiens; identical to SEQ ID NO: 771165

SEQ ID NO: 771168 - protein, 219 aa, Homo sapiens
MEQLKSFQIIAHLKRLQEEINEVKTWSNRITEKQDILNNSLTTLSQDITKVDQSTTSMAKDVGLKITSVKTDIRRISGLVTDVISLTDSVQELENKIEKVEKNTVKNIGDLLSSSIDRTATLRKTASENSQRINSVKKTLTELKSDFDKHTDRFLSLEGDRAKVLKTVTFANDLKPKVYNLKKDFSRLEPLVNDLTLRIGRLVTDLLQREKPSIRGDPL

SEQ ID NO: 771169 - protein, 106 aa, Homo sapiens
YRLECSQKNPNLPDRFLSLEGDRAKVLKTVTFANDLKPKVYNLKKDFSRLEPLVNDLTLRIGRLVTDLLQREKEIAFLSEKISNLTIVQAEIKDIKDEIAHISDMN

SEQ ID NO: 771170 - protein, 244 aa, Homo sapiens; identical to SEQ ID NO: 771165

SEQ ID NO: 771171 - protein, 350 aa, Homo sapiens; identical to SEQ ID NO: 771166

SEQ ID NO: 771172 - protein, 244 aa, Homo sapiens; identical to SEQ ID NO: 771165

SEQ ID NO: 771173 - protein, 244 aa, Homo sapiens; identical to SEQ ID NO: 771165

SEQ ID NO: 771174 - protein, 111 aa, Homo sapiens
RSRLSLHTSLQAEGAGFGLGRPRKGLPQCSGGLKGSSSAAKVGAQAEEAPRASEGCEGCPHAVTSHLGLELQLCPEVWAPAGLVERTTLATPPTSASFFSAATPEGPPLAS

SEQ ID NO: 771175 - protein, 87 aa, Homo sapiens
  misc_feature (11)..(11): Xaa can be any naturally occurring amino acid
DVTSGVHSRSXAVRWGPGRVAGKDLEALQIHLCILASDFTTEGQPSLEASLINVTRKPLPQQTKGMEEETYNKRHLKKKEKLVFRKH

SEQ ID NO: 771176 - protein, 103 aa, Homo sapiens
MAPGRSRRVDRLSKPRALMAGAREKALRRGHSPGGAASTLLHSAGHLGLSKPAGCCTFWDRESVSWVNPAHGRGGAARSCGTGYPAGCWLQRLHLPLGQPPGP

SEQ ID NO: 771177 - protein, 171 aa, Homo sapiens
ITLYEDRGFQGRHYECSSDHPNLQPYLSRCNSVRVDSGCWVLYEQPNYSGLQEFLRRGDYADHQQWMGLSDSVRSCRLIPHASSHRLRIYEREDYRGQMVEITEDCSSLHDRFHLSEIHSFNVLEGSWVLYELPNYQGRQYLLRPGDCRWCQDWGATDARVGSLRRAVELY

SEQ ID NO: 771178 - protein, 333 aa, Homo sapiens
REVGWGDYKPLTAPQAARGTSATTALQPGVPDFTGSRACGQAPRASGFVEGTLGILSTVQVLGGPPWLRRTLPKLGRPKEAPVARMSTQSTHPLKPEAPRLPPGIPESHCSCRVWTHNSELAVSLAVCLRVARHSTRGTTVEADSVGESEGVKVHSFVQSCGPSAPTVALDDRILASFLVIAKCHTMHVPCGMRSDGGSSSRIVSRSLIRVSASWVQRQETSLAVKSSDLLAITVHGGLIIAPHCNLSVSRVTRAFRQQGRGPILLWRYLHHLGSQPAVRRAALMCEDALVPFYERFSFHAVGPCAITVGSLTFMELHCSLRGHPFLRRNSGC

SEQ ID NO: 771179 - protein, 292 aa, Homo sapiens
REVGWGDYKPLTAPQAARGTSATTALQPGVPDFTGSRACGQAPRASGFVEGTLGILSTVQVLGGPPWLRRTLPKLGRPKEAPVARMSTQSTHPLKPEAPRLPPGIPESPSCQRRHTLPASEFRCLTPEDAVSAFEIEREAFISVLGVCPLYLDEIRHFLTLCPELSLGWFEEGCLVAFIIGSLWDKERLMQESLTLHRSGGHIAHLHVLAVHRAFRQQGRGPILLWRYLHHLGSQPAVRRAALMCEDALVPFYERFSFHAVGPCAITVGSLTFMELHCSLRGHPFLRRNSGC

SEQ ID NO: 771180 - protein, 692 aa, Homo sapiens
MGSVGGEGRITEGDMRRGRDGGPLHGCPKKPATFPHHRKKGSKQTNLDFSPINPKIQRDLKSLVGGSQLEGGRGSLTAEGTDWARFSQSPPHAPLLQSSPPRAGSGSWGRIGYEETILPPLELGVRGWGPSKGRRAAKLQIGLGSVGVRATGGVRELGRGARAARARSGAAVPTGGRPASLHRQERTGFQGERAASPGKDIWSLKPPPGPCPDPEKKQARGAAPHSSEGRSRGPAPGRGPGPRSQAGSRVGLGRLWAGQAAEVGIQGSLGRSPHETRGWRRVVGGRRYPSAPLTLCCLSPLPARGAPSGTMLTRLFSEPGLLSDVPKFASWGDGEDDEPRSDKGDAPPPPPPAPGPGAPGPARAAKPVPLRGEEGTEATLAEVKEEGELGGEEEEEEEEEEGLDEAEGERPKKRGPKKRKMTKARLERSKLRRQKANARERNRMHDLNAALDNLRKVVPCYSKTQKLSKIETLRLAKNYIWALSEILRSGKRPDLVSYVQTLCKGLSQPTTNLVAGCLQLNSRNFLTEQGADGAGRFHGSGGPFAMHPYPYPCSRLAGAQCQAAGGLGGGAAHALRTHGYCAAYETLYAAAGGGGASPDYNSSEYEGPLSPPLCLNGNFSLKQDSSPDHEKSYHYSMHYSALPGSRPTGHGLVFGSSAVRGGVHSENLLSYDMHLHHDRGPMYEELNAFFHN

SEQ ID NO: 771181 - protein, 382 aa, Homo sapiens
MLTRLFSEPGLLSDVPKFASWGDGEDDEPRSDKGDAPPPPPPAPGPGAPGPARAAKPVPLRGEEGTEATLAEVKEEGELGGEEEEEEEEEEGLDEAEGERPKKRGPKKRKMTKARLERSKLRRQKANARERNRMHDLNAALDNLRKVVPCYSKTQKLSKIETLRLAKNYIWALSEILRSGKRPDLVSYVQTLCKGLSQPTTNLVAGCLQLNSRNFLTEQGADGAGRFHGSGGPFAMHPYPYPCSRLAGAQCQAAGGLGGGAAHALRTHGYCAAYETLYAAAGGGGASPDYNSSEYEGPLSPPLCLNGNFSLKQDSSPDHEKSYHYSMHYSALPGSRPTGHGLVFGSSAVRGGVHSENLLSYDMHLHHDRGPMYEELNAFFHN

SEQ ID NO: 771182 - protein, 197 aa, Homo sapiens
CYLTLTQAMKMGLGGNPYGPAGTGKTESVKALGGLLGRQVLVFNCDEGIDVKSMGRIFVGLVKCGAWGCFDEFNRLEESVLSAVSMQIQTIQDALKNHRTVCELLGKEVEVNSNSGIFITMNPAGKGYGGRQKLPDNLKQLFRPVAMSHPDNELIAEVILYSEGFKDAKVLSRKLVAIFNLSRELLTPQQHYDYGFS

SEQ ID NO: 771183 - protein, 94 aa, Homo sapiens
RIEWNRHRMELNTIIEWSRMESSSNGKEWNHRIESNGIIIEWNRMVSTSNGKKRNYRMESKRIFERTRMESSNGMEWNNPWTGRQSSSNGIEWN

SEQ ID NO: 771184 - protein, 38 aa, Homo sapiens
MVNSSQRVPTNETMNGTKRISRTISDRIWTLDPQNRPT

SEQ ID NO: 771185 - protein, 542 aa, Homo sapiens
GATPRTVNRRALRELGSCEAAGGVGVRGARAMATVQEKAAALNLSALHSPAHRPPGFSVAQKPFGATYVWSSIINTLQTQVEVKKRRHRLKRHNDCFVGSEAVDVIFSHLIQNKYFGDVDIPRAKVVRVCQALMDYKVFEAVPTKVFGKDKKPTFEDSSCSLYRFTTIPNQDSQLGKENKLYSPARYADALFKSSDIRSASLEDLWENLSLKPANSPHVNISATLSPQVINEVWQEETIGRLLQLVDLPLLDSLLKQQEAVPKIPQPKRQSTMVNSSNYLDRGILKAYSDSQEDEWLSAAIDCLEYLPDQMVVEISRSFPEQPDRTDLVKELLFDAIGRYYSSREPLLNHLSDVHNGIAELLVNGKTEIALEATQLLLKLLDFQNREEFRRLLYFMAVAANPSEFKLQKESDNRMVVKRIFSKAIVDNKNLSKGKTDLLVLFLMDHQKDVFKIPGTLHKIVSVKLMAIQNGRDPNRDAGYIYCQRIDQRDYSNNTEKTTKDELLNLLKTLDEDSKLSAKEKKKLLGQFYKCHPDIFIEHFGD

SEQ ID NO: 771186 - protein, 238 aa, Homo sapiens
GATPRTVNRRALRELGSCEAAGGVGVRGARAMATVQEKAAALNLSALHSPAHRPPGFSVAQKPFGATYVWSSIINTLQTQVEVKKRRHRLKRHNDCFVGSEAVDVIFSHLIQNKYFGDVDIPRAKVVRVCQALMDYKVFEAVPTKVFGKDKKPTFEDSSCSLYRFTTIPNQDSQLGKENKLYSPARYADALFKSSDIRSASLEDLWENLSLKPANSPHVNISATLSPQGKLRMKQSKK

SEQ ID NO: 771187 - protein, 524 aa, Homo sapiens
GATPRTVNRRALRELGSCEAAGGVGVRGARAMATVQEKAAALNLSALHSPAHRPPGFSVAQKPFGATYVWSSIINTLQTQVEVKKRRHRLKRHNDCFVGSEAVDVIFSHLIQNKYFGDVDIPRAKVVRVCQALMDYKVFEAVPTKVFGKDKKPTFEDSSCSLYRFTTIPNQDSQLGKENKLYSPARYADALFKSSDIRSASLEDLWENLSLKPANSPHVNISATLSPQVINEVWQEETIGRLLQLVDLPLLDSLLKQQEAVPKIPQPKRQSTMVNSSNYLDRGILKAYSDSQEDEWLSAAIDCLEYLPDQMVVEISRSFPEQPDRTDLVKELLFDAIGRYYSSREPLLNHLSDVHNGIAELLVDFQNREEFRRLLYFMAVAANPSEFKLQKESDNRMVVKRIFSKAIVDNKNLSKGKTDLLVLFLMDHQKDVFKIPGTLHKIVSVKLMAIQNGRDPNRDAGYIYCQRIDQRDYSNNTEKTTKDELLNLLKTLDEDSKLSAKEKKKLLGQFYKCHPDIFIEHFGD

SEQ ID NO: 771188 - protein, 385 aa, Homo sapiens
GATPRTVNRRALRELGSCEAAGGVGVRGARAMATVQEKAAALNLSALHSPAHRPPGFSVAQKPFGATYVWSSIINTLQTQVEVKKRRHRLKRHNDCFVGSEAVDVIFSHLIQNKYFGDVDIPRAKVVRVCQALMDYKVFEAVPTKVFGKDKKPTFEDSSCSLYRFTTIPNQDSQLGKENKLYSPARYADALFKSSDIRSASLEDLWENLSLKPANSPHVNISATLSPQVINEVWQEETIGRLLQLVDLPLLDSLLKQQEAVPKIPQPKRQSTMVNSSNYLDRGILKAYSDSQEDEWLSAAIDCLEYLPDQMVVEISRSFPEQPDRTDLVKELLFDAIGRYYSSREPLLNHLSDVHNGIAELLVNGKTEIALEATQLLLKAFRFPK

SEQ ID NO: 771189 - protein, 502 aa, Homo sapiens
MRGLCEFYWQEFGIKGFSVAQKPFGATYVWSSIINTLQTQVEVKKRRHRLKRHNDCFVGSEAVDVIFSHLIQNKYFGDVDIPRAKVVRVCQALMDYKVFEAVPTKVFGKDKKPTFEDSSCSLYRFTTIPNQDSQLGKENKLYSPARYADALFKSSDIRSASLEDLWENLSLKPANSPHVNISATLSPQVINEVWQEETIGRLLQLVDLPLLDSLLKQQEAVPKIPQPKRQSTMVNSSNYLDRGILKAYSDSQEDEWLSAAIDCLEYLPDQMVVEISRSFPEQPDRTDLVKELLFDAIGRYYSSREPLLNHLSDVHNGIAELLVNGKTEIALEATQLLLKLLDFQNREEFRRLLYFMAVAANPSEFKLQKESDNRMVVKRIFSKAIVDNKNLSKGKTDLLVLFLMDHQKDVFKIPGTLHKIVSVKLMAIQNGRDPNRDAGYIYCQRIDQRDYSNNTEKTTKDELLNLLKTLDEDSKLSAKEKKKLLGQFYKCHPDIFIEHFGD

SEQ ID NO: 771190 - protein, 209 aa, Homo sapiens
DLLLGVQQEGDCVHLARLRPERGADFSRRRGSVCPGGGRTKDGRRRKRAAAWAEAGPQLRRRRRRLGLGGGHEPPGAEWWPPGLTRRGKRPGPAILTAHRGPRGNLRRLRPLCPAESPPPGAAGRSGRARGEEASERGTMSRGPAALRREGERDPGPAERTYGLWRAPAAAFKPPERRKGVRKGPAQAAGRAAADAPLEGVRLSADPPP

SEQ ID NO: 771191 - protein, 117 aa, Homo sapiens
GEVAHQLQGSLFEPQITGLGVPKVMAWCLALHHPSPITQAPPGAELGQGGFQRRQMGQEQGDHSTWRPELLRDSRRRSSPEPAGTCWVLTGSRRGSAAGNQVIETFNSGGGGDGWRQ

SEQ ID NO: 771192 - protein, 166 aa, Homo sapiens
LLCSTEPGTESCSVNTCWMVGWVTGQWLWATCESSVGCQTQPAELNSTWKPLCKWQCPMGFSLKMGAVATLPAPRRDLAPLEMGLSSQPASTHFLVPSTKRFEDMIAPFRLNDGFKDEATVNEMRRDCPWKISDEEITKNRVKSLRQVRLNEIVLDYSRDAALIVM

SEQ ID NO: 771193 - protein, 1038 aa, Homo sapiens
PSLDTQATMAELPTTETPGDATLCSGRFTISTLLSSDEPSPPAAYDSSHPSHLTHSSTFCMRTFGYNTIDVVPTYEHYANSTQPGEPRKVRPTLADLHSFLKQEGRHLHALAFDSRPSHEMTDGLVEGEAGTSSEKNPEEPVRFGWVKGVMIRCMLNIWGVILYLRLPWITAQAGIVLTWIIILLSVTVTSITGLSISAISTNGKVKSGGTYFLISRSLGPELGGSIGLIFAFANAVGVAMHTVGFAETVRDLLQEYGAPIVDPINDIRIIGVVSVTVLLAISLAGMEWESKAQVLFFLVIMVSFANYLVGTLIPPSEDKASKGFFSYRADIFVQNLVPDWRGPDGTFFGMFSIFFPSATGILAGANISGDLKDPAIAIPKGTLMAIFWTTISYLAISATIGSCVVRDASGVLNDTVTPGWGACEGLACSYGWNFTECTQQHSCHYGLINYYQTMSMVSGFAPLITAGIFGATLSSALACLVSAAKVFQCLCEDQLYPLIGFFGKGYGKNKEPVRGYLLAYAIAVAFIIIAELNTIAPIISNFFLCSYALINFSCFHASITNSPGWRPSFQYYNKWAALFGAIISVVIMFLLTWWAALIAIGVVLFLLLYVIYKKPEVNWGSSVQAGSYNLALSYSVGLNEVEDHIKNYRPQCLVLTGPPNFRPALVDFVGTFTRNLSLMICGHVLIGPHKQRMPELQLIANGHTKWLNKRKIKAFYSDVIAEDLRRGVQILMQAAGLGRMKPNILVVGFKKNWQSAHPATVEDYIGILHDAFDFNYGVCVMRMREGLNVSKMMQAHINPVFDPAEDGKEASARGARPSVSGALDPKALVKEEQATTIFQSEQGKKTIDIYWLFDDGGLTLLIPYLLGRKRRWSKCKIRVFVGGQINRMDQERKAIISLLSKFRLGFHEVHILPDINQNPRAEHTKRFEDMIAPFRLNDGFKDEATVNEMRRDCPWKISDEEITKNRVKSLRQVRLNEIVLDYSRDAALIVITLPIGRKGKCPSSLYMAWLETLSQDLRPPVILIRGNQENVLTFYCQ

SEQ ID NO: 771194 - protein, 1029 aa, Homo sapiens
PSLDTQATMAELPTTETPGDATLCSGRFTISTLLSSDEPSPPAAYDSSHPSHLTHSSTFCMRTFGYNTIDVVPTYEHYANSTQPGEPRKVRPTLADLHSFLKQEGRHLHALAFDSRPSHEMTDGLVEGEAGTSSEKNPEEPVRFGWVKGVMIRCMLNIWGVILYLRLPWITAQAGIVLTWIIILLSVTVTSITGLSISAISTNGKVKSGGTYFLISRSLGPELGGSIGLIFAFANAVGVAMHTVGFAETVRDLLQEYGAPIVDPINDIRIIGVVSVTVLLAISLAGMEWESKAQVLFFLVIMVSFANYLVGTLIPPSEDKASKGFFSYRADIFVQNLVPDWRGPDGTFFGMFSIFFPSATGILAGANISGDLKDPAIAIPKGTLMAIFWTTISYLAISATIGSCVVRDASGVLNDTVTPGWGACEGLACSYGWNFTECTQQHSCHYGLINYYQTMSMVSGFAPLITAGIFGATLSSALACLVSAAKVFQCLCEDQLYPLIGFFGKGYGKNKEPVRGYLLAYAIAVAFIIIAELNTIAPIISNFFLCSYALINFSCFHASITNSPGWRPSFQYYNKWAALFGAIISVVIMFLLTWWAALIAIGVVLFLLLYVIYKKPEVNWGSSVQAGSYNLALSYSVGLNEVEDHIKNYRPQCLVLTGPPNFRPALVDFVGTFTRNLSLMICGHVLIGPHKQRMPELQLIANGHTKWLNKRKIKAFYSDVIAEDLRRGVQILMQAAGLGRMKPNILVVGFKKNWQSAHPATVEDYIGILHDAFDFNYGVCVMRMREGLNVSKMMQAHINPVFDPAEDGKEASARVDPKALVKEEQATTIFQSEQGKKTIDIYWLFDDGGLTLLIPYLLGRKRRWSKCKIRVFVGGQINRMDQERKAIISLLSKFRLGFHEVHILPDINQNPRAEHTKRFEDMIAPFRLNDGFKDEATVNEMRRDCPWKISDEEITKNRVKSLRQVRLNEIVLDYSRDAALIVITLPIGRKGKCPSSLYMAWLETLSQDLRPPVILIRGNQENVLTFYCQ

SEQ ID NO: 771195 - protein, 224 aa, Homo sapiens
DIYWLFDDVYGLLALLRLEDGGGLLLLSPGKKTIDIYWLFDDGGLTLLIPYLLGRKRRWSKCKIRVFVGGQINRMDQERKAIISLLSKFRLGFHEVHILPDINQNPRAEHTKRFEDMIAPFRLNDGFKDEATVNEMRRDCPWKISDEEITKNRVKSLRQVRLNEIVLDYSRDAALIVITLPIGRKGKCPSSLYMAWLETLSQDLRPPVILIRGNQENVLTFYCQ

SEQ ID NO: 771196 - protein, 86 aa, Homo sapiens
GRWLCSDPPPPPAVDPKALVKEEQATTIFQSEQGKKTIDIYWLFDDGGSDPLGSALLPGGGGVVVVFLPSPSWPALKGDRGSWAQQ

SEQ ID NO: 771197 - protein, 144 aa, Homo sapiens
LLCSTEPGTESCSVNTCWMVGWVTGQWLWATCESSVGCQTQPAELNSTWKPLCKWQCPMGFSLKMGAVATLPAPRRDLAPLEMGLSSQPASTHFLVPSTKRFEDMIAPFRLNDGFKDEATVNEMRRDCPGITGVSHGAQLQIVI

SEQ ID NO: 771198 - protein, 510 aa, Homo sapiens
ELAWPLRKDDSKFVKRSIFFISNFFLCSYALINFSCFHASITNSPGWRPSFQYYNKWAALFGAIISVVIMFLLTWWAALIAIGVVLFLLLYVIYKKPEVNWGSSVQAGSYNLALSYSVGLNEVEDHIKNYRPQCLVLTGPPNFRPALVDFVGTFTRNLSLMICGHVLIGPHKQRMPELQLIANGHTKWLNKRKIKAFYSDVIAEDLRRGVQILMQAAGLGRMKPNILVVGFKKNWQSAHPATVEDYIGILHDAFDFNYGVCVMRMREGLNVSKMMQAHINPVFDPAEDGKEASARVDPKALVKEEQATTIFQSEQGKKTIDIYWLFDDGGLTLLIPYLLGRKRRWSKCKIRVFVGGQINRMDQERKAIISLLSKFRLGFHEVHILPDINQNPRAEHTKRFEDMIAPFRLNDGFKDEATVNEMRRDCPWKISDEEITKNRVKSLRQVRLNEIVLDYSRDAALIVITLPIGRKGKCPSSLYMAWLETLSQDLRPPVILIRGNQENVLTFYCQ

SEQ ID NO: 771199 - protein, 86 aa, Homo sapiens
HMKKRCPGEFKRHQHQLLFIDRTEHFAHREEGEVPQLAVHGLAGDPVPGPQTSSHPDPRKPGKRAHLLLPVTPGFDIPVHSSECVG

SEQ ID NO: 771200 - protein, 212 aa, Homo sapiens
LGPHADLFRKHEIDGKALLLLRSDMMMKYMGLKLGPALKLSYHIDRLKQGKFLNQESTATATTGETFVLGNSLARSLEPHSDSMDSASNPTNLVSTSQRHRPLLSSCGLPPSTASAVRRLCSRGSDRYLESRDASRLSGRDPSSWTVEDVMQFVREADPQLGPHADLFRKHEIDGKALLLLRSDMMMKYMGLKLGPALKLSYHIDRLKQGKF

SEQ ID NO: 771201 - protein, 109 aa, Homo sapiens
CCLLHSNRYLGASTLAVLLSSNSGFTVFQVKPLSWGIVWPAPWNHTQTQWTLPQIPPTLSAPPKGTGPCFHPVASHQALPQLCAGYAPGVSLPESWPSFPPSLFPSLPS

SEQ ID NO: 771202 - protein, 143 aa, Homo sapiens [sequence omitted]

SEQ ID NO: 771203 - protein, 216 aa, Homo sapiens
PSFRNKLAAAGSRAGRSFSSRLQDSRSLDGLSEACGGAGSSGSAESGAGGGRRATISSPLELEGTVSRHGDLTHFVANNLQLKIRLSGAPPPPPSAPARPCPAPAPTPTPAIPPIDPEVLRDLERLSRELGGRVDRLLRGLGGAVQELTALSVGCIQTYRDAVDSLGEAVDMSIKGMYTLLARCEELERALQPVQGLARQVRDIRRTLEVLEALCK

SEQ ID NO: 771204 - protein, 319 aa, Homo sapiens
PTWSMESSRGRPGPETDLLAVAEHQALVFGGGPGRTSSEPPAGLRVSGEEETENVGGANRHPRTSPKTSSCGVVHRPEREALENEPGPQGTLSGAGSRRGAPGAEHEPSLSSRHKNPAPPEGKPSSGRDCRRGGPGGGMDVEQQEEEDNDEEAAAGSRAGRSFSSRLQDSRSLDGLSEACGGAGSSGSAESGAGGGRRATISSPLELEGTVSRHGDLTHFVANNLQLKIRLSGAPPPPPSAPARPCPAPAPTPTPAIPPIDPEVLRDLERLSRELGGRVDRLLRGLGGAVQELTALSVGCIQTYRDAVDLQGVLVGSAH

SEQ ID NO: 771205 - protein, 361 aa, Homo sapiens
PTWSMESSRGRPGPETDLLAVAEHQALVFGGGPGRTSSEPPAGLRVSGEEETENVGGANRHPRTSPKTSSCGVVHRPEREALENEPGPQGTLSGAGSRRGAPGAEHEPSLSSRHKNPAPPEGKPSSGRDCRRGGPGGGMDVEQQEEEDNDEEAAAGSRAGRSFSSRLQDSRSLDGLSEACGGAGSSGSAESGAGGGRRATISSPLELEGTVSRHGDLTHFVANNLQLKIRLSGAPPPPPSAPARPCPAPAPTPTPAIPPIDPEVLRDLERLSRELGGRVDRLLRGLGGAVQELTALSVGCIQTYRDAVDSLGEAVDMSIKGMYTLLARCEELERALQPVQGLARQVRDIRRTLEVLEALCK

SEQ ID NO: 771206 - protein, 350 aa, Homo sapiens [sequence omitted]

SEQ ID NO: 771207 - protein, 850 aa, Homo sapiens
MVASARVQKLVRRYKLAIATALAILLLQGLKGRQRKPRPLDPGEGSKDTDSSAGRRGSTGRRHGRWRGRAESPGVPVAKVVRAVTSRQRASRRVPPAPPPEAPGRQNLSGAAAGEALVGAAGFPPHGDTGSVEGAPQPTDNGFTPKCEIVGKDALSALARASTKQCQQEIANVVCLHQAGSLMPKAVPRHCQLTGKMSPGIQWDESQAQQPMDGPPVRIAYMLVVHGRAIRQLKRLLKAVYHEQHFFYIHVDKRSDYLHREVVELAQGYDNVRVTPWRMVTIWGGASLLRMYLRSMRDLLEVPGWAWDFFINLSATDYPTRTNEELVAFLSKNRDKNFLKSHGRDNSRFIKKQGLDRLFHECDSHMWRLGERQIPAGIVVDGGSDWFVLTRSFVEYVVYTDDPLVAQLRQFYTYTLLPAESFFHTVLENSLACETLVDNNLRVTNWNRKLGCKCQYKHIVDWCGCSPNDFKPQDFLRLQQVSRPTFFARKFESTVNQEVLEILDFHLYGSYPPGTPALKAYWENTYDAADGPSGLSDVMLTAYTAFARLSLHHAATAAPPMGTPLCRFEPRGLPSSVHLYFYDDHFQGYLVTQAVQPSAQGPAETLEMWLMPQGSLKLLGRSDQASRLQSLEVGTDWDPKERLFRNFGGLLGPLDEPVAVQRWARGPNLTATVVWIDPTYVVATSYDITVDTETEVTQYKPPLSRPLRPGPWTVRLLQFWEPLGETRFLVLPLTFNRKLPLRKDDASWLHAGPPHNEYMEQSFQGLSSILNLPQPELAEEAAQRHTQLTGPALEAWTDRELSSFWSVAGLCAIGPSPCPSLEPCRLTSWSSLSPDPKSELGPVKADGRLR

SEQ ID NO: 771208 - protein, 865 aa, Homo sapiens [sequence omitted]

SEQ ID NO: 771209 - protein, 765 aa, Homo sapiens
MVASARVQKLVRRYKLAIATALAILLLQGLVVWSFSGLEEDEAGEKGRQRKPRPLDPGEGSKDTDSSAGRRGSTGRRHGRWRGRAESPGVPVAKVVRAVTSRQRASRRVPPAPPPEAPGRQNLSGAAAGEALVGAAGFPPHGDTGSVEGAPQPTDNGFTPKCEIVGKDALSALARASTKQCQQEIANVVCLHQAGSLMPKAVPRHCQLTGKMSPGIQWDESQAQQPMDGPPVRIAYMLVVHGRAIRQLKRLLKAVYHEQHFFYIHVDKRSDYLHREVVELAQGYDNVRVTPWRMVTIWGGASLLRMYLRSMRDLLEVPGWAWDFFINLSATDYPTRTNEELVAFLSKNRDKNFLKSHGRDNSRFIKKQGLDRLFHECDSHMWRLGERQIPAGIVVDGGSDWFVLTRSFVEYVVYTDDPLVAQLRQFYTYTLLPAESFFHTVLENSLACETLVDNNLRVTNWNRKLGCKCQYKHIVDWCGCSPNDFKPQDFLRLQQVSRPTFFARKFESTVNQEVLEILDFHLYGSYPPGTPALKAYWENTYDAADGPSGLSDVMLTAYTAFARLSLHHAATAAPPMGTPLCRFEPRGLPSSVHLYFYDDHFQGYLVTQAVQPSAQGPAETLEMWLMPQGSLKLLGRSDQASRLQSLEVGTDWDPKERLFRNFGGLLGPLDEPVAVQRWARGPNLTATVVWIDPTYVVATSYDITVDTETEVTQYKPPLSRPLRPGPWTVRLLQFWEPLGETRFLVLPLTFNRKLPLRKGKRAVLK

SEQ ID NO: 771210 - protein, 511 aa, Homo sapiens
MVASARVQKLVRRYKLAIATALAILLLQGLVVWSFSGLEEDEAGEKGRQRKPRPLDPGEGSKDTDSSAGRRGSTGRRHGRWRGRAESPGVPVAKVVRAVTSRQRASRRVPPAPPPEAPGRQNLSGAAAGEALVGAAGFPPHGDTGSVEGAPQPTDNGFTPKCEIVGKDALSALARASTKQCQQEIANVVCLHQAGSLMPKAVPRHCQLTGKMSPGIQWDESQAQQPMDGPPVRIAYMLVVHGRAIRQLKRLLKAVYHEQHFFYIHVDKRSDYLHREVVELAQGYDNVRVTPWRMVTIWGGASLLRMYLRSMRDLLEVPGWAWDFFINLSATDYPTRTNEELVAFLSKNRDKNFLKSHGRDNSRFIKKQGLDRLFHECDSHMWRLGERQIPAGIVVDGGSDWFVLTRSFVEYVVYTDDPLVAQLRQFYTYTLLPAESFFHTVLENSLACETLVDNNLRVTNWNRKLGCKCQYKHIVDWCGCSPNDFKPQDFLRLQPLRPMQSFQVCTGSEVT

SEQ ID NO: 771211 - protein, 865 aa, Homo sapiens [sequence omitted]

SEQ ID NO: 771212 - protein, 128 aa, Homo sapiens
MGLASTESVAGGVLTACSAPTDDASWLHAGPPHNEYMEQSFQGLSSILNLPQPELAEEAAQRHTQLTGPALEAWTDRELSSFWSVAGLCAIGPSPCPSLEPCRLTSWSSLSPDPKSELGPVKADGRLR

SEQ ID NO: 771213 - protein, 778 aa, Homo sapiens
MVASARVQKLVRRYKLAIATALAILLLQGLVVWSFSGLEEDEAGEKGRQRKPRPLDPGEGSKDTDSSAGRRGSTGRRHGRWRGRAESPGVPVAKVVRAVTSRQRASRRVPPAPPPEAPGRQNLSGAAAGEALVGAAGFPPHGDTGSVEGAPQPTDNGFTPKCEIVGKDALSALARASTKQCQQEIANVVCLHQAGSLMPKAVPRHCQLTGKMSPGIQWDESQAQQPMDGPPVRIAYMLVVHGRAIRQLKRLLKAVYHEQHFFYIHVDKRSDYLHREVVELAQGYDNVRVTPWRMVTIWGGASLLRMYLRSMRDLLEVPGWAWDFFINLSATDYPTRTNEELVAFLSKNRDKNFLKSHGRDNSRFIKKQGLDRLFHECDSHMWRLGERQIPAGIVVDGGSDWFVLTRSFVEYVVYTDDPLVAQLRQFYTYTLLPAESFFHTVLENSLACETLVDNNLRVTNWNRKLGCKCQYKHIVDWCGCSPNDFKPQDFLRLQQVSRPTFFARKFESTVNQEVLEILDFHLYGSYPPGTPALKAYWENTYDAADGPSGLSDVMLTAYTAFARLSLHHAATAAPPMGTPLCRFEPRGLPSSVHLYFYDDHFQGYLVTQAVQPSAQGPAETLEMWLMPQGSLKLLGRSDQASRLQSLEVGTDWDPKERLFRNFGGLLGPLDEPVAVQRWARGPNLTATVVWIDPTYVVATSYDITVDTETEVTQYKPPLSRPLRPGPWTVRLLQFWEPLGETRFLVLPLTFNRKLPLRKDDASWLHAGPPHNEYMEAGL

SEQ ID NO: 771214 - protein, 502 aa, Homo sapiens
MASKKLGADFHGTFSYLDDVPFKTGDKFKTPAKVGLPIGFSLPDCLQVVREVQYDFSLEKKTIEWAEEIKKIEEAEREAECKIAEAEAKVNSKSGPEGDSKMSFSKTHSTATMPPPINPILASLQHNSILTPTRVSSSATKQKVLSPPHIKADFNLADFECEEDPFDNLELKTIDEKEELRNILVGTTGPIMAQLLDNNLPRGGSGSVLQDEEVLASLERATLDFKPLHKPNGFITLPQLGNCEKMSLSSKVSLPPIPAVSNIKSLSFPKLDSDDSNQKTAKLASTFHSTSCLRNGTFQNSLKPSTQSSASELNGHHTLGLSALNLDSGTEMPALTSSQMPSLSVLSVCTEESSPPNTGPTVTPPNFSVSQVPNMPSCPQAYSELQMLSPSERQCVETVVNMGYSYECVLRAMKKKGENIEQILDYLFAHGQLCEKGFDPLLVEEALEMHQCSEEKMMEFLQLMSKFKEMGFELKDIKEVLLLHNNDQDNALEDLMARAGAS

SEQ ID NO: 771215 - protein, 404 aa, Homo sapiens
RRREVGLQHGGCGTGGGYGDGLARSGQSWRWWRSLSLGAVGSSAGTEPGRPAGASTFRLLRRRQQRHSGSKWLLRSWVQIFMGLSVTLMMSHLRQETNSKHQLKLVYLLASPCLIVCRLSEKYSMTSLWKRKPNGFITLPQLGNCEKMSLSSKVSLPPIPAVSNIKSLSFPKLDSDDSNQKTAKLASTFHSTSCLRNGTFQNSLKPSTQSSASELNGHHTLGLSALNLDSGTEMPALTSSQMPSLSVLSVCTEESSPPNTGPTVTPPNFSVSQVPNMPSCPQAYSELQMLSPSERQCVETVVNMGYSYECVLRAMKKKGENIEQILDYLFAHGQLCEKGFDPLLVEEALEMHQCSEEKMMEFLQLMSKFKEMGFELKDIKEVLLLHNNDQDNALEDLMARAGAS

SEQ ID NO: 771216 - protein, 502 aa, Homo sapiens; identical to SEQ ID NO: 771214

SEQ ID NO: 771217 - protein, 502 aa, Homo sapiens; identical to SEQ ID NO: 771214

SEQ ID NO: 771218 - protein, 77 aa, Homo sapiens
SVGGGQLSGRSLPWVGGAGEAEYVGPGSALPHGAAWRGAGSWVELRGIKLWPCASSSLGSTLFWEREYQHKVGERRI

SEQ ID NO: 771219 - protein, 104 aa, Homo sapiens
SVGGGQLSGRSLPWVGGAGEAEYVGPGSALPHGAAWRGAGSWVELRGIKLWPCASSSLGSTLFWEREYQQMNLAVLSRLECSGTISAHCNLWLPGSSDSPASAP

SEQ ID NO: 771220 - protein, 75 aa, Homo sapiens
REHQLRLSPLQGRRDSAAGGGGAVALGRLKRDGCKGEELRVLSIRRKTRSAVEEHCTGVRKWSLGVTLHLTSLGL

SEQ ID NO: 771221 - protein, 77 aa, Homo sapiens
MPKCPKCNKEVYFAERVTSLGKDWHRPCLKCEKCGKTLTSGGHAEHEGKPYCNHPCYAAMFGPKGFGRGGAESHTFK

SEQ ID NO: 771222 - protein, 140 aa, Homo sapiens
MAQSKSESLKTRDADSAALSLRPKARSLWEAIGASPRVQRWKNLESGVQGQKERKSSILHSTGRKRGSRLSKHAAYLHSSTCCVLASLAANSMVPTHTEGGSSSPTPLTPMSVSVSNTLTDTQGNNASSAIQVSLNLVDT

SEQ ID NO: 771223 - protein, 33 aa, Homo sapiens
FSYKAAGLWEVHLIPVLESWFAASRTSSGAEFA

SEQ ID NO: 771224 - protein, 497 aa, Homo sapiens
EFREQKASERASELPAVGERGDRKSERGEGARGEKVTVKCAAPLTGALSPAPRVMATAASNHYSLLTSSASIVHAEPPGGMQQGAGGYREAQSLVQGDYGALQSNGHPLSHAHQWITALSHGGGGGGGGGGGGGGGGGGGGGDGSPWSTSPLGQPDIKPSVVVQQGGRGDELHGPGALQQQHQQQQQQQQQQQQQQQQQQQQQRPPHLVHHAANHHPGPGAWRSAAAAAHLPPSMGASNGGLLYSQPSFTVNGMLGAGGQPAGLHHHGLRDAHDEPHHADHHPHPHSHPHQQPPPPPPPQGPPGHPGAHHDPHSDEDTPTSDDLEQFAKQFKQRRIKLGFTQADVGLALGTLYGNVFSQTTICRFEALQLSFKNMCKLKPLLNKWLEEADSSSGSPTSIDKIAAQGRKRKKRTSIEVSVKGALESHFLKCPKPSAQEITSLADSLQLEKEVVRVWFCNRRQKEKRMTPPGGTLPGAEDVYGGSRDTPPHHGVQTPVQ

SEQ ID NO: 771225 - protein, 383 aa, Homo sapiens
RRASQRVSESEKEGEEEKESEGGAGGGGDGSPWSTSPLGQPDIKPSVVVQQGGRGDELHGPGALQQQHQQQQQQQQQQQQQQQQQQQQQRPPHLVHHAANHHPGPGAWRSAAAAAHLPPSMGASNGGLLYSQPSFTVNGMLGAGGQPAGLHHHGLRDAHDEPHHADHHPHPHSHPHQQPPPPPPPQGPPGHPGAHHDPHSDEDTPTSDDLEQFAKQFKQRRIKLGFTQADVGLALGTLYGNVFSQTTICRFEALQLSFKNMCKLKPLLNKWLEEADSSSGSPTSIDKIAAQGRKRKKRTSIEVSVKGALESHFLKCPKPSAQEITSLADSLQLEKEVVRVWFCNRRQKEKRMTPPGGTLPGAEDVYGGSRDTPPHHGVQTPVQ

SEQ ID NO: 771226 - protein, 102 aa, Homo sapiens
MGVTVNLMGILGKRFWRSAYKRVLVIGNNGPFPKSGSDGVMSGKIYSQARILSIHKKLRKIRCQNTQHNTGIFEVPYRSKIPGTMNTRPEGVNPFNHFKHGR

SEQ ID NO: 771227 - protein, 122 aa, Homo sapiens
MLIYMLMYMLIVMFIFYHDKNILKSYINSCRSPVENSPMTSHSIILWDGSTMLDHKALHNAAPTSLSPWPRLLPPTPFSSCQAPQPPHGALQQLCELPACWQPSQQRALVCPLLSLYSGHYL

SEQ ID NO: 771228 - protein, 71 aa, Homo sapiens [sequence omitted]

SEQ ID NO: 771229 - protein, 418 aa, Homo sapiens
LRSRSAPSLADLPFPSRLPTPGPWPQHPVRCRLRAGKSSRSPRRPCRSAGGQRAARHPQPAACSPQPAARSQIAGSDRTRLDRRPQPGAMLPLLLGLLGPAACWALGPTPGPGSSELRSAFSAARTTPLEGTSEMAVTFDKVYVNIGGDFDVATGQFRCRVPGAYFFSFTAGKAPHKSLSVMLVRNRDEVQALAFDEQRRPGARRAASQSAMLQLDYGDTVWLRLHGAPQYALGAPGATFSGYLVYADADADAPARGPPAPPEPRSAFSAARTRSLVGSDAGPGPRHQPLAFDTEFVNIGGDFDAAAGVFRCRLPGAYFFSFTLGKLPRKTLSVKLMKNRDEVQAMIYDDGASRRREMQSQSVMLALRRGDAVWLLSHDHDGYGAYSNHGKYITFSGFLVYPDLAPAAPPGLGASELL

SEQ ID NO: 771230 - protein, 167 aa, Homo sapiens
MYCRGAAAIILTYDVNHRQSLVELEDRFLGLTDTASKDCLFAIVGNKVDLTEEGALAGQEKEECSPNMDAGDRVSPRAPKQVQLEDAVALYKKILKYKMLDEQDVPAAEQMCFETSAKTGYNVDLLFETLFDLVVPMILQQRAERPSHTVDISSHKPPKRTRSGCCA

SEQ ID NO: 771231 - protein, 234 aa, Homo sapiens
MRKPDSKIVLLGDMNVGKTSLLQRYMERRFPDTVSTVGGAFYLKQWRSYNISIWDTAGREQFHGLGSMYCRGAAAIILTYDVNHRQSLVELEDRFLGLTDTASKDCLFAIVGNKVDLTEEGALAGQEKEECSPNMDAGDRVSPRAPKQVQLEDAVALYKKILKYKMLDEQDVPAAEQMCFETSAKTGYNVDLLFETLFDLVVPMILQQRAERPSHTVDISSHKPPKRTRSGCCA

SEQ ID NO: 771232 - protein, 142 aa, Homo sapiens
MRKPDSKIVLLGDMNVGKTSLLQRYMERRFPDTVSTVGGAFYLKQWRSYNISIWDTAGREQFHGLGSMYCRGAAAIILTYDVNHRQSLVELEDRFLGRHTQWIYPVISHPRGPDLGVVPDFRGPPGLRLCMLGRGLTRQAVI

SEQ ID NO: 771233 - protein, 726 aa, Homo sapiens
TCQEHVPPAVAGALGAAAMGMSKSHSFFGYPLSIFFIVVNEFCERFSYYGMRAILILYFTNFISWDDNLSTAIYHTFVALCYLTPILGALIADSWLGKFKTIVSLSIVYTIGQAVTSVSSINDLTDHNHDGTPDSLPVHVVLSLIGLALIALGTGGIKPCVSAFGGDQFEEGQEKQRNRFFSIFYLAINAGSLLSTIITPMLRVQQCGIHSKQACYPLAFGVPAALMAVALIVFVLGSGMYKKFKPQGNIMGKVAKCIGFAIKNRFRHRSKAFPKREHWLDWAKEKYDERLISQIKMVTRVMFLYIPLPMFWALFDQQGSRWTLQATTMSGKIGALEIQPDQMQTVNAILIVIMVPIFDAVLYPLIAKCGFNFTSLKKMAVGMVLASMAFVVAAIVQVEIDKTLPVFPKGNEVQIKVLNIGNNTMNISLPGEMVTLGPMSQTNAFMTFDVNKLTRINISSPGSPVTAVTDDFKQGQRHTLLVWAPNHYQVVKDGLNQKPEKGENGIRFVNTFNELITITMSGKVYANISSYNASTYQFFPSGIKGFTISSTEIPPQCQPNFNTFYLEFGSAYTYIVQRKNDSCPEVKVFEDISANTVNMALQIPQYFLLTCGEVVFSVTGLEFSYSQAPSNMKSVLQAGWLLTVAVGNIIVLIVAGAGQFSKQWAEYILFAALLLVVCVIFAIMARFYTYINPAEIEAQFDEDEKKNRLEKSNPYFMSGANSQKQM

SEQ ID NO: 771234 - protein, 324 aa, Homo sapiens
MDQWGVYFNPVLVSFCQSFFGYPLSIFFIVVNEFCERFSYYGMRAILILYFTNFISWDDNLSTAIYHTFVALCYLTPILGALIADSWLGKFKTIVSLSIVYTIGQAVTSVSSINDLTDHNHDGTPDSLPVHVVLSLIGLALIALGTGGIKPCVSAFGGDQFEEGQEKQRNRFFSIFYLAINAGSLLSTIITPMLRGKRYLKGTSVGLFLVRPSPCLLRFVLFFPSALFSSCQLHAGMHVGIWSKCFLPCEFHLLFVLFKSLIPVTTGESKPSLAWASIFLNCYSCKVMLVVRGKRQERCLGSQAGGRSCHFSLQALLPSDISVT

SEQ ID NO: 771235 - protein, 141 aa, Homo sapiens
MAPKVFRQYWDIPDGTDCHRKAYSTTSIASVAGLTAAAYRVTLNPPGTFLEGVAKVGQYTFTAAAVGAVFGLTTCISAHVREKPDDPLNYFLGGCAGGLTLGARTHNYGIGAAACVYFGIAASLVKMGRLEGWEVFAKPKV

SEQ ID NO: 771236 - protein, 141 aa, Homo sapiens; identical to SEQ ID NO: 771235

SEQ ID NO: 771237 - protein, 141 aa, Homo sapiens; identical to SEQ ID NO: 771235

SEQ ID NO: 771238 - protein, 141 aa, Homo sapiens; identical to SEQ ID NO: 771235

SEQ ID NO: 771239 - protein, 141 aa, Homo sapiens; identical to SEQ ID NO: 771235

SEQ ID NO: 771240 - protein, 119 aa, Homo sapiens
MRGLALASMGKGETETHRCVTMARCPALPQPQLGAARCPRRGKSVWGGMRTHSLGSCWEATWTPASLCASVSTSPESRALFLSDLIPEESVLSGVSVWLPGWAPARAWSVLVRPSPTRA

SEQ ID NO: 771241 - protein, 123 aa, Homo sapiens
MAPKVFRQYWDIPDGTDCHRKAYSTTSIASVAGLTAAAYRVTLNPPGTFLEGVAKVGQYTFTAAAVGAVFGLTTCISAHVREKPDDPLNYFLGGCAGGLTLGARSEVAPSPPPPSSQPGQNDP

SEQ ID NO: 771242 - protein, 146 aa, Homo sapiens
GRVGRRTRGSTHASGDIPDGTDCHRKAYSTTSIASVAGLTAAAYRVTLNPPGTFLEGVAKVGQYTFTAAAVGAVFGLTTCISAHVREKPDDPLNYFLGGCAGGLTLGARTHNYGIGAAACVYFGIAASLVKMGRLEGWEVFAKPKV

SEQ ID NO: 771243 - protein, 106 aa, Homo sapiens
LHPDTGSERPRGSCCARLEALALPVYPAAAVGAVFGLTTCISAHVREKPDDPLNYFLGGCAGGLTLGARTHNYGIGAAACVYFGIAASLVKMGRLEGWEVFAKPKV

SEQ ID NO: 771244 - protein, 77 aa, Homo sapiens
ADAGGEAKHGPDSSCSERVLSNLSHYFLGGCAGGLTLGARTHNYGIGAAACVYFGIAASLVKMGRLEGWEVFAKPKV

SEQ ID NO: 771245 - protein, 141 aa, Homo sapiens; identical to SEQ ID NO: 771235

SEQ ID NO: 771246 - protein, 141 aa, Homo sapiens; identical to SEQ ID NO: 771235

SEQ ID NO: 771247 - protein, 113 aa, Homo sapiens
MFPSGLTAAAYRVTLNPPGTFLEGVAKVGQYTFTAAAVGAVFGLTTCISAHVREKPDDPLNYFLGGCAGGLTLGARTHNYGIGAAACVYFGIAASLVKMGRLEGWEVFAKPKV

SEQ ID NO: 771248 - protein, 117 aa, Homo sapiens
TASLLCLAGLTAAAYRVTLNPPGTFLEGVAKVGQYTFTAAAVGAVFGLTTCISAHVREKPDDPLNYFLGGCAGGLTLGARTHNYGIGAAACVYFGIAASLVKMGRLEGWEVFAKPKV

SEQ ID NO: 771249 - protein, 80 aa, Homo sapiens
PGRAIPGEVQKKVTKIIFGFKHPTMEMLKPMSFKSFSSPSRGPSAYMGHRGGHLMYSCLVPTSALPPGGHRHHCCCLSTV

SEQ ID NO: 771250 - protein, 281 aa, Homo sapiens
MQQPFNYPYPQIYWVDSSASSPWAPPGTVLPCPTSVPRRPGQRRPPPPPPPPPLPPPPPPPPLPPLPLPPLKKRGNHSTGLCLLVMFFMVLVALVGLGLGMFQLFHLQKELAELRESTSQMHTASSLEKQIGHPSPPPEKKELRKVAHLTGKSNSRSMPLEWEDTYGIVLLSGVKYKKGGLVINETGLYFVYSKVYFRGQSCNNLPLSHKVYMRNSKYPQDLVMMEGKMMSYCTTGQMWARSSYLGAVFNLTSADHLYVNVSELSLVNFEESQTFFGLYKL

SEQ ID NO: 771251 - protein, 124 aa, Homo sapiens [sequence omitted]

SEQ ID NO: 771252 - protein, 235 aa, Homo sapiens
HTRIHSGEKPYKCNECSKTFRLRSYLASHRRVHSGEKPYKCNECSKTFSQRSYLHCHRRLHSGEKPYKCNECGKTFSHKPSLVHHRRLHTGEKSYKCTVCDKAFVRNSYLARHTRIHTAEKPYKCNECGKAFNQQSQLSLHHRIHAGEKLYKCETCDKVFSRKSHLKRHRRIHPGKKPYKCKVCDKTFGSDSHLKQHTGLHTGEKPYKCNECGKAFSKQSTLIHHQAVHGVGKLD

SEQ ID NO: 771253 - protein, 75 aa, Homo sapiens
CRCSARYVNLYGASVCTIPQCCRQTSWIVFGTSVSQSSPADKRAWGGATDGGKVPAGRGGAADEGRGLPVAVGSS

SEQ ID NO: 771254 - protein, 189 aa, Homo sapiens
MEFVPGGSISSIINRFGPLPEMVFCKYTKQILQGVAYLHENCVVHRDIKGNNVMLMPTGIIKLIDFGCARRLAWAGLNGTHSDMLKSMHGTPYWMAPEVINESGYGRKSDIWSIGCTVFEMATGKPPLASMDRMAAMFYIGAHRGLMPPLPDHFSENAADFVRMCLTRDQHERPSALQLLKHSFLERSH

SEQ ID NO: 771255 - protein, 168 aa, Homo sapiens
MEFVPGGSISSIINRFGPLPEMVFCKYTKQILQGVAYLHENCVVHRDIKGNNVMLMPTGIIKLIDFGCARRLAWAGLNGTHSDMLKSMHGTPYWMAPEVINESGYGRKSDIWSIGCTVFEMATGKPPLASMDRMAAMFYIGAHRGLMPPLPDHFSENAADFVRMCLTR

SEQ ID NO: 771256 - protein, 277 aa, Homo sapiens
VRAQTVLACAEQGGVSERNAQLKREVGSRPGHLPGDHMARCRHHSGYLADDEASHSMCSARVQLPKKPLVPEMRPACKPGRVPHPPSTCGSSALQGQRRNKRHPQPFGHFLDFLTESQVLDSLETVVEKATERMAAMKTEAGVPLVEVQDPVEVPSGGRRAHARPSLSTVHRHRVRPTLCTGHPNNYPSSSSSMSNCHSSLMAGCLGSHSRDSDLGAQGSLPPVRDKLLLEKNLKRLLQLEREGKGLSQSCSQRDSLLWDSLGSQTSFQWTQEQPLS

SEQ ID NO: 771257 - protein, 272 aa, Homo sapiens
GDPQVVSPPHAERNAQLKREVGSRPGHLPGDHMARCRHHSGYLADDEASHSMCSARVQLPKKPLVPEMRPACKPGRVPHPPSTCGSSALQGQRRNKRHPQPFGHFLDFLTESQVLDSLETVVEKATERMAAMKTEAGVPLVEVQDPVEVPSGGRRAHARPSLSTVHRHRVRPTLCTGHPNNYPSSSSSMSNCHSSLMAGCLGSHSRDSDLGAQGSLPPVRDKLLLEKNLKRLLQLEREGKGLSQSCSQRDSLLWDSLGSQTSFQWTQEQPLS

SEQ ID NO: 771258 - protein, 148 aa, Homo sapiens
MQTFPVAGALDPAILDTSSPQALYTVLLIVLVMMSLVFGKFVPVNWEPPQPLPFPKYLRCYRCLLETKELGCLLGSDICLTPAGSSCITLHKKNSSGSDVMVSDCRSKEQMSDCSNTRTSPVSGFWIFSQYCFLDFCNDPQNRGLYTP

SEQ ID NO: 771259 - protein, 148 aa, Homo sapiens; identical to SEQ ID NO: 771258

SEQ ID NO: 771260 - protein, 126 aa, Homo sapiens
PGRGRPTACPPRFTPQAPELRTTSPRVRSVCHSQRPMLKPSTSSAPSVSSDSVGVGGAGGVQVWRGGKKVQSLSLSLSLSLFLDSPGTQKRPEACLLTFFKGRPPGDMGTWGRSLHLSVPVRKAVG

SEQ ID NO: 771261 - protein, 54 aa, Homo sapiens
MPLRAAARELRWVPKRGIGKRDLTAAAAATRTGPVEAARAYASRGNDARQAAAA

SEQ ID NO: 771262 - protein, 338 aa, Homo sapiens
GGGFSESREGSSRVSAVQTGPSAKNLLSGFSQCLPGWMFGRVYAWPCGIAVADSQLSEGSITPSVSDGSWWRVLSRDVILTGPRAGCPGDRSLTSHQTMCLVNVTQEPEPLAPAPNYSQANNLLSNSPANSAWHRVQALDVDGAGLHPFSCPHCWSNRVKAMASNCTKWTTCCIYLFTGIPSDKYLSHPLLLTVDSRASTQGHVAGHRCNATALGLRPWPLNRTRIDDKGYAPVLSHGLVSISLSYVKLARRRTPQQLLGELTRQLMPFGPPSRRSGIPLTGRQPTHVSPYGNVGFLRHGRHESHGQAPPAGRQPLQVGPGVSETHTPFERRALQQDT

SEQ ID NO: 771263 - protein, 441 aa, Homo sapiens
MVPPKLHVLFCLCGCLAVVYPFDWQYINPVAHMKSSAWVNKIQVLMAAASFGQTKIPRGNGPYSVGCTDLMFDHTNKGTFLRLYYPSQDNDRLDTLWIPNKEYFWGLSKFLGTHWLMGNILRLLFGSMTTPANWNSPLRPGEKYPLVVFSHGLGAFRTLYSAIGIDLASHGFIVAAVEHRDRSASATYYFKDQSAAEIGDKSWLYLRTLKQEEETHIRNEQVRQRAKECSQALSLILDIDHGKPVKNALDLKFDMEQLKDSIDREKIAVIGHSFGGATVIQTLSEDQRFRCGIALDAWMFPLGDEVYSRIPQPLFFINSEYFQYPANIIKMKKCYSPDKERKMITIRGSVHQNFADFTFATGKIIGHMLKLKGDIDSNAAIDLSNKASLAFLQKHLGLHKDFDQWDCLIEGDDENLIPGTNINTTNQHIMLQNSSGIEKYN

SEQ ID NO: 771264 - protein, 441 aa, Homo sapiens; identical to SEQ ID NO: 771263

SEQ ID NO: 771265 - protein, 450 aa, Homo sapiens
RQAGGRALVVEGQAVSLRCRAVGDPEPVVHWVAPDGRLLGNSSRTRVRGDGTLDVTITTLRDSGTFTCIASNAAGEATAPVEVCVVPLPLMAPPPAAPPPLTEPGSSDIATPGRPGANDSAAERRLVAAELTSNSVLIRWPAQRPVPGIRMYQVQYNSSVDDSLVYRMIPSTSQTFLVNDLAAGRAYDLCVLAVYDDGATALPATRVVGCVQFTTAGDPAPCRPLRAHFLGGTMIIAIGGVIVASVLVFIVLLMIRYKVYGDGDSRRVKGSRSLPRVSHVCSQTNGAGTGAAQAPALPAQDHYEALREVESQAAPAVAVEAKAMEAETASAEPEVVLGRSLGGSATSLCLLPSEETSGEESRAAVGPRRSRSGALEPPTSAPPTLALVPGGAAARPRPQQRYSFDGDYGALFQSHSYPRRARRTKRHRSTLHSSLGNRARLCLRKKKRNI

SEQ ID NO: 771266 - protein, 157 aa, Homo sapiens
MESGFTSKDTYLSHFNPRDYLEKYYKFGSRHSAESQILKHLLKNLFKIFCLDGVKGDLLIDIGSGPTIYQLLSACESFKEIVVTDYSDQNLQELEKWLKKEPEAFDWSPVVTYVCDLEGNRVKGPEKEEKLRQAVKQVLKCDVTQSQPLGAVPFTPG

SEQ ID NO: 771267 - protein, 139 aa, Homo sapiens
MESGFTSKDTYLSHFNPRDYLEKYYKFGSRHSAESQILKHLLKIGSGPTIYQLLSACESFKEIVVTDYSDQNLQELEKWLKKEPEAFDWSPVVTYVCDLEGNRVKGPEKEEKLRQAVKQVLKCDVTQSQPLGAVPFTPG

SEQ ID NO: 771268 - protein, 157 aa, Homo sapiens; identical to SEQ ID NO: 771266

SEQ ID NO: 771269 - protein, 157 aa, Homo sapiens; identical to SEQ ID NO: 771266

SEQ ID NO: 771270 - protein, 157 aa, Homo sapiens; identical to SEQ ID NO: 771266

SEQ ID NO: 771271 - protein, 103 aa, Homo sapiens
MESGFTSKDTYLSHFNPRDYLEKYYKFGSRHSAESQILKHLLKIGSGPTIYQLLSACESFKEIVVTDYSDQNLQELEKWLKKEPEAFDWSPVVTYVCDLEGNR

SEQ ID NO: 771272 - protein, 110 aa, Homo sapiens
MESGFTSKDTYLSHFNPRDYLEKYYKFGSRHSAESQILKHLLKNLFKIFCLDGVKGDLLIDIGSGPTIYQLLSACESFKEIVVTDYSDQNLQELEKWLKKEPEAVPFTPG

SEQ ID NO: 771273 - protein, 126 aa, Homo sapiens
MESGFTSKDTYLSHFNPRDYLEKYYKFGSRHSAESQILKHLLKNLFKIFCLDGVKGDLLIDIGSGPTIYQLLSACESFKEIVVTDYSDQNLQELEKWLKKEPEAFDWSPVVTYDHGCAQEQLLHDW

SEQ ID NO: 771274 - protein, 157 aa, Homo sapiens; identical to SEQ ID NO: 771266

SEQ ID NO: 771275 - protein, 157 aa, Homo sapiens; identical to SEQ ID NO: 771266

SEQ ID NO: 771276 - protein, 157 aa, Homo sapiens; identical to SEQ ID NO: 771266

SEQ ID NO: 771277 - protein, 97 aa, Homo sapiens
HSRGSAITSALLSACESFKEIVVTDYSDQNLQELEKWLKKEPEAFDWSPVVTYVCDLEGNRVKGPEKEEKLRQAVKQVLKCDVTQSQPLGAVPLTPG

SEQ ID NO: 771278 - protein, 121 aa, Homo sapiens [sequence omitted]

SEQ ID NO: 771279 - protein, 172 aa, Homo sapiens
MESGFTSKDTYLSHFNPRDYLEKYYKFGSRHSAESQILKHLLKNLFKIFCLDGVKGDLLIDIGSGPTIYQLLSACESFKEIVVTDYSDQNLQELEKWLKKEPEAFDWSPVVTYVCDLEGNRVKGPEKEEKLRQAVKQVLKCDVMRAQHTVSGCRLPRPPPPTAGRSGTSAAY

SEQ ID NO: 771280 - protein, 121 aa, Homo sapiens [sequence omitted]

SEQ ID NO: 771281 - protein, 782 aa, Homo sapiens
MAPSAWAICWLLGGLLLHGGSSGPSPGPSVPRLRLSYRDLLSANRSAIFLGPQGSLNLQAMYLDEYRDRLFLGGLDALYSLRLDQAWPDPREVLWPPQPGQREECVRKGRDPLTECANFVRVLQPHNRTHLLACGTGAFQPTCALITVGHRGEHVLHLEPGSVESGRGRCPHEPSRPFASTFIDGELYTGLTADFLGREAMIFRSGGPRPALRSDSDQSLLHDPRFVMAARIPENSDQDNDKVYFFFSETVPSPDGGSNHVTVSRVGRVCVNDAGGQRVLVNKWSTFLKARLVCSVPGPGGAETHFDQLEDVFLLWPKAGKSLEVYALFSTVSAVFQGFAVCVYHMADIWEVFNGPFAHRDGPQHQWGPYGGKVPFPRPGVCPSKMTAQPGRPFGSTKDYPDEVLQFARAHPLMFWPVRPRHGRPVLVKTHLAQQLHQIVVDRVEAEDGTYDVIFLGTDSGSVLKVIALQAGGSAEPEEVVLEELQVFKVPTPITEMEISVKRQMLYVGSRLGVAQLRLHQCETYGTACAECCLARDPYCAWDGASCTHYRPSLGKRRFRRQDIRHGNPALQCLGQSQEEEAVGLVAATMVYGTEHNSTFLECLPKSPQAAVRWLLQRPGDEGPDQVKTDERVLHTERGLLFRRLSRFDAGTYTCTTLEHGFSQTVVRLALVVIVASQLDNLFPPEPKPEEPPARGGLASTPPKAWYKDILQLIGFANLPRVDEYCERVWCRGTTECSGCFRSRSRGKQARGKSWAGLELGKKMKSRVHAEHNRTPREVEAT

SEQ ID NO: 771282 - protein, 114 aa, Homo sapiens
ARWEALSLPSHLSPGAMVRKPSSTMWMETFSRYLLSANRSAIFLGPQGSLNLQAMYLDEYRDRLFLGGLDALYSLRLDQAWPDPREVLWPPQPGQREECVRKGRDPLVSAVGRD

SEQ ID NO: 771283 - protein, 78 aa, Homo sapiens
  misc_feature (8)..(9): Xaa can be any naturally occurring amino acid
FIVSPPRXXDMSNHAVAQTALRAFTLDSGLAGSRQGPLGSYSRKRREEEHKILSNEHLHLEKVDSFCQPHPTHGTVCY

SEQ ID NO: 771284 - protein, 36 aa, Homo sapiens
MKERDYGPEAQLHLEALGVPKPWATSPSALPGEDSY

SEQ ID NO: 771285 - protein, 138 aa, Homo sapiens
TAQQDQEFPKPQPPEAQAQGLQVLDTTQGPWGCHPAPLSWDACGSRNSRWPYFIFPLKNICLDHKFPIPGGLRHGINANWSQVFWELCHLLASEGIQVCCFQLWLIYQGPRPVFTNAAHPMHSGRDSDAFGAEGHPRL

SEQ ID NO: 771286 - protein, 178 aa, Homo sapiens
SLFASNVGSGHFIGLAGSGAATGISVSAYELNGLFSVLMLAWIFLPIYIAGQVTTMPEYLRKRFGGIRIPIILAVLYLFIYIFTKISVDMYAGAIFIQQSLHLDLYLAIVGLLAITAVYTVAGGLAAVIYTDALQTLIMLIGALTLMCYSFAAVGGMEGLKEKYFLALASNRSENSSC

SEQ ID NO: 771287 - protein, 140 aa, Homo sapiens
MLAWIFLPIYIAGQVTTMPEYLRKRFGGIRIPIILAVLYLFIYIFTKISVDMYAGAIFIQQSLHLDLYLAIVGLLAITAVYTVAGGLAAVIYTDALQTLIMLIGALTLMCYSFAAVGGMEGLKEKYFLALASNRSENSSC

SEQ ID NO: 771288 - protein, 113 aa, Homo sapiens [sequence omitted]

SEQ ID NO: 771289 - protein, 72 aa, Homo sapiens
NYLGDHGMWFWSSEEVPGWSRFSIDEPIEAMGVDEVAQEEGQVRDLGNLTTEGLEKEEEQRSRRKTRISGNL

SEQ ID NO: 771290 - protein, 321 aa, Homo sapiens
GVVTVGRRRRAAESERLNRPFSNLSQPRKNLWGIKSTAVRNIDGSINNINEDDEEDVVDLAANSLLNKLIHQSLVESSHRVEVLQKDPSSPLYSVKTFEELRLKEELLKGIYAMGFNRPSKIQEMALPMMLAHPPQNLIAQSQSGTGKTAAFVLAMLSRVNALELFPQCLCLAPTYELALQTGRVVEQMGKFCVDVQVMYAIRGNRIPRGTDITKQIIIGTPGTVLDWCFKLKLIDLTKIRVFVLDEADVMIDTQGFSDHSIRIQRALPSEWPNAPLFSNLEDSWVAPWLSKESLTLGYQFRQRGHRKIRKLALVSRKKYT

SEQ ID NO: 771291 - protein, 175 aa, Homo sapiens
RLTRSARGWRPGAERPRAPALAAALETGNGSGHASADCGNARDSWSPGLQRNALLPGLSFPDCITGIQWVPWRKGAEEAARPQLARDPHAPITPRGATMLPTAQIASADPAGGSGLDASFPPQTRRGHATYPLPAYCRPQTETVQPCALLRLPEVSASAGREHAARARAPTGSPP

SEQ ID NO: 771292 - protein, 291 aa, Homo sapiens
MVREQYTTATEGICIERPENQYVYKIGIYGWRKRCLYLFVLLLLIILVVNLALTIWILKVMWFSPAGMGHLCVTKDGLRLEGESEFLFPLYAKEIHSRVDSSLLLQSTQNVTVNARNSEGEVTGRLKVGPKMVEVQNQQFQINSNDGKPLFTVDEKEVVVGTDKLRVTGPEGALFEHSVETPLVRADPFQDLRLESPTRSLSMDAPRGVHIQAHAGKIEALSQMDILFHSSDGMLVLDAETVCLPKLVQGTWGPSGSSQSLYEICVCPDGKLYLSVAGVSTTCQEHSHICL

SEQ ID NO: 771293 - protein, 121 aa, Homo sapiens
RKMATSGGEEAAAAAPAPGTPATGADTTPGWEVAVRPLLSASYSAFEMKELPQLVASVIERYRAAALAGDAVVGGGDFEPDRLDPLSGPPPAPLRIPATATASGSRARGDWLAWVSLRQRM

SEQ ID NO: 771294 - protein, 337 aa, Homo sapiens
MLTLPFDESVVMPESQMCRKFSRECEDQKQIKKPESFSKQIVLRGKSIKRAPGEETEKEEEEEDREEEDENGLPRRRGLRKKKTTKLRLERVKFRRQEANARERNRMHGLNDALDNLRKVVPCYSKTQKLSKIETLRLAKNYIWALSEILRIGKRPDLLTFVQNLCKGLSQPTTNLVAGCLQLNARSFLMGQGGEAAHHTRSPYSTFYPPYHSPELTTPPGHGTLDNSKSMKPYNYCSAYESFYESTSPECASPQFEGPLSPPPINYNGIFSLKQEETLDYGKNYNYGMHYCAVPPRGPLGQGAMFRLPTDSHFPYDLHLRSQSLTMQDELNAVFHN

SEQ ID NO: 771295 - protein, 337 aa, Homo sapiens; identical to SEQ ID NO: 771294

SEQ ID NO: 771296 - protein, 337 aa, Homo sapiens; identical to SEQ ID NO: 771294

SEQ ID NO: 771297 - protein, 715 aa, Homo sapiens
MWRVLFLLSGLGGLRMDSNFDSLPVQITVPEKIRSIIKEGIESQASYKIVIEGKPYTVNLMQKNFLPHNFRVYSYSGTGIMKPLDQDFQNFCHYQGYIEGYPKSVVMVSTCTGLRGVLQFENVSYGIEPLESSVGFEHVIYQVKHKKADVSLYNEKDIESRDLSFKLQSEYNHMGSDTTVVAQKVFQLIGLTNAIFVSFNITIILSSLELWIDENKIATTGEANELLHTFLRWKTSYLVLRPHDVAFLLVYREKSNYVGATFQGKMCDANYAGGVVLHPRTISLESLAVILAQLLSLSMGITYDDINKCQCSGAVCIMNPEAIHFSGVKIFSNCSFEDFAHFISKQKSQCLHNQPRLDPFFKQQAVCGNAKLEAGEECDCGTEQDCALIGETCCDIATCRFKAGSNCAEGPCCENCLFMSKERMCRPSFEECDLPEYCNGSSASCPENHYVQTGHPCGLNQWICIDGVCMSGDKQCTDTFGKEVEFGPSECYSHLNSKTDVSGNCGISDSGYTQCEADNLQCGKLICKYVGKFLLQIPRATIIYANISGHLCIAVEFASDHADSQKMWIKDGTSCGSNKVCRNQRCVSSSYLGYDCTTDKCNDRGVCNNKKHCHCSASYLPPDCSVQSDLWPGGSIDSGNFPPVAIPARLPERRYIENIYHSKPMRWPFFLFIPFFIIFCVLIAIMVKVNFQRKKWRTEDYSSDEQPESESEPKG

SEQ ID NO: 771298 - protein, 735 aa, Homo sapiens
MWRVLFLLSGLGGLRMDSNFDSLPVQITVPEKIRSIIKEGIESQASYKIVIEGKPYTVNLMQKNFLPHNFRVYSYSGTGIMKPLDQDFQNFCHYQGYIEGYPKSVVMVSTCTGLRGVLQFENVSYGIEPLESSVGFEHVIYQVKHKKADVSLYNEKDIESRDLSFKLQSVEPQQDFAKYIEMHVIVEKQLYNHMGSDTTVVAQKVFQLIGLTNAIFVSFNITIILSSLELWIDENKIATTGEANELLHTFLRWKTSYLVLRPHDVAFLLVYREKSNYVGATFQGKMCDANYAGGVVLHPRTISLESLAVILAQLLSLSMGITYDDINKCQCSGAVCIMNPEAIHFSGVKIFSNCSFEDFAHFISKQKSQCLHNQPRLDPFFKQQAVCGNAKLEAGEECDCGTEQDCALIGETCCDIATCRFKAGSNCAEGPCCENCLFMSKERMCRPSFEECDLPEYCNGSSASCPENHYVQTGHPCGLNQWICIDGVCMSGDKQCTDTFGKEVEFGPSECYSHLNSKTDVSGNCGISDSGYTQCEADNLQCGKLICKYVGKFLLQIPRATIIYANISGHLCIAVEFASDHADSQKMWIKDGTSCGSNKVCRNQRCVSSSYLGYDCTTDKCNDRGVCNNKKHCHCSASYLPPDCSVQSDLWPGGSIDSGNFPPVAIPARLPERRYIENIYHSKPMRWPFFLFIPFFIIFCVLIAIMVKVNFQRKKWRTEDYSSDEQPESESEPKG

SEQ ID NO: 771299 - protein, 628 aa, Homo sapiens
MWRVLFLLSGLGGLRMDSNFDSLPVQITVPEKIRSIIKEGIESQASYKIVIEGKPYTVNLMQKNFLPHNFRVYSYSGTGIMKPLDQDFQNFCHYQGYIEGYPKSVVMVSTCTGLRGVLQFENVSYGIEPLESSVGFEHVIYQVKHKKADVSLYNEKDIESRDLSFKLQSVEPQQDFAKYIEMHVIVEKQLHPRTISLESLAVILAQLLSLSMGITYDDINKCQCSGAVCIMNPEAIHFSGVKIFSNCSFEDFAHFISKQKSQCLHNQPRLDPFFKQQAVCGNAKLEAGEECDCGTEQDCALIGETCCDIATCRFKAGSNCAEGPCCENCLFMSKERMCRPSFEECDLPEYCNGSSASCPENHYVQTGHPCGLNQWICIDGVCMSGDKQCTDTFGKEVEFGPSECYSHLNSKTDVSGNCGISDSGYTQCEADNLQCGKLICKYVGKFLLQIPRATIIYANISGHLCIAVEFASDHADSQKMWIKDGTSCGSNKVCRNQRCVSSSYLGYDCTTDKCNDRGVCNNKKHCHCSASYLPPDCSVQSDLWPGGSIDSGNFPPVAIPARLPERRYIENIYHSKPMRWPFFLFIPFFIIFCVLIAIMVKVNFQRKKWRTEDYSSDEQPESESEPKG

SEQ ID NO: 771300 - protein, 584 aa, Homo sapiens
MAGRRLNLRWALSVLCVLLMAETVSGTRGSSTGAHISPQFPASGVNQTPVVDCRKVCGLNVSDRCDFIRTNPDCHSDGGYLDYLEGIFCHFPPSLLPLAVTLYVSWLLYLFLILGVTAAKFFCPNLSAISTTLKLSHNVAGVTFLAFGNGAPDIFSALVAFSDPHTAGLALGALFGAGVLVTTVVAGGITILHPFMAASRPFFRDIVFYMVAVFLTFLMLFRGRVTLAWALGYLGLYVFYVVTVILCTWIYQRQRRGSLFCPMPVTPEILSDSEEDRVSSNTNSYDYGDEYRPLFFYQETTAQILVRALNPLDYMKWRRKSAYWKALKVFKLPVEFLLLLTVPVVDPDKDDQNWKRPLNCLHLVISPLVVVLTLQSGTYGVYEIGGLVPVWVVVVIAGTALASVTFFATSDSQPPRLHWLFAFLGFLTSALWINAAATEVVNILRSLGVVFRLSNTVLGLTLLAWGNSIGDAFSDFTLARQGYPRMAFSACFGGIIFNILVGVGLGCLLQISRSHTEVKLEPDGLLVWVLAGALGLSLVFSLVSVPLQCFQLSRVYGFCLLLFYLNFLVVALLTEFGVIHLKSM

SEQ ID NO: 771301 - protein, 528 aa, Homo sapiens
MAGRRLNLRWALSVLCVLLMAETVSGTRGSSTGAHISPQFPASGVNQTPVVDCRKVCGLNVSDRCDFIRTNPDCHSDGGYLDYLEGIFCHFPPSLLPLAVTLYVSWLLYLFLILGVTAAKFFCPNLSAISTTLKLSHNVAGVTFLAFGNGAPDIFSALVAFSDPHTAGLALGALFGYLGLYVFYVVTVILCTWIYQRQRRGSLFCPMPVTPEILSDSEEDRVSSNTNSYDYGDEYRPLFFYQETTAQILVRALNPLDYMKWRRKSAYWKALKVFKLPVEFLLLLTVPVVDPDKDDQNWKRPLNCLHLVISPLVVVLTLQSGTYGVYEIGGLVPVWVVVVIAGTALASVTFFATSDSQPPRLHWLFAFLGFLTSALWINAAATEVVNILRSLGVVFRLSNTVLGLTLLAWGNSIGDAFSDFTLARQGYPRMAFSACFGGIIFNILVGVGLGCLLQISRSHTEVKLEPDGLLVWVLAGALGLSLVFSLVSVPLQCFQLSRVYGFCLLLFYLNFLVVALLTEFGVIHLKSM

SEQ ID NO: 771302 - protein, 556 aa, Homo sapiens
MAETVSGTRGSSTGAHISPQFPASVPQVCGLNVSDRCDFIRTNPDCHSDGGYLDYLEGIFCHFPPSLLPLAVTLYVSWLLYLFLILGVTAAKFFCPNLSAISTTLKLSHNVAGVTFLAFGNGAPDIFSALVAFSDPHTAGLALGALFGAGVLVTTVVAGGITILHPFMAASRPFFRDIVFYMVAVFLTFLMLFRGRVTLAWALGYLGLYVFYVVTVILCTWIYQRQRRGSLFCPMPVTPEILSDSEEDRVSSNTNSYDYGDEYRPLFFYQETTAQILVRALNPLDYMKWRRKSAYWKALKVFKLPVEFLLLLTVPVVDPDKDDQNWKRPLNCLHLVISPLVVVLTLQSGTYGVYEIGGLVPVWVVVVIAGTALASVTFFATSDSQPPRLHWLFAFLGFLTSALWINAAATEVVNILRSLGVVFRLSNTVLGLTLLAWGNSIGDAFSDFTLARQGYPRMAFSACFGGIIFNILVGVGLGCLLQISRSHTEVKLEPDGLLVWVLAGALGLSLVFSLVSVPLQCFQLSRVYGFCLLLFYLNFLVVALLTEFGVIHLKSM

SEQ ID NO: 771303 - protein, 584 aa, Homo sapiens; identical to SEQ ID NO: 771300

SEQ ID NO: 771304 - protein, 264 aa, Homo sapiens
GVGDIGRGGVKLPVEFLLLLTVPVVDPDKDDQNWKRPLNCLHLVISPLVVVLTLQSGTYGVYEIGGLVPVWVVVVIAGTALASVTFFATSDSQPPRLHWLFAFLGFLTSALWINAAATEVVNILRSLGVVFRLSNTVLGLTLLAWGNSIGDAFSDFTLARQGYPRMAFSACFGGIIFNILVGVGLGCLLQISRSHTEVKLEPDGLLVWVLAGALGLSLVFSLVSVPLQCFQLSRVYGFCLLLFYLNFLVVALLTEFGVIHLKSM

SEQ ID NO: 771305 - protein, 584 aa, Homo sapiens; identical to SEQ ID NO: 771300

SEQ ID NO: 771306 - protein, 584 aa, Homo sapiens; identical to SEQ ID NO: 771300

SEQ ID NO: 771307 - protein, 540 aa, Homo sapiens
MAGRRLNLRWALSVLCVLLMAETVSGTRGSSTGAHISPQFPASGVNQTPVVDCRKVCGLNVSDRCDFIRTNPDCHSDGGYLDYLEGIFCHFPPSLLPLAVTLYVSWLLYLFLILGVTAAKFFCPNLSAISTTLKLSHNVAGVTFLAFGNGAPDIFSALVAFSDPHTAGLALGALFGAGVLVTTVVAGGITILHPFMAASRPFFRDIVFYMVAVFLTFLMLFRGRVTLAWALGYLGLYVFYVVTVILCTWIYQRQRRGSLFCPMPVTPEILSDSEEDRVSSNTNSYDYGDEYRPLFFYQETTAQILVRALNPLDYMKWRRKSAYWKALKVFKLPVEFLLLLTVPVVDPDKDDQNWKRPLNCLHLVISPLVVVLTLQSGTYGVYEIGGLVPVWVVVVIAGTALASVTFFATSDSQPPRLHWLFAFLGFLTSALWINAAATEVVNILRSLGVVFRLSNTVLGLTLLAWGNSIGDAFSDFTLARQGYPRMAFSACFGGIIFNILVGVGLGCLLQIPIAVLPAQQSLWLLPAPLLPELPCRGPPH

SEQ ID NO: 771308 - protein, 481 aa, Homo sapiens
MAGRRLNLRWALSVLCVLLMAETVSGTRGSSTGAHISPQFPASGVNQTPVVDCRKVCGLNVSDRCDFIRTNPDCHSDGGYLDYLEGIFCHFPPSLLPLAVTLYVSWLLYLFLILGVTAAKFFCPNLSAISTTLKLSHNVAGVTFLAFGNGAPDIFSALVAFSDPHTAGLALGALFGAGVLVTTVVAGGITILHPFMAASRPFFRDIVFYMVAVFLTFLMLFRGRVTLAWALGYLGLYVFYVVTVILCTWIYQRQRRGSLFCPMPVTPEILSDSEEDRVSSNTNSYDYGDEYRPLFFYQETTAQILVRALNPLDYMKWRRKSAYWKALKVFKLPVEFLLLLTVPVVDPDKDDQNWKRPLNCLHLVISPLVVVLTLQSGTYGVYEIGGLVPVWVVVVIAGTALASVTFFATSDSQPPRLHWLFAFLGFLTSALWINAAATEVVNILRSLGVVFRLSNTVLGLTLLAWGNSIGGDSGLGGVEWG

SEQ ID NO: 771309 - protein, 135 aa, Homo sapiens
VDDQGGWGKRLTTAGPSCSCADAFSDFTLARQGYPRMAFSACFGGIIFNILVGVGLGCLLQISRSHTEVKLEPDGLLVWVLAGALGLSLVFSLVSVPLQCFQLSRVYGFCLLLFYLNFLVVALLTEFGVIHLKSM

SEQ ID NO: 771310 - protein, 133 aa, Homo sapiens
RLPSALILGPLGLLALVLSPLSLFALILGPLCLFALVLGPFYLFGLVLSPLGLSALVLGPPPPFSPGFGVVSTFLPWEQGERGRKEGGRRGKRPGQAGGQECKTLSAMRCLQLTVSNAANLHDCLGQWMGLFQ

SEQ ID NO: 771311 - protein, 847 aa, Homo sapiens
MSKSFQQSSLSRDSQGHGRDLSAAGIGLLAAATQSLSMPASLGRMNQGTARLASLMNLGMSSSLNQQGAHSALSSASTSSHNLQSIFNIGSRGPLPLSSQHRGDADQASNILASFGLSARDLDELSRYPEDKITPENLPQILLQLKRRRTEEGPTLSYGRDGRSATREPPYRVPRDDWEEKRHFRRDSFDDRGPSLNPVLDYDHGSRSQESGYYDRMDYEDDRLRDGERCRDDSFFGETSHNYHKFDSEYERMGRGPGPLQERSLFEKKRGAPPSSNIEDFHGLLPKGYPHLCSICDLPVHSNKEWSQHINGASHSRRCQLLLEIYPEWNPDNDTGHTMGDPFMLQQSTNPAPGILGPPPPSFHLGGPAVGPRGNLGAGNGNLQGPRHMQKGRVETSRVVHIMDFQRGKNLRYQLLQLVEPFGVISNHLILNKINEAFIEMATTEDAQAAVDYYTTTPALVFGKPVRVHLSQKYKRIKKPEGKPDQKFDQKQELGRVIHLSNLPHSGYSDSAVLKLAEPYGKIKNYILMRMKSQAFIEMETREDAMAMVDHCLKKALWFQGRCVKVDLSEKYKKLVLRIPNRGIDLLKKDKSRKRSYSPDGKESPSDKKSKTDGSQKTESSTEGKEQEEKSGEDGEKDTKDDQTEQEPNMLLESEDELLVDEEEAAALLESGSSVGDETDLANLGDVASDGKKEPSDKAVKKDGSASAAAKKKLKKVDKIEELDQENEAALENGIKNEENTEPGAESSENADDPNKDTSENADGQSDENKDDYTIPDEYRIGPYQPNVPVGIDYVIPKTGFYCKLCSLFYTNEEVAKNTHCSSLPHYQKLKKFLNKLAEERRQKKET

SEQ ID NO: 771312 - protein, 847 aa, Homo sapiens; identical to SEQ ID NO: 771311

SEQ ID NO: 771313 - protein, 847 aa, Homo sapiens; identical to SEQ ID NO: 771311

SEQ ID NO: 771314 - protein, 847 aa, Homo sapiens; identical to SEQ ID NO: 771311

SEQ ID NO: 771315 - protein, 847 aa, Homo sapiens; identical to SEQ ID NO: 771311

SEQ ID NO: 771316 - protein, 847 aa, Homo sapiens; identical to SEQ ID NO: 771311

SEQ ID NO: 771317 - protein, 847 aa, Homo sapiens; identical to SEQ ID NO: 771311

SEQ ID NO: 771318 - protein, 895 aa, Homo sapiens
MSKSFQQSSLSRDSQGHGRDLSAAGIGLLAAATQSLSMPASLGRMNQGTARLASLMNLGMSSSLNQQGAHSALSSASTSSHNLQSIFNIGSRGPLPLSSQHRGDADQASNILASFGLSARDLDELSRYPEDKITPENLPQILLQLKRRRTEEGPTLSYGRDGRSATREPPYRVPRDDWEEKRHFRRDSFDDRGPSLNPVLDYDHGSRSQESGYYDRMDYEDDRLRDGERCRDDSFFGETSHNYHKFDSEYERMGRGPGPLQERSLFEKKRGAPPSSNIEDFHGLLPKGYPHLCSICDLPVHSNKEWSQHINGASHSRRCQLLLEIYPEWNPDNDTGHTMGDPFMLQQSTNPAPGILGPPPPSFHLGGPAVGPRGNLGAGNGNLQGPRHMQKGRVETSRVVHIMDFQRGKNLRYQLLQLVEPFGVISNHLILNKINEAFIEMATTEDAQAAVDYYTTTPALVFGKPVRVHLSQKYKRIKKPEGKPDQKFDQKQELGRVIHLSNLPHSGYSDSAVLKLAEPYGKIKNYILMRMKSQAFIEMETREDAMAMVDHCLKKALWFQGRCVKVDLSEKYKKLVLRIPNRGIDLLKKDKSRKRSYSPDGKESPSDKKSKTDGSQKTESSTEGKEQEEKSGEDGEKDTKDDQTEQEPNMLLESEDELLVDEEEAAALLESGSSVGDETDLANLGDVASDGKKEPSDKAVKKDGSASAAAKKKLKKRRFPGSMEGFVTLDEVGDEEDSELQKLRKSGMAFKSGDKNDDGLVEIKVDKIEELDQENEAALENGIKNEENTEPGAESSENADDPNKDTSENADGQSDENKDDYTIPDEYRIGPYQPNVPVGIDYVIPKTGFYCKLCSLFYTNEEVAKNTHCSSLPHYQKLKKFLNKLAEERRQKKET

SEQ ID NO: 771319 - protein, 866 aa, Homo sapiens
MSKSFQQSSLSRDSQGHGRDLSAAGIGLLAAATQSLSMPASLGRMNQGTARLASLMNLGMSSSLNQQGAHSALSSASTSSHNLQSIFNIGSRGPLPLSSQHRGDADQASNILASFGLSARDLDELSRYPEDKITPENLPQILLQLKRRRTEEGPTLSYGRDGRSATREPPYRVPRDDWEEKRHFRRDSFDDRGPSLNPVLDYDHGSRSQESGYYDRMDYEDDRLRDGERCRDDSFFGETSHNYHKFDSEYERMGRGPGPLQERSLFEKKRGAPPSSNIEDFHGLLPKGYPHLCSICDLPVHSNKEWSQHINGASHSRRCQLLLEIYPEWNPDNDTGHTMGDPFMLQQSTNPAPGILGPPPPSFHLGGPAVGPRGNLGAGNGNLQGPRHMQKGRVETSRVVHIMDFQRGKNLRYQLLQLVEPFGVISNHLILNKINEAFIEMATTEDAQAAVDYYTTTPALVFGKPVRVHLSQKYKRIKKPEGKPDQKFDQKQELGRVIHLSNLPHSGYSDSAVLKLAEPYGKIKNYILMRMKSQAFIEMETREDAMAMVDHCLKKALWFQGRCVKVDLSEKYKKLVLRIPNRGIDLLKKDKSRQKIFTLPGLGTRISNVHSTQHTSPKNHPLGNLAISPDTDGSQKTESSTEGKEQEEKSGEDGEKDTKDDQTEQEPNMLLESEDELLVDEEEAAALLESGSSVGDETDLANLGDVASDGKKEPSDKAVKKDGSASAAAKKKLKKVDKIEELDQENEAALENGIKNEENTEPGAESSENADDPNKDTSENADGQSDENKDDYTIPDEYRIGPYQPNVPVGIDYVIPKTGFYCKLCSLFYTNEEVAKNTHCSSLPHYQKLKKFLNKLAEERRQKKET

SEQ ID NO: 771320 - protein, 793 aa, Homo sapiens
MSKSFQQSSLSRDSQGHGRDLSAAGIGLLAAATQSLSMPASLGRMNQGTARLASLMNLGMSSSLNQQGAHSALSSASTSSHNLQSIFNIGSRGPLPLSSQHRGDADQASNILASFGLSARDLDELSRYPEDKITPENLPQILLQLKRRRTEEGPTLSYGRDGRSATREPPYRVPRDDWEEKRHFRRDSFDDRGPSLNPVLDYDHGSRSQESGYYDRMDYEDDRLRDGERCRDDSFFGETSHNYHKFDSEYERMGRGPGPLQERSLFEKKRGAPPSSNIEDFHGLLPKGYPHLCSICDLPVHSNKEWSQHINGASHSRRCQLLLEIYPEWNPDNDTGHTMGDPFMLQQSTNPAPGILGPPPPSFHLGGPAVGPRGNLGAGNGNLQGPRHMQKGRVETSRVVHIMDFQRGKNLRYQLLQLVEPFGVISNHLILNKINEAFIEMATTEDAQAAVDYYTTTPALVFGKPVRVHLSQKYKRIKKPEGKPDQKFDQKQELGRVIHLSNLPHSGYSDSAVLKLAEPYGKIKNYILMRMKSQAFIEMETREDAMAMVDHCLKKALWFQGRCVKVDLSEKYKKLVLRIPNRGIDLLKKDKSRKRSYSPDGKESPSDKKSKTDGSQKTESSTEGKEQEEKSGEDGEKDTKDDQTEQEPNMLLESEDELLVDEEEAAALLESGSSVGDETDLANLGDVASDGKKEPSDKAVKKDGSASAAAKKKLKKVDKIEELDQENEAALENGIKNEENTEPGAESSENADDPNKDTSENADGQSDENKDDYTIPDEYRIGPYQPNVPVGEI

SEQ ID NO: 771321 - protein, 300 aa, Homo sapiens
MSKSFQQSSLSRDSQGHGRDLSEKYKKLVLRIPNRGIDLLKKDKSRKRSYSPDGKESPSDKKSKTDGSQKTESSTEGKEQEEKSGEDGEKDTKDDQTEQEPNMLLESEDELLVDEEEAAALLESGSSVGDETDLANLGDVASDGKKEPSDKAVKKDGSASAAAKKKLKKVDKIEELDQENEAALENGIKNEENTEPGAESSENADDPNKDTSENADGQSDENKDDYTIPDEYRIGPYQPNVPVGIDYVIPKTGFYCKLCSLFYTNEEVAKNTHCSSLPHYQKLKKFLNKLAEERRQKKET

SEQ ID NO: 771322 - protein, 847 aa, Homo sapiens; identical to SEQ ID NO: 771311

SEQ ID NO: 771323 - protein, 847 aa, Homo sapiens; identical to SEQ ID NO: 771311

SEQ ID NO: 771324 - protein, 847 aa, Homo sapiens; identical to SEQ ID NO: 771311

SEQ ID NO: 771325 - protein, 835 aa, Homo sapiens
MSKSFQQSSLSRDSQGHGRDLSAAGIGLLAAATQSLSMPASLGRMNQGTARLASLMNLGMSSSLNQQGAHSALSSASTSSHNLQSIFNIGSRGPLPLSSQHRGDADQASNILASFGLSARDLDELSRYPEDKITPENLPQILLQLKRRRTEEGPTLSYGRDGRSATREPPYRVPRDDWEEKRHFRRDSFDDRGPSLNPVLDYDHGSRSQESGYYDRMDYEDDRLRDGERCRDDSFFGETSHNYHKFDSEYERMGRGPGPLQERSLFEKKRGAPPSSNIEDFHGLLPKGYPHLCSICDLPVHSNKEWSQHINGASHSRRCQLLLEIYPEWNPDNDTGHTMGDPFMLQQSTNPAPGILGPPPPSFHLGGPAVGPRGNLGAGNGNLQGPRHMQKGRVETSRVVHIMDFQRGKNLRYQLLQLVEPFGVISNHLILNKINEAFIEMATTEDAQAAVDYYTTTPALVFGKPVRVHLSQKYKRIKKPEGKPDQKFDQKQELGRVIHLSNLPHSGYSDSAVLKLAEPYGKIKNYILMRMKSQAFIEMETREDAMAMVDHCLKKALWFQGRCVKVDLSEKYKKLVLRIPNRGIDLLKKDKSRKRSYSPDGKESPSDKKSKTDGSQKTESSTEGKEQEEKSGEDGEKDTKDDQTEQEPNMLLESEDELLVDEEEAAALLESGSSVGDETDLANLGDVASDGKKEPSDKAVKKDGSASAAAKKKLKKVDKIEELDQENEAALENGIKNEENTEPGAESSENADDPNKDTSENADGQSDENKDDYTIPDEYRIGPYQPNVPVGIDYVIPKTGFYCKLCSLFYTNEEVAKNTHCSSLPHYQKLKTISE

SEQ ID NO: 771326 - protein, 640 aa, Homo sapiens
MSKSFQQSSLSRDSQGHGRDLSAAGIGLLAAATQSLSMPASLGRMNQGTARLASLMNLGMSSSLNQQGAHSALSSASTSSHNLQSIFNIGSRGPLPLSSQHRGDADQASNILASFGLSARDLDELSRYPEDKITPENLPQILLQLKRRRTEEGPTLSYGRDGRSATREPPYRVPRDDWEEKRHFRRDSFDDRGPSLNPVLDYDHGSRSQESGYYDRMDYEDDRLRDGERCRDDSFFGETSHNYHKFDSEYERMGRGPGPLQERSLFEKKRGAPPSSNIEDFHGLLPKGYPHLCSICDLPVHSNKEWSQHINGASHSRRCQLLLEIYPEWNPDNDTGHTMGDPFMLQQSTNPAPGILGPPPPSFHLGGPAVGPRGNLGAGNGNLQGPRHMQKGRVETSRVVHIMDFQRGKNLRYQLLQLVEPFGVISNHLILNKINEAFIEMATTEDAQAAVDYYTTTPALVFGKPVRVHLSQKYKRIKKPEGKPDQKFDQKQELGRVIHLSNLPHSGYSDSAVLKLAEPYGKIKNYILMRMKSQAFIEMETREDAMAMVDHCLKKALWFQGRCVKVDLSEKYKKLVLRIPNRGIDLLKKDKSRKRSYSPDGKESPSDKKSKSSSSDSRSILGSCSVWSSFVSFSPSSPDF

SEQ ID NO: 771327 - protein, 575 aa, Homo sapiens
MSKSFQQSSLSRDSQGHGRDLSAAGIGLLAAATQSLSMPASLGRMNQGTARLASLMNLGMSSSLNQQGAHSALSSASTSSHNLQSIFNIGSRGPLPLSSQHRGDADQASNILASFGLSARDLDELSRYPEDKITPENLPQILLQLKRRRTEEGPTLSYGRDGRSATREPPYRVPRDDWEEKRHFRRDSFDDRGPSLNPVLDYDHGSRSQESGYYDRMDYEDDRLRDGERCRDDSFFGETSHNYHKFDSEYERMGRGPGPLQERSLFEKKRGAPPSSNIEDFHGLLPKGYPHLCSICDLPVHSNKEWSQHINGASHSRRCQLLLEIYPEWNPDNDTGHTMGDPFMLQQSTNPAPGILGPPPPSFHLGGPAVGPRGNLGAGNGNLQGPRHMQKGRVETSRVVHIMDFQRGKNLRYQLLQLVEPFGVISNHLILNKINEAFIEMATTEDAQAAVDYYTTTPALVFGKPVRVHLSQKYKRIKKPEGKPDQKFDQKQELGRVIHLSNLPHSGYSDSAVLKLAEPYGKIKNYILMRMKSQLLLKWSPIRGLATISRGFLEIYKNPKYKKLIDAIDRKDHHC

SEQ ID NO: 771328 - protein, 421 aa, Homo sapiens
MSKSFQQSSLSRDSQGHGRDLSAAGIGLLAAATQSLSMPASLGRMNQGTARLASLMNLGMSSSLNQQGAHSALSSASTSSHNLQSIFNIGSRGPLPLSSQHRGDADQASNILASFGLSARDLDELSRYPEDKITPENLPQILLQLKRRRTEEGPTLSYGRDGRSATREPPYRVPRDDWEEKRHFRRDSFDDRGPSLNPVLDYDHGSRSQESGYYDRMDYEDDRLRDGERCRDDSFFGETSHNYHKFDSEYERMGRGPGPLQERSLFEKKRGAPPSSNIEDFHGLLPKGYPHLCSICDLPVHSNKEWSQHINGASHSRRCQLLLEIYPEWNPDNDTGHTMGDPFMLQQSTNPAPGILGPPPPSFHLGGPAVGPRGNLGAGNGNLQGPRHMQKGRVETSRVVHIMDVSNGGYNREGILAESDW

SEQ ID NO: 771329 - protein, 106 aa, Homo sapiens
MEKGVGMILFLVRPRITIINLTVSMREWDVVLAPYKRDLSLRKREALLQVAILKTSMDSYRRVIPICALYVICQFILIRSGVNISMEQVTVVDASFFLKCRSLKYL

SEQ ID NO: 771330 - protein, 847 aa, Homo sapiens; identical to SEQ ID NO: 771311

SEQ ID NO: 771331 - protein, 847 aa, Homo sapiens; identical to SEQ ID NO: 771311

SEQ ID NO: 771332 - protein, 559 aa, Homo sapiens
MLGAQWRRNQPSRAAEEWSQHINGASHSRRCQLLLEIYPEWNPDNDTGHTMGDPFMLQQSTNPAPGILGPPPPSFHLGGPAVGPRGNLGAGNGNLQGPRHMQKGRVETSRVVHIMDFQRGKNLRYQLLQLVEPFGVISNHLILNKINEAFIEMATTEDAQAAVDYYTTTPALVFGKPVRVHLSQKYKRIKKPEGKPDQKFDQKQELGRVIHLSNLPHSGYSDSAVLKLAEPYGKIKNYILMRMKSQAFIEMETREDAMAMVDHCLKKALWFQGRCVKVDLSEKYKKLVLRIPNRGIDLLKKDKSRKRSYSPDGKESPSDKKSKTDGSQKTESSTEGKEQEEKSGEDGEKDTKDDQTEQEPNMLLESEDELLVDEEEAAALLESGSSVGDETDLANLGDVASDGKKEPSDKAVKKDGSASAAAKKKLKKVDKIEELDQENEAALENGIKNEENTEPGAESSENADDPNKDTSENADGQSDENKDDYTIPDEYRIGPYQPNVPVGIDYVIPKTGFYCKLCSLFYTNEEVAKNTHCSSLPHYQKLKKFLNKLAEERRQKKET

SEQ ID NO: 771333 - protein, 791 aa, Homo sapiens
MSKSFQQSSLSRDSQGHGRDLSAAGIGLLAAATQSLSMPASLGRMNQGTARLASLMNLGMSSSLNQQGAHSALSSASTSSHNLQSIFNIGSRGPLPLSSQHRGDADQASNILASFGLSARDLDELSRYPEDKITPENLPQILLQLKRRRTEEGPTLSYGRDGRSATREPPYRVPRDDWEEKRHFRRDSFDDRGPSLNPVLDYDHGSRSQESGYYDRMDYEDDRLRDGERCRDDSFFGETSHNYHKFDSEYERMGRGPGPLQERSLFEKKRGAPPSSNIEDFHGLLPKGYPHLCSICDLPVHSNKEWSQHINGASHSRRCQLLLEIYPEWNPDNDTGHTMGDPFMLQQSTNPAPGILGPPPPSFHLGGPAVGPRGNLGAGNGNLQGPRHMQKGRVETSRVVHIMDFQRGKNLRYQLLQLVEPFGVISNHLILNKINEAFIEMATTEDAQAAVDYYTTTPALVFGKPVRVHLSQKYKRIKAFIEMETREDAMAMVDHCLKKALWFQGRCVKVDLSEKYKKLVLRIPNRGIDLLKKDKSRKRSYSPDGKESPSDKKSKTDGSQKTESSTEGKEQEEKSGEDGEKDTKDDQTEQEPNMLLESEDELLVDEEEAAALLESGSSVGDETDLANLGDVASDGKKEPSDKAVKKDGSASAAAKKKLKKVDKIEELDQENEAALENGIKNEENTEPGAESSENADDPNKDTSENADGQSDENKDDYTIPDEYRIGPYQPNVPVGIDYVIPKTGFYCKLCSLFYTNEEVAKNTHCSSLPHYQKLKKFLNKLAEERRQKKET

SEQ ID NO: 771334 - protein, 826 aa, Homo sapiens
MSKSFQQSSLSRDSQGHGRDLSAAGIGLLAAATQSLSMPASLGRMNQGTARLASLMNLGMSSSLNQQGAHSALSSASTSSHNLQSIFNIGSRGPLPLSSQHRGDADQASNILASFGLSARDLDELSRYPEDKITPENLPQILLQLKRRRTEEGPTLSYGRDGRSATREPPYRVPRDDWEEKRHFRRDSFDDRGPSLNPVLDYDHGSRSQESGYYDRMDYEDDRLRDGERCRDDSFFGETSHNYHKFDSEYERMGRGPGPLQERSLFEKKRGAPPSSNIEDFHGLLPKGYPHLCSICDLPVHSNKEWSQHINGASHSRRCQLLLEIYPEWNPDNDTGHTMGDPFMLQQSTNPAPGILGPPPPSFHLGGPAVGPRGNLGAGNGNLQGPRHMQKGRVETSRVVHIMDFQRGKNLRYQLLQLVEPFGVISNHLILNKINEAFIEMATTEDAQAAVDYYTTTPALVFGKPVRVHLSQKYKRIKKPEGKPDQKFDQKQELGRVIHLSNLPHSGYSDSAVLKLAEPYGKIKNYILMRMKSQAFIEMETREDAMAMVDHCLKKALWFQGRCVKVDLSEKYKKLVLRIPNRGIDLLKKDKSRKRSYSPDGKESPSDKKSKTDGSQKTESSTEGKEQEEKSGEDGEKDTKDDQTEQEPNMLLESEDELLVDEEEAAALLESGSSVGDETDLANLGDVASDGKKEPSDKAVKKDGSASAAAKKKLKKVDKIEELDQENEAALENGIKNEENADGQSDENKDDYTIPDEYRIGPYQPNVPVGIDYVIPKTGFYCKLCSLFYTNEEVAKNTHCSSLPHYQKLKKFLNKLAEERRQKKET

SEQ ID NO: 771335 - protein, 847 aa, Homo sapiens; identical to SEQ ID NO: 771311

SEQ ID NO: 771336 - protein, 819 aa, Homo sapiens
MSKSFQQSSLSRDSQGHGRDLSAAGIGLLAAATQSLSMPASLGRMNQGTARLASLMNLGMSSSLNQQGAHSALSSASTSSHNLQSIFNIGSRGPLPLSSQHRGDADQASNILASFGLSARDLDELSRYPEDKITPENLPQILLQLKRRRTEEGPTLSYGRDGRSATREPPYRVPRDDWEEKRHFRRDSFDDRGPSLNPVLDYDHGSRSQESGYYDRMDYEDDRLRDGERCRDDSFFGETSHNYHKFDSEYERMGRGPGPLQERSLFEKKRGAPPSSNIEDFHGLLPKGYPHLCSICDLPVHSNKEWSQHINGASHSRRCQLLLEIYPEWNPDNDTGHTMGDPFMLQQSTNPAPGILGPPPPSFHLGGPAVGPRGNLGAGNGNLQGPRHMQKGRVETSRVVHIMDFQRGKNLRYQLLQLVEPFGVISNHLILNKINEAFIEMATTEDAQAAVDYYTTTPALVFGKPVRVHLSQKYKRIKKPEGKPDQKFDQKQELGRVIHLSNLPHSGYSDSAVLKLAEPYGKIKNYILMRMKSQAFIEMETREDAMAMVDHCLKKALWFQGRCVKVDLSEKYKKLVLRIPNRGIDLLKKDKSRKRSYSPDGKESPSDKKSKTDGSQKTESSTEGKEQEEKSGEDGEKDTKDDQTEQEPNMLLESEDELLVDEEEAAALLESGSSVGDETDLANLGDVASDGKKEPSDKAVKKDGSASAAAKKKLKKVDKIEELDQENEAALENGIKNEENTEPGAESSENADDPNKDTSENADGQSDENKDDYTIPDEYRIGPYQPNVPVGIDYVIPKTGFYCKLCSLFYTFFKYNTDS

SEQ ID NO: 771337 - protein, 198 aa, Homo sapiens
MVEMADLLHGSHHTEYLGMIGKKKGTLEETDLANLGDVASDGKKEPSDKAVKKDGSASAAAKKKLKKVDKIEELDQENEAALENGIKNEENTEPGAESSENADDPNKDTSENADGQSDENKDDYTIPDEYRIGPYQPNVPVGIDYVIPKTGFYCKLCSLFYTNEEVAKNTHCSSLPHYQKLKKFLNKLAEERRQKKET

SEQ ID NO: 771338 - protein, 718 aa, Homo sapiens
MSKSFQQSSLSRDSQGHGRDLSAAGIGLLAAATQSLSMPASLGRMNQGTARLASLMNLGMSSSLNQQGAHSALSSASTSSHNLQSIFNIGSRGPLPLSSQHRGDADQASNILASFGLSARDLDELSRYPEDKITPENLPQILLQLKRRRTEEGPTLSYGRDGRSATREPPYRVPRDDWEEKRHFRRDSFDDRGPSLNPVLDYDHGSRSQESGYYDRMDYEDDRLRDGERCRDDSFFGETSHNYHKFDSEYERMGRGPGPLQERSLFEKKRGAPPSSNIEDFHGLLPKGYPHLCSICDLPVHSNKEWSQHINGASHSRRCQLLLEIYPEWNPDNDTGHTMGDPFMLQQSTNPAPGILGPPPPSFHLGGPAVGPRGNLGAGNGNLQGPRHMQKGRVETSRVVHIMDFQRGKNLRYQLLQLVEPFGVISNHLILNKINEAFIEMATTEDAQAAVDYYTTTPALVFGKPVRVHLSQKYKRIKKPEGKPDQKFDQKQELGRVIHLSNLPHSGYSDSAVLKLAEPYGKIKNYILMRMKSQAFIEMETREDAMAMVDHCLKKALWFQGRCVKVDLSEKYKKLVLRIPNRGIDLLKKDKSRKRSYSPDGKESPSDKKSKTDGSQKTESSTEGKEQEEKSGEDGEKDTKDDQTEQEPNMLLESEDELLVDEEEAAALLESGSSVGDETDLANLGDVASDGKKAVPADRSLMKECGPCMSMTLDKALR

SEQ ID NO: 771339 - protein, 586 aa, Homo sapiens
  misc_feature (583)..(583): Xaa can be any naturally occurring amino acid
MSKSFQQSSLSRDSQGHGRDLSAAGIGLLAAATQSLSMPASLGRMNQGTARLASLMNLGMSSSLNQQGAHSALSSASTSSHNLQSIFNIGSRGPLPLSSQHRGDADQASNILASFGLSARDLDELSRYPEDKITPENLPQILLQLKRRRTEEGPTLSYGRDGRSATREPPYRVPRDDWEEKRHFRRDSFDDRGPSLNPVLDYDHGSRSQESGYYDRMDYEDDRLRDGERCRDDSFFGETSHNYHKFDSEYERMGRGPGPLQERSLFEKKRGAPPSSNIEDFHGLLPKGYPHLCSICDLPVHSNKEWSQHINGASHSRRCQLLLEIYPEWNPDNDTGHTMGDPFMLQQSTNPAPGILGPPPPSFHLGGPAVGPRGNLGAGNGNLQGPRHMQKGRVETSRVVHIMDFQRGKNLRYQLLQLVEPFGVISNHLILNKINEAFIEMATTEDAQAAVDYYTTTPALVFGKPVRVHLSQKYKRIKKPEGKPDQKFDQKQELGRVIHLSNLPHSGYSDSAVLKLAEPYGKIKNYILMRMKSQAFIEMETREDAMAMVDHCLKKALWFQGRCVKVDLSEKYKKLVLRDPNRXHDY

SEQ ID NO: 771340 - protein, 325 aa, Homo sapiens
MSKSFQQSSLSRDSQGHGRDLSAAGIGLLAAATQSLSMPASLGRMNQGTARLASLMNLGMSSSLNQQGAHSALSSASTSSHNLQSIFNIGSRGPLPLSSQHRGDADQASNILASFGLSARDLDELSRYPEDKITPENLPQILLQLKRRRTEEGPTLSYGRDGRSATREPPYRVPRDDWEEKRHFRRDSFDDRGPSLNPVLDYDHGSRSQESGYYDRMDYEDDRLRDGERCRDDSFFGETSHNYHKFDSEYERMGRGPGPLQERSLFEKKRGAPPSSNIEDFHGLLPKGYPHLCSICDLPVHSNKEWSQHINGASHSRRCQLLLEM

SEQ ID NO: 771341 - protein, 146 aa, Homo sapiens
SAGVIIFSGVCNSVLTINATMPEPTKSAPAPKKGSKKAVTKAQKKDGKKRKRSRKESYSVYVYKVLKQVHPDTGISSKAMGIMNSFVNDIFERIAGEASRLAHYNKRSTITSREIQTAVRLLLPGELAKHAVSEGTKAVTKYTSSK

SEQ ID NO: 771342 - protein, 146 aa, Homo sapiens; identical to SEQ ID NO: 771341

SEQ ID NO: 771343 - protein, 146 aa, Homo sapiens; identical to SEQ ID NO: 771341

SEQ ID NO: 771344 - protein, 146 aa, Homo sapiens; identical to SEQ ID NO: 771341

SEQ ID NO: 771345 - protein, 97 aa, Homo sapiens
WTPLKDGLRLSAEPWLTFSKSELLLFIFRRCRDFGGGGGGENVSIPLLSLGNSKAKEADLLIPVPTLLFCPEEPSVGWRRCQVVEFEWSVGPFLVSL

SEQ ID NO: 771346 - protein, 106 aa, Homo sapiens
ARQPAKPPSSYIALITMAILQSPHKRLTLSGICAFISDRFPYYRRKFPAWQNSIRHNLSLNDCFVKIPREPGRPGKGNYWSLDPASQDMFDNGSFLRRRKRFQRHQ

SEQ ID NO: 771347 - protein, 107 aa, Homo sapiens [sequence omitted]

SEQ ID NO: 771348 - protein, 167 aa, Homo sapiens
LRTAHLPCSALNHQGSQNGDQRWEEHRRRCTQDLREEGDEETTNDVPHIQCGDGCDPQGLRDNSQFCLQRIHQGLIFYEKLLGSDIFTGEPSLLPDSPVGQLHASLLGLSQLLQPEGHHWETQQIPSLSPSQPWQRLLLRFKILRSLQAFVAVAARVFAHGAATLSP

SEQ ID NO: 771349 - protein, 189 aa, Homo sapiens
MLGSRAVMLLLLLPWTAQGRAVPGGSSPAWTQCQQLSQKLCTLAWSAHPLVGHMDLREEGDEETTNDVPHIQCGDGCDPQGLRDNSQFCLQRIHQGLIFYEKLLGSDIFTGEPSLLPDSPVGQLHASLLGLSQLLQPEGHHWETQQIPSLSPSQPWQRLLLRFKILRSLQAFVAVAARVFAHGAATLSP

SEQ ID NO: 771350 - protein, 149 aa, Homo sapiens
LNNKKAWGSKGPLMRWKDQSLLGTCKNKNMQLSQEGNPRVQEIELFFFFSFFLRQGLALSPRLECSSMISAHCNLHLLGSSESPASAPQVAGTKGMCQHARLVFVFLVETGFRHVGQADLELLTSDELPASAAQSVGVTTVSYQARPKR

SEQ ID NO: 771351 - protein, 93 aa, Homo sapiens
VLYQMFVSNCLQLFAPKGFRLARLSSWRVHAGLVSHSAVRPHQGALVERIIPHPLYSAQNHDYDVALLRLQTALNFSGSAVGEAKPDWGPGPC

SEQ ID NO: 771352 - protein, 457 aa, Homo sapiens
MSLMLDDQPPMEAQYAEEGPGPGIFRAEPGDQQHPISQAVCWRSMRRGCAVLGALGLLAGAGVGSWLLVLYLCPAASQPISGTLQDEEITLSCSEASAEEALLPALPKTVSFRINSEDFLLEAQVRDQPRWLLVCHEGWSPALGLQICWSLGHLRLTHHKGVNLTDIKLNSSQEFAQLSPRLGGFLEEAWQPRNNCTSGQVVSLRCSECGARPLASRIVGGQSVAPGRWPWQASVALGFRHTCGGSVLAPRWVVTAAHCMHSFRLARLSSWRVHAGLVSHSAVRPHQGALVERIIPHPLYSAQNHDYDVALLRLQTALNFSDTVGAVCLPAKEQHFPKGSRCWVSGWGHTHPSHTYSSDMLQDTVVPLFSTQLCNSSCVYSGALTPRMLCAGYLDGRADACQGDSGGPLVCPDGDTWRLVGVVSWGRGCAEPNHPGVYAKVAEFLDWIHDTAQDSLL

SEQ ID NO: 771353 - protein, 198 aa, Homo sapiens
MHSFRLARLSSWRVHAGLVSHSAVRPHQGALVERIIPHPLYSAQNHDYDVALLRLQTALNFSDTVGAVCLPAKEQHFPKGSRCWVSGWGHTHPSHTYSSDMLQDTVVPLFSTQLCNSSCVYSGALTPRMLCAGYLDGRADACQGDSGGPLVCPDGDTWRLVGVVSWGRGCAEPNHPGVYAKVAEFLDWIHDTAQDSLL

SEQ ID NO: 771354 - protein, 70 aa, Homo sapiens
PQPVGIQPASITAVTGSTFGEHLKEARGGGGFPRAHECGWTCRHAVMYPCSVCLCLHVHTSDAPVYVCQA

SEQ ID NO: 771355 - protein, 674 aa, Homo sapiens
MAFLSRTSPVAAASFQSRQAGGQRLHPASELPAAPAMAEHRSMDGRMEAATRGGSHLQAAAQTPPRPGPPSAPPPPPKEGHQEGLVELPASFRELLTFFCTNATIHGAIRLVCSRGNRLKTTSWGLLSLGALVALCWQLGLLFERHWHRPVLMAVSVHSERKLLPLVTLCDGNPRRPSPVLRHLELLDEFARENIDSLYNVNLSKGRAALSATVPRHEPPFHLDREIRLQRLSHSGSRVRVGFRLCNSTGGDCFYRGYTSGVAAVQDWYHFHYVDILALLPAAWEDSHGSQDGHFVLSCSYDGLDCQARQFRTFHHPTYGSCYTVDGVWTAQRPGITHGVGLVLRVEQQPHLPLLSTLAGIRVMVHGRNHTPFLGHHSFSVRPGTEATISIREDEVHRLGSPYGHCTAGGEGVEVELLHNTSYTRQACLVSCFQQLMVETCSCGYYLHPLPAGAEYCSSARHPAWGHCFYRLYQDLETHRLPCTSRCPRPCRESAFKLSTGTSRWPSAKSAGWTLATLGEQGLPHQSHRQRSSLAKINIVYQELNYRSVEEAPVYSVPQLLSAMGSLCSLWFGASVLSLLELLELLLDASALTLVLGGRRLRRAWFSWPRASPASGASSIKPEASQMPPPAGGTSDDPEPSGPHLPRVMLPGVLAGVSAEESWAGPQPLETLDT

SEQ ID NO: 771356 - protein, 699 aa, Homo sapiens
MAFLSRTSPVAAASFQSRQAGGQRLHPASELPAAPAMAEHRSMDGRMEAATRGGSHLQAAAQTPPRPGPPSAPPPPPKEGHQEGLVELPASFRELLTFFCTNATIHGAIRLVCSRGNRLKTTSWGLLSLGALVALCWQLGLLFERHWHRPVLMAVSVHSERKLLPLVTLCDGNPRRPSPVLRHLELLDEFARENIDSLYNVNLSKGRAALSATVPRHEPPFHLDREIRLQRLSHSGSRVRVGFRLCNSTGGDCFYRGYTSGVAAVQDWYHFHYVDILALLPAAWEDSHGSQDGHFVLSCSYDGLDCQARQFRTFHHPTYGSCYTVDGVWTAQRPGITHGGCQPLAGAGAGVQAGGLTPALGLPGVGLVLRVEQQPHLPLLSTLAGIRVMVHGRNHTPFLGHHSFSVRPGTEATISIREDEVHRLGSPYGHCTAGGEGVEVELLHNTSYTRQACLVSCFQQLMVETCSCGYYLHPLPAGAEYCSSARHPAWGHCFYRLYQDLETHRLPCTSRCPRPCRESAFKLSTGTSRWPSAKSAGWTLATLGEQGLPHQSHRQRSSLAKINIVYQELNYRSVEEAPVYSVPQLLSAMGSLCSLWFGASVLSLLELLELLLDASALTLVLGGRRLRRAWFSWPRASPASGASSIKPEASQMPPPAGGTSDDPEPSGPHLPRVMLPGVLAGVSAEESWAGPQPLETLDT

SEQ ID NO: 771357 - protein, 567 aa, Homo sapiens
MAFLSRTSPVAAASFQSRQAGGQRLHPASELPAAPAMAEHRSMDGRMEAATRGGSHLQAAAQTPPRPGPPSAPPPPPKEGHQEGLVELPASFRELLTFFCTNATIHGAIRLVCSRGNRLKTTSWGLLSLGALVALCWQLGLLFERHWHRPVLMAVSVHSERKLLPLVTLCDGNPRRPSPVLRHLELLDEFARENIDSLYNVNLSKGRAALSATVPRHEPPFHLDREIRLQRLSHSGSRVRVGFRLCNSTGGDCFYRGYTSGVAAVQDWYHFHYVDILALLPAAWEDSHGSQDGHFVLSCSYDGLDCQARQFRTFHHPTYGSCYTVDGVWTAQRPGITHGGCQPLAGAGAGVQAGGLTPALGLPGVGLVLRVEQQPHLPLLSTLAGIRVMVHGRNHTPFLGHHSFSVRPGTEATISIREDEVHRLGSPYGHCTAGGEGVEVELLHNTSYTRQACLVSCFQQLMVETCSCGYYLHPLPAGAEYCSSARHPAWGHWFYSSTGLETHASLLPPLPKGLQGRRIQALNGDLQVGFRKSAEMDSGQLVTRGADQSPTKTAGQSIRYGAQYVMR

SEQ ID NO: 771358 - protein, 674 aa, Homo sapiens; identical to SEQ ID NO: 771355

SEQ ID NO: 771359 - protein, 654 aa, Homo sapiens
LLASTLCSDGCAELGAPSPSQVHYGSDSSMSPKEGHQEGLVELPASFRELLTFFCTNATIHGAIRLVCSRGNRLKTTSWGLLSLGALVALCWQLGLLFERHWHRPVLMAVSVHSERKLLPLVTLCDGNPRRPSPVLRHLELLDEFARENIDSLYNVNLSKGRAALSATVPRHEPPFHLDREIRLQRLSHSGSRVRVGFRLCNSTGGDCFYRGYTSGVAAVQDWYHFHYVDILALLPAAWEDSHGSQDGHFVLSCSYDGLDCQARQFRTFHHPTYGSCYTVDGVWTAQRPGITHGGCQPLAGAGAGVQVRWPHTSPWPPRSRPGPQGWQQPHLPLLSTLAGIRVMVHGRNHTPFLGHHSFSVRPGTEATISIREDEVHRLGSPYGHCTAGGEGVEVELLHNTSYTRQACLVSCFQQLMVETCSCGYYLHPLPAGAEYCSSARHPAWGHCFYRLYQDLETHRLPCTSRCPRPCRESAFKLSTGTSRWPSAKSAGWTLATLGEQGLPHQSHRQRSSLAKINIVYQELNYRSVEEAPVYSVPQLLSAMGSLCSLWFGASVLSLLELLELLLDASALTLVLGGRRLRRAWFSWPRASPASGASSIKPEASQMPPPAGGTSDDPEPSGPHLPRVMLPGVLAGVSAEESWAGPQPLETLDT

SEQ ID NO: 771360 - protein, 98 aa, Homo sapiens
EGHQEGLVELPASFRELLTFFCTNATIHGAIRLVCSRGNRLKTTSWGLLSLGALVALCWQLGLLFERHWHRPVLMAVSVHSERKLLPLVTLCDGNPRR

SEQ ID NO: 771361 - protein, 98 aa, Homo sapiens
MAPVGHRFHLAFSCPNTCTFAKSFPPVAQMLFLCANCLRQSSPLANVGSFKEQMRLATHLGAHHSQCSVGRPCTPDVARAFSPSLKSWRAQHTLTHPG

SEQ ID NO: 771362 - protein, 105 aa, Homo sapiens
QEWWLTPVIPALEAEVEGSLEAQEFKTSLGNMAVSTSSKTLVGHGGACRQSQLLRKLWWEDHLSGGEEGVKAAVSHDHTTTLQPGQQRKTLSQKRKKEIKYVSVI

SEQ ID NO: 771363 - protein, 110 aa, Homo sapiens
MPPDLSIGLEDQHWDDDEQNGHEDAQNQGPDVQALGGGGIGLGPGHVANHLPVPRLHGVGECYEAQAAGVHEEGVEQGPDEHGRARRSRCGCGSRWTSGNRVLGRPHKAT

SEQ ID NO: 771364 - protein, 745 aa, Homo sapiens
  misc_feature (151)..(151): Xaa can be any naturally occurring amino acid
PSVSYQQPHRSEAVEAGRSGVKMAAAAVAAAAAAAAAASLQVLEMESMETAAAGSAGLAAEVRGSGTVDFGPGPGISAMEASGGDPGPEAEDFECSSHCSELSWRQNEQRRQGLFCDITLCFGGAGGREFRAHRSVLAAATEYFTPLAPSXGGGPPRGFFSPEVFPPPGPLFGRVEMRKWSSEPGPEPDTVEAVIEYMYTGRIRVSTGSVHEVLELADRFLLIRLKEFCGEFLKKKLHLSNCVAIHSLAHMYTLSQLALKAADMIRRNFHKVIQDEEFYTLPFHLIRDWLSDLEITVDSEEVLFETVLKWVQRNAEERERYFEELFKLLRLSQMKPTYLTRHVKPERLVANNEVCVKLVADAVERHALRAENIQSGTCQHPTSHVSLLPRYGQNMDVIMVIGGVSEGGDYLSECVGYFVDEDRWVNLPHIHNHLDGHAVAVTESYVYVAGSMEPGFAKTVERYNPNLNTWEHVCSLMTRKHSFGLTEVKGKLYSIGGHGNFSPGFKDVTVYNPELDKWHNLESAPKILRDVKALAIEDRFVYIAARTPVDRDTEDGLKAVITCYDTETRQWQDVESLPLIDNYCFFQMSVVNSNFYQTASCCPKSYCLENEEAVRKIASQVSDEILESLPPEVLSIEGAAICYYKDDVFIIGGWKNSDDIDKQYRKEAYRYCAERKRWMLLPPMPQPRCRATACHVRIPYRYLHGTQRYPMPQNLMWQKDRIRQMQEIHRHALNMRRVPSSQIEC

SEQ ID NO: 771365 - protein, 730 aa, Homo sapiens
PSVSYQQPHRSEAVEAGRSGVKMAAAAVAAAAAAAAAASLQVLEMESMETAAAGSAGLAAEVRGSGTVDFGPGPGISAMEASGGDPGPEAEDFECSSHCSELSWRQNEQRRQGLFCDITLCFGGAGGREFRAHRSVLAAATEYFTPLLSGQFSESRSGRVEMRKWSSEPGPEPDTVEAVIEYMYTGRIRVSTGSVHEVLELADRFLLIRLKEFCGEFLKKKLHLSNCVAIHSLAHMYTLSQLALKAADMIRRNFHKVIQDEEFYTLPFHLIRDWLSDLEITVDSEEVLFETVLKWVQRNAEERERYFEELFKLLRLSQMKPTYLTRHVKPERLVANNEVCVKLVADAVERHALRAENIQSGTCQHPTSHVSLLPRYGQNMDVIMVIGGVSEGGDYLSECVGYFVDEDRWVNLPHIHNHLDGHAVAVTESYVYVAGSMEPGFAKTVERYNPNLNTWEHVCSLMTRKHSFGLTEVKGKLYSIGGHGNFSPGFKDVTVYNPELDKWHNLESAPKILRDVKALAIEDRFVYIAARTPVDRDTEDGLKAVITCYDTETRQWQDVESLPLIDNYCFFQMSVVNSNFYQTASCCPKSYCLENEEAVRKIASQVSDEILESLPPEVLSIEGAAICYYKDDVFIIGGWKNSDDIDKQYRKEAYRYCAERKRWMLLPPMPQPRCRATACHVRIPYRYLHGTQRYPMPQNLMWQKDRIRQMQEIHRHALNMRRVPSSQIEC

SEQ ID NO: 771366 - protein, 550 aa, Homo sapiens
KLPESHGWSRQAVGAPRGAAANPGWGGVGWRGLLVVLSVLMSQARQGHRKEESDYSKDGQCSRQPERTLQPPGILALERQPARRSSRGGGTLSALTALHAGDISTECSMKGLCSTCQPWVRADAEDTAVGFQLSDYMRNIMYFGGTCQSPALPALVRPPAPPLQPSLDIKPFLPFPLDTAAAVNLFPNFNAMDPIQKAVINHTFGVPLPHRRKQIISCNICQLRFNSDSQAAAHYKGTKHAKKLKALEAMKNKQKSVTAKDSAKTTFTSITTNTINTSSDKTGGKKGAMKPCGLFLPFCTRDGTAGTPAISTTTTVEIRKSSVMTTEITSKVEKSPTTATGNSSCPSTETEEEKAKRLLYCSLCKVAVNSASQLEAHNSGTKHKTMLEARNGSGTIKAFPRAGVKGKGPVNKGNTGLQNKTFHCEICDVHVNSETQLKQHISSRRHKDRAAGKPPKPKYSPYNKLQKTAHPLGVKLVFSKEPSKPLAPRILPNPLAAAAAAAAVAVSSPFSLRTAPAATLFQTSALPPALLRPAPGPIRTAHTPVLFAPY

SEQ ID NO: 771367 - protein, 397 aa, Homo sapiens
KLPESHGWSRQAVGAPRGAAANPGWGGVGWRGLLVVLSVLMSQARQGHRKEESDYSKDGQCSRQPERTLQPPGILALERQPARRSSRGGGTLSALTALHAGDISTECSMKGLCSTCQPWVRADAEDTAVGFQLSDYMRNIMYFGGTCQSPALPALVRPPAPPLQPSLDIKPFLPFPLDTAAAVNLFPNFNAMDPIQKAVINHTFGVPLPHRRKQIISCNICQLRFNSDSQAAAHYKGTKHAKKLKALEAMKNKQKSVTAKDSAKTTFTSITTNTINTSSDKTGGKKGAMKPCGLFLPFCTRDGTAGTPAISTTTTVEIRKSSVMTTEITSKVEKSPTTATGNSSCPSTETEEEKAKRLLYCSLCKVAVNSASQLEAHNSGEMQRFLFCFNSSAIIFL

SEQ ID NO: 771368 - protein, 135 aa, Homo sapiens
KLPESHGWSRQAVGAPRGAAANPGWGGVGWRGLLVVLSVLMSQARQGHRKEESDYSKDGQCSRQPERTLQPPGILALERQPARRSSRGGGTLSALTALHAGDISTECSMKGLCSTCQPWVRADAEDTAVGFQLSD

SEQ ID NO: 771369 - protein, 531 aa, Homo sapiens
KLPESHGWSRQAVGAPRGAAANPGWGGVGWRGLLVVLSVLMSQARQGHRKEESDYSKDGQCSRQPERTLQPPGILALERQPARRSSRGGGTLSALTALHAGDISTECSMKGLCSTCQPWVRADAEDTAVGFQLSDYMRNIMYFGGTCQSPALPALVRPPAPPLQPSLDIKPFLPFPLDTAAAVNLFPNFNAMDPIQKAVINHTFGVPLPHRRKQIISCNICQLRFNSDSQAAAHYKGTKHAKKLKALEAMKNKQKSVTAKDSAKTTFTSITTNTINTSSDKTDGTAGTPAISTTTTVEIRKSSVMTTEITSKVEKSPTTATGNSSCPSTETEEEKAKRLLYCSLCKVAVNSASQLEAHNSGTKHKTMLEARNGSGTIKAFPRAGVKGKGPVNKGNTGLQNKTFHCEICDVHVNSETQLKQHISSRRHKDRAAGKPPKPKYSPYNKLQKTAHPLGVKLVFSKEPSKPLAPRILPNPLAAAAAAAAVAVSSPFSLRTAPAATLFQTSALPPALLRPAPGPIRTAHTPVLFAPY

SEQ ID NO: 771370 - protein, 378 aa, Homo sapiens
KLPESHGWSRQAVGAPRGAAANPGWGGVGWRGLLVVLSVLMSQARQGHRKEESDYSKDGQCSRQPERTLQPPGILALERQPARRSSRGGGTLSALTALHAGDISTECSMKGLCSTCQPWVRADAEDTAVGFQLSDYMRNIMYFGGTCQSPALPALVRPPAPPLQPSLDIKPFLPFPLDTAAAVNLFPNFNAMDPIQKAVINHTFGVPLPHRRKQIISCNICQLRFNSDSQAAAHYKGTKHAKKLKALEAMKNKQKSVTAKDSAKTTFTSITTNTINTSSDKTDGTAGTPAISTTTTVEIRKSSVMTTEITSKVEKSPTTATGNSSCPSTETEEEKAKRLLYCSLCKVAVNSASQLEAHNSGEMQRFLFCFNSSAIIFL

SEQ ID NO: 771371 - protein, 522 aa, Homo sapiens
MNSFFGTPAASWCLLESDVSSAPDKEAGRERRALSVQQRGGPAWSGSLEWSRQSAGDRRRLGLSRQTAKSSWSRSRDRTCCCRRAWWILVPAADRARRERFIMNEKWDTNSSENWHPIWNVNDTKHHLYSDINITYVNYYLHQPQVAAIFIISYFLIFFLCMMGNTVVCFIVMRNKHMHTVTNLFILNLAISDLLVGIFCMPITLLDNIIAGWPFGNTMCKISGLVQGISVAASVFTLVAIAVDRFQCVVYPFKPKLTIKTAFVIIMIIWVLAITIMSPSAVMLHVQEEKYYRVRLNSQNKTSPVYWCREDWPNQEMRKIYTTVLFANIYLAPLSLIVIMYGRIGISLFRAAVPHTGRKNQEQWHVVSRKKQKIIKMLLIVALLFILSWLPLWTLMMLSDYADLSPNELQIINIYIYPFAHWLAFGNSSVNPIIYGFFNENFRRGFQEAFQLQLCQKRAKPMEAYALKAKSHVLINTSNQLVQESTFQNPHGETLLYRKSAEKPQQELVMEELKETTNSSEI

SEQ ID NO: 771372 - protein, 433 aa, Homo sapiens
MFFFSVSSLLRFIMNEKWDTNSSENWHPIWNVNDTKHHLYSDINITYVNYYLHQPQVAAIFIISYFLIFFLCMMGNTVVCFIVMRNKHMHTVTNLFILNLAISDLLVGIFCMPITLLDNIIAGWPFGNTMCKISGLVQGISVAASVFTLVAIAVDRFQCVVYPFKPKLTIKTAFVIIMIIWVLAITIMSPSAVMLHVQEEKYYRVRLNSQNKTSPVYWCREDWPNQEMRKIYTTVLFANIYLAPLSLIVIMYGRIGISLFRAAVPHTGRKNQEQWHVVSRKKQKIIKMLLIVALLFILSWLPLWTLMMLSDYADLSPNELQIINIYIYPFAHWLAFGNSSVNPIIYGFFNENFRRGFQEAFQLQLCQKRAKPMEAYALKAKSHVLINTSNQLVQESTFQNPHGETLLYRKSAEKPQQELVMEELKETTNSSEI

SEQ ID NO: 771373 - protein, 294 aa, Homo sapiens
  misc_feature (14)..(14): Xaa can be any naturally occurring amino acid
FIFFLLGRGLKNKXKLRFQCVVYPFKPKLTIKTAFVIIMIIWVLAITIMSPSAVMLHVQEEKYYRVRLNSQNKTSPVYWCREDWPNQEMRKIYTTVLFANIYLAPLSLIVIMYGRIGISLFRAAVPHTGRKNQEQWHVVSRKKQKIIKMLLIVALLFILSWLPLWTLMMLSDYADLSPNELQIINIYIYPFAHWLAFGNSSVNPIIYGFFNENFRRGFQEAFQLQLCQKRAKPMEAYALKAKSHVLINTSNQLVQESTFQNPHGETLLYRKSAEKPQQELVMEELKETTNSSEI

SEQ ID NO: 771374 - protein, 304 aa, Homo sapiens
MCKISGLVQGISVAASVFTLVAIAVDRFQCVVYPFKPKLTIKTAFVIIMIIWVLAITIMSPSAVMLHVQEEKYYRVRLNSQNKTSPVYWCREDWPNQEMRKIYTTVLFANIYLAPLSLIVIMYGRIGISLFRAAVPHTGRKNQEQWHVVSRKKQKIIKMLLIVALLFILSWLPLWTLMMLSDYADLSPNELQIINIYIYPFAHWLAFGNSSVNPIIYGFFNENFRRGFQEAFQLQLCQKRAKPMEAYALKAKSHVLINTSNQLVQESTFQNPHGETLLYRKSAEKPQQELVMEELKETTNSSEI

SEQ ID NO: 771375 - protein, 423 aa, Homo sapiens
MFIMNEKWDTNSSENWHPIWNVNDTKHHLYSDINITYVNYYLHQPQVAAIFIISYFLIFFLCMMGNTVVCFIVMRNKHMHTVTNLFILNLAISDLLVGIFCMPITLLDNIIAGWPFGNTMCKISGLVQGISVAASVFTLVAIAVDRFQCVVYPFKPKLTIKTAFVIIMIIWVLAITIMSPSAVMLHVQEEKYYRVRLNSQNKTSPVYWCREDWPNQEMRKIYTTVLFANIYLAPLSLIVIMYGRIGISLFRAAVPHTGRKNQEQWHVVSRKKQKIIKMLLIVALLFILSWLPLWTLMMLSDYADLSPNELQIINIYIYPFAHWLAFGNSSVNPIIYGFFNENFRRGFQEAFQLQLCQKRAKPMEAYALKAKSHVLINTSNQLVQESTFQNPHGETLLYRKSAEKPQQELVMEELKETTNSSEI

SEQ ID NO: 771376 - protein, 423 aa, Homo sapiens; identical to SEQ ID NO: 771375

SEQ ID NO: 771377 - protein, 260 aa, Homo sapiens
MDVGAFTSGQIRAQRELTSSHHLELSPCLASGLTFQYVPSDETISSAESFSTMWKWILTHCASAFPHLPGCCCCCFLLLFLVSSVPVTCQALGQDMVSPEATNSSSSSFSSPSSAGRHVRSYNHLQGDVRWRKLFSFTKYFLKIEKNGKVSGTKKENCPYSILEITSVEIGVVAVKAINSNYYLAMNKKGKLYGSKEFNNDCKLKERIEENGYNTYASFNWQHNGRQMYVALNGKGAPRRGQKTRRKNTSAHFLPMVVHS

SEQ ID NO: 771378 - protein, 209 aa, Homo sapiens
IPAHGGTRPAPMAFALLRPVGAHVLYPDVRLLSEDEENRSESDASDQSFGCCEGPEAARRGPGPGGGRRAGGGGGAGPVVVVRQRQAANARERDRTQSVNTAFTALRTLIPTEPVDRKLSKIETLRLASSYIAHLANVLLLGDSADDGQPCFRAAGSAKGAVPAAPTRRQPRSICTFCLSNQRKGGGRRDLGGSCLKVRGVAPLRGPRR

SEQ ID NO: 771379 - protein, 401 aa, Homo sapiens
MQVSIACTEHNLKSRNGEDRLLSKQSSTAPNVVNAARAKFRTVAIIARSLGTFTPQHHISLKESTAKQTGMKYRNLGKSGLRVSCLGLGTWVTFGGQISDEVAERLMTIAYESGVNLFDTAEVYAAGKAEVILGSIIKKKGWRRSSLVITTKLYWGGKAETERGLSRKHIIEGLKGSLQRLQLEYVDVVFANRPDSNTPMEEIVRAMTHVINQGMAMYWGTSRWSAMEIMEAYSVARQFNMIPPVCEQAEYHLFQREKVEVQLPELYHKIGVGAMTWSPLACGIISGKYGNGVPESSRASLKCYQWLKERIVSEEGRKQQNKLKDLSPIAERLGCTLPQLAVAWCLRNEGVSSVLLGSSTPEQLIENLGAIQVLPKMTSHVVNEIDNILRNKPYSKKDYRS

SEQ ID NO: 771380 - protein, 408 aa, Homo sapiens
MHLYKPACADIPSPKLGLPKSSESALKCRWHLAVTKTQPQAACKPVRPSGAAEQKYVEKFLRVHGISLQETTRAETGMAYRNLGKSGLRVSCLGLGTWVTFGGQISDEVAERLMTIAYESGVNLFDTAEVYAAGKAEVILGSIIKKKGWRRSSLVITTKLYWGGKAETERGLSRKHIIEGLKGSLQRLQLEYVDVVFANRPDSNTPMEEIVRAMTHVINQGMAMYWGTSRWSAMEIMEAYSVARQFNMIPPVCEQAEYHLFQREKVEVQLPELYHKIGVGAMTWSPLACGIISGKYGNGVPESSRASLKCYQWLKERIVSEEGRKQQNKLKDLSPIAERLGCTLPQLAVAWCLRNEGVSSVLLGSSTPEQLIENLGAIQVLPKMTSHVVNEIDNILRNKPYSKKDYRS

SEQ ID NO: 771381 - protein, 408 aa, Homo sapiens; identical to SEQ ID NO: 771380

SEQ ID NO: 771382 - protein, 408 aa, Homo sapiens; identical to SEQ ID NO: 771380

SEQ ID NO: 771383 - protein, 419 aa, Homo sapiens
MLAARTGAAGSQISEENTKLRRQSGFSVAGKDKSPKKASENAKDSSLSPSGESQLRARQMALLREVCMNWYLKLCDLVREHTTVCTTGMPHRNLGKSGLRVSCLGLGTWVTFGGQISDEVAERLMTIAYESGVNLFDTAEVYAAGKAEVILGSIIKKKGWRRSSLVITTKLYWGGKAETERGLSRKHIIEGLKGSLQRLQLEYVDVVFANRPDSNTPMEEIVRAMTHVINQGMAMYWGTSRWSAMEIMEAYSVARQFNMIPPVCEQAEYHLFQREKVEVQLPELYHKIGVGAMTWSPLACGIISGKYGNGVPESSRASLKCYQWLKERIVSEEGRKQQNKLKDLSPIAERLGCTLPQLAVAWCLRNEGVSSVLLGSSTPEQLIENLGAIQVLPKMTSHVVNEIDNILRNKPYSKKDYRS

SEQ ID NO: 771384 - protein, 401 aa, Homo sapiens; identical to SEQ ID NO: 771379

SEQ ID NO: 771385 - protein, 295 aa, Homo sapiens
MTIAYESGVNLFDTAEVYAAGKAEVILGSIIKKKGWRRSSLVITTKLYWGGKAETERGLSRKHIIEGLKGSLQRLQLEYVDVVFANRPDSNTPMEEIVRAMTHVINQGMAMYWGTSRWSAMEIMEAYSVARQFNMIPPVCEQAEYHLFQREKVEVQLPELYHKIGVGAMTWSPLACGIISGKYGNGVPESSRASLKCYQWLKERIVSEEGRKQQNKLKDLSPIAERLGCTLPQLAVAWCLRNEGVSSVLLGSSTPEQLIENLGAIQVLPKMTSHVVNEIDNILRNKPYSKKDYRS

SEQ ID NO: 771386 - protein, 151 aa, Homo sapiens
MHLYKPACADIPSPKLGLPKSSESALKCRWHLAVTKTQPQAACKPVRPSGAAEQKYVEKFLRVHGISLQETTRAETGMAYRNLGKSGLRVSCLGLGTWVTFGGQISDEVAERLMTIAYESGVNLFDTAEVYAAGKAEVILGSIIKKKGWRK

SEQ ID NO: 771387 - protein, 224 aa, Homo sapiens
MAQKEEAAVATEAASQNGEDLENLDDPEKLKELIELPPFEIVTGERLPANFFKFQFRNVEYSSGRNKTFLCYVVEAQGKGGQVQASRGYLEDEHAAAHAEEAFFNTILPAFDPALRYNVTWYVSSSPCAACADRIIKTLSKTKNLRLLILVGRLFMWEEPEIQAALKKLKEAGCKLRIMKPQDFEYVWQNFVEQEEGESKAFQPWEDIQENFLYYEEKLADILK

SEQ ID NO: 771388 - protein, 198 aa, Homo sapiens
MKQELIILSCPFVSLTYRERLPANFFKFQFRNVEYSSGRNKTFLCYVVEAQGKGGQVQASRGYLEDEHAAAHAEEAFFNTILPAFDPALRYNVTWYVSSSPCAACADRIIKTLSKTKNLRLLILVGRLFMWEEPEIQAALKKLKEAGCKLRIMKPQDFEYVWQNFVEQEEGESKAFQPWEDIQENFLYYEEKLADILK

SEQ ID NO: 771389 - protein, 224 aa, Homo sapiens; identical to SEQ ID NO: 771387

SEQ ID NO: 771390 - protein, 224 aa, Homo sapiens; identical to SEQ ID NO: 771387

SEQ ID NO: 771391 - protein, 151 aa, Homo sapiens
MWSTVPGGTRPSSAMWLKHRHAAAHAEEAFFNTILPAFDPALRYNVTWYVSSSPCAACADRIIKTLSKTKNLRLLILVGRLFMWEEPEIQAALKKLKEAGCKLRIMKPQDFEYVWQNFVEQEEGESKAFQPWEDIQENFLYYEEKLADILK

SEQ ID NO: 771392 - protein, 254 aa, Homo sapiens
MASLLKVDQEVKLKVDSFRERITSEAEDLVANFFPKKLLELDSFLKEPILNIHDLTQIHSDMNLPVPDPILLTNSHDGLDGPTYKKRRLDECEEAFQGTKVFVMPNGMLKSNQQLVDIIEKVKPEIRLLIEKCNTVKMWVQLLIPRIEDGNNFGVSIQEETVAELRTVESEAASYLDQISRYYITRAKLVSKIAKYPHVEDYRRTVTEIDEKEYISLRLIISELRNQYVTLHDMILKNIEKIKRPRSSNAETLY

SEQ ID NO: 771393 - protein, 342 aa, Homo sapiens
  misc_feature (17)..(17): Xaa can be any naturally occurring amino acid
HYRRSIPTGRGKHCAWXEVVVLSERASRQQAAGGRADGTEGGSERAVSKPARAVGSRGQPRFLRSLRPPPWSPQRLRCPEDRTRPGPAMASLLKVDQEVKLKVDSFRERITSEAEDLVANFFPKKLLELDSFLKEPILNIHDLTQIHSDMNLPVPDPILLTNSHDGLDGPTYKKRRLDECEEAFQGTKVFVMPNGMLKSNQQLVDIIEKVKPEIRLLIEKCNTVKMWVQLLIPRIEDGNNFGVSIQEETVAELRTVESEAASYLDQISRYYITRAKLVSKIAKYPHVEDYRRTVTEIDEKEYISLRLIISELRNQYVTLHDMILKNIEKIKRPRSSNAETLY

SEQ ID NO: 771394 - protein, 330 aa, Homo sapiens
IQLGTRPGGESERASRQQAAGGRADGTEGGSERAVSKPARAVGSRGQPRFLRSLRPPPWSPQRLRCPEDRTRPGPAMASLLKVDQEVKLKVDSFRERITSEAEDLVANFFPKKLLELDSFLKEPILNIHDLTQIHSDMNLPVPDPILLTNSHDGLDGPTYKKRRLDECEEAFQGTKVFVMPNGMLKSNQQLVDIIEKVKPEIRLLIEKCNTVKMWVQLLIPRIEDGNNFGVSIQEETVAELRTVESEAASYLDQISRYYITRAKLVSKIAKYPHVEDYRRTVTEIDEKEYISLRLIISELRNQYVTLHDMILKNIEKIKRPRSSNAETLY

SEQ ID NO: 771395 - protein, 323 aa, Homo sapiens
RPFSVYMHVCLGCVRDWTGTEGGSERAVSKPARAVGSRGQPRFLRSLRPPPWSPQRLRCPEDRTRPGPAMASLLKVDQEVKLKVDSFRERITSEAEDLVANFFPKKLLELDSFLKEPILNIHDLTQIHSDMNLPVPDPILLTNSHDGLDGPTYKKRRLDECEEAFQGTKVFVMPNGMLKSNQQLVDIIEKVKPEIRLLIEKCNTVKMWVQLLIPRIEDGNNFGVSIQEETVAELRTVESEAASYLDQISRYYITRAKLVSKIAKYPHVEDYRRTVTEIDEKEYISLRLIISELRNQYVTLHDMILKNIEKIKRPRSSNAETLY

SEQ ID NO: 771396 - protein, 254 aa, Homo sapiens; identical to SEQ ID NO: 771392

SEQ ID NO: 771397 - protein, 193 aa, Homo sapiens
MNLPVPDPILLTNSHDGLDGPTYKKRRLDECEEAFQGTKVFVMPNGMLKSNQQLVDIIEKVKPEIRLLIEKCNTVKMWVQLLIPRIEDGNNFGVSIQEETVAELRTVESEAASYLDQISRYYITRAKLVSKIAKYPHVEDYRRTVTEIDEKEYISLRLIISELRNQYVTLHDMILKNIEKIKRPRSSNAETLY

SEQ ID NO: 771398 - protein, 227 aa, Homo sapiens
MASLLKVDQEVKLKVDSFRERITSEAEDLVANFFPKKLLELDSFLKEPILNIHDLTQIHSDMNLPVPDPILLTNSHDGLDGPTYKKRRLDECEEAFQGTKVFVMPNGMLKSNQQLVDIIEKVKPEIRLLIEKCNTVKMWVQLLIPRIEDGNNFGVSIQEETVAELRTVESEAEDYRRTVTEIDEKEYISLRLIISELRNQYVTLHDMILKNIEKIKRPRSSNAETLY

SEQ ID NO: 771399 - protein, 97 aa, Homo sapiens
AWISRGYSAEGDSEAASYLDQISRYYITRAKLVSKIAKYPHVEDYRRTVTEIDEKEYISLRLIISELRNQYVTLHDMILKNIEKIKRPRSSNAETLY

SEQ ID NO: 771400 - protein, 254 aa, Homo sapiens; identical to SEQ ID NO: 771392

SEQ ID NO: 771401 - protein, 103 aa, Homo sapiens [sequence omitted]

SEQ ID NO: 771402 - protein, 103 aa, Homo sapiens [sequence omitted]

SEQ ID NO: 771403 - protein, 103 aa, Homo sapiens [sequence omitted]

SEQ ID NO: 771404 - protein, 171 aa, Homo sapiens
MEKWILKKIKYLQSGGLSASYYSYKVDSFRERITSEAEDLVANFFPKKLLELDSFLKEPILNIHDLTQIHSDMNLPVPDPILLTNSHDGLDGPTYKKRRLDECEEAFQGTKVFVMPNGMLKSNQQLVDIIEKVKPEIRLLIEKCNTQMWGTVLIPRLSGTLGGPRRTCSRR

SEQ ID NO: 771405 - protein, 210 aa, Homo sapiens
IQLGTRPGGESERASRQQAAGGRADGTEGGSERAVSKPARAVGSRGQPRFLRSLRPPPWSPQRLRCPEDRTRPGPAMASLLKVDQEVKLKVDSFRERITSEAEDLVANFFPKKLLELDSFLKEPILNIHDLTQIHSDMNLPVPDPILLTKLAIDWTLGLGLPQTLLNATADNGFGDLNGWVEGKRARFRKRGKPESGWLMAGLGREIGGV

SEQ ID NO: 771406 - protein, 254 aa, Homo sapiens; identical to SEQ ID NO: 771392

SEQ ID NO: 771407 - protein, 254 aa, Homo sapiens; identical to SEQ ID NO: 771392

SEQ ID NO: 771408 - protein, 267 aa, Homo sapiens
MASLLKVDQEVKLKVDSFRERITSEAEDLVANFFPKKLLELDSFLKEPILNIHDLTQIHSDMNLPVPDPILLTNSHDGLDGPTYKKRRLDECEEAFQGTKVFVMPNGMLKSNQQLVDIIEKVKPEIRLLIEKCNTPSGKGPHICFDLQVKMWVQLLIPRIEDGNNFGVSIQEETVAELRTVESEAASYLDQISRYYITRAKLVSKIAKYPHVEDYRRTVTEIDEKEYISLRLIISELRNQYVTLHDMILKNIEKIKRPRSSNAETLY

SEQ ID NO: 771409 - protein, 132 aa, Homo sapiens
SDTESAVIEKVNTVKMWVQLLIPRIEDGNNFGVSIQEETVAELRTVESEAASYLDQISRYYITRAKLVSKIAKYPHVEDYRRTVTEIDEKEYISLRLIISELRNQYVTLHDMILKNIEKIKRPRSSNAETLY

SEQ ID NO: 771410 - protein, 254 aa, Homo sapiens; identical to SEQ ID NO: 771392

SEQ ID NO: 771411 - protein, 254 aa, Homo sapiens; identical to SEQ ID NO: 771392

SEQ ID NO: 771412 - protein, 254 aa, Homo sapiens; identical to SEQ ID NO: 771392

SEQ ID NO: 771413 - protein, 505 aa, Homo sapiens
ELRAGRWEGGLTLGTQAVWGQFHQGPVPRIGEGGTSGAGGEGASALRPSLAPSGAPAGRKGSEKSVLPVLPPATCGPGGSPQAPGPQRRWPGRGQSLPLRVQPVLSLPQRRRCRLSSPSCCNRPTMDSPIQIFRGEPGPTCAPSACLPPNSSAWFPGWAEPDSNGSAGSEDAQLEPAHISPAIPVIITAVYSVVFVVGLVGNSLVMFVIIRYTKMKTATNIYIFNLALADALVTTTMPFQSTVYLMNSWPFGDVLCKIVISIDYYNMFTSIFTLTMMSVDRYIAVCHPVKALDFRTPLKAKIINICIWLLSSSVGISAIVLGGTKVREDVDVIECSLQFPDDDYSWWDLFMKICVFIFAFVIPVLIIIVCYTLMILRLKSVRLLSGSREKDRNLRRITRLVLVVVAVFVVCWTPIHIFILVEALGSTSHSTAALSSYYFCIALGYTNSSLNPILYAFLDENFKRCFRDFCFPLKMRMERQSTSRVRNTVQDPAYLRDIDGMNKPV

SEQ ID NO: 771414 - protein, 137 aa, Homo sapiens
MVTLHVRGRLTPDISNPKRLGAGRDPRQPGPHAAPGSASVHQGAGAAEPFSPDTLVSSENARSPPSCCSRLWRTRLYWCHMPAAGCAMEGGTCLFSRGSSGTGNFRDPSWAEPPRAEALWVASNSSLMGPASRPNGR

SEQ ID NO: 771415 - protein, 37 aa, Homo sapiens
MEWPPLNIPPCCTSDSFQQSQAQEAVVGTQAWHLLAA

SEQ ID NO: 771416 - protein, 82 aa, Homo sapiens
FMTKNPKANAIKTKINSWDLIKLKSFCMAKGTVSRVNRQPTEWVKIFTVYTSDKGLISRIYNKIKQISKKITNNPIKNRPRT

SEQ ID NO: 771417 - protein, 152 aa, Homo sapiens
RSAADGAFVSGEFCGGKLLRWCLVTDFPPDSCTTCSYSRRSTPGCSPGGERPCGLPRLPTPIARVLAALAASRSRAGGAPPGSSLIAHAPSGVPIQPSALFCPKVVLTRIHVAHPTPTGAELGIPAMPSQSTFTISLLSQHLACCVLTTLCL

SEQ ID NO: 771418 - protein, 96 aa, Homo sapiens
RSAADGAFVSGSRGLSEGEGSSVSLQRSRVLSAMKHVLNLYLLGVVLTLLSIFVRVMESLEGLLESPSPGTSWTTRSQLANTEPTKGLPDHPSRSM

SEQ ID NO: 771419 - protein, 134 aa, Homo sapiens
RSAADGAFVSGEFCGGKLLRWCLVTDFPPDSCTTCSYSRRSTPGCSPGGSRGLSEGEGSSVSLQRSRVLSAMKHVLNLYLLGVVLTLLSIFVRVMESLEGLLESPSPGTSWTTRSQLANTEPTKGLPDHPSRSM

SEQ ID NO: 771420 - protein, 96 aa, Homo sapiens; identical to SEQ ID NO: 771418

SEQ ID NO: 771421 - protein, 96 aa, Homo sapiens; identical to SEQ ID NO: 771418

SEQ ID NO: 771422 - protein, 96 aa, Homo sapiens; identical to SEQ ID NO: 771418

SEQ ID NO: 771423 - protein, 96 aa, Homo sapiens; identical to SEQ ID NO: 771418

SEQ ID NO: 771424 - protein, 613 aa, Homo sapiens
PASAERPYKCAECGKSFKGSSGLRYHLRDHTGERPYQCGECGKAFKRSSLLAIHQRVHTGLRAFTCGQCGLTFKWSSHYQYHLRLHSGERPYACGECGKAFRNTSCLRRHRHVHTGERPHACGVCGKSFAQTSNLRQHQRVHTGERPFRCPLCPKTFTHSSNLLLHQRTHSAERPFTCPICGRGFVMAAYLQRHLRTHAPANTPPSTTAPAAGPQPPAPLAAARAPPATQDVHVLPHLQATLSLEVAGGTAQAPSLGPAAPNSQTFLLVQTAQGLQLIPSSVQPPTPPPPPAPPKLILLPSSSAGAGGGRARQGPRAVGKAGQGAGVVWLPGPGGLGVQGAASAGASGTGQSLIVLQNVGGGEAGPQEMSGVQLQPLRPAPEVTTVQLQPAQEVTTVQLQPAQEVTTVQLQPAQEVTTVQLQPVAGQLSNSSGGAVATEAPNLLVVQSGAAEELLTGPGPGEAGDGEASTGVVQDVLFETLQTDEGLQSVLVLSGADGEQTRLCVQEVETLPPGLTEPPATGPPGQKLLIIRSAPATELLDSSNTGGGTATLQLLAPPPSGPASGPAGLPGAPASQMVQVVPAGAGPGVMTPQGLPSIQIVQTLPAVQLVHTF

SEQ ID NO: 771425 - protein, 556 aa, Homo sapiens
PASAERPYKCAECGKSFKGSSGLRYHLRDHTGERPYQCGECGKAFKRSSLLAIHQRVHTGLRAFTCGQCGLTFKWSSHYQYHLRLHSGERPYACGECGKAFRNTSCLRRHRHVHTGERPHACGVCGKSFAQTSNLRQHQRVHTGERPFRCPLCPKTFTHSSNLLLHGPRQPPKMSTSCPTIQATLSLEVAGGTAQAPSLGPAAPNSQTFLLVQTAQGLQLIPSSVQPPTPPPPPAPPKLILLPSSSAGAGGGRARQGPRAVGKAGQGAGVVWLPGPGGLGVQGAASAGASGTGQSLIVLQNVGGGEAGPQEMSGVQLQPLRPAPEVTTVQLQPAQEVTTVQLQPAQEVTTVQLQPAQEVTTVQLQPVAGQLSNSSGGAVATEAPNLLVVQSGAAEELLTGPGPGEAGDGEASTGVVQDVLFETLQTDEGLQSVLVLSGADGEQTRLCVQEVETLPPGLTEPPATGPPGQKLLIIRSAPATELLDSSNTGGGTATLQLLAPPPSGPASGPAGLPGAPASQMVQVVPAGAGPGVMTPQGLPSIQIVQTLPAVQLVHTF

SEQ ID NO: 771426 - protein, 34 aa, Homo sapiens
FAHPSFAASLKMGPPKSKAEKIKRSPMDKVLRFA

SEQ ID NO: 771427 - protein, 256 aa, Homo sapiens
SCPTPRVTRAGSLWTGGSARPRTAARPARGKEPVGVGGAVGGGDPPALGGPSPRRLLSGWGGGGAAEMSGQSLTDRITAAQHSVTGSAVSKTVCKATTHEIMGPKKKHLDYLIQCTNEMNVNIPQLADSLFERTTNSSWVVVFKSLITTHHLMVYGNERFIQYLASRNTLFNLSNFLDKSGLQGYDMSTFIRRYSRYLNEKAVSYRQVAFDFTKVKRGADGVMRTMNTEKLLKTVPIIQNQMDALLDFNVSYAFVI

SEQ ID NO: 771428 - protein, 612 aa, Homo sapiens
ILSDSAGDTSRFSLDWWQRAAPNRRQAGTGEGAGGGRGCGGGWGPSGSWGSQSPPAAERVGWWRSCRDVRPEPDGPNHCRPAQCHRLCRIQDSMQGHDPRDHGAQEKAPGLADGVMRTMNTEKLLKTVPIIQNQMDALLDFNVNSNELTNGVINAAFMLLFKDAIRLFAAYNEGIINLLEKYFDMKKNQCKEGLDIYKKFLTRMTRISEFLKVAEQVGIDRGDIPDLSQAPSSLLDALEQHLASLEGKKIKDSTAASRATTLSNAVSSLASTGLSLTKVDEREKQAALEEEQARLKALKEQRLKELAKKPHTSLTTAASPVSTSAGGIMTAPAIDIFSTPSSSNSTSKLPNDLLDLQQPTFHPSVHPMSTASQVASTWGDPFSATVDAVDDAIPSLNPFLTKSSGDVHLSISSDVSTFTTRTPTHEMFVGFTPSPVAQPHPSAGLNVDFESVFGNKSTNVIVDSGGFDELGGLLKPTVASQNQNLPVAKLPPSKLVSDDLDSSLANLVGNLGIGNGTTKNDVNWSQPGEKKLTGGSNCEPKVAPTTAWNAATMAPPVMAYPATTPTGMIGYGIPPQMGSVPVMTQPTLIYSQPVMRPPNPFGPVSGAQIQFM

SEQ ID NO: 771429 - protein, 719 aa, Homo sapiens
SCPTPRVTRAGSLWTGGSARPRTAARPARGKEPVGVGGAVGGGDPPALGGPSPRRLLSGWGGGGAAEMSGQSLTDRITAAQHSVTGSAVSKTVCKATTHEIMGPKKKHLDYLIQCTNEMNVNIPQLADSLFERTTNSSWVVVFKSLITTHHLMVYGNERFIQYLASRNTLFNLSNFLDKSGLQGYDMSTFIRRYSRYLNEKAVSYRQVAFDFTKVKRGADGVMRTMNTEKLLKTVPIIQNQMDALLDFNVNSNELTNGVINAAFMLLFKDAIRLFAAYNEGIINLLEKYFDMKKNQCKEGLDIYKKFLTRMTRISEFLKVAEQVGIDRGDIPDLSQAPSSLLDALEQHLASLEGKKIKDSTAASRATTLSNAVSSLASTGLSLTKVDEREKQAALEEEQARLKALKEQRLKELAKKPHTSLTTAASPVSTSAGGIMTAPAIDIFSTPSSSNSTSKLPNDLLDLQQPTFHPSVHPMSTASQVASTWGDPFSATVDAVDDAIPSLNPFLTKSSGDVHLSISSDVSTFTTRTPTHEMFVGFTPSPVAQPHPSAGLNVDFESVFGNKSTNVIVDSGGFDELGGLLKPTVASQNQNLPVAKLPPSKLVSDDLDSSLANLVGNLGIGNGTTKNDVNWSQPGEKKLTGGSNCEPKVAPTTAWNAATMAPPVMAYPATTPTGMIGYGIPPQMGSVPVMTQPTLIYSQPVMRPPNPFGPVSGAQIQFM

SEQ ID NO: 771430 - protein, 361 aa, Homo sapiens
SCPTPRVTRAGSLWTGGSARPRTAARPARGKEPVGVGGAVGGGDPPALGGPSPRRLLSGWGGGGAAEMSGQSLTDRITAAQHSVTGSAVSKTVCKATTHEIMGPKKKHLDYLIQCTNEMNVNIPQLADSLFERTTNSSWVVVFKSLITTHHLMVYGNERFIQYLASRNTLFNLSNFLDKSGLQGYDMSTFIRRYSRYLNEKAVSYRQVAFDFTKVKRGADGVMRTMNTEKLLKTVPIIQNQMDALLDFNVNSNELTNGVINAAFMLLFKDAIRLFAAYNEGIINLLEKYFDMKKNQCKEGLDIYKKFLTRMTRISEFLKVAEQVGIDRGDIPDLSQVSLSLKYQSTICCVQVVKSIKISNI

SEQ ID NO: 771431 - protein, 131 aa, Homo sapiens
MTLSPLFYILMGHNYWRVYPFCRKCKNGLAEEIKFMFKYYFFTAPGNKHFKHVLAADSALWNGCDPVSNGFEQKRGSDWQKSPEIDLCLGKVVCPEIELCLDRVACRARDDSVKPCLFLLLALCFLLCWLP

SEQ ID NO: 771432 - protein, 115 aa, Homo sapiens
LTFTTNFHSIALPVFGAKCLKIIAYLLLSTIYLFPLSPNPIPGRPLALHLHPSCLSCPRQGHLTSQLLYLLVMSVSCDSVLMLLATLSVLGMASSTALSSGAPPAGPVPLLSVLC

SEQ ID NO: 771433 - protein, 525 aa, Homo sapiens
MLRTILDAPQRLLKEGRASRQLVLVVVFVALLLDNMLFTVVVPIVPTFLYDMEFKEVNSSLHLGHAGSSPHALASPAFSTIFSFFNNNTVAVEESVPSGIAWMNDTASTIPPPATEAISAHKNNCLQGTGFLEEEITRVGVLFASKAVMQLLVNPFVGPLTNRIGYHIPMFAGFVIMFLSTVMFAFSGTYTLLFVARTLQGIGSSFSSVAGLGMLASVYTDDHERGRAMGTALGGLALGLLVGAPFGSVMYEFVGKSAPFLILAFLALLDGALQLCILQPSKVSPESAKGTPLFMLLKDPYILVAAGSICFANMGVAILEPTLPIWMMQTMCSPKWQLGLAFLPASVSYLIGTNLFGVLANKMGRWLCSLIGMLVVGTSLLCVPLAHNIFGLIGPNAGLGLAIGMVDSSMMPIMGHLVDLRHTSVYGSVYAIADVAFCMGFAIGPSTGGAIVKAIGFPWLMVITGVINIVYAPLCYYLRSPPAKEEKLAILSQDCPMETRMYATQKPTKEFPLGEDSDEEPDHEE

SEQ ID NO: 771434 - protein, 493 aa, Homo sapiens
MLRTILDAPQRLLKEGRASRQLVLVVVFVALLLDNMLFTVVVPIVPTFLYDMEFKEVNSSLHLGHAGSSPHALASPAFSTIFSFFNNNTVAVEESVPSGIAWMNDTASTIPPPATEAISAHKNNCLQGTGFLEEEITRVGVLFASKAVMQLLVNPFVGPLTNRIGYHIPMFAGFVIMFLSTVMFAFSGTYTLLFVARTLQGIGSSFSSVAGLGMLASVYTDDHERGRAMGTALGGLALGLLVGAPFGSVMYEFVGKSAPFLILAFLALLDGALQLCILQPSKVSPESAKGTPLFMLLKDPYILVAAGLAFLPASVSYLIGTNLFGVLANKMGRWLCSLIGMLVVGTSLLCVPLAHNIFGLIGPNAGLGLAIGMVDSSMMPIMGHLVDLRHTSVYGSVYAIADVAFCMGFAIGPSTGGAIVKAIGFPWLMVITGVINIVYAPLCYYLRSPPAKEEKLAILSQDCPMETRMYATQKPTKEFPLGEDSDEEPDHEE

SEQ ID NO: 771435 - protein, 559 aa, Homo sapiens
MLRTILDAPQRLLKEGRASRQLVLVVVFVALLLDNMLFTVVVPIVPTFLYDMEFKEVNSSLHLGHAGSSPHALASPAFSTIFSFFNNNTVAVEESVPSGIAWMNDTASTIPPPATEAISAHKNNCLQGTGFLEEEITRVGVLFASKAVMQLLVNPFVGPLTNRIGYHIPMFAGFVIMFLSTVMFAFSGTYTLLFVARTLQGIGSSFSSVAGLGMLASVYTDDHERGRAMGTALGGLALGLLVGAPFGSVMYEFVGKSAPFLILAFLALLDGALQLCILQPSKVSPESAKGTPLFMLLKDPYILVAAGSICFANMGVAILEPTLPIWMMQTMCSPKWQLGLAFLPASVSYLIGTNLFGVLANKMGRWLCSLIGMLVVGTSLLCATKLEVYMKPFSDVHNGKQRQLYSMKNETRSVCLVPLAHNIFGLIGPNAGLGLAIGMVDSSMMPIMGHLVDLRHTSVYGSVYAIADVAFCMGFAIGPSTGGAIVKAIGFPWLMVITGVINIVYAPLCYYLRSPPAKEEKLAILSQDCPMETRMYATQKPTKEFPLGEDSDEEPDHEE

SEQ ID NO: 771436 - protein, 1078 aa, Homo sapiens
MAFYSCCWVLLALTWHTSAYGPDQRAQKKGDIILGGLFPIHFGVAAKDQDLKSRPESVECIRYNFRGFRWLQAMIFAIEEINSSPALLPNLTLGYRIFDTCNTVSKALEATLSFVAQNKIDSLNLDEFCNCSEHIPSTIAVVGATGSGVSTAVANLLGLFYIPQVSYASSSRLLSNKNQFKSFLRTIPNDEHQATAMADIIEYFRWNWVGTIAADDDYGRPGIEKFREEAEERDICIDFSELISQYSDEEEIQHVVEVIQNSTAKVIVVFSSGPDLEPLIKEIVRRNITGKIWLASEAWASSSLIAMPQYFHVVGGTIGFALKAGQIPGFREFLKKVHPRKSVHNGFAKEFWEETFNCHLQEGAKGPLPVDTFLRGHEESGDRFSNSSTAFRPLCTGDENISSVETPYIDYTHLRISYNVYLAVYSIAHALQDIYTCLPGRGLFTNGSCADIKKVEAWQVLKHLRHLNFTNNMGEQVTFDECGDLVGNYSIINWHLSPEDGSIVFKEVGYYNVYAKKGERLFINEEKILWSGFSREVPFSNCSRDCLAGTRKGIIEGEPTCCFECVECPDGEYSDETDASACNKCPDDFWSNENHTSCIAKEIEFLSWTEPFGIALTLFAVLGIFLTAFVLGVFIKFRNTPIVKATNRELSYLLLFSLLCCFSSSLFFIGEPQDWTCRLRQPAFGISFVLCISCILVKTNRVLLVFEAKIPTSFHRKWWGLNLQFLLVFLCTFMQIVICVIWLYTAPPSSYRNQELEDEIIFITCHEGSLMALGFLIGYTCLLAAICFFFAFKSRKLPENFNEAKFITFSMLIFFIVWISFIPAYASTYGKFVSAVEVIAILAASFGLLACIFFNKIYIILFKPSRNTIEEVRCSTAAHAFKVAARATLRRSNVSRKRSSSLGGSTGSTPSSSISSKSNSEDPFPQPERQKQQQPLALTQQEQQQQPLTLPQQQRSQQQPRCKQKVIFGSGTVTFSLSFDEPQKNAMAHRNSTHQNSLEAQKSSDTLTRHQPLLPLQCGETDLDLTVQETGLQGPVGGDQRPEVEDPEELSPALVVSSSQSFVISGGGSTVTENVVNS

SEQ ID NO: 771437 - protein, 424 aa, Homo sapiens
MAFYSCCWVLLALTWHTSAYGPDQRAQKKGDIILGGLFPIHFGVAAKDQDLKSRPESVECIRYNFRGFRWLQAMIFAIEEINSSPALLPNLTLGYRIFDTCNTVSKALEATLSFVAQNKIDSLNLDEFCNCSEHIPSTIAVVGATGSGVSTAVANLLGLFYIPQVSYASSSRLLSNKNQFKSFLRTIPNDEHQATAMADIIEYFRWNWVGTIAADDDYGRPGIEKFREEAEERDICIDFSELISQYSDEEEIQHVVEVIQNSTAKVIVVFSSGPDLEPLIKEIVRRNITGKIWLASEAWASSSLIAMPQYFHVVGGTIGFALKAGQIPGFREFLKKVHPRKSVHNGFAKEFWEETFNCHLQEGAKGPLPVDTFLRGHEESGDRFSNSSTAFRPLCTGDENISSVETPYIDYTHLRISYNVYLAV

SEQ ID NO: 771438 - protein, 188 aa, Homo sapiens
MAFYSCCWVLLALTWHTSAYGPDQRAQKKGDIILGGLFPIHFGVAAKDQDLKSRPESVECIRYNFRGFRWLQAMIFAIEEINSSPALLPNLTLGYRIFDTCNTVSKALEATLSFVAQNKIDSLNLDEFCNCSEHIPSTIAVVGATGSGVSTAVANLLGLFYIPQVLKPSQTGHWEQDQKKQAWGCHAQ

SEQ ID NO: 771439 - protein, 1078 aa, Homo sapiens; identical to SEQ ID NO: 771436

SEQ ID NO: 771440 - protein, 1088 aa, Homo sapiens
MAFYSCCWVLLALTWHTSAYGPDQRAQKKGDIILGGLFPIHFGVAAKDQDLKSRPESVECIRYNFRGFRWLQAMIFAIEEINSSPALLPNLTLGYRIFDTCNTVSKALEATLSFVAQNKIDSLNLDEFCNCSEHIPSTIAVVGATGSGVSTAVANLLGLFYIPQVSYASSSRLLSNKNQFKSFLRTIPNDEHQATAMADIIEYFRWNWVGTIAADDDYGRPGIEKFREEAEERDICIDFSELISQYSDEEEIQHVVEVIQNSTAKVIVVFSSGPDLEPLIKEIVRRNITGKIWLASEAWASSSLIAMPQYFHVVGGTIGFALKAGQIPGFREFLKKVHPRKSVHNGFAKEFWEETFNCHLQEGAKGPLPVDTFLRGHEESGDRFSNSSTAFRPLCTGDENISSVETPYIDYTHLRISYNVYLAVYSIAHALQDIYTCLPGRGLFTNGSCADIKKVEAWQVLKHLRHLNFTNNMGEQVTFDECGDLVGNYSIINWHLSPEDGSIVFKEVGYYNVYAKKGERLFINEEKILWSGFSREPLTFVLSVLQVPFSNCSRDCLAGTRKGIIEGEPTCCFECVECPDGEYSDETDASACNKCPDDFWSNENHTSCIAKEIEFLSWTEPFGIALTLFAVLGIFLTAFVLGVFIKFRNTPIVKATNRELSYLLLFSLLCCFSSSLFFIGEPQDWTCRLRQPAFGISFVLCISCILVKTNRVLLVFEAKIPTSFHRKWWGLNLQFLLVFLCTFMQIVICVIWLYTAPPSSYRNQELEDEIIFITCHEGSLMALGFLIGYTCLLAAICFFFAFKSRKLPENFNEAKFITFSMLIFFIVWISFIPAYASTYGKFVSAVEVIAILAASFGLLACIFFNKIYIILFKPSRNTIEEVRCSTAAHAFKVAARATLRRSNVSRKRSSSLGGSTGSTPSSSISSKSNSEDPFPQPERQKQQQPLALTQQEQQQQPLTLPQQQRSQQQPRCKQKVIFGSGTVTFSLSFDEPQKNAMAHRNSTHQNSLEAQKSSDTLTRHQPLLPLQCGETDLDLTVQETGLQGPVGGDQRPEVEDPEELSPALVVSSSQSFVISGGGSTVTENVVNS

SEQ ID NO: 771441 - protein, 133 aa, Homo sapiens
KHGVHAVWPAGCRYEHTWWHAQSHTVSGIDVKLTSSEVNPLSVASTICHWLYNIVLSLIRDSSTYAMIHRCVYHHGASILILELVGHSFLLISVFFVVTCWNHRSETSFQQLTLASPRFSIINIVGSILEGKM

SEQ ID NO: 771442 - protein, 127 aa, Homo sapiens
MVESMKKVAGMDVELTVEERNLLSVAYKNVIGARRASWRIISSIEQKEENKGGEDKLKMIREYRQMVETELKLICCDILDVLDKHLIPAANTGESKVFYYKHEQGTTTGIWQNLPQETTGRRLRRTA

SEQ ID NO: 771443 - protein, 127 aa, Homo sapiens; identical to SEQ ID NO: 771442

SEQ ID NO: 771444 - protein, 127 aa, Homo sapiens; identical to SEQ ID NO: 771442

SEQ ID NO: 771445 - protein, 127 aa, Homo sapiens; identical to SEQ ID NO: 771442

SEQ ID NO: 771446 - protein, 127 aa, Homo sapiens; identical to SEQ ID NO: 771442

SEQ ID NO: 771447 - protein, 127 aa, Homo sapiens; identical to SEQ ID NO: 771442

SEQ ID NO: 771448 - protein, 127 aa, Homo sapiens; identical to SEQ ID NO: 771442

SEQ ID NO: 771449 - protein, 127 aa, Homo sapiens; identical to SEQ ID NO: 771442

SEQ ID NO: 771450 - protein, 127 aa, Homo sapiens; identical to SEQ ID NO: 771442

SEQ ID NO: 771451 - protein, 127 aa, Homo sapiens; identical to SEQ ID NO: 771442

SEQ ID NO: 771452 - protein, 127 aa, Homo sapiens; identical to SEQ ID NO: 771442

SEQ ID NO: 771453 - protein, 127 aa, Homo sapiens; identical to SEQ ID NO: 771442

SEQ ID NO: 771454 - protein, 127 aa, Homo sapiens; identical to SEQ ID NO: 771442

SEQ ID NO: 771455 - protein, 127 aa, Homo sapiens; identical to SEQ ID NO: 771442

SEQ ID NO: 771456 - protein, 127 aa, Homo sapiens; identical to SEQ ID NO: 771442

SEQ ID NO: 771457 - protein, 127 aa, Homo sapiens
GRPWQVSSTGMDVELTVEERNLLSVAYKNVIGARRASWRIISSIEQKEENKGGEDKLKMIREYRQMVETELKLICCDILDVLDKHLIPAANTGESKVFYYKHEQGTTTGIWQNLPQETTGRRLRRTA

SEQ ID NO: 771458 - protein, 154 aa, Homo sapiens
MVESMKKVAGMDVELTVEERNLLSVAYKNVIGARRASWRIISSIEQKEENKGGEDKLKMIREYRQMVETELKLICCDILDVLDKHLIPAANTGTGDYHRYLAEFATGNDRKEAAENSLVAYKAASDIAMTELPPSASYSLRSCSQFFRILLRNS

SEQ ID NO: 771459 - protein, 147 aa, Homo sapiens
MVESMKKVAGMDVELTVEERNLLSVAYKNVIGARRASWRIISSIEQKEENKGGEDKLKMIREYRQMVETELKLICCDILDVLDKHLIPAANTGESKVFYYKHRKEAAENSLVAYKAASDIAMTELPPSASYSLRSCSQFFRILLRNS

SEQ ID NO: 771460 - protein, 69 aa, Homo sapiens
DELGYDERTGDYHRYLAEFATGNDRKEAAENSLVAYKAASDIAMTELPPSASYSLRSCSQFFRILLRNS

SEQ ID NO: 771461 - protein, 127 aa, Homo sapiens; identical to SEQ ID NO: 771442

SEQ ID NO: 771462 - protein, 127 aa, Homo sapiens; identical to SEQ ID NO: 771442

SEQ ID NO: 771463 - protein, 79 aa, Homo sapiens
SGGGGVGWRDVLSSAGSERLRESETLSASIRRADPAGAAAAMDDREDLVYQAKLAEQAERYDGEEQNKEALQDVEDENQ

SEQ ID NO: 771464 - protein, 127 aa, Homo sapiens; identical to SEQ ID NO: 771442

SEQ ID NO: 771465 - protein, 127 aa, Homo sapiens; identical to SEQ ID NO: 771442

SEQ ID NO: 771466 - protein, 127 aa, Homo sapiens; identical to SEQ ID NO: 771442

SEQ ID NO: 771467 - protein, 142 aa, Homo sapiens
MVESMKKVAGMDVELTVEERNLLSVAYKNVIGARRASWRIISSIEQKEENKGGEDKLKMIREYRQMVETELKLICCDILDVLDKHLIPAANTGESKVFYYKHCRFYTRRENVRLKVGPFRTITLFYVGFQLLFKNNCSMLEG

SEQ ID NO: 771468 - protein, 122 aa, Homo sapiens
MVESMKKVAGMDVELTVEERNLLSVAYKNVIGARRASWRIISSIEQKEENKGGEDKLKMIREYRQMHSSPPSLAQPLLFSMCNLKLICTTGYLTGATDTESVLFLLKHSMELTLNLNKTNLN

SEQ ID NO: 771469 - protein, 82 aa, Homo sapiens
MVESMKKVAGMDVELTVEERNLLSVAYKNVIGARRASWRIISSIEQKEENKGGEDKLKMIREYRQMLSQRWDSDRGENSVRG

SEQ ID NO: 771470 - protein, 142 aa, Homo sapiens; identical to SEQ ID NO: 771467

SEQ ID NO: 771471 - protein, 127 aa, Homo sapiens
MDDREDLVYQAKLAEQAERYDEMSEPMKAAGMHAQPADPDSNLLSAAYTTAPAARLRLSRPLTSLLPQAAHQVAPAPLLHDRPLSTSALSLNLLVQPALTSPPPSSHPTPSSTFPIPIPTACSFSPP

SEQ ID NO: 771472 - protein, 127 aa, Homo sapiens; identical to SEQ ID NO: 771442

SEQ ID NO: 771473 - protein, 127 aa, Homo sapiens; identical to SEQ ID NO: 771442

SEQ ID NO: 771474 - protein, 127 aa, Homo sapiens; identical to SEQ ID NO: 771442

SEQ ID NO: 771475 - protein, 127 aa, Homo sapiens; identical to SEQ ID NO: 771442

SEQ ID NO: 771476 - protein, 118 aa, Homo sapiens
MVESMKKVAGMDVELTVEERNLLSVAYKNVIGARRASWRIISSIEQKEENKGGEDKLKMIREYRQMCDILDVLDKHLIPAANTGESKVFYYKHEQGTTTGIWQNLPQETTGRRLRRTA

SEQ ID NO: 771477 - protein, 127 aa, Homo sapiens; identical to SEQ ID NO: 771442

SEQ ID NO: 771478 - protein, 83 aa, Homo sapiens
TNDTGISAQSAWKLSLKESFTSVTFWMFVYKQLSSSSHLAARRKFQYVFLIAIDLNRGLPQVSGRICHRKRQEGGCGEQPSGL

SEQ ID NO: 771479 - protein, 127 aa, Homo sapiens; identical to SEQ ID NO: 771442

SEQ ID NO: 771480 - protein, 77 aa, Homo sapiens
SPLIPYDRITGHYTVEVFCDNRSKRKECAGNELAEMTSGLLRALIKDMAYGRDKPDELKISNYTMSYLDVFSHRLSI

SEQ ID NO: 771481 - protein, 107 aa, Homo sapiens
RTLTVEVSVETIRNPQQQESLKHATRIIDEVVNKFLDDLGNAKSHLMSLYSACSSEDPRVLGRKAIRDSTLIMQLLRDNLTLWTSDMQGDGEEQNKEALQDVEDENQ

SEQ ID NO: 771482 - protein, 127 aa, Homo sapiens; identical to SEQ ID NO: 771442

SEQ ID NO: 771483 - protein, 127 aa, Homo sapiens; identical to SEQ ID NO: 771442

SEQ ID NO: 771484 - protein, 127 aa, Homo sapiens; identical to SEQ ID NO: 771442

SEQ ID NO: 771485 - protein, 133 aa, Homo sapiens
MVESMKKVAGMDVELTVEERNLLSVAYKNVIGARRASWRIISSIEQKEENKGGEDKLKMIREYRQMVETELKLICCDILDVLDKHLIPAANTGESKVFYYKHIRGLPQDNARGVKSDRKEGAENSIVDDNSAT

SEQ ID NO: 771486 - protein, 78 aa, Homo sapiens
MVESMKKVAGMDVELTVEERNLLSVAYKNVIGARRASWRIISSIEQKEENKGGEDKLKMIREYRQMAMDILDVLDHLF

SEQ ID NO: 771487 - protein, 72 aa, Homo sapiens
SGGGGVGWRDVLSSAGSERLRESETLSASIRRADPAGAAAAMDDREDLVYQAKLAEQAERYDDLKQEISKFL

SEQ ID NO: 771488 - protein, 41 aa, Homo sapiens
MDDREDLVYQAKLAEQAERYDGELGGQRGAGILGPSAAAHR

SEQ ID NO: 771489 - protein, 334 aa, Homo sapiens
LERSHFTTTFLPKCQHGQIRSRSPAHSHPQGESTVGWALIHEGGLPHATAVPPGTRLLITLVLCRYHSILFRAKDLDPEPRSHIVRGNHTQSALLAGLRKFVLYELQVLAFTRIGNGVPSTPLILERTKDDAPGPPVRLVFPEVRLTSVRIVWQPPEEPNGIILGYQIAYRLASSSPHTFTTVEVGATVRQFTATDLAPESAYIFRLSAKTRQGWGEPLEATVITTEKRERPAPPRELLVPQAEVTARSLRLQWVPGSDGASPIRYFTMQVRELPRGEWQTYSSSISHEATACVVDRLRPFTSYKLRLKATNDIGDSDFSSETEAVTTLQDGEQ

SEQ ID NO: 771490 - protein, 71 aa, Homo sapiens
SFPRLLAARWWNSVYCLVGPSAGYTLRGAGWNTVLMKSPSGSTGWSPVVTIAFILSNQPPHKPWPGIPWRV

SEQ ID NO: 771491 - protein, 156 aa, Homo sapiens
EPGVGYSLVVRRFLSRSEKRNIRVGVTRFSRDFIIDGLSVERNHVLVRINLVGGPLERILPPRLLEKSDNPYPWPMFSSYPLPNCYLSDITRNAGIKQDNDLDKLLLCLKISDKQTEWIENCQRQFCKMMKAKPDIISGEVLPIFRFFLCEIPSRV

SEQ ID NO: 771492 - protein, 100 aa, Homo sapiens
SRRRLPPQRGELPAQALDRVLPAAGYSRSLPLLLLWLTKAYICSSYLPNDTVESGIHPVYFCSTHYIEMLLKAELPLVFSAFHMSGFAPSQVIHKGVAFL

SEQ ID NO: 771493 - protein, 156 aa, Homo sapiens; identical to SEQ ID NO: 771491

SEQ ID NO: 771494 - protein, 154 aa, Homo sapiens
SRSASITNLSLDRSGSPMVPSYETSVSPQANRTYVRTETTEDERKILLDSVQLKDLWKKICHHSSGMEFQDHRYWLRTHPNCIVGKELVNWLIRNGHIATRAQAIAIGQAMVDGRWLDCVSHHDQLFRDEYALYRPLQVLFSVYCQLECSKLIL

SEQ ID NO: 771495 - protein, 195 aa, Homo sapiens
MWICPGGGGGGGGGGGGGGGGGGGGDREDARPAPLLLWALLALWLCCATPAHALQCRDGYEPCVNEGMCVTYHNGTGYCKCPEGFLGEYCQHRDPCEKNRCQNGGTCVAQAMLGKATCRCASGFTGEDCQYSTSHPCFVSRPCLNGGTCHMLSRDTYECTCQVGFTGKECQWTDACLSHPCANGSTCTTVAKQFS

SEQ ID NO: 771496 - protein, 228 aa, Homo sapiens
MVDMDKLINNLEVQLNSEGGSMQVFKQVTASVRNRDPPEIEYRSNMTSPTLLDANPMENPALFNDIKIEPPEELLASDFSLPQVEPVDLSFHKPKAPLQPASMLQAPIRPPKPQSSPQTLVVSTSTSDMSTSANIPTVLTPGSVLTSSQSTGSQQILHVIHTIPSVSLPNKMGGLKTIPVVVQSLPMVYTTLPADGGPAAITVPLIGGDGKNAGSGAQRPRWMFSHLD

SEQ ID NO: 771497 - protein, 359 aa, Homo sapiens
MVDMDKLINNLEVQLNSEGGSMQVFKQVTASVRNRDPPEIEYRSNMTSPTLLDANPMENPALFNDIKIEPPEELLASDFSLPQVEPVDLSFHKPKAPLQPASMLQAPIRPPKPQSSPQTLVVSTSTSDMSTSANIPTVLTPGSVLTSSQSTGSQQILHVIHTIPSVSLPNKMGGLKTIPVVVQSLPMVYTTLPADGGPAAITVPLIGGDGKNAGSVKVDPTSMSPLEIPSDSEESTIESGSSALQSLQGLQQEPAAMAQMQGEESLDLKRRRIHQCDFAGCSKVYTKSSHLKAHRRIHTGEKPYKCTWDGCSWKFARSDELTRHFRKHTGIKPFRCTDCNRSFSRSDHLSLHRRRHDTM

SEQ ID NO: 771498 - protein, 68 aa, Homo sapiens
THTSGYFSCFLLPEGVGVVFQVCSCKPSDEASCIHRGLDGRTSLSPPCLLHSVSFPDGERETQAAVTH

SEQ ID NO: 771499 - protein, 68 aa, Homo sapiens; identical to SEQ ID NO: 771498

SEQ ID NO: 771500 - protein, 918 aa, Homo sapiens
FAEPAAAFPGATAMAASLSERLFSLELLVDWVRLEARLLPSPAAAVEQEEEEEEKEQGEASSPRGLCPAVAFRLLDFPTLLVYPPDGPGAPAAEPWPGVIRFGRGKSCLFRLQPATLHCRLLRTPLATLLLQLPPGRPTPTPQLLGACDISLATAAHRVVGPAASGCSHRHRGRFPLHNRVGERTGDIALAYRLTDLGSRLLSQLERPLTFTRTGGGAEVSPQTQQERQQLQQPASQPSPKEADKPLGELEIPEAQKDLKEMVKSKAECDNVGSVENGKTNSVVTCSGAGNGRNVSSLNEEVTELDMETNIFCPPPLYYTNLTQEKPPPAQAKITIEPQMNAPEEMDDASPEKKRVNPPAHRSCLKHPSSAAHEHPPMLVNPPHIQNIGATNQTCQTEQNRINTIRQLPLLNALLVELSLLYDQPVTSPAHIHPHLAWLYRTEDKKSPESSAKSTCRSEAKKDKRSVGGCEKSVSLQYKKNQIENYKEDKYSEKSSGALHKRVPKGRLLYGLTNTLRLRLKLTNPDMLVVHEKRELYRKRQSQMLGTKFRIPSSKVKLLSSAEQSQKPQLPEDKYLDSDASFTENSDTSRQISGVFDEPSTSKETKLKYATEKKTVDCSKNRINNVSLEEVVSPANSIIPERLTPTNILGGNVEMKIQSPCVFQQDAVVDRIVDKEIDIRQVKTTDNDILMADISDKRTGKNSCYENISELKYSDDLSSPCYSEDFCTSEDTSRSFKAHDSSSRTENPKHSQYTSKSSDTGVSKKKNSSDRSSILSPPFSAGSPVHSYRKFHISKTQDKSLEEASSISASDLSSTHWTEQKENQIDQNSMHNSEITKRAQDISVKTRSSWKSLEKSQSPQTSQVSSYLPSNVSELNVLDSSTSDHFEEGNDDVGSLNISKQCKDICELVINKLPGYTM

SEQ ID NO: 771501 - protein, 918 aa, Homo sapiens; identical to SEQ ID NO: 771500

SEQ ID NO: 771502 - protein, 138 aa, Homo sapiens
VSQDYFLFPQILECVRTLFLMVPTVCFHVCGSTGCSAAKPPWAPLICGRFSCFLVFGDFLRTVGVGYFVGCASVGICLLTRLGSQVLGREDMEVKSFSSHPVQASTVRRTQCLMLMQVTWLRCALQHFPQSSDSFSFH

SEQ ID NO: 771503 - protein, 281 aa, Homo sapiens
HLRQQEGGSFSQAAGRAARIMSTTTCQVVAFLLSILGLAGCIAATGMDMWSTQDLYDNPVTSVFQYEGLWRSCVRQSSGFTECRPYFTILGLPAMLQAVRALMIVGIVLGAIGLLVSIFALKCIRIGSMEDSAKANMTLTSGIMFIVSGLCAIAGVSVFANMLVTNFWMSTANMYTGMGGMVQTVQTRYTFGAALFVGWVAGGLTLIGGVMMCIACRGLAPEETNYKAVSYHASGHSVAYKPGGFKASTGFGSNTKNKKIYDGGARTEDEVQSYPSKHDYV

SEQ ID NO: 771504 - protein, 261 aa, Homo sapiens
MAVTACQGLGFVVSLIGIAGIIAATCMDQWSTQDLYNNPVTAVFNYQGLWRSCVRESSGFTECRGYFTLLGLPAMLQAVRALMIVGIVLGAIGLLVSIFALKCIRIGSMEDSAKANMTLTSGIMFIVSGLCAIAGVSVFANMLVTNFWMSTANMYTGMGGMVQTVQTRYTFGAALFVGWVAGGLTLIGGVMMCIACRGLAPEETNYKAVSYHASGHSVAYKPGGFKASTGFGSNTKNKKIYDGGARTEDEVQSYPSKHDYV

SEQ ID NO: 771505 - protein, 113 aa, Homo sapiens
GDVNCSGRPRPRVAEPPPPLGRSGGYFCIFPPAPRPRCPRMPGGLMKFDLFFPSKYLPHHHGAPRPLPPSFPSLGESFELSPEPRVGHAACRAWEGEWGCSSSCGTVGGVRPR

SEQ ID NO: 771506 - protein, 121 aa, Homo sapiens
GETPRPAERGTPVRLFTEEELARYGGKEGFYGRGAPYNALTGKDSTRGVAKMSLDPADLTHDTTGLTAKELEALDEVFTKVYKAKYPIVGYTARRILNEDGSPNLDFKPEDQPHFDIKDEF

SEQ ID NO: 771507 - protein, 121 aa, Homo sapiens; identical to SEQ ID NO: 771506

SEQ ID NO: 771508 - protein, 427 aa, Homo sapiens
MGSVRTNRYSIVSSEEDGMKLATMAVANGFGNGKSKVHTRQQCRSRFVKKDGHCNVQFINVGEKGQRYLADIFTTCVDIRWRWMLVIFCLAFVLSWLFFGCVFWLIALLHGDLDASKEGKACVSEVNSFTAAFLFSIETQTTIGYGFRCVTDECPIAVFMVVFQSIVGCIIDAFIIGAVMAKMAKPKKRNETLVFSHNAVIAMRDGKLCLMWRVGNLRKSHLVEAHVRAQLLKSRITSEGEYIPLDQIDINVGFDSGIDRIFLVSPITIVHEIDEDSPLYDLSKQDIDNADFEIVVILEGMVEATAMTTQCRSSYLANEILWGHRYEPVLFEEKHYYKVDYSRFHKTYEVPNTPLCSARDLAEKKYILSNANSFCYENEVALTSKEEDDSENGVPESTSTDTPPDIDLHNQASVPLEPRPLRRESEI

SEQ ID NO: 771509 - protein, 427 aa, Homo sapiens; identical to SEQ ID NO: 771508

SEQ ID NO: 771510 - protein, 100 aa, Homo sapiens
TGALASAQPSRRRRAGSWEFWFALAHSLFTNHWILHASVPPTSTPCPHAPAPATGKGCCVFFLFARCRCVLGNGLWPPSPTLPCPAAPEVPSCHTAVALT

SEQ ID NO: 771511 - protein, 173 aa, Homo sapiens
MLASGLLLVALLASLTVMVLMSVWQQRKSRGKLPLGPTPLLFIGNYLQLNTEHICDSIMKISERYGPVFTIHLGPRRVVVLCGHDAVKEALVDQAEEFSGRGEQATFDWLFKGYGVTCRTWERTKPLRRFSIATLRDFGVGKRGIKEVSRRRRASSSRPSRARAAPASIPPSS

SEQ ID NO: 771512 - protein, 207 aa, Homo sapiens
APASLQTSPLQGPAGPARWEESGTGRRLTGPTADQARRDPDHGDRDPGIATPRTSSPRPVAPTSPGHSVAESPRPQRASPGGATSIPACRPGHAPPGQRLSPSRDGIGARRSMDPGWGQRDVGWGGLAVILFAALRCSRCSPGCCNYARGLVCWRCGTRGTGARGPRLSRGNPGGSHGGAGAVWRSLLRLRATRGLATAEGARSPGA

SEQ ID NO: 771513 - protein, 142 aa, Homo sapiens
MAAGGSDPRAGDVEEDASQLIFPKEFETAETLLNSEVHMLLEHRKQQNESAEDEQELSEVFMKTLNYTARFSRFKNRETIASVRSLLLQKKLHKFELACLANLCPETAEESKALIPSLEGRFEDEELQQILDDIQTKRSFQY

SEQ ID NO: 771514 - protein, 85 aa, Homo sapiens
MKITGGLLLLCTVVYFCSSSEAASLSPKKVDCSIYKKYPVVAIPCPITYLPVCGSDYITYGNECHLCTESLKSNGRVQFLHDGSC

SEQ ID NO: 771515 - protein, 166 aa, Homo sapiens
MRNRKAQEREEQNKTQEEHKGGGAGMETAPRGGTRNVETDKHRICDIEDGSGARHEMGIDDNKKRNERERAHEDEKASGDDDERQQSWARVSADARQTENEGRDEQKPKATTTNHNQKKREAAEEERAKDNTENSVRNSGKRKEQRHSGGARLAATPPAKTQQENQ

SEQ ID NO: 771516 - protein, 102 aa, Homo sapiens
MPQHITDYRRPVPITLELRQSSNPRAWTNQSPNAILVDLSPGTPLVIMLHRSGSTHKAETTESFKQGSFNRTMNYLQGIVTKCESKRTLKNTHGAGRGGSRL

SEQ ID NO: 771517 - protein, 42 aa, Homo sapiens
MAAPGAQVPGSRHSRGAWAALPTCSQRLPELPSDKGEPPLPS

SEQ ID NO: 771518 - protein, 124 aa, Homo sapiens
MLLSLQPFLLWPQDKVLIVPYRFTPKDVEPLVCEVGLVTRFNEIHALGLVTESMMELKSSLPPFQPHGLRKTTSQTHLSQEDSTSIFMIRVTKWRLGIVPGSQHTSSPTGWYHQVMATPAPCHK

SEQ ID NO: 771519 - protein, 70 aa, Homo sapiens
APCCQLSCPLGSEQPWCWHQEEPGAQGPLPGGSRQHPQGRKLQLRFLLKPQCASQSSGVSLAGATLLCGT

SEQ ID NO: 771520 - protein, 639 aa, Homo sapiens [sequence omitted]

SEQ ID NO: 771521 - protein, 111 aa, Homo sapiens [sequence omitted]

SEQ ID NO: 771522 - protein, 458 aa, Homo sapiens
ERLRAEWDKAWGWAGAMALPSRILLWKLVLLQSSAVLLHSGSSVPAAAGSSVVSESAVSWEAGARAVLRCQSPRMVWTQDRLHDRQRVLHWDLRGPGGGPARRLLDLYSAGEQRVYEARDRGRLELSASAFDDGNFSLLIRAVEETDAGLYTCNLHHHYCHLYESLAVRLEVTDGPPATPAYWDGEKEVLAVARGAPALLTCVNRGHVWTDRHVEEAQQVVHWDRQPPGVPHDRADRLLDLYASGERRAYGPLFLRDRVAVGADAFERGDFSLRIEPLEVADEGTYSCHLHHHYCGLHERRVFHLTVAEPHAEPPPRGSPGNGSSHSGAPGPDPTLARGHNVINVIVPESRAHFFQQLGYVLATLLLFILLLVTVLLAARRRRGGYEYSDQKSGKSKGKDVNLAEFAVAAGDQMLYRSEDIQLDYKNNILKERAELAHSPLPAKYIDLDKGFRKENCK

SEQ ID NO: 771523 - protein, 397 aa, Homo sapiens
ERLRAEWDKAWGWAGAMALPSRILLWKLVLLQSSAVLLHSGSSVPAAAGSSVVSESAVSWEAGARAVLRCQSPRMVWTQDRLHDRQRVLHWDLRGPGGGPARRLLDLYSAGEQRVYEARDRGRLELSASAFDDGNFSLLIRAVEETDAGLYTCNLHHHYCHLYESLAVRLEVTDGPPATPAYWDGEKEVLAVARGAPALLTCVNRGHVWTDRHVEEAQQVVHWDRQPPGVPHDRADRLLDLYASGERRAYGPLFLRDRVAVGADAFERGDFSLRIEPLEVADEGTYSCHLHHHYCGLHERRVFHLTVAEPHAEPPPRGSPGNGSSHSGAPGPDPTLARGHNVINVIVPESRAHFFQQLGYVLATLLLFILLLVTVLLAARRRRGGEAAPAKPAAPGD

SEQ ID NO: 771524 - protein, 458 aa, Homo sapiens; identical to SEQ ID NO: 771522

SEQ ID NO: 771525 - protein, 615 aa, Homo sapiens
ERLRAEWDKAWGWAGAMALPSRILLWKLVLLQSSAVLLHSGSSVPAAAGSSVVSESAVSWEAGARAVLRCQSPRMVWTQDRLHDRQRVLHWDLRGPGGGPARRLLDLYSAGEQRVYEARDRGRLELSASAFDDGNFSLLIRAVEETDAGLYTCNLHHHYCHLYESLAVRLEVTDGPPATPAYWDGEKEVLAVARGAPALLTCVNRGHVWTDRHVEEAQQVVHWDRQPPGVPHDRADRLLDLYASGERRAYGPLFLRDRVAVGADAFERGDFSLRIEPLEVADEGTYSCHLHHHYCGLHERRVFHLTVAEPHAEPPPRGSPGNGSSHSGAPGPDPTLARGHNVINVIVPESRAHFFQQLGYVLATLLLFILLLVTVLLAARRRRGGYEYSDQKSGKSKGKDVNLAEFAVAAGDQMLYRSEDIQLDYKNNILKERAELAHSPLPAKYIDLDKGERRGRPQPISEPCLSPFHLTWDQRWQAPARPGAPATSGSEIPGESCGGVCPVSPTVMRVEDSRQPVGALGFQGSGRRTANREALGSWLGQQLHLSCLCSSGHLLMLRGSPPFQRLVPLSWNLAWAYAEAASTPLPQGLGGSIAPTPAAFAHGWPCPPLAQPKSH

SEQ ID NO: 771526 - protein, 458 aa, Homo sapiens; identical to SEQ ID NO: 771522

SEQ ID NO: 771527 - protein, 432 aa, Homo sapiens
ERLRAEWDKAWGWAGAMALPSRILLWKLVLLQSSAVLLHSGSSVPAAAGSSVVSESAVSWEAGARAVLRCQSPRMVWTQDRLHDRQRVLHWDLRGPGGGPARRLLDLYSAGEQRVYEARDRGRLELSASAFDDGNFSLLIRGAGTGDRGRGVGAGVRGRGVGGTARLTRGFLLGAAAVEETDAGLYTCNLHHHYCHLYESLAVRLEVTDGPPATPAYWDGEKEVLAVARGAPALLTCVNRGHVWTDRHVEEAQQVVHWDRQPPGVPHDRADRLLDLYASGERRAYGPLFLRDRVAVGADAFERGDFSLRIEPLEVADEGTYSCHLHHHYCGLHERRVFHLTVAEPHAEPPPRGSPGNGSSHSGAPGPDPTLARGHNVINVIVPESRAHFFQQLGYVLATLLLFILLLVTVLLAARRRRGGEAAPAKPAAPGD

SEQ ID NO: 771528 - protein, 427 aa, Homo sapiens
ERLRAEWDKAWGWAGAMALPSRILLWKLVLLQSSAVLLHSGSSVPAAAGSSVVSESAVSWEAGARAVLRCQSPRMVWTQDRLHDRQRVLHWDLRGPGGGPARRLLDLYSAGEQRVYEARDRGRLELSASAFDDGNFSLLIRAVEETDAGLYTCNLHHHYCHLYESLAVRLEVTDGRECFPPAPQLPPLDPRPPPRPARRYRAPSAAPATPAYWDGEKEVLAVARGAPALLTCVNRGHVWTDRHVEEAQQVVHWDRQPPGVPHDRADRLLDLYASGERRAYGPLFLRDRVAVGADAFERGDFSLRIEPLEVADEGTYSCHLHHHYCGLHERRVFHLTVAEPHAEPPPRGSPGNGSSHSGAPGPDPTLARGHNVINVIVPESRAHFFQQLGYVLATLLLFILLLVTVLLAARRRRGGEAAPAKPAAPGD

SEQ ID NO: 771529 - protein, 379 aa, Homo sapiens
MALPSRILLWKLVLLQSSAVLLHSGSSVPAAAGSSVVSESAVSWEAGARAVLRCQSPRMVWTQDRLHDRQRVLHWDLRGPGGGPARRLLDLYSAGEQRVYEARDRGRLELSASAFDDGNFSLLIRGAGTGDRGRGVGAGVRGRGVGGTARLTRGFLLGAAAVEETDAGLYTCNLHHHYCHLYESLAVRLEVTDGPPATPAYWDGEKEVLAVARGAPALLTCVNRGHVWTDRHVEEAQQVVHWDRQPPGVPHDRADRLLDLYASGERRAYGPLFLRDRVAVGADAFERGDFSLRIEPLEVADEGTYSCHLHHHYCDPTLARGHNVINVIVPESRAHFFQQLGYVLATLLLFILLLVTVLLAARRRRGGEAAPAKPAAPGD

SEQ ID NO: 771530 - protein, 458 aa, Homo sapiens; identical to SEQ ID NO: 771522

SEQ ID NO: 771531 - protein, 390 aa, Homo sapiens
RLRAEWDKAWGWAGAMALPSRILLWKLVLLQSSAVLLHSGSSVPAAAGSSVVSESAVSWEAGARAVLRCQSPRMVWTQDRLHDRQRVLHWDLRGPGGGPARRLLDLYSAGEQRVYEARDRGRLELSASAFDDGNFSLLIRGGGPGTGFAVAAGDQMLYRSEDIQLGEAVLGHEGTGAAPSRAGKCILGAGTSASSPPTDYKNNILKERAELAHSPLPAKYIDLDKGERRGRPQPISEPCLSPFHLTWDQRWQAPARPGAPATSGSEIPGESCGGVCPVSPTVMRVEDSRQPVGALGFQGSGRRTANREALGSWLGQQLHLSCLCSSGHLLMLRGSPPFQRLVPLSWNLAWAYAEAASTPLPQGLGGSIAPTPAAFAHGWPCPPLAQPKSH

SEQ ID NO: 771532 - protein, 466 aa, Homo sapiens
ERLRAEWDKAWGWAGAMALPSRILLWKLVLLQSSAVLLHSGSSVPAAAGSSVVSESAVSWEAGARAVLRCQSPRMVWTQDRLHDRQRVLHWDLRGPGGGPARRLLDLYSAGEQRVYEARDRGRLELSASAFDDGNFSLLIRAVEETDAGLYTCNLHHHYCHLYESLAVRLEVTDGPPATPAYWDGEKEVLAVARGAPALLTCVNRGHVWTDRHVEEAQQVVHWDRQPPGVPHDRADRLLDLYASGERRAYGPLFLRDRVAVGADAFERGDFSLRIEPLEVADEGTYSCHLHHHYCGLHERRVFHLTVAEPHAEPPPRGSPGNGSSHSGAPGPDPTLARGHNVINVIVPESRAHFFQQLGYVLATLLLFILLLVTVLLAARRRRGGYEYSDQKSGKSKGKDVNLAEFAVAAGDQMLYRSEDIQLASSPPTDYKNNILKERAELAHSPLPAKYIDLDKDPSGLCPLGA

SEQ ID NO: 771533 - protein, 411 aa, Homo sapiens
MAGTRLSAESPVPSKPGTQEVVSKRFLNDRKWDSSAIDDPLCGHRSVSLVLLHSGSSVPAAAGSSVVSESAVSWEAGARAVLRCQSPRMVWTQDRLHDRQRVLHWDLRGPGGGPARRLLDLYSAGEQRVYEARDRGRLELSASAFDDGNFSLLIRAVEETDAGLYTCNLHHHYCHLYESLAVRLEVTDGPPATPAYWDGEKEVLAVARGAPALLTCVNRGHVWTDRHVEEAQQVVHWDRQPPGVPHDRADRLLDLYASGERRAYGPLFLRDRVAVGADAFERGDFSLRIEPLEVADEGTYSCHLHHHYCGLHERRVFHLTVAEPHAEPPPRGSPGNGSSHSGAPGPDPTLARGHNVINVIVPESRAHFFQQLGYVLATLLLFILLLVTVLLAARRRRGGEAAPAKPAAPGD

SEQ ID NO: 771534 - protein, 360 aa, Homo sapiens
ERLRAEWDKAWGWAGAMALPSRILLWKLVLLQSSAVLLHSGSSVPAAAGSSVVSESAVSWEAGARAVLRCQSPRMVWTQDRLHDRQRVLHWDLRGPGGGPARRLLDLYSAGEQRVYEARDRGRLELSASAFDDGNFSLLIRAVEETDAGLYTCNLHHHYCHLYESLAVRLEVTDGPPATPAYWDGEKEVLAVARGAPALLTCVNRGHVWTDRHVEEAQQVVHWDRQPPGVPHDRADRLLDLYASGERRAYGPLFLRDRVAVGADAFERGDFSLRIEPLEVADEGTYSCHLHHHYCDPTLARGHNVINVIVPESRAHFFQQLGYVLATLLLFILLLVTVLLAARRRRGGEAAPAKPAAPGD

SEQ ID NO: 771535 - protein, 458 aa, Homo sapiens; identical to SEQ ID NO: 771522

SEQ ID NO: 771536 - protein, 545 aa, Homo sapiens
MALPSRILLWKLVLLQSSAVLLHSGSSVPAAAGSSVVSESAVSWEAGARAVLRCQSPRMVWTQDRLHDRQRVLHWDLRGPGGGPARRLLDLYSAGEQRVYEARDRGRLELSASAFDDGNFSLLIRAVEETDAGLYTCNLHHHYCHLYESLAVRLEVTDGPPATPAYWDGEKEVLAVARGAPALLTCVNRGHVWTDRHVEEAQQVVHWDRQPPGVPHDRADRLLDLYASGERRAYGPLFLRDRVAVGADAFERGDFSLRIEPLEVADEGTYSCHLHHHYCGLHERRVFHLTVAEPHAEPPPRGSPGNGSSHSGAPGPDPTLARGHNVINVIVPESRAHFFQQLGYVLATLLLFILLLVTVLLAARRRRGGYEYSDQKSGKSKGKDVNLAEFAVAAGDQMLYRSEDIQLGEAVLGHEGTGAAPSRAGKCILGAGTSASSPPTDYKNNILKERAELAHSPLPAKYIDLDKGERRGRPQPISEPCLSPFHLTWDQRWQAPARPGAPATSGSEIRCFGPPGAAPPALSLPHPYPSLALSHLDSHWAPCDF

SEQ ID NO: 771537 - protein, 99 aa, Homo sapiens
GRYRPGMYGIEPHAEPPPRGSPGNGSSHSGAPGPDPTLARGHNVINVIVPESRAHFFQQLGYVLATLLLFILLLVTVLLAARRRRGGEAAPAKPAAPGD

SEQ ID NO: 771538 - protein, 211 aa, Homo sapiens
ERLRAEWDKAWGWAGAMALPSRILLWKLVLLQSSAVLLHSGSSVPAAAGSSVVSESAVSWEAGARAVLRCQSPRMVWTQDRLHDRQRVLHWDLRGPGGGPARRLLDLYSAGEQRVYEARDRGRLELSASAFDDGNFSLLIRAVEETDAGLYTCNLHHHYCHLYESLAVRLEVTDGPPATPAYWDGEKEVLAVARGAPALLTCACTNAASST

SEQ ID NO: 771539 - protein, 263 aa, Homo sapiens
ASPGKRCWPGCSGAGSRVWWLPALRHLAMGSTESSEGRRVSFGVDEEERVRVLQGVRLSENVVNRMKEPSSPPPAPTSSTFGLQDGNLRAPHKESTLPRSGSSGGQQPSGMKEGVKRYEQEHAAIQDKLFQVAKREREAATKHSKASLPTGEGSISHEEQKSVRLARELESREAELRRRDTFYKEQLERIERKNAEMYKLSSEQFHEAASKMESTIKPRRVEPVCSGLQAQILHCYRDRPHEVLLCSDLVKAYQRCVSAAHKG

SEQ ID NO: 771540 - protein, 69 aa, Homo sapiens
  misc_feature (13)..(14): Xaa can be any naturally occurring amino acid
RAAPPGTVSLYLXXVSRLRKLVMPRRVEPVCSGLQAQILHCYRDRPHEVLLCSDLVKAYQRCVSAAHKG

SEQ ID NO: 771541 - protein, 260 aa, Homo sapiens
GITGIVSKGLGGICLPSTVEAGQRSTFYLLDWQNAEMYKLSSEQFHEAASKMESTIKHKQATLHNPVAALDPGGLCSHGQLHRRLPWTEGKAAQTPAMDGKREGCTNRSAVDGREGCTDSCCGRKGRLPRGLPWTEGKAAAWTAAVDGREGCCPDCRRGRKGRLLPGLPPWTEGKAAARTAAVDGREGCTEPYHQWEGKAARRLAWIEGKGADCLGHEGKATHRIIMDGRKAAQRNVNDEKGRMQSLAIDEKEGCTEAFL

SEQ ID NO: 771542 - protein, 263 aa, Homo sapiens; identical to SEQ ID NO: 771539

SEQ ID NO: 771543 - protein, 263 aa, Homo sapiens; identical to SEQ ID NO: 771539

SEQ ID NO: 771544 - protein, 314 aa, Homo sapiens
ASPGKRCWPGCSGAGSRVWWLPALRHLAMGSTESSEGRRVSFGVDEEERVRVLQGVRLSENVVNRMKEPSSPPPAPTSSTFGLQDGNLRAPHKESTLPRSGSSGGQQPSGMKEGVKRYEQEHAAIQDKLFQVAKREREAATKHSKASLPTGEGSISHEEQKSVRLARELESREAELRRRDTFYKEQLERIERKNAEMYKLSSEQFHEAASKMESTIKVQYFMNSRNTKWRKKYPMTDGFTCEHESPAVSGHLGCSASAFGNISALNVRPRRVEPVCSGLQAQILHCYRDRPHEVLLCSDLVKAYQRCVSAAHKG

SEQ ID NO: 771545 - protein, 232 aa, Homo sapiens
ASPGKRCWPGCSGAGSRVWWLPALRHLAMGSTESSEGRRVSFGVDEEERVRVLQGVRLSENVVNRMKEPSSPPPAPTSSTFGLQDGNLRAPHKESTLPRSGSSGGQQPSGMKEGVKRYEQEHAAIQDKLFQVAKREREAATKHSKASLPTGEGSISHEEQKSVRLARELESREAELRRRDTFYKEQLERIERKNAEMYKLSSEQFHEAASKMESTINAGPLHMPLSLGLPRV

SEQ ID NO: 771546 - protein, 80 aa, Homo sapiens
AVSGIKGWLSWAQRGGLSWRRAAPSSWGPSSGAFLSPECTQAPVKEPGVEPHTTACFSVCYIVSLSHPPQGLTLRPSSHF

SEQ ID NO: 771547 - protein, 200 aa, Homo sapiens
VSRGRMLRCINCLQSNSMRQPPSSLRAAGHHCSPTWAVWILCEGLSRMKEGVKRYEQEHAAIQDKLFQVAKREREAATKHSKASLPTGEGSISHEEQKSVRLARELESREAELRRRDTFYKEQLERIERKNAEMYKLSSEQFHEAASKMESTIKPRRVEPVCSGLQAQILHCYRDRPHEVLLCSDLVKAYQRCVSAAHKG

SEQ ID NO: 771548 - protein, 263 aa, Homo sapiens; identical to SEQ ID NO: 771539

SEQ ID NO: 771549 - protein, 367 aa, Homo sapiens
ASPGKRCWPGCSGAGSRVWWLPALRHLAMGSTESSEGRRVSFGVDEEERVRVLQGVRLSENVVNRMKEPSSPPPAPTSSTFGLQDGNLRAPHKESTLPRSGSSGGQQPSGMKEGVKRYEQEHAAIQDKLFQVAKREREAATKHSKASLPTGEGSISHEEQKSVRLARELESREAELRRRDTFYKEQLERIERKNAEMYKLSSEQFHEAASKMESTIKVQYFMNSRNTKWRKKYPMTDGFTCEHESPAVSGHLGCSASAFGNISALNVRANCVTEHVLTGPSWASPAILLPSSQQLCGVGSSPIPDAPTTQWKVTKPAPCPRPRRVEPVCSGLQAQILHCYRDRPHEVLLCSDLVKAYQRCVSAAHKG

SEQ ID NO: 771550 - protein, 229 aa, Homo sapiens
ASPGKRCWPGCSGAGSRVWWLPALRHLAMGSTESSEGRRVSFGVDEEERVRVLQGVRLSENVVNRMKEPSSPPPAPTSSTFGLQDGNLRAPHKESTLPRSGSSGGQQPSGMKEGVKRYEQEHAAIQDKLFQVAKREREAATKHSKASLPTGEGSISHEEQKSVRLARELESREAELRRRDTFYKEQLERIERKNAEMYKLSSEQFHEAAEIARMRCCCARTWSRHTSAA

SEQ ID NO: 771551 - protein, 420 aa, Homo sapiens
ASPGKRCWPGCSGAGSRVWWLPALRHLAMGSTESSEGRRVSFGVDEEERVRVLQGVRLSENVVNRMKEPSSPPPAPTSSTFGLQDGNLRAPHKESTLPRSGSSGGQQPSGMKEGVKRYEQEHAAIQDKLFQVAKREREAATKHSKASLPTGEGSISHEEQKSVRLARELESREAELRRRDTFYKEQLERIERKNAEMYKLSSEQFHEAASKMESTIKHKQATLHNPVAALDPGGLCSHGQLHRRLPWTEGKAAQTPAMDGKREGCTNRSAVDGREGCTDSCCGRKGRLPRGLPWTEGKAAAWTAAVDGREGCCPDCRRGRKGRLLPGLPPWTEGKAAARTAAVDGREGCTEPYHQWEGKAARRLAWIEGKGADCLGHEGKATHRIIMDGRKAAQRNVNDEKGRMQSLAIDEKEGCTEAFL

SEQ ID NO: 771552 - protein, 113 aa, Homo sapiens
GCSGFVSCTSTSNAHGQEQPEKLDTLFEGFLEVTRQSSLKGPMSWADVAFTGHWKLDTFLPLRALLVADEQRAHLGAWRLRASENTQGGEIKSGIQGPLGGRAWETPRHSVGT

SEQ ID NO: 771553 - protein, 235 aa, Homo sapiens
ESADGRGSSVLPEATATARGVPGEMAEQHGAPEQAAAGKSHGDLGGSYKVILYELENFQGKRCELSAECPSLTDSLLEKVGSIQVESGPWLAFESRAFRGEQFVLEKGDYPRWDAWSNSRDSDSLLSLRPLNIDSPHHKLHLFENPAFSGRKMEIVDDDVPSLWAHGFQDRVASVRAINGTWVGYEFPGYRGRQYVFERGEYRHWNEWDASQPQLQSVRRIRDQKWHKRGRFPSS

SEQ ID NO: 771554 - protein, 235 aa, Homo sapiens; identical to SEQ ID NO: 771553

SEQ ID NO: 771555 - protein, 84 aa, Homo sapiens
QASGLFGALVACLPNSAASPRQEHFLPRLLKLVRGFPTSQKQLHRPPARDLRPQPSTPRLGDLSPPSGPAHHESGPVLGAGMKQ

SEQ ID NO: 771556 - protein, 83 aa, Homo sapiens
QASGLFGALVACLPNSAASPRQEHFLPRLLKLVRGFPTSQKQLHRPPARDLRPQPSTPRLGDLSPPSGPGQGPETCEALSLGV

SEQ ID NO: 771557 - protein, 89 aa, Homo sapiens
QASGLFGALVACLPNSAASPRQEHFLPRLLKLVRGFPTSQKQLHRPPARDLRPQPSTPRLGDLSPPSGPAPSVVTSYIVIHDAKSSLLK

SEQ ID NO: 771558 - protein, 84 aa, Homo sapiens; identical to SEQ ID NO: 771555

SEQ ID NO: 771559 - protein, 83 aa, Homo sapiens; identical to SEQ ID NO: 771556

SEQ ID NO: 771560 - protein, 39 aa, Homo sapiens
NFLPSLTTPQCTSQNLISPRSQALTYISVFCHSITHIQQ

SEQ ID NO: 771561 - protein, 119 aa, Homo sapiens
MAGLMTIVTSLLFLGVCAHHIIPTGSVVIPSPCCMFFVSKRIPENRVVSYQLSSRSTCLKAGVIFTTKKGQQFCGDPKQEWVQRYMKNLDAKQKKASPRARAVAVKGPVQRYPGNQTTC

SEQ ID NO: 771562 - protein, 80 aa, Homo sapiens
KKDPDGLRQRPFLQRWPGCTYRPGSLIMVVVSKVRDKLMEDLDTEYPRPVRVGGHRGSEVTKMRRGQQGTSKTGHSGSRL

SEQ ID NO: 771563 - protein, 115 aa, Homo sapiens
PLLGPSWLTSPLHNKHVNGSRISYFLVGEFPFLKWGFGSLICTFFFPTSLEKQLGRTGFAGIAGARAKPGHCHHGLQPRLSGPGGERLQQQVSGPRRGSHSELPIYRLFSGRDED

SEQ ID NO: 771564 - protein, 168 aa, Homo sapiens
LPLPKTLKGKKAKGKKVAPAPAVVKKQEAKKVVNSLFEKRRKNFGIGQDIQPKRELTYFVKMARYVRLQQQRAILYKQLKVPPAINQFTQALNCQTVTQLLKLAHKYRPETKQEKKQRLLAQAEKKAAGKGGVPTKRPPALRAGVNTITTLVENKKAQLVVIAHDVDS

SEQ ID NO: 771565 - protein, 153 aa, Homo sapiens
PRGRSCVLLCTDFGGTAKAEQSSPQMMIIPHLLRDKDQRATTATIPEPANAGERKMREFNSVPSQSSGGDATHLPLSLWARLMPGASVDRGHAPGLPKLEKAARLRSEGQNSTVSPTEIKVGAGSVASEALRENPFPGRRGGLHSAACAARLE

SEQ ID NO: 771566 - protein, 592 aa, Homo sapiens
MATCWQALWAYRSYLIVFFVPILLLPLPILVPSKEAYCAYAIILMALFWCTEALPLAVTALFPLILFPMMGIVDASEVAVEYLKDSNLLFFGGLLVAIAVEHWNLHKRIALRVLLIVGVRPAPLILGFMLVTAFLSMWISNTATSAMMVPIAHAVLDQLHSSQASSNVEEGSNNPTFELQEPSPQKEVTKLDNGQALPVTSASSEGRAHLSQKHLHLTQCMSLCVCYSASIGGIATLTGTAPNLVLQGQINSLFPQNGNVVNFASWFSFAFPTMVILLLLAWLWLQILFLGFNFRKNFGIGEKMQEQQQAAYCVIQTEHRLLGPMTFAEKAISILFVILVLLWFTREPGFFLGWGNLAFPNAKGESMVSDGTVAIFIGIIMFIIPSKFPGLTQDPENPGKLKAPLGLLDWKTVNQKMPWNIVLLLGGGYALAKGSERSGLSEWLGNKLTPLQSVPAPAIAIILSLLVATFTECTSNVATTTIFLPILASMAQAICLHPLYVMLPCTLATSLAFMLPVATPPNAIVFSFGDLKVLDMARAGFLLNIIGVLIIALAINSWGIPLFSLHSFPSWAQSNTTAQCLPSLANTTTPSP

SEQ ID NO: 771567 - protein, 92 aa, Homo sapiens
RPAERGSLCERGLGVAAHYSLRLAEEWMEAPRVKLPRMRWVIREGIGIHPGFSDSKACSKTSAVSSANGDGALGITLYANEISGTFCSGFIN

SEQ ID NO: 771568 - protein, 89 aa, Homo sapiens
PTSFRPGTDGRVLSCVSPSDRQSWPSPAVKGRFKSQLPDLSGLHSYSPGRNSVAGSNPQKPGLGSPGRYSPVHGSQLRRMARLAELAAL

SEQ ID NO: 771569 - protein, 152 aa, Homo sapiens
MPGLTQHRTPGKCPAPSGSSPPWHLQPLCTCSGGFLQHVSCGEPPATLTTGTIGLLARGALSHSEAGSLSVSRTGYHLSVSVVGLDASADSVYWELLIRRFGPEKGYLNKSSTAFIPTRPQQPWIQGWTTHQKLHFLLGVVARACNPTALGG

SEQ ID NO: 771570 - protein, 94 aa, Homo sapiens
ACMHLPYAAASAPQAASRSGKARRRLRTRPHTAPLADMSGYFPAPWRLLGGTLSFTPVCCHGCRALVLMAPGGTYRMPRAERKWEWRRCDIPRC

SEQ ID NO: 771571 - protein, 89 aa, Homo sapiens; identical to SEQ ID NO: 771568

SEQ ID NO: 771572 - protein, 89 aa, Homo sapiens; identical to SEQ ID NO: 771568

SEQ ID NO: 771573 - protein, 89 aa, Homo sapiens; identical to SEQ ID NO: 771568

SEQ ID NO: 771574 - protein, 127 aa, Homo sapiens [sequence omitted]

SEQ ID NO: 771575 - protein, 275 aa, Homo sapiens [sequence omitted]

SEQ ID NO: 771576 - protein, 115 aa, Homo sapiens
NKSKFFSVPGDEGALQNRPRLHLPLSLVAKSLDFYITGKTTQHNAYTHTRACMHTHARTHDAHACTHAHMHTHACARTHHTCTHVHNAHMHTRTHMHTRTRMHTRAHAHTHTEHR

SEQ ID NO: 771577 - protein, 143 aa, Homo sapiens
MIAIVPLAKPSYVAKPGENMGDHYPVIWILILGGNRLQQIVVDLFTISGKSSMFKVVTKDVFGRMCIKSDFITFFRENNHLSIIYVLGSTFVGFKNVCSGETNVIFITNPLNEDLQHPIHVKNIKLVDTTEQSKIFIHRPDIR

SEQ ID NO: 771578 - protein, 79 aa, Homo sapiens
MAVPLLSQWATLQQPLMRTQEGEPTQSPLEVLCSMYRRERRSWVETRAPLRPPRPAPDNADPGPTQQGALHGSCLGEHL

SEQ ID NO: 771579 - protein, 72 aa, Homo sapiens
KKEQEAEQYRLKLEAIARQQPNGVDFTMVEEVAEVDAVVVTEGELEERETKVTGSAGTTEPHTRVSMATVSS

SEQ ID NO: 771580 - protein, 793 aa, Homo sapiens
MILANVFCLFFFLDETLRSLASPSSLQGPELHGWRPPVDCVRANELCAAESNCSSRYRTLRQCLAGRDRNTMLANKECQAALEVLQESPLYDCRCKRGMKKELQCLQIYWSIHLGLTEGEEFYEASPYEPVTSRLSDIFRLASIFSGTGADPVVSAKSNHCLDAAKACNLNDNCKKLRSSYISICNREISPTERCNRRKCHKALRQFFDRVPSEYTYRMLFCSCQDQACAERRRQTILPSCSYEDKEKPNCLDLRGVCRTDHLCRSRLADFHANCRASYQTVTSCPADNYQACLGSYAGMIGFDMTPNYVDSSPTGIVVSPWCSCRGSGNMEEECEKFLRDFTENPCLRNAIQAFGNGTDVNVSPKGPSFQATQAPRVEKTPSLPDDLSDSTSLGTSVITTCTSVQEQGLKANNSKELSMCFTELTTNIIPGSNKVIKPNSGPSRARPSAALTVLSVLMLKLALRLWEPSQNIFESYADKNSRLTKWKHTQTHTHLAKKKLFFPPCRCTCLLPGFFSGEVFVNQTDKQAGSLRAGPGVPWQGKLWCRGGHEALEMPFTFSWCFSLWTLLKQRPDKSLQRKGLWAVPEAGWGQDNTAASPGCPLWGPAGGWQRASVSGAAGLAMRVHLQPFGFKDGDGFALPLCPRVGLVGLQLVWELPHGWRWRGFAPCWAPPDCSTECWGWGPAPGGLESSACLGEPLWRGIKTWAPASFSVAEILKSERNGPLLASLLSRGSFGRPPFGEREGRDHSRVCVCSTVGPQAFLLSSPSSSFPLSLSSFPETYVNCMYIPGLLS

SEQ ID NO: 771581 - protein, 79 aa, Homo sapiens
TKTLRARAEAGSKGFDEYMKELGVGIALRKMGAMAKPDCIITCDGKNLTIKTESTLKTTQFSCTGRSRKRQKQEAAEAG

SEQ ID NO: 771582 - protein, 131 aa, Homo sapiens
TKTLRARAEAGSKGFDEYMKELGVGIALRKMGAMAKPDCIITCDGKNLTIKTESTLKTTQFSCTLGEKFEETTADGRKTQTVCNFTDGALVQHQEWDGKESTITRKLKDGKLVVECVMNNVTCTRIYEKVE

SEQ ID NO: 771583 - protein, 31 aa, Homo sapiens
MLRGDTPSSLLLQHRAALQGANTGSHSHHSE

SEQ ID NO: 771584 - protein, 115 aa, Homo sapiens
MALGYPQLQDVTSPCRSSHVVIQGDKDCSFLTSELIHYVVREATNQQKFWQKQLLQQFWEQMEKQQVHTFSPSVEKSEETLGDNSEMWDVTPDAGDGVVKPCLEKNHPRPLTHQP

SEQ ID NO: 771585 - protein, 300 aa, Homo sapiens [sequence omitted]

SEQ ID NO: 771586 - protein, 427 aa, Homo sapiens
MVCWQDLEESLRMKLSLTKVVNGCRLGKIKNLGKTGDHTMDIPGCLLYTKTGSAPHLTHHTLHNIHGVPAMAQLTLSSLAEHHEVLTEYKEGVGKFIGMPESLLYCSLHDPVSPCPAGYVTNKSVSVWSVAGRVEMTVSKFMAIQKALQPDWFQCLSDGEVSCKEATSIKRVRKSVDRSLLFLDNCLRLQEESEVLQKSVIIGVIEGGDVMEERLRSARETAKRPVGGFLLDGFQGNPTTLEARLRLLSSVTAELPEDKPRLISGVSRPDEVLECIERGVDLFESFFPYQVTERGCALTFSFDYQPNPEETLLQQNGTQEEIKCMDQIKKIETTGCNQEITSFEINLKEKKYQEDFNPLVRGCSCYCCKNHTRAYIHHLLVTNELLAGVLLMMHNFEHYFGFFHYIREALKSDKLAQLKELIHRQAS

SEQ ID NO: 771587 - protein, 415 aa, Homo sapiens
MKLSLTKVVNGCRLGKIKNLGKTGDHTMDIPGCLLYTKTGSAPHLTHHTLHNIHGVPAMAQLTLSSLAEHHEVLTEYKEGVGKFIGMPESLLYCSLHDPVSPCPAGYVTNKSVSVWSVAGRVEMTVSKFMAIQKALQPDWFQCLSDGEVSCKEATSIKRVRKSVDRSLLFLDNCLRLQEESEVLQKSVIIGVIEGGDVMEERLRSARETAKRPVGGFLLDGFQGNPTTLEARLRLLSSVTAELPEDKPRLISGVSRPDEVLECIERGVDLFESFFPYQVTERGCALTFSFDYQPNPEETLLQQNGTQEEIKCMDQIKKIETTGCNQEITSFEINLKEKKYQEDFNPLVRGCSCYCCKNHTRAYIHHLLVTNELLAGVLLMMHNFEHYFGFFHYIREALKSDKLAQLKELIHRQAS

SEQ ID NO: 771588 - protein, 253 aa, Homo sapiens [sequence omitted]

SEQ ID NO: 771589 - protein, 415 aa, Homo sapiens; identical to SEQ ID NO: 771587

SEQ ID NO: 771590 - protein, 415 aa, Homo sapiens; identical to SEQ ID NO: 771587

SEQ ID NO: 771591 - protein, 415 aa, Homo sapiens; identical to SEQ ID NO: 771587

SEQ ID NO: 771592 - protein, 152 aa, Homo sapiens
MKLSLTKVVNGCRLGKIKNLGKTGDHTMDIPGCLLYTKTGSAPHLTHHTLHNIHGVPAMAQLTLSSLAEHHEVLTEYKEGVGKFIGMPESLLYCSLHDPVSPCPAGYVTNKVCFQKGLQGCSFVPGSQPMVYPSDAQIPLSGMIPYTFSLFR

SEQ ID NO: 771593 - protein, 361 aa, Homo sapiens
MYGRNELIARYIKLRTGKTRTRKQVSSHIQVLARRKAREIQAKLKDQAAKDKALQSMAAMSSAQIISATAFHSSMALARGPGRPAVSGFWQGALPGQAGTSHDVKPFSQQTYAVQPPLPLPGFESPAGPAPSPSAPPAPPWQGRSVASSKLWMLEFSAFLEQQQDPDTYNKHLFVHIGQSSPSYSDPYLEAVDIRQIYDKFPEKKGGLKDLFERGPSNAFFLVKFWADLNTNIEDEGSSFYGVSSQYESPENMIITCSTKVCSFGKQVVEKVETEYARYENGHYSYRIHRSPLCEYMINFIHKLKHLPEKYMMNSVLENFTILQVVTNRDTQETLLCIAYVFEVSASEHGAQHHIYRLVKE

SEQ ID NO: 771594 - protein, 496 aa, Homo sapiens
GAGGPAATPSGSLPPAAARISFQPSFRAFQRPPRTLEARGREGRSSGAAASRQPTSAPPSGALEGTAGTITSNEWSSPTSPEGSTASGGSQALDKPIDNDAEGVWSPDIEQSFQEALAIYPPCGRRKIILSDEGKMYGRNELIARYIKLRTGKTRTRKQVSSHIQVLARRKAREIQAKLKDQAAKDKALQSMAAMSSAQIISATAFHSSMALARGPGRPAVSGFWQGALPGQAGTSHDVKPFSQQTYAVQPPLPLPGFESPAGPAPSPSAPPAPPWQGRSVASSKLWMLEFSAFLEQQQDPDTYNKHLFVHIGQSSPSYSDPYLEAVDIRQIYDKFPEKKGGLKDLFERGPSNAFFLVKFWADLNTNIEDEGSSFYGVSSQYESPENMIITCSTKVCSFGKQVVEKVETEYARYENGHYSYRIHRSPLCEYMINFIHKLKHLPEKYMMNSVLENFTILQVVTNRDTQETLLCIAYVFEVSASEHGAQHHIYRLVKE

SEQ ID NO: 771595 - protein, 318 aa, Homo sapiens
MYGRNELIARYIKLRTGKTRTRKQVSSHIQVLARRKAREIQAKLKFWQGALPGQAGTSHDVKPFSQQTYAVQPPLPLPGFESPAGPAPSPSAPPAPPWQGRSVASSKLWMLEFSAFLEQQQDPDTYNKHLFVHIGQSSPSYSDPYLEAVDIRQIYDKFPEKKGGLKDLFERGPSNAFFLVKFWADLNTNIEDEGSSFYGVSSQYESPENMIITCSTKVCSFGKQVVEKVETEYARYENGHYSYRIHRSPLCEYMINFIHKLKHLPEKYMMNSVLENFTILQVVTNRDTQETLLCIAYVFEVSASEHGAQHHIYRLVKE

SEQ ID NO: 771596 - protein, 701 aa, Homo sapiens
MARRGWRRAPLRRGVGSSPRARRLMRPLWLLLAVGVFDWAGASDGGGGEARAMDEEIVSEKQAEESHRQDSANLLIFILLLTLTILTIWLFKHRRARFLHETGLAMIYGLLVGLVLRYGIHVPSDVNNVTLSCEVQSSPTTLLVNVSGKFYEYMLKGEISSHELNNVQDNEMLRKVTFDPEVFFNILLPPIIFYAGYSLKRRHFFRNLGSILAYAFLGTAISCFVIGSIMYGCVTLMKVTGQLAGDFYFTDCLLFGAIVSATDPVTVLAIFHELQVDVELYALLFGESVLNDAVAIVLSSSIVAYQPAGDNSHTFDVTAMFKSIGIFLGIFSGSFAMGAATGVVTALVTKFTKLREFQLLETGLFFLMSWSTFLLAEAWGFTGVVAVLFCGITQAHYTYNNLSTESQHRTKQLFELLNFLAENFIFSYMGLTLFTFQNHVFNPTFVVGAFVAIFLGRAANIYPLSLLLNLGRRSKIGSNFQHMMMFAGLRGAMAFALAIRDTATYARQMMFSTTLLIVFFTVWVFGGGTTAMLSCLHIRVGVDSDQEHLGVPENERRTTKAESAWLFRMWYNFDHNYLKPLLTHSGPPLTTTLPACCGPIARCLTSPQAYENQEQLKDDDSDLILNDGDISLTYGDSTVNTEPATSSAPRRFMGNSSEDALDRELAFGDHELVIRGTRLVLPMDDSEPPLNLLDNTRHGPA

SEQ ID NO: 771597 - protein, 649 aa, Homo sapiens
MDEEIVSEKQAEESHRQDSANLLIFILLLTLTILTIWLFKHRRARFLHETGLAMIYGLLVGLVLRYGIHVPSDVNNVTLSCEVQSSPTTLLVNVSGKFYEYMLKGEISSHELNNVQDNEMLRKVTFDPEVFFNILLPPIIFYAGYSLKRRHFFRNLGSILAYAFLGTAISCFVIGSIMYGCVTLMKVTGQLAGDFYFTDCLLFGAIVSATDPVTVLAIFHELQVDVELYALLFGESVLNDAVAIVLSSSIVAYQPAGDNSHTFDVTAMFKSIGIFLGIFSGSFAMGAATGVVTALVTKFTKLREFQLLETGLFFLMSWSTFLLAEAWGFTGVVAVLFCGITQAHYTYNNLSTESQHRTKQLFELLNFLAENFIFSYMGLTLFTFQNHVFNPTFVVGAFVAIFLGRAANIYPLSLLLNLGRRSKIGSNFQHMMMFAGLRGAMAFALAIRDTATYARQMMFSTTLLIVFFTVWVFGGGTTAMLSCLHIRVGVDSDQEHLGVPENERRTTKAESAWLFRMWYNFDHNYLKPLLTHSGPPLTTTLPACCGPIARCLTSPQAYENQEQLKDDDSDLILNDGDISLTYGDSTVNTEPATSSAPRRFMGNSSEDALDRELAFGDHELVIRGTRLVLPMDDSEPPLNLLDNTRHGPA

SEQ ID NO: 771598 - protein, 701 aa, Homo sapiens; identical to SEQ ID NO: 771596

SEQ ID NO: 771599 - protein, 669 aa, Homo sapiens
MARRGWRRAPLRRGVGSSPRARRLMRPLWLLLAVGVFDWAGASDGGGGEARAMDEEIVSEKQAEESHRQDSANLLIFILLLTLTILTIWLFKHRRARFLHETGLAMIYGLLVGLVLRYGIHVPSDVNNVTLSCEVQSSPTTLLVTFDPEVFFNILLPPIIFYAGYSLKRRHFFRNLGSILAYAFLGTAISCFVIGSIMYGCVTLMKVTGQLAGDFYFTDCLLFGAIVSATDPVTVLAIFHELQVDVELYALLFGESVLNDAVAIVLSSSIVAYQPAGDNSHTFDVTAMFKSIGIFLGIFSGSFAMGAATGVVTALVTKFTKLREFQLLETGLFFLMSWSTFLLAEAWGFTGVVAVLFCGITQAHYTYNNLSTESQHRTKQLFELLNFLAENFIFSYMGLTLFTFQNHVFNPTFVVGAFVAIFLGRAANIYPLSLLLNLGRRSKIGSNFQHMMMFAGLRGAMAFALAIRDTATYARQMMFSTTLLIVFFTVWVFGGGTTAMLSCLHIRVGVDSDQEHLGVPENERRTTKAESAWLFRMWYNFDHNYLKPLLTHSGPPLTTTLPACCGPIARCLTSPQAYENQEQLKDDDSDLILNDGDISLTYGDSTVNTEPATSSAPRRFMGNSSEDALDRELAFGDHELVIRGTRLVLPMDDSEPPLNLLDNTRHGPA

SEQ ID NO: 771600 - protein, 701 aa, Homo sapiens; identical to SEQ ID NO: 771596

SEQ ID NO: 771601 - protein, 269 aa, Homo sapiens
MARRGWRRAPLRRGVGSSPRARRLMRPLWLLLAVGVFDWAGASDGGGGEARAMDEEIVSEKQAEESHRQDSANLLIFILLLTLTILTIWLFKHRRARFLHETGLAMIYGLLVGLVLRYGIHVPSDVNNVTLSCEVQSSPTTLLVNVSGKFYEYMLKGEISSHELNNVQDNEMLRKVTFDPEVFFNILLPPIIFYAGYSLKRRHFFRNLGSILAYAFLGTAISCFVIGSIMYGCVTLMKVTGQLAGDFYFTDCLLFGAIVSATDPGMFYM

SEQ ID NO: 771602 - protein, 105 aa, Homo sapiens
GLDKSFPTTALWKFGAGSFLLWGLCLGGCLAVSKVSTYQMPVVPLLPDVATKNASRCPPKSNVPCGGGIAPGLGTLSYTLFWDLTCIIWLSSHCRHSFPFHLTEK

SEQ ID NO: 771603 - protein, 647 aa, Homo sapiens
GGALGGRGVMDGSGPFSCPICLEPLREPVTLPCGHNFCLACLGALWPHRGASGAGGPGGAARCPLCQEPFPDGLQLRKNHTLSELLQLRQGSGPGSGPGPAPALAPEPSAPSALPSVPEPSAPCAPEPWPAGEEPVRCDACPEGAALPAALSCLSCLASFCPAHLGPHERSPALRGHRLVPPLRRLEESLCPRHLRPLERYCRAERVCLCEACAAQEHRGHELVPLEQERALQEAEQSKVLSAVEDRMDELGAGIAQSRRTVALIKSAAVAERERVSRLFADAAAALQGFQTQVLGFIEEGEAAMLGRSQGDLRRQEEQRSRLSRARQNLSQVPEADSVSFLQELLALRLALEDGCGPGPGPPRELSFTKSSQAVRAVRDMLAVACVNQWEQLRGPGGNEDGPQKLDSEADAEPQDLESTNLLESEAPRDYFLKFAYIVDLDSDTADKFLQLFGTKGVKRVLCPINYPLSPTRFTHCEQVLGEGALDRGTYYWEVEIIEGWVSMGVMAEDFSPQEPYDRGRLGRNAHSCCLQWNGRSFSVWFHGLEAPLPHPFSPTVGVCLEYADRALAFYAVRDGKMSLLRRLKASRPRRGGIPASPIDPFQSRLDSHFAGLFTHRLKPAFFLESVDAHLQIGPLKKSCISVLKRR

SEQ ID NO: 771604 - protein, 400 aa, Homo sapiens
MDELGAGIAQSRRTVALIKSAAVAERERVSRLFADAAAALQGFQTQVLGFIEEGEAAMLGRSQGDLRRQEEQRSRLSRARQNLSQVPEADSVSFLQELLALRLALEDGCGPGPGPPRELSFTKSSQAVRAVRDMLAVACVNQWEQLRGPGGNEDGPQKLDSEADAEPQDLESTNLLESEAPRDYFLKFAYIVDLDSDTADKFLQLFGTKGVKRVLCPINYPLSPTRFTHCEQVLGEGALDRGTYYWEVEIIEGWVSMGVMAEDFSPQEPYDRGRLGRNAHSCCLQWNGRSFSVWFHGLEAPLPHPFSPTVGVCLEYADRALAFYAVRDGKMSLLRRLKASRPRRGGIPASPIDPFQSRLDSHFAGLFTHRLKPAFFLESVDAHLQIGPLKKSCISVLKRR

SEQ ID NO: 771605 - protein, 698 aa, Homo sapiens
GGALGGRGVMDGSGPFSCPICLEPLREPVTLPCGHNFCLACLGALWPHRGASGAGGPGGAARCPLCQEPFPDGLQLRKNHTLSELLQLRQGSGPGSGPGPAPALAPEPSAPSALPSVPEPSAPCAPEPWPAGEEPVRCDACPEGAALPAALSCLSCLASFCPAHLGPHERSPALRGHRLVPPLRRLEESLCPRHLRPLERYCRAERVCLCEACAAQEHRGHELVPLEQERALQEVGSGGTLGGAGAGDRPRASGPRTLDPPVFPGWVLISSSNLRIFAVPSSLDKAEQSKVLSAVEDRMDELGAGIAQSRRTVALIKSAAVAERERVSRLFADAAAALQGFQTQVLGFIEEGEAAMLGRSQGDLRRQEEQRSRLSRARQNLSQVPEADSVSFLQELLALRLALEDGCGPGPGPPRELSFTKSSQAVRAVRDMLAVACVNQWEQLRGPGGNEDGPQKLDSEADAEPQDLESTNLLESEAPRDYFLKFAYIVDLDSDTADKFLQLFGTKGVKRVLCPINYPLSPTRFTHCEQVLGEGALDRGTYYWEVEIIEGWVSMGVMAEDFSPQEPYDRGRLGRNAHSCCLQWNGRSFSVWFHGLEAPLPHPFSPTVGVCLEYADRALAFYAVRDGKMSLLRRLKASRPRRGGIPASPIDPFQSRLDSHFAGLFTHRLKPAFFLESVDAHLQIGPLKKSCISVLKRR

SEQ ID NO: 771606 - protein, 722 aa, Homo sapiens
GGALGGRGVMDGSGPFSCPICLEPLREPVTLPCGHNFCLACLGALWPHRGASGAGGPGGAARCPLCQEPFPDGLQLRKNHTLSELLQLRQGSGPGSGPGPAPALAPEPSAPSALPSVPEPSAPCAPEPWPAGEEPVRCDACPEGAALPAALSCLSCLASFCPAHLGPHERSPALRGHRLVPPLRRLEESLCPRHLRPLERYCRAERVCLCEACAAQEHRGHELVPLEQERALQEAEQSKVLSAVEDRMDELGAGIAQSRRTVALIKVKHPSLSMEQSTPNKPCPYLLSTSVPGPGPDPGQAQSGPSVPSRGPVGSRGQGRRGVQSGTVLCPHCPLYCRPVQSAAVAERERVSRLFADAAAALQGFQTQVLGFIEEGEAAMLGRSQGDLRRQEEQRSRLSRARQNLSQVPEADSVSFLQELLALRLALEDGCGPGPGPPRELSFTKSSQAVRAVRDMLAVACVNQWEQLRGPGGNEDGPQKLDSEADAEPQDLESTNLLESEAPRDYFLKFAYIVDLDSDTADKFLQLFGTKGVKRVLCPINYPLSPTRFTHCEQVLGEGALDRGTYYWEVEIIEGWVSMGVMAEDFSPQEPYDRGRLGRNAHSCCLQWNGRSFSVWFHGLEAPLPHPFSPTVGVCLEYADRALAFYAVRDGKMSLLRRLKASRPRRGGIPASPIDPFQSRLDSHFAGLFTHRLKPAFFLESVDAHLQIGPLKKSCISVLKRR

SEQ ID NO: 771607 - protein, 647 aa, Homo sapiens; identical to SEQ ID NO: 771603

SEQ ID NO: 771608 - protein, 594 aa, Homo sapiens
GGALGGRGVMDGSGPFSCPICLEPLREPVTLPCGHNFCLACLGALWPHRGASGAGGPGGAARCPLCQEPFPDGLQLRKNHTLSELLQLRQGSGPGSGPGPAPALAPEPSAPSALPSVPEPSAPCAPEPWPAGEEPVRCDACPEGAALPAALSCLSCLASFCPAHLGPHERSPALRGHRLVPPLRRLEESLCPRHLRPLERYCRAERVCLCEACAAQEHRGHELVPLEQERALQEAEQSKVLSAVEDRMDELGAGIAQSRRTVALIKSAAVAERERVSRLFADAAAALQGFQTQVLGFIEEGEAAMLGRSQGDLRRQEEQRSRLSRARQNLSQVPEADSVSFLQELLALRLALEDGCGPGPGPPRELSFTKSSQAVRAVRDMLAVACVNQWEQLRGPGGNEDGPQKLDSEADAEPQDLESTNLLESEAPRDYFLKFAYIVDLDSDTADKFLQLFGTKGVKRVLCPINYPLSPTRFTHCEQVLGEGALDRGTYYWEVEIIEGWVSMGVMAEDFSPQEPYDRGRLGRNAHSCCLQWNGRSFSVWFHGLEAPLPHPFSPTLFIHSAFPLPGRRTPRPCSPADLTSGRQSYSWDSSKLP

SEQ ID NO: 771609 - protein, 364 aa, Homo sapiens
GGALGGRGVMDGSGPFSCPICLEPLREPVTLPCGHNFCLACLGALWPHRGASGAGGPGGAARCPLCQEPFPDGLQLRKNHTLSELLQLRQGSGPGSGPGPAPALAPEPSAPSALPSVPEPSAPCAPEPWPAGEEPVRCDACPEGAALPAALSCLSCLASFCPAHLGPHERSPALRGHRLVPPLRRLEESLCPRHLRPLERYCRAERVCLCEACAAQEHRGHELVPLEQERALQEAEQSKVLSAVEDRMDELGAGIAQSRRTVALIKSAAVAERERVSRLFADAAAALQGFQTQVLGFIEEGEAAMLGRSQGDLRRQEEQRSRLSRARQNLSQVPEADSVSFLQELLALRLAWRMGEAELPRGSR

SEQ ID NO: 771610 - protein, 647 aa, Homo sapiens; identical to SEQ ID NO: 771603

SEQ ID NO: 771611 - protein, 655 aa, Homo sapiens
GGALGGRGVMDGSGPFSCPICLEPLREPVTLPCGHNFCLACLGALWPHRGASGAGGPGGAARCPLCQEPFPDGLQLRKNHTLSELLQLRQGSGPGSGPGPAPALAPEPSAPSALPSVPEPSAPCAPEPWPAGEEPVRCDACPEGAALPAALSCLSCLASFCPAHLGPHERSPALRGHRLVPPLRRLEESLCPRHLRPLERYCRAERVCLCEACAAQEHRGHELVPLEQERALQEVGSGGTTRAEQSKVLSAVEDRMDELGAGIAQSRRTVALIKSAAVAERERVSRLFADAAAALQGFQTQVLGFIEEGEAAMLGRSQGDLRRQEEQRSRLSRARQNLSQVPEADSVSFLQELLALRLALEDGCGPGPGPPRELSFTKSSQAVRAVRDMLAVACVNQWEQLRGPGGNEDGPQKLDSEADAEPQDLESTNLLESEAPRDYFLKFAYIVDLDSDTADKFLQLFGTKGVKRVLCPINYPLSPTRFTHCEQVLGEGALDRGTYYWEVEIIEGWVSMGVMAEDFSPQEPYDRGRLGRNAHSCCLQWNGRSFSVWFHGLEAPLPHPFSPTVGVCLEYADRALAFYAVRDGKMSLLRRLKASRPRRGGIPASPIDPFQSRLDSHFAGLFTHRLKPAFFLESVDAHLQIGPLKKSCISVLKRR

SEQ ID NO: 771612 - protein, 343 aa, Homo sapiens [sequence omitted]

SEQ ID NO: 771613 - protein, 295 aa, Homo sapiens
FFKLDQTGGPPRELSFTKSSQAVRAVRDMLAVACVNQWEQLRGPGGNEDGPQKLDSEADAEPQDLESTNLLESEAPRDYFLKFAYIVDLDSDTADKFLQLFGTKGVKRVLCPINYPLSPTRFTHCEQVLGEGALDRGTYYWEVEIIEGWVSMGVMAEDFSPQEPYDRGRLGRNAHSCCLQWNGRSFSVWFHGLEAPLPHPFSPTVGVCLEYADRALAFYAVRDGKMSLLRRLKASRPRRGGIPASPIDPFQSRLDSHFAGLFTHRLKPAFFLESVDAHLQIGPLKKSCISVLKRR

SEQ ID NO: 771614 - protein, 418 aa, Homo sapiens
GGALGGRGVMDGSGPFSCPICLEPLREPVTLPCGHNFCLACLGALWPHRGASGAGGPGGAARCPLCQEPFPDGLQLRKNHTLSELLQLRQGSGPGSGPGPAPALAPEPSAPSALPSVPEPSAPCAPEPWPAGEEPVRCDACPEGAALPAALSCLSCLASFCPAHLGPHERSPALRGHRLVPPLRRLEESLCPRHLRPLERYCRAERVCLCEACAAQEHRGHELVPLEQERALQEAEQSKVLSAVEDRMDELGAGIAQSRRTVALIKSAAVAERERVSRLFADAAAALQGFQTQVLGFIEEGEAAMLGRSQGDLRRQEEQRSRLSRARQNLSQVPEADSVSFLQELLALRLALEDGCGPGPGPPRELSFTKSSQAVRAVRDMLAVACVNQWEQLRGPGGNEDGPQKLDSEGGHRPTPPR

SEQ ID NO: 771615 - protein, 256 aa, Homo sapiens
TTTKFAAASTEIPLSAEVTTEESFYLSIQKDLTALLTGDTQAEISQIMNNGRKGAVCVQEPSCPLASLGSSAVTCHSAGSVGFLKEQRSALGREHPGGCDRSSSMGRPGRVKHVEFQGVEILWTGGDKRETQHPIDFETSLQRTASPDSKESSKVPRHLISSAGLCNSSSLTENVWDESWKAPSERPGTSSGTFSPVRLDESGEDEVFLQENKQHLEKTPKPERDRERISEQEEHVKGEDEDILGPGYTEDSTDVY

SEQ ID NO: 771616 - protein, 178 aa, Homo sapiens
MAFLLKLEPDMQGKVDLFRARIAQEAEDLVSTFFPQKVLELNSRVQELRLQDLSRIHSVPTSEPLATPGNKGDGPNQNLPVLLTQFSIKVPALLGSEGQLLRSNQHLVELTEWVKPEIKLLREKCNTVHMYVHPLILKVQDGNNFRVSIQEDTVDQLWTVDSTAASSLCGFSTYYNTQ

SEQ ID NO: 771617 - protein, 128 aa, Homo sapiens
MQTYAHAQYQRPTTAINETELPILIDQSRPDFKHILLQQNLYTSHLSYTLPSNHALRSYILLISINSYIYNLNTNYNIYMNNLHNKHVKIQTETHTRTCISTLYDPNISHATMTYNLSSTYTNSKDAR

SEQ ID NO: 771618 - protein, 107 aa, Homo sapiens
LSCCRWGVCEVKQDRQGTGEAPVCRGRGVLGASPLAPASFERLISLMWGLVIEAWEPPCPHAALCVSQACPTGLESLPPGPSALLSTVTSFSPFFTGGTPTWREATG

SEQ ID NO: 771619 - protein, 254 aa, Homo sapiens
  misc_feature (4)..(6): Xaa can be any naturally occurring amino acid
  misc_feature (19)..(19): Xaa can be any naturally occurring amino acid
  misc_feature (25)..(25): Xaa can be any naturally occurring amino acid
  misc_feature (247)..(247): Xaa can be any naturally occurring amino acid
LLGXXXLLGAPVSISSSDXHREKKXRFTVYKVLVSVGRSEWFVFRRYAEFDKLYNTLKKQFPAMALKIPAKRIFGDNFDPDFIKQRRAGLNEFIQNLVRYPELYNHPDVRAFLQMDSPKHQSDPSEDEDERSSQKLHSTSQNINLGPSGNPHAKPTDFDFLKVIGKGSFGKVLLAKRKLDGKFYAVKVLQKKIVLNRKEQKHIMAERNVLLKNVKHPFLVGLHYSFQTTEKLYFVLDFVNGGELFFXYKGTAFL

SEQ ID NO: 771620 - protein, 496 aa, Homo sapiens
MQRDHTMDYKESCPSVSIPSSDEHREKKKRFTVYKVLVSVGRSEWFVFRRYAEFDKLYNTLKKQFPAMALKIPAKRIFGDNFDPDFIKQRRAGLNEFIQNLVRYPELYNHPDVRAFLQMDSPKHQSDPSEDEDERSSQKLHSTSQNINLGPSGNPHAKPTDFDFLKVIGKGSFGKVLLAKRKLDGKFYAVKVLQKKIVLNRKEQKHIMAERNVLLKNVKHPFLVGLHYSFQTTEKLYFVLDFVNGGELFFHLQRERSFPEHRARFYAAEIASALGYLHSIKIVYRDLKPENILLDSVGHVVLTDFGLCKEGIAISDTTTTFCGTPEYLAPEVIRKQPYDNTVDWWCLGAVLYEMLYGLPPFYCRDVAEMYDNILHKPLSLRPGVSLTAWSILEELLEKDRQNRLGAKEDFLEIQNHPFFESLSWADLVQKKIPPPFNPNVAGPDDIRNFDTAFTEETVPYSVCVSSDYSIVNASVLEADDAFVGFSYAPPSEDLFL

SEQ ID NO: 771621 - protein, 286 aa, Homo sapiens
MDYKESCPSVSIPSSDEHREKKKRFTVYKVLVSVGRSEWFVFRRYAEFDKLYNTLKKQFPAMALKIPAKRIFGDNFDPDFIKQRRAGLNEFIQNLVRYPELYNHPDVRAFLQMDSPKHQSDPSEDEDERSSQKLHSTSQNINLGPSGNPHAKPTDFDFLKVIGKGSFGKVLLAKRKLDGKFYAVKVLQKKIVLNRKEQKHIMAERNVLLKNVKHPFLVGLHYSFQTTEKLYFVLDFVNGGELFFHLQRKRIALCCIEGSWRNGLPQLSYVNGYPSDFNAIFSLRAL

SEQ ID NO: 771622 - protein, 378 aa, Homo sapiens
MDSPKHQSDPSEDEDERSSQKLHSTSQNINLGPSGNPHAKPTDFDFLKVIGKGSFGKVLLAKRKLDGKFYAVKVLQKKIVLNRKEQKHIMAERNVLLKNVKHPFLVGLHYSFQTTEKLYFVLDFVNGGELFFHLQRERSFPEHRARFYAAEIASALGYLHSIKIVYRDLKPENILLDSVGHVVLTDFGLCKEGIAISDTTTTFCGTPEYLAPEVIRKQPYDNTVDWWCLGAVLYEMLYGLPPFYCRDVAEMYDNILHKPLSLRPGVSLTAWSILEELLEKDRQNRLGAKEDFLEIQNHPFFESLSWADLVQKKIPPPFNPNVAGPDDIRNFDTAFTEETVPYSVCVSSDYSIVNASVLEADDAFVGFSYAPPSEDLFL

SEQ ID NO: 771623 - protein, 153 aa, Homo sapiens
GSHQLGPIDEMPYGLPPFYCRDVAEMYDNILHKPLSLRPGVSLTAWSILEELLEKDRQNRLGAKEDFLEIQNHPFFESLSWADLVQKKIPPPFNPNVAGPDDIRNFDTAFTEETVPYSVCVSSDYSIVNASVLEADDAFVGFSYAPPSEDLFL

SEQ ID NO: 771624 - protein, 174 aa, Homo sapiens
MQRDHTMDYKESCPSVSIPSSDEHREKKKRFTVYKVLVSVGRSEWFVFRRYAEFDKLYNTLKKQFPAMALKIPAKRIFGDNFDPDFIKQRRAGLNEFIQNLVRYPELYNHPDVRAFLQMDSPKHQSDPSEDEDERSSQKMESLCCPCWNAMAQSRLTATSPSWFQVILLPQPPK

SEQ ID NO: 771625 - protein, 496 aa, Homo sapiens; identical to SEQ ID NO: 771620

SEQ ID NO: 771626 - protein, 454 aa, Homo sapiens
MDYKESCPSVSIPSSDEHREKKKRFTVYKVLVSVGRSEWFVFRRYAEFDKLYNTLKKQFPAMALKIPAKRIFGDNFDPDFIKQRRAGLNEFIQNLVRYPELYNHPDVRAFLQMDSPKHQSDPSEDEDERSSQKVLLAKRKLDGKFYAVKVLQKKIVLNRKEQKHIMAERNVLLKNVKHPFLVGLHYSFQTTEKLYFVLDFVNGGELFFHLQRERSFPEHRARFYAAEIASALGYLHSIKIVYRDLKPENILLDSVGHVVLTDFGLCKEGIAISDTTTTFCGTPEYLAPEVIRKQPYDNTVDWWCLGAVLYEMLYGLPPFYCRDVAEMYDNILHKPLSLRPGVSLTAWSILEELLEKDRQNRLGAKEDFLEIQNHPFFESLSWADLVQKKIPPPFNPNVAGPDDIRNFDTAFTEETVPYSVCVSSDYSIVNASVLEADDAFVGFSYAPPSEDLFL

SEQ ID NO: 771627 - protein, 111 aa, Homo sapiens
MAIKRWKWSSQSKSRSVKCESSWQQVFCLFGFGFGLFVLRWSLLLPPRLEYNGAISAYCNLPIPGSNDSPATASGVAGITGIHHHAQLIFVFLVDTRFYHVGQAGLELLTS

SEQ ID NO: 771628 - protein, 84 aa, Homo sapiens
SRFTSLPTGIEKGIEEHGPGAGAAGQMGRRAGYCKRSRTWGREGLQKAPSTEGESAADSCLARAGGVEQKVDAEQKVDAEQKVD

SEQ ID NO: 771629 - protein, 106 aa, Homo sapiens
MRPSLRLWPRPTGVQCLRSLGRETRAGGDSAEPPCWVGSMTTWWVSSPHALTVNSPVDSFLLVSITPGQAWYNTGRCSQSFQHSTFTGQDGGPRFPSEESESQGAA

SEQ ID NO: 771630 - protein, 66 aa, Homo sapiens
RGERVSSKMWSQQVSHYEDYHGNQGVLLGLKWMRAVLEGAGLMTHGRGLKRMWVVAEDRRVSWNVW

SEQ ID NO: 771631 - protein, 110 aa, Homo sapiens
RERERERERERERERERERGQNPLVAFGVFPWTRPPGRRTSTGWARQAGCAGRKSDELESGRWGATAGLSGEVTLPLRPEWKGAPGGGTAGAEMESHCSPDGVQWRDLGS

SEQ ID NO: 771632 - protein, 44 aa, Homo sapiens
SPWRFSAAYSVGQQVAQDTRQLLSSHNAVLELEQKLVLYEGPWL

SEQ ID NO: 771633 - protein, 144 aa, Homo sapiens
MKTLLLLAVIMIFGLLQAHGNLVNFHRMIKLTTGKEAALSYGFYGCHCGVGGRGSPKDATDRCCVTHDCCYKRLEKRGCGTKFLSYKFSNSGSRITCAKQDSCRSQLCECDKAAATCFARNKTTYNKKYQYYSNKHCRGSTPRC

SEQ ID NO: 771634 - protein, 144 aa, Homo sapiens; identical to SEQ ID NO: 771633

SEQ ID NO: 771635 - protein, 144 aa, Homo sapiens; identical to SEQ ID NO: 771633

SEQ ID NO: 771636 - protein, 144 aa, Homo sapiens; identical to SEQ ID NO: 771633

SEQ ID NO: 771637 - protein, 150 aa, Homo sapiens
MKTLLLLAVIMIFGLLQAHGNLVNFHRMIKLTTGKEAALSYGFYGCHCGVGGRGSPKDATDRCCVTHDCCYKRLEKRGCGTKFLSYKFSNSGSRITCAKQDSCRSQLCECDKAAATCFARNKTTYNRVPSSLETFHPVLNFPLSYPPSLP

SEQ ID NO: 771638 - protein, 144 aa, Homo sapiens; identical to SEQ ID NO: 771633

SEQ ID NO: 771639 - protein, 144 aa, Homo sapiens; identical to SEQ ID NO: 771633

SEQ ID NO: 771640 - protein, 144 aa, Homo sapiens; identical to SEQ ID NO: 771633

SEQ ID NO: 771641 - protein, 150 aa, Homo sapiens; identical to SEQ ID NO: 771637

SEQ ID NO: 771642 - protein, 289 aa, Homo sapiens
MEPVGCCGECRGSSVDPRSTFVLSNLAEVVERVLTFLPAKALLRVACVCRLWRECVRRVLRTHRSVTWISAGLAEAGHLEGHCLVRVVAEELENVRILPHTVLYMADSETFISLEECRGHKRARKRTSMETALALEKLFPKQCQVLGIVTPGIVVTPMGSGSNRPQEIEIGESGFALLFPQIEGIKIQPFHFIKDPKNLTLERHQLTEVGLLDNPELRVVLVFGYNCCKVGASNYLQQVVSTFSDMNIILAGGQVDNLSSLTSEKSMSCVLLISSVNEGKWSQVLSLWG

SEQ ID NO: 771643 - protein, 403 aa, Homo sapiens
MEPVGCCGECRGSSVDPRSTFVLSNLAEVVERVLTFLPAKALLRVACVCRLWRECVRRVLRTHRSVTWISAGLAEAGHLEGHCLVRVVAEELENVRILPHTVLYMADSETFISLEECRGHKRARKRTSMETALALEKLFPKQCQVLGIVTPGIVVTPMGSGSNRPQEIEIGESGFALLFPQIEGIKIQPFHFIKDPKNLTLERHQLTEVGLLDNPELRVVLVFGYNCCKVGASNYLQQVVSTFSDMNIILAGGQVDNLSSLTSEKNPLDIDASGVVGLSFSGHRIQSATVLLNEDVSDEKTAEAAMQRLKAANIPEHNTIGFMFACVGRGFQYYRAKGNVEADAFRKFFPSVPLFGFFGNGEIGCDRIVTGNFILRKCNEVKDDDLFHSYTTIMALIHLGSSK

SEQ ID NO: 771644 - protein, 403 aa, Homo sapiens; identical to SEQ ID NO: 771643

SEQ ID NO: 771645 - protein, 299 aa, Homo sapiens
MADSETFISLEECRGHKRARKRTSMETALALEKLFPKQCQVLGIVTPGIVVTPMGSGSNRPQEIEIGESGFALLFPQIEGIKIQPFHFIKDPKNLTLERHQLTEVGLLDNPELRVVLVFGYNCCKVGASNYLQQVVSTFSDMNIILAGGQVDNLSSLTSEKNPLDIDASGVVGLSFSGHRIQSATVLLNEDVSDEKTAEAAMQRLKAANIPEHNTIGFMFACVGRGFQYYRAKGNVEADAFRKFFPSVPLFGFFGNGEIGCDRIVTGNFILRKCNEVKDDDLFHSYTTIMALIHLGSSK

SEQ ID NO: 771646 - protein, 192 aa, Homo sapiens
MEPVGCCGECRGSSVDPRSTFVLSNLAEVVERVLTFLPAKALLRVACVCRLWRECVRRVLRTHRSVTWISAGLAEAGHLEGHCLVRVVAEELENVRILPHTVLYMADSETFISLEECRGHKRARKRTSMETALALEKLFPKQCQVLGIVTPGIVVTPMGSGSNRPQEIEIGESGFALLFPQIEGIKIQPSFR

SEQ ID NO: 771647 - protein, 348 aa, Homo sapiens
MEPVGCCGECRGSSVDPRSTFVLSNLAEVVERVLTFLPAKALLRVACVCRLWRECVRRVLRTHRSVTWISAGLAEAGHLEGHCLVRVVAEELENVRILPHTVLYMADSETFISLEECRGHKRARKRTSMETALALEKLFPKQCQVLGIVTPGIVGLLDNPELRVVLVFGYNCCKVGASNYLQQVVSTFSDMNIILAGGQVDNLSSLTSEKNPLDIDASGVVGLSFSGHRIQSATVLLNEDVSDEKTAEAAMQRLKAANIPEHNTIGFMFACVGRGFQYYRAKGNVEADAFRKFFPSVPLFGFFGNGEIGCDRIVTGNFILRKCNEVKDDDLFHSYTTIMALIHLGSSK

SEQ ID NO: 771648 - protein, 312 aa, Homo sapiens
MEPVGCCGECRGSSVDPRSTFVLSNLAEVVERVLTFLPAKALLRVACVCRLWRECVRRVLRTHRSVTWISAGLAEAGHLEGHCLVRVVAEELENVRILPHTVLYMADSETFISLEECRGHKRARKRTSMETALALEKLFPKQCQVLGIVTPGIVVTPMGSGSNRPQEIEIGESGFALLFPQIEGIKIQPFHFIKDPKNLTLERHQLTEVGTLWILMPRVWLDCHLVDTESRVPLCSSTRTSVMRRLLRLRCSASKRPTFQSITPLASCLHALAGAFSITEPRGMLRLMHLESFFLVFPYSASLEMEKLDVIG

SEQ ID NO: 771649 - protein, 163 aa, Homo sapiens
MADSETFISLEECRGHKRARKRTSMETALALEKLFPKQCQVLGIVTPGIVVTPMGSGSNRPQEIEIGESGFALLFPQIEGIKIQPFHFIKDPKNLTLERHQLTEVGLLDNPELRVVLVFGYNCCKVGASNYLQQVVSTFSDMNIILAGGQVDNLSSLTSEKSK

SEQ ID NO: 771650 - protein, 103 aa, Homo sapiens
MEPVGCCGECRGSSVDPRSTFVLSNLAEVVERVLTFLPAKALLRVACVCRLWRECVRRVLRTHRSVTWISAGLAEAGHLEGHCLVRVVAEELETRFRFCQLSQ

SEQ ID NO: 771651 - protein, 299 aa, Homo sapiens; identical to SEQ ID NO: 771645

SEQ ID NO: 771652 - protein, 299 aa, Homo sapiens; identical to SEQ ID NO: 771645

SEQ ID NO: 771653 - protein, 297 aa, Homo sapiens
AFSRIPVGCKCRGRKRARKRTSMETALALEKLFPKQCQVLGIVTPGIVVTPMGSGSNRPQEIEIGESGFALLFPQIEGIKIQPFHFIKDPKNLTLERHQLTEVGLLDNPELRVVLVFGYNCCKVGASNYLQQVVSTFSDMNIILAGGQVDNLSSLTSEKNPLDIDASGVVGLSFSGHRIQSATVLLNEDVSDEKTAEAAMQRLKAANIPEHNTIGFMFACVGRGFQYYRAKGNVEADAFRKFFPSVPLFGFFGNGEIGCDRIVTGNFILRKCNEVKDDDLFHSYTTIMALIHLGSSK

SEQ ID NO: 771654 - protein, 381 aa, Homo sapiens
MEPVGCCGECRGSSVDPRSTFVLSNLAEVVERVLTFLPAKALLRVACVCRLWRECVRRVLRTHRSVTWISAGLAEAGHLEGHCLVRVVAEELENVRILPHTVLYMADSETFISLEECRGHKRARKRTSMETALALEKLFPKQCQVLGIVTPGIVVTPMGSGSNRPQEIEIGESGFALLFPQIEGIKIQPFHFIKDPKNLTLERHQLTEVGLLDNPELRVVLVFGYNCCKVGASNYLQQVVSTFSDMNIILAGGQVDNLSSLTSEKNPLDIDASGVVGLSFSGHRIQSATVLLNEDVSDEKTAEAAMQRLKAANIPEHNTIGFMFACVGRGFQYYRAKGNVEADAFRKFFPSVPLFGFFGNGEIGCDRIVTGNFILRKCNEV

SEQ ID NO: 771655 - protein, 267 aa, Homo sapiens
MEPVGCCGECRGSSVDPRSTFVLSNLAEVVERVLTFLPAKALLRVACVCRLWRECVRRVLRTHRSVTWISAGLAEAGHLEGHCLVRVVAEELENVRILPHTVLYMADSETFISLEECRGHKRARKRTSMETALALEKLFPKQCQVLGIVTPGIVVTPMGSGSNRPQEIEIGESGFALLFPQIEGIKIQPFHFIKDPKNLTLERHQLTEVGLLDNPELRVVLVFGYNCCKVGASNYLQQVVSTFSDMNIILAGGQVDNLSSLTSEKSK

SEQ ID NO: 771656 - protein, 134 aa, Homo sapiens
MGKPTGTESPKEVPNPVGSGKGFREGCLQILMTKSNIFAVVTQEEMNGWLEAVASSVAEHAEIARWGQTLPTTSSTDEGTLRGKAEIAGPAGAGSDFPPPGPDTSRLPSFPHCGHKDTFSSAGAGAPSSNTEDA

SEQ ID NO: 771657 - protein, 114 aa, Homo sapiens
MGELGFYKDSKGPASGSTHGGEPLLSLHKATSEVASDYKKKKHVFKLQTQDGSEFLLQAKDEEEMNGWLEAVASSVAEHAEIARWGQTLPTTSSTDEGNPKREGGDRRASGRRK

SEQ ID NO: 771658 - protein, 181 aa, Homo sapiens
MSPRDRHSGLLGTAAAHSHQELEDLGVSRIGHQELNLERQLTLLCALNYGLETENLKTLSHKLNASAKNLQNFITGRRRSGHYDGRTSRKLPNDFLTSVVDLIGAAKSLLAWLDRSPFAAVTDYSVTRNNVIQLCLELTTIVQQDCTVYETENKILHVVSILGFILIFIRGYFLVQLEEVN

SEQ ID NO: 771659 - protein, 183 aa, Homo sapiens
MSPRDRHSGLLGTAAAHSHQELEDLGVSRIGHQELNLERQLTLLCALNYGLETENLKTLSHKLNASAKNLQNFITGRRRSGHYDGRTSRKLPNDFLTSVVDLIGAAKSLLAWLDRSPFAAVTDYSVTRNNVIQLCLELTTIVQQDCTVYETENKILHVCKTLSGVCDHIISLSSDPLVSQSAH

SEQ ID NO: 771660 - protein, 501 aa, Homo sapiens
MRLPKLLTFLLWYLAWLDLEFICTVLGAPDLGQRPQGTRPGLAKAEAKERPPLARNVFRPGGHSYGGGATNANARAKGGTGQTGGLTQPKKDEPKKLPPRPGGPEPKPGHPPQTRQATARTVTPKGQLPGGKAPPKAGSVPSSFLLKKAREPGPPREPKEPFRPPPITPHEYMLSLYRTLSDADRKGGNSSVKLEAGLANTITSFIDKGQDDRGPVVRKQRYVFDISALEKDGLLGAELRILRKKPSDTAKPAAPGGGRAAQLKLSSCPSGRQPAALLDVRSVPGLDGSGWEVFDIWKLFRNFKNSAQLCLELEAWERGRAVDLRGLGFDRAARQVHEKALFLVFGRTKKRDLFFNEIKARSGQDDKTVYEYLFSQRRKRRAPLATRQGKRPSKNLKARCSRKALHVNFKDMGWDDWIIAPLEYEAFHCEGLCEFPLRSHLEPTNHAVIQTLMNSMDPESTPPTCCVPTRLSPISILFIDSANNVVYKQYEDMVVESCGCR

SEQ ID NO: 771661 - protein, 501 aa, Homo sapiens; identical to SEQ ID NO: 771660

SEQ ID NO: 771662 - protein, 277 aa, Homo sapiens
MWSPTMAGGLFAVSKKYFEYLGSYDTGMEVWGGENLEFSFRIWQCGGVLETHPCSHVGHVFPKQAPYSRNKALANSVRAAEVWMDEFKELYYHRNPRARLEPFGDVTERKQLRDKLQCKDFKWFLETVYPELHVPEDRPGFFGMLQNKGLTDYCFDYNPPDENQIVGHQVILYLCHGMGQNQFFEYTSQKEIRYNTHQPEGCIAVEAGMDTLIMHLCEETAPENQKFILQEDGSLFHEQSKKCVQAARKESSDSFVPLLRDCTNSDHQKWFFKERML

SEQ ID NO: 771663 - protein, 76 aa, Homo sapiens
CTSLVLCPRDSPELLRYTEDTYPSINISEMDGSLFHEQSKKCVQAARKESSDSFVPLLRDCTNSDHQKWFFKERML

SEQ ID NO: 771664 - protein, 515 aa, Homo sapiens
RPPVPANALGARGEAVRLQLQGEELRLQEESVRLHQINIYLSDRISLHRRLPVRWNPLCKEKKYDYDNLPRTSVIIAFYNEAWSTLLRTVYSVLETSPDILLEEVILVDDYSDREHLKERLANELSGLPKVRLIRANKREGLVRARLLGASAARGDVLTFLDCHCECHEGWLEPLLQRIHEEESAVVCPVIDVIDWNTFEYLGNSGEPQIGGFDWRLVFTWHTVPERERIRMQSPVDVIRSPTMAGGLFAVSKKYFEYLGSYDTGMEVWGGENLEFSFRIWQCGGVLETHPCSHVGHVFPKQAPYSRNKALANSVRAAEVWMDEFKELYYHRNPRARLEPFGDVTERKQLRDKLQCKDFKWFLETVYPELHVPEDRPGFFGMLQNKGLTDYCFDYNPPDENQIVGHQVILYLCHGMGQNQFFEYTSQKEIRYNTHQPEGCIAVEAGMDTLIMHLCEETAPENQKFILQEDGSLFHEQSKKCVQAARKESSDSFVPLLRDCTNSDHQKWFFKERML

SEQ ID NO: 771665 - protein, 563 aa, Homo sapiens
RPPVPANALGARGEAVRLQLQGEELRLQEESVRLHQINIYLSDRISLHRRLPVRWNPLCKEKKYDYDNLPRTSVIIAFYNEAWSTLLRTVYSVLETSPDILLEEVILVDDYSDREHLKERLANELSGLPKVRLIRANKREGLVRARLLGASAARGDVLTFLDCHCECHEGWLEPLLQRIHEEESAVVCPVIDVIDWNTFEYLGNSGEPQIGGFDWRLVFTWHTVPERERIRMQSPVDVIRSPTMAGGLFAVSKKYFEYLGSYDTGMEVWGGENLEFSFRIWQCGGVLETHPCSHVGHVFPKQAPYSRNKALANSVRAAEVWMDEFKELYYHRNPRARLEPFGDVTERKQLRDKLQCKDFKWFLETVYPELHVPEDRPGFFGMLQNKGLTDYCFDYNPPDENQIVGHQVILYLCHGMGQNQFFEYTSQKEIRYNTHQPEGCIAVEAGMDTLIMHLCEETAPENQKFILQEDGSLFHEQSKKCVQAARKESSDSFVPLLPTRLAPKFPGNSQFQGNNTVGVFPFFPKKKGGKRGPCVRPKKFVVCGASILEKTLFFSAAGNKNNR

SEQ ID NO: 771666 - protein, 515 aa, Homo sapiens; identical to SEQ ID NO: 771664

SEQ ID NO: 771667 - protein, 315 aa, Homo sapiens
MDFGVLVPTAYMFWGLLSCSLPTFCVMSVPGRWPPARWRLSILAVSIMPCVCLASLLQILWTRSSSPAHHLASPFLCVQIWQCGGVLETHPCSHVGHVFPKQAPYSRNKALANSVRAAEVWMDEFKELYYHRNPRARLEPFGDVTERKQLRDKLQCKDFKWFLETVYPELHVPEDRPGFFGMLQNKGLTDYCFDYNPPDENQIVGHQVILYLCHGMGQNQFFEYTSQKEIRYNTHQPEGCIAVEAGMDTLIMHLCEETAPENQKFILQEDGSLFHEQSKKCVQAARKESSDSFVPLLRDCTNSDHQKWFFKERML

SEQ ID NO: 771668 - protein, 86 aa, Homo sapiens
GSLCRRVQKFICRRMDLYFTNSPRNVSRLRGRSRVTVSFHSYETAPTRIIRNGSSKSACYEASCIKEPIEGDCGARTLPNKDLAKQ

SEQ ID NO: 771669 - protein, 69 aa, Homo sapiens
MAQDLSEKDLLKMEVEQLKKEVKNTRIPISKAGKEIKEYVEAQAGNDPFLKGIPEDKNPFKEKGGCLIS

SEQ ID NO: 771670 - protein, 77 aa, Homo sapiens
RPRFGTRLGECALLWQDQVCLGQDGPGSQREGPVEDGGGAAEERSEKHKNSDFQSGKGNQGVRGGPSRKRSFSQRHP

SEQ ID NO: 771671 - protein, 69 aa, Homo sapiens; identical to SEQ ID NO: 771669

SEQ ID NO: 771672 - protein, 152 aa, Homo sapiens
MSPEAMGYPEVERRELLPAAAPRERGSQGCGCGGAPARAGEGNSCLLFLGFFGLSLALHLLTLCCYLELRSELRRERGAESRLGGSGTPGTSGTLSSLGGLDPDSPITSHLGQPSPKQQPLEPGEAALHSDSQDGHQLHVSFSLRKKKAGHQ

SEQ ID NO: 771673 - protein, 140 aa, Homo sapiens
MSPEAMGYPEVERRELLPAAAPRERGSQGCGCGGAPARAGEGNSCLLFLGFFGLSLALHLLTLCCYLELRSELRRERGAESRLGGSGTPGTSGTLSSLGGLDPDSPITSHLGQPSPKQQPLEPGEAALHSDSQDGHQGHQ

SEQ ID NO: 771674 - protein, 140 aa, Homo sapiens; identical to SEQ ID NO: 771673

SEQ ID NO: 771675 - protein, 211 aa, Homo sapiens
MSPEAMGYPEVERRELLPAAAPRERGSQGCGCGGAPARAGEGNSCLLFLGFFGLSLALHLLTLCCYLELRSELRRERGAESRLGGSGTPGTSGTLSSLGGLDPDSPITSHLGQPSPKQQPLEPGEAALHSDSQDGHQRTLTTSFHSLMAYKVSAEKSTDILMDIPLDTNELCLPSVHSQHLHSEDLLKAHESSQSLSGSCFTWRHLVSHLQ

SEQ ID NO: 771676 - protein, 136 aa, Homo sapiens
HTARVHLHVVIKGELLACPDGSCGKESDATQPLVKVVYDDLLHQHVEHTLSETEPGRTRHRAKILPFALRSRERRWPGNPAQQLCAQCPRPPSSTSPAAGLRWGSVCFGDGGLIFLPGGSAVVLRRGDRHTQPSLM

SEQ ID NO: 771677 - protein, 198 aa, Homo sapiens
SLKAGKGPFPGSSSEGVSFYSAFLFHCASNGLDEAHPREGGKSASLGVPSSMLISSRNTVSHTQNHVGPDIWAPHGPVKSTHTVNHHPQQLKKKISSLSQTSRLLCPQLLMSLDFRDFGNSFLGSSTLSSRLGSAWLRTVFSRWERTPVSLETLVSIPPKKCSVKSVLSQISTQFSALPENFSQHGGWRHLREARLGP

SEQ ID NO: 771678 - protein, 102 aa, Homo sapiens
MALYLGLGRGLHSQAAKEPLPISLGSSGGPDMILFQTYISHFVFLPERVRALPPSGICPPHRLPGCGLLWLQSRCQPLAFILLSGQMAALLQPCPPGKERPP

SEQ ID NO: 771679 - protein, 187 aa, Homo sapiens
VRTGRTRRRPGSGGDRYPYRWGRLEERNLHEFEQLGFPTTSKSWKTQGAGRAPGAMASPSGSSEAPGKPRGRDGRPRREEDDVPPEEKRLRLLLEGGSAQPQDCEDGQDAPRSARKETGTQTGGEAEDFYGNTLFEEPMKQCQAGTRISSDFFEEEIRFFTHRSCLSGSRRTEGPFMRFCLRRPLAW

SEQ ID NO: 771680 - protein, 76 aa, Homo sapiens
ESRNQSLCYNERQLWLTVESLLVDYSIRIISEQFLILDWLLSDFQVITKEKKKRHYVFPLESQYGLFVPTKIHVEI

SEQ ID NO: 771681 - protein, 643 aa, Homo sapiens
MLLKKHAGKGGGREPRSEDPTPAEQHCARTMPPCAVLAALLSVVAVVSCLYLGVKTNDLQARIAALESAKGAPSIHLLPDTLDHLKTMVQEKVERLLAQKSYEHMAKIRIAREAPSECNCPAGPPGKRGKRGRRGESGPPGQPGPQGPPGPKGDKGEQGDQGPRMVFPKINHGFLSADQQLIKRRLIKGDQGQAGPPGPPGPPGPRGPPGDTGKDGPRGMPGVPGEPGKPGEQGLMGPLGPPGQKGSIGAPGIPGMNGQKGEPGLPGAVGQNGIPGPKGEPGEQGEKRETLERTAPRVTQAKRVTLDHLLQELRENLGNLVVQGKRVNQGFLGFLDFLGIKGEPGFIGPQGEPGLPGLPGTKGERGEAGPPGRGERGEPGAPGPKGKQGESGTRGPKGSKGDRGEKGDSGAQGPRGPPGQKGDQGATKIIDYNGNLHEALQRITTLTVTGPPGPPGPQGLQGPKGEQGSPGIPGMDGEQGLKGSKGDMGDPGMTGEKGGIGLPGLPGANGMKGEKGDSGMPGPQGPSIIGPPGPPGPHGPPGPMGPHGLPGPKGTDGPMGPHGPAGPKGERGEKGAMGEPGPRGPYGLPGKDGEPGLDGFPGPRGEKGDLGEKGEKVTSPSQHVPCLILLLLSALLFSLCDSI

SEQ ID NO: 771682 - protein, 287 aa, Homo sapiens
MVDEAVYVSTRRPQVNEVERRRGESGPPGPPGPKGDKGEQGDQGPRGLPGFPTVAALHSNQILTVKGDQGQAGPPGPPGPPGPRGPPGDTGKDGPRGMPGVPGEPGKPGEQGLMGPLGPPGQKGSIGAPGIPGMNGQKGEPGLPGAVGQNGIPGPKGEPVEQGEKGDAGENGPKGDTGEKGDPGSSAAGIKGEPGESGRPGQKGEPGFIGPQGEPGLPGLPGTKGERGEAGPPGRGERGEPGAPGPKGIREEKGALELRDKGPLAKQGQEPLDLRYTQLPKTPRYPF

SEQ ID NO: 771683 - protein, 198 aa, Homo sapiens
MGCPLMTMPGPPGKRGKRGRRGESGPPGQPGPQGPPGPKGDKGEQGDQGPRGLPGFPTVAALHSNQILTVKGDQGQAGPPGPPGPPGPRGPPGDTGKDGPRGMPGVPGEPGKPGEQGLMGPLGPPGQKGSIGAPGIPGMNGQKGEPGLPGAVGQNGIPGPKGEPGEQGEKGDAGENGPRVTQAKKGDLDHLLQELREN

SEQ ID NO: 771684 - protein, 642 aa, Homo sapiens
MLLKKHAGKGGGREPRSEDPTPAEQHCARTMPPCAVLAALLSVVAVVSCLYLGVKTNDLQARIAALESAKGAPSIHLLPDTLDHLKTMVQEKVERLLAQKSYEHMAKIRIAREAPSECNCPAGPPGKRGKRGRRGESGPPGQPGPQGPPGPKGDKGEQGDQGPRMVFPKINHGFLSADQQLIKRRLIKGDQGQAGPPGPPGPPGPRGPPGDTGKDGPRGMPGVPGEPGKPGEQGLMGPLGPPGQKGSIGAPGIPGMNGQKGEPGLPGAVGQNGIPGPKGEPVEQGEKGDAGENGPKGDTGEKGDPGSSAAGIKGEPGESGRPGQKGEPGLPGLPGLPGIKGEPGFIGPQGEPGLPGLPGTKGERGEAGPPGRGERGEPGAPGPKGKQGESGTRGPKGSKGDRGEKGDSGAQGPRGPPGQKGDQGATKIIDYNGNLHEALQRITTLTVTGPPGPPGPQGLQGPKGEQGSPGIPGMDGEQGLKGSKGDMGDPGMTGEKGGIGLPGLPGANGMKGEKGDSGMPGPQGPSIIGPPGPPGPHGPPGPMGPHGLPGPKGTDGPMGPHGPAGPKGERGEKGAMGEPGPRGPYGLPGKDGEPGLDGFPGPRGEKGDLGEKGEKVTSPSQHVPCLILLLLSALLFSLCDSI

SEQ ID NO: 771685 - protein, 654 aa, Homo sapiens
MLLKKHAGKGGGREPRSEDPTPAEQHCARTMPPCAVLAALLSVVAVVSCLYLGVKTNDLQARIAALESAKGAPSIHLLPDTLDHLKTMVQEKVERLLAQKSYEHMAKIRIAREAPSECNCPAGPPGKRGKRGRRGESGPPGQPGPQGPPGPKGDKGEQGDQGPRMVFPKINHGFLSADQQLIKRRLIKGDQGQAGPPGPPGPPGPRGPPGDTGKDGPRGMPGVPGEPGKPGEQGLMGPLGPPGQKGSIGAPGIPGMNGQKGEPGLPGAVGQNGIPGPKGEPVEQGEKGDAGENGPKGDTGEKGDPGSSAAGIKGEPGESGRPGQKGEPGLPGLPGLPGIKGEPGFIGPQGEPGLPGLPGTKGERGEAGPPGRGERGEPGAPGPKGKQGESGTRGPKGSKGDRGEKGDSGAQGPRGPPGQKGDQGATKIIDYNGNLHEALQRITTLTVTGPPGPPGPQGLQGPKGEQGSPGIPGMDGEQGLKGSKGDMGDPGMTGEKGGIGLPGLPGANGMKGEKGDSGMPGPQGPSIIGPPGPPGPHGPPGPMGPHGLPGPKGTDGPMGPHGPAGPKGERGEKGAMGEPGPRGPYGLPGKDGEPGLDGFPGPRGEKGDLGEKGEKGFRGVKGEKGEPGQPGLDGLDAPCQLGPDGLPMPGCWQK

SEQ ID NO: 771686 - protein, 176 aa, Homo sapiens
MLLKKHAGKGGGREPRSEDPTPAEQHCARTMPPCAVLAALLSVVAVVSCLYLGVKTNDLQARIAALESAKGAPSIHLLPDTLDHLKTMVQEKVERLLAQKSYEHMAKIRIAREAPSECNCPAGPPGKRGKRGRRGESGPPGQPGPQGPPGPKGDKGEQGDQGPRGSLGPPGRKGLL

SEQ ID NO: 771687 - protein, 165 aa, Homo sapiens
MLLKKHAGKGGGREPRSEDPTPAEQHCARTMPPCAVLAALLSVVAVVSCLYLGVKTNDLQARIAALESAKGAPSIHLLPDTLDHLKTMVQEKVERLLAQKSYEHMAKIRIAREAPSECNCPAGPPGKRGKRGRRGESGPPGQPGPQGPPGPKGDKGEQGDQGPRN

SEQ ID NO: 771688 - protein, 134 aa, Homo sapiens
MTEEPIKEILGAPKAHMAATMEKSPKSEVVITTVPLVSEIQLMAATGGTELSCYRCIIPFAVVVFIAGIVVTAVAYSFNSHGSIISIFGLVVLSSGLFLLASSALCWKVRQRSKKAKRRESQTALVANQRSLFA

SEQ ID NO: 771689 - protein, 134 aa, Homo sapiens; identical to SEQ ID NO: 771688

SEQ ID NO: 771690 - protein, 134 aa, Homo sapiens; identical to SEQ ID NO: 771688

SEQ ID NO: 771691 - protein, 134 aa, Homo sapiens; identical to SEQ ID NO: 771688

SEQ ID NO: 771692 - protein, 141 aa, Homo sapiens
SLTLAGKALLLEALSQKLDEEAHMAATMEKSPKSEVVITTVPLVSEIQLMAATGGTELSCYRCIIPFAVVVFIAGIVVTAVAYSFNSHGSIISIFGLVVLSSGLFLLASSALCWKVRQRSKKAKRRESQTALVANQRSLFA

SEQ ID NO: 771693 - protein, 134 aa, Homo sapiens; identical to SEQ ID NO: 771688

SEQ ID NO: 771694 - protein, 192 aa, Homo sapiens
MAVSRKDWSALSSLARQRTLEDEEEQERERRRRHRNLSSTTDDEAPRLSQNGDRQASASERLPSVEEAEVPKPLPPASKDEDEDIQSILRTRQERRQRRQVVEAAQAPIQERLEAEEGRNSLSPVQATQKPLVSKKELEIPPRRRLSREQRGPWALEEESLVGREPEERKKGVPEKSPVLEKSSMPKKTARS

SEQ ID NO: 771695 - protein, 517 aa, Homo sapiens
MAVSRKDWSALSSLARQRTLEDEEEQERERRRRHRNLSSTTDDEAPRLSQNGDRQASASERLPSVEEAEVPKPLPPASKDEDEDIQSILRTRQERRQRRQVVEAAQAPIQERLEAEEGRNSLSPVQATQKPLVSKKELEIPPRRRLSREQRGPWALEEESLVGREPEERKKGVPEKSPVLEKSSMPKKTAPEKSLVSDKTSISEKVLASEKTSLSEKIAVSEKRNSSEKKSVLEKTSVSEKSLAPGMALGSGRRLVSEKASIFEKALASEKSPTADAKPAPKRATASEQPLAQEPPASGGSPATTKEQRGRALPGKNLPSLAKQGASDPPTVASRLPPVTLQVKIPSKEEEADMSSPTQRTYSSSLKRSSPRTISFRMKPKKENSETTLTRSASMKLPDNTVKLGEKLERYHTAIRRSESVKSRGLPCTELFVAPVGVASKRHLFEKELAGQSRAEPASSRKENLRLSGVVTSRLNLWISRTQESGDQDPQEAQKASSATERTQWGQKSDSSLDAEV

SEQ ID NO: 771696 - protein, 226 aa, Homo sapiens
SDGPPSACGLAAGPAWAAINAALSGTKPNFRGPFPGLEIRTSARGAHLARQRTLEDEEEQERERRRRHRNLSSTTDDEAPRLSQNGDRQASASERLPSVEEAEVPKPLPPASKDEDEDIQSILRTRQERRQRRQVVEAAQAPIQERLEAEEGRNSLSPVQATQKPLVSKKELEIPPRRRLSREQRGPWALEEESLVGREPEERKKGVPEKSPVLEKSSMPKKTARS

SEQ ID NO: 771697 - protein, 67 aa, Homo sapiens
GSAVGVLGSQRSESVKSRGLPCTELFVAPVGVASKRHLFEKELAGQSRAEPASSRKVRGSGPTGSLG

SEQ ID NO: 771698 - protein, 146 aa, Homo sapiens
ASLRSCSAAVGHRVSWFCIQFQRSVALRGSRSKMQLDFDLAIQIFRPVSPGFQGCVSWSCKPNDHTRSGLKQQRFILTALEARSPNSRCGRGWFLPEALREPRSQAPPGARWWPGSRVLPASWTHGSNLCSLLPICMFSFSCQESS

SEQ ID NO: 771699 - protein, 104 aa, Homo sapiens
LALSPRLECSGAISAHYNLRLPGSSNSHGASASLVAETADVYHHAWLIFVFLVEMGSCHVGQASLKLLTSCDLLRLVDQSAEITDMSHHGCPKPSLFLMPFFKF

SEQ ID NO: 771700 - protein, 185 aa, Homo sapiens
ASRSLNEHLQALLTPDEPDKSQGQDLQEQLAEGCRLAQHLVQKLSPENDNDDDEDVQVEVAEKVQKSSAPREMQKAEEKEVPEDSLEECAITYSNSHGPYDSNQPHRKTKITFEEDKVDSALIGSSSHVEWEDAVHIIPGSSMIYILKLSENVFMIKFSLNVLPGTLQRQCCEFPTSAHLRAEKV

SEQ ID NO: 771701 - protein, 225 aa, Homo sapiens
HPFYSTGGEALHLILLPATGNVAENSPPGTSVHKFSVKLSASLSPVIPGFPQIVNSNPLTEAFRVNWLSGTYFEVVTTGMEQLDFETGPNIFDLQIYVKDEVGVTDLQVLTVQVTDVNEPPQFQGNLAEDWLGLHLYIVERANPGFIYQVEAFDPEDTSRNIPLSYFLISPPKSFRMSANGTLFSTTELDFEAGHRSFHLIVEVRDSGGLKASTELQVNIVNLND

SEQ ID NO: 771702 - protein, 127 aa, Homo sapiens
WILQNPGRVSQTYLQTPLSFPQVYIAIYIRQYSQNIFMEYIWGHLNDCLLTALPFGVSAALSDAPETLQTLDLDSPAPRLPLVFPLSIQSCRPETSVILLTLPSPPSHIPKSITSSRDFKKEQLYCT

SEQ ID NO: 771703 - protein, 333 aa, Homo sapiens
RIVKESGGKLTRRLVNSQCEFERRKPDGTTTLGLLHPVDPIVGEPGYCPVRLGMTTGRLQSGVNTLQGFKEDKRNKVTPVLYLNYGPYSSYAPHYDSTFANISKDDSDLIYSTYGEDSDLPSDFSIHEFLATCQDYPYVMADSLLDVLTKGGHSRTLQEMEMSLPEDEGHTRTLDTAKEMEQITEVEPPGRLDSSTQDRLIALKAVTNFGVPVEVFDSEEAEIFQKKLDETTRLLRELQEAQNERLSTRPPPNMICLLGPSYREMHLAEQVTNNLKELAQQVTPGDIVSTYGVRKAMGISIPSPVMENNFVDLTEDTEEPKKTDVAECGPGGS

SEQ ID NO: 771704 - protein, 76 aa, Homo sapiens
EWKPAATQKPVRRRRRGLQQPDGGYNPDGRQQRRRRSVALHALEHNPAMKKEEALTQATAWTHLQDARLNETLQAQ

SEQ ID NO: 771705 - protein, 194 aa, Homo sapiens
DCGKAFCRGSQLTQHQRIHTGEKPHECKECGKTFKLHSYLIQHQIIHTDLKPYECKQCGKAFSRVGDLKTHQSIHAGEKPYECKECGKTFRLNSQLIYHQTIHTGLKPYVCKECKKAFRSISGLSQHKRIHTGEKPYECKECDKAFNRSDRLTQHETIHTGVKPQKCKECGKAFSHCYQLSQHQRFHHGERLLM

SEQ ID NO: 771706 - protein, 199 aa, Homo sapiens
TSLPSRPWKLVDPRISAFRLPKVPRSPPTALAAAQPQRLWLEIEILWNQPLDALDWGGTRFHCLESSTFSDLSLCGAPGLRSEKCALGHRQQRRRRKEQLSLRPLTTRAGWGGLAGVGLLHFPSWDPLPELAWGPGRGTRGASFSPQAPPDVGKANNRGNAEKQKAIRHDLSRLRREISVGRVRGEGQERARGGGSREI

SEQ ID NO: 771707 - protein, 113 aa, Homo sapiens
MRFAKKHKKKGLKKMHTNNAKAMSPRAEALKALVKPKEVKPKIPKGVSHKLDRLAYIAHPNLGKLARARMAKGLRLCRPKAKAKDQTKAQAAAPASVSAQAPKAAQCPTKTSE

SEQ ID NO: 771708 - protein, 39 aa, Homo sapiens
MPRCEGQMKGMLLERCLLRLLRISGLCPDGRSTIKAQNF

SEQ ID NO: 771709 - protein, 39 aa, Homo sapiens; identical to SEQ ID NO: 771708

SEQ ID NO: 771710 - protein, 180 aa, Homo sapiens [sequence omitted]

SEQ ID NO: 771711 - protein, 103 aa, Homo sapiens
IELVVFLPALCCKMGVPYCIIKGKARLGRLVHRKTCTTVAFTQVNLEDKGALAKLVEGIRTNDNDRYDEICCHWGGNILGPKSVACIAKLEKAKAKELATKLG

SEQ ID NO: 771712 - protein, 146 aa, Homo sapiens [sequence omitted]

SEQ ID NO: 771713 - protein, 134 aa, Homo sapiens
MSKELAAMGPGASGDGVRTETAPHIALDSRVGLHAYDISVVVIYFVFVIAVGIWSSIRASRGTIGGYFLAGRSMSWWPIGASLMSSNVGSGLFIGLAGTGAAGGLAVGGFEWNVRKLAWFLQNTEGLTHLCLWH

SEQ ID NO: 771714 - protein, 279 aa, Homo sapiens
HLRRANSSLALPLTHAHTRLEMAAAAAAAGDSDSWDADAFSVEDPVRKVGGGGTAGGDRWEGEDEDEDVKDNWDDDDDEKKEEAEVKPEVKISEKKKIAEKIKEKERQQKKRQEEIKKRLEEPEEPKVLTPEEQLADKLRLKKLQEESDLELAKETFGVNNAVYGIDAMNPSSRDDFTEFGKLLKDKITQYEKSLYYASFLEVLVRDVCISLEIDDLKKITNSLTVLCSEKQKQEKQSKAKKKKKGVVPGGGLKATMKDDLADYGGYDGGYVQDYEDFM

SEQ ID NO: 771715 - protein, 243 aa, Homo sapiens
EFPTMQRGALSPVLMLSAAPEPPPRPPPALSPPGSGPGSGSRHGSARPGPTPEPSGSLGAALDSSLRAAVAFKAEGQRCYREKKFREAIGKYHRALLQLKAAQGARPSGLPAPAPGPTSSPGPARLSEEQRRLVESTEVECYDSLTACLLQSELVNYERVREYCLKVLEKQQGNFKATYRAGIAFYHLGDYARALRYLQEARSREPTDTNVLRYIQLTQLKMNRCSLQREDSGAGSQTRDVIG

SEQ ID NO: 771716 - protein, 172 aa, Homo sapiens
MQRGALSPVLMLSAAPEPPPRPPPALSPPGSGPGSGSRHGSARPGPTPEPSGSLGAALDSSLRAAVAFKAEGQRCYREKKFREAIGKYHRALLQLKAAQGARPSGLPAPGPRAHQQPRAGAPQRGAAAPGGEHGGGVLRLPHGYAVGGWGDGARGEGAIGRAWRLGGQGPWG

SEQ ID NO: 771717 - protein, 257 aa, Homo sapiens
SGFSAPSQLWCGRPPLWLRVAEAAWRRRRRWGELSVAAAAGGGLVGLVCYQLYGDPRAGSPATGRPSKSAATEPEDPPRGRGMLPIPVAAAKETVAIGRTDIEDLDLYATSRERRFRLFASIECEGQLFMTPYDFILAVTTDEPKVAKTWKSLSKQELNQMLAETPPVWKGSSKLFRNLKEKGVISYTEYLFLLCILTKPHAGFRIAFNMFDTDGNEMVDKKEFLVLQEIFRKKNEKREIKGDEEKRAMLVRILYSS

SEQ ID NO: 771718 - protein, 153 aa, Homo sapiens
AGSLPPPSSGVGGLRYGCAAKALVAATPGVSSTLRSPAPPWAVGAACGDHPSKSAATEPEDPPRGRGMLPIPVAAAKETVAIGRTDIEDLDLYATSRERRFRLFASIECEGQLFMTPYDFILAVTTDEPKGIKSNARRNTTSLERLIEAISKS

SEQ ID NO: 771719 - protein, 305 aa, Homo sapiens
RVLCPLPALVWAASAMAALRRLLWPPPRVSPPLCAHQPLLGPWGRPAVTTLGLPGRPFSSREDEERAVAEAAWRRRRRWGELSVAAAAGGGLVGLVCYQLYGDPRAGSPATGRPSKSAATEPEDPPRGRGMLPIPVAAAKETVAIGRTDIEDLDLYATSRERRFRLFASIECEGQLFMTPYDFILAVTTDEPKVAKTWKSLSKQELNQMLAETPPVWKGSSKLFRNLKEKGVISYTEYLFLLCILTKPHAGFRIAFNMFDTDGNEMVDKKEFLVLQEIFRKKNEKREIKGDEEKRAMLVRILYSS

SEQ ID NO: 771720 - protein, 114 aa, Homo sapiens
TNEDAVYDIANEDVVYDIANEDALQDIANEVAVYDIANEDIVYDIANEDALYDITNEDAVYNIANEDAVYGIANEDAVYEFANKDAVYDIANEDTVQDICKKEDAANVRHFSLS

SEQ ID NO: 771721 - protein, 605 aa, Homo sapiens
MEADIITNLRCRLKEAEEERLKAAQYGLQLVESQNELQNQLDKCRNEMMTMTESYEQEKYTLQREVELKSRMLESLSCECEAIKQQQKMHLEKLEEQLSRSHGQEVNELKTKIEKLKVELDEARLSEKQLKHQVDHQKELLSCKSEELRVMSERVQESMSSEMLALQIELTEMESMKTTLKEEVNELQYRQEQLELLITNLMRQVDRLKEEKEEREKEAVSYYNALEKARVANQDLQVQLDQALQQALDPNSKGNSLFAEVEDRRAAMERQLISMKVKYQSLKKQNVFNREQMQRMKLQIATLLQMKGSQTEFEQQERLLAMLEQKNGEIKHLLGEIRNLEKFKNLYDSMESKPSVDSGTLEDNTYYTDLLQMKLDNLNKEIESTKGELSIQRMKALFESQRALDIERKLFANERCLQLSESENMKLRAKLDELKLKYEPEETVEVPVLKKRREVLPVDITTAKDACVNNSALGGEVYRLPPQKEETQSCPNSLEDNNLQLEKSVSIHTPVVSLSPHKNLPVDMQLKKEKKCVKLIGVPADAEALSERSGNTPNSPRLAAESKLQTEVKEGKETSSKLEKETCKKSHPILYVSSKSTPETQCPQQ

SEQ ID NO: 771722 - protein, 508 aa, Homo sapiens
MEADIITNLRCRLKEAEEERLKAAQYGLQLVESQNELQNQLDKCRNEMMTMTESYEQEKYTLQREVELKSRMLESLSCECEAIKQQQKMHLEKLEEQLSRSHGQEVNELKTKIEKLKVELDEARLSEKQLKHQVDHQKELLSCKSEELRVMSERVQESMSSEMLALQIELTEMESMSMKVKYQSLKKQNVFNREQMQRMKLQIATLLQMKGSQTEFEQQERLLAMLEQKNGEIKHLLGEIRNLEKFKNLYDSMESKPSVDSGTLEDNTYYTDLLQMKLDNLNKEIESTKGELSIQRMKALFESQRALDIERKLFANERCLQLSESENMKLRAKLDELKLKYEPEETVEVPVLKKRREVLPVDITTAKDACVNNSALGGEVYRLPPQKEETQSCPNSLEDNNLQLEKSVSIHTPVVSLSPHKNLPVDMQLKKEKKCVKLIGVPADAEALSERSGNTPNSPRLAAESKLQTEVKEGKETSSKLEKETCKKSHPILYVSSKSTPETQCPQQ

SEQ ID NO: 771723 - protein, 597 aa, Homo sapiens
MEADIITNLRCRLKEAEEERLKAAQYGLQLVESQNELQNQLDKCRNEMMTMTESYEQEKYTLQREVELKSRMLESLSCECEAIKQQQKMHLEKLEEQLSRSHGQEVNELKTKIEKLKVELDEARLSEKQLKHQVDHQKELLSCKSEELRVMSERVQESMSSEMLALQIELTEMESMKTTLKEEVNELQYRQEQLELLITNLMRQVDRLKEEKEEREKEAVSYYNALEKARVANQDLQVQLDQALQQALDPNSKGNSLFAEVEDRRAAMERQLISMKVKYQSLKKQNVFNREQMQRMKMKGSQTEFEQQERLLAMLEQKNGEIKHLLGEIRNLEKFKNLYDSMESKPSVDSGTLEDNTYYTDLLQMKLDNLNKEIESTKGELSIQRMKALFESQRALDIERKLFANERCLQLSESENMKLRAKLDELKLKYEPEETVEVPVLKKRREVLPVDITTAKDACVNNSALGGEVYRLPPQKEETQSCPNSLEDNNLQLEKSVSIHTPVVSLSPHKNLPVDMQLKKEKKCVKLIGVPADAEALSERSGNTPNSPRLAAESKLQTEVKEGKETSSKLEKETCKKSHPILYVSSKSTPETQCPQQ

SEQ ID NO: 771724 - protein, 605 aa, Homo sapiens; identical to SEQ ID NO: 771721

SEQ ID NO: 771725 - protein, 605 aa, Homo sapiens; identical to SEQ ID NO: 771721

SEQ ID NO: 771726 - protein, 102 aa, Homo sapiens
SSSPLCRWETEARRSRRSGARSRRTPAPHRRADALCAELPAIGSAPTGLGTEGQRMLPPSRWQECPSPFSLELRVCASLGVKGRPRCDGRLCSVLGAKPGSG

SEQ ID NO: 771727 - protein, 92 aa, Homo sapiens
SLHLSPMLNASFPRTSDSGFFSFGTQTGFQLADSLLWNLVIVIYLEVLRKIRHQSEKSSYQNTINSAKRQARRNIKFMVKLGGKNDEIIDTL

SEQ ID NO: 771728 - protein, 30 aa, Homo sapiens
EEKHRCCGKTDERPRPITVVVVRDASQRRR

SEQ ID NO: 771729 - protein, 127 aa, Homo sapiens
RESRPAISQAHTVSPARPWMLHLILTAGLPCRWKCPVSQRAHIHLELTAHKWLMLEVQGGLGKQMRPPHSYLDLAATVPGDCSRPNGRVIGVCAHCLYPQQPPLPLFSLALPLHPLPSSLGRRNETG

SEQ ID NO: 771730 - protein, 525 aa, Homo sapiens
QKGAATGKQALHCIRMSMKWTSALLLIQLSCYFSSGSCGKVLVWPTEFSHWMNIKTILDELVQRGHEVTVLASSASISFDPNSPSTLKFEVYPVSLTKTEFEDIIKQLVKRWAELPNDILRKFCKDIVSNKKLMKKLQESRFDVVLADAVFPFGELLAELLKIPFVYSLRFSPGYAIEKHSGGLLFPPSYVPVVMSELSDQMTFIERVKNMIYVLYFEFWFQIFDMKKWDQFYSEVLGRPTTLSETMAKADIWLIRNYWDFQFPHPLLPNVEFVGGLHCKPAKPLPKEMEEFVQSSGENGVVVFSLGSMVSNTSEERANVIASALAKIPQKVLWRFDGNKPDTLGLNTRLYKWIPQNDLLGHPKTRAFITHGGANGIYEAIYHGIPMVGVPLFADQPDNIAHMKAKGAAVSLDFHTMSSTDLLNALKTVINDPLYKENAMKLSRIHHDQPVKPLDRAVFWIEFVMRHKGAKHLRVAAHDLTWFQYHSLDVTGFLLACVATVIFIITKCLFCVWKFVRTGKKGKRD

SEQ ID NO: 771731 - protein, 543 aa, Homo sapiens
QKGAATGKQALHCIRMSMKWTSALLLIQLSCYFSSGSCGKVLVWPTEFSHWMNIKTILDELVQRGHEVTVLASSASISFDPNSPSTLKFEVYPVSLTKTEFEDIIKQLVKRWAELPKDTFWSYFSQVQEIMWTFNDILRKFCKDIVSNKKLMKKLQESRFDVVLADAVFPFGELLAELLKIPFVYSLRFSPGYAIEKHSGGLLFPPSYVPVVMSELSDQMTFIERVKNMIYVLYFEFWFQIFDMKKWDQFYSEVLGRPTTLSETMAKADIWLIRNYWDFQFPHPLLPNVEFVGGLHCKPAKPLPKEMEEFVQSSGENGVVVFSLGSMVSNTSEERANVIASALAKIPQKVLWRFDGNKPDTLGLNTRLYKWIPQNDLLGHPKTRAFITHGGANGIYEAIYHGIPMVGVPLFADQPDNIAHMKAKGAAVSLDFHTMSSTDLLNALKTVINDPLYKENAMKLSRIHHDQPVKPLDRAVFWIEFVMRHKGAKHLRVAAHDLTWFQYHSLDVTGFLLACVATVIFIITKCLFCVWKFVRTGKKGKRD

SEQ ID NO: 771732 - protein, 87 aa, Homo sapiens
MGPLEWREFQRVLAGVGPLRHGSAADMLACIECGELSVENFCGFGKCIMSCIHHHRIMQNSFTAFKKIPGWAQWLMLVIPALCEARA

SEQ ID NO: 771733 - protein, 138 aa, Homo sapiens
MDTTELLGGFEQVDLIRPWRRLLEKVEGTVRALLRDSLLISADDAEVVLRAWSHFLLTYKPKCLGEGGKAITMEIVNKLEAVLLLMQRLNNKINSYCKAEFAKLVEEFRSFGVKLTQLASGHSHGTFEWVDSMLVQAL

SEQ ID NO: 771734 - protein, 63 aa, Homo sapiens
SASTCTHIQAGHKAAGRSTSDHNQKSWPLTTHLSASGSQGPSMGGTPHENYPNAQVPANAHKP

SEQ ID NO: 771735 - protein, 97 aa, Homo sapiens
GSVTSTPGPIFYPKFLAVPAVTLGLSIWISHEQFKHNMSKTKSTIFQKQPTPLPPLPTSLTRITTFHNKDMTIGYPCAQPWGGFLRCTQLPPRCVVF

SEQ ID NO: 771736 - protein, 246 aa, Homo sapiens
MDVNSSGHPDLYGRLCSFLLPEVGGRLPDLSPDGGAEPVAVSGTPHLLSGGPRGDGQPGAHLGRNPGQCLRPRGANQERAEKVVIGSVLTLISLRSRATAWWYLRVLLKKLRQPSNYLIVSMALANLSVAMAVMPFISVTDLIGGKWIFGHFFCNVFSMNVMCCTAWILTLYVISIDRYLGIMKPLTYPMRQKGKCMTKMILSVCLLSAFVTLPTIFGRAQNVNDDKVCLVSQDFGYTIYSTAVAS

SEQ ID NO: 771737 - protein, 38 aa, Homo sapiens
MVEPTSRFYHTINIFTITILITFTITIYIITILITVTT

SEQ ID NO: 771738 - protein, 81 aa, Homo sapiens
PRPTAGGNSSSSQDRFRALRTQGHTQATQVGLQMWGSPCWSQAGWHWHGTWGISPRLGSQDASCSLSSIPPLPLPEAPGYF

SEQ ID NO: 771739 - protein, 38 aa, Homo sapiens
RRTELFITTALTLELRPWNSGPGLFALHQTDVSPQVLL

SEQ ID NO: 771740 - protein, 47 aa, Homo sapiens
LPNYPVKHYPHYLHFSDEGSWLRINQNLRRLKVSDWHSHGKGPWTDF

SEQ ID NO: 771741 - protein, 132 aa, Homo sapiens
RPLGGDLLPRSTLPARVLSAASTFHPAPAFGATVAAFHRRAALRAPEPAMSGPNGDLGMPVEAGAEGEEDGFGEAEYAAINSMLDQINSCLDHLEEKNDHLHARLQELLESNRQTRLEFQQQLGEAPSDASP

SEQ ID NO: 771742 - protein, 132 aa, Homo sapiens; identical to SEQ ID NO: 771741

SEQ ID NO: 771743 - protein, 132 aa, Homo sapiens; identical to SEQ ID NO: 771741

SEQ ID NO: 771744 - protein, 82 aa, Homo sapiens
RPLGGDLLPRSTLPARVLSAASTFHPAPAFGATVAAFHRRAALRAPEPAMSGPNGDLGMPVEAGAEGEEDGFGEAERYNLLG

SEQ ID NO: 771745 - protein, 132 aa, Homo sapiens; identical to SEQ ID NO: 771741

SEQ ID NO: 771746 - protein, 82 aa, Homo sapiens; identical to SEQ ID NO: 771744

SEQ ID NO: 771747 - protein, 78 aa, Homo sapiens
VRAAGHQSRFTDGETKAASGTLALVGLAPPLPSVLGETEAPEGGRVELSGGAGPGRGVGDAGASLCRFSIPSHPALLV

SEQ ID NO: 771748 - protein, 132 aa, Homo sapiens; identical to SEQ ID NO: 771741

SEQ ID NO: 771749 - protein, 39 aa, Homo sapiens
MGKHNSTQMSKPGDLSKPGDLSKPGDLSKPGDLSKPGDL

SEQ ID NO: 771750 - protein, 82 aa, Homo sapiens; identical to SEQ ID NO: 771744

SEQ ID NO: 771751 - protein, 78 aa, Homo sapiens; identical to SEQ ID NO: 771747

SEQ ID NO: 771752 - protein, 387 aa, Homo sapiens
RACLESHGRQPSTGLAPQLSLVYFSGVTSVPSFKGGALSLWVICTDCAKKAFVLQMSTVKEQLIEKLIEDDENSQCKITIVGTGAVGMACAISILLKDLADELALVDVALDKLKGEMMDLQHGSLFFSTSKITSGKDYSVSANSRIVIVTAGARQQEGETRLALVQRNVAIMKSIIPAIVHYSPDCKILVVSNPVDILTYIVWKISGLPVTRVIGSGCNLDSARFRYLIGEKLGVHPTSCHGWIIGEHGDSSVPLWSGVNVAGVALKTLDPKLGTDSDKEHWKNIHKQVIQSAYEIIKLKGYTSWAIGLSVMDLVGSILKNLRRVHPVSTMVKGLYGIKEELFLSIPCVLGRNGVSDVVKINLNSEEEALFKKSAETLWNIQKDLIF

SEQ ID NO: 771753 - protein, 332 aa, Homo sapiens
MSTVKEQLIEKLIEDDENSQCKITIVGTGAVGMACAISILLKDLADELALVDVALDKLKGEMMDLQHGSLFFSTSKITSGKDYSVSANSRIVIVTAGARQQEGETRLALVQRNVAIMKSIIPAIVHYSPDCKILVVSNPVDILTYIVWKISGLPVTRVIGSGCNLDSARFRYLIGEKLGVHPTSCHGWIIGEHGDSSVPLWSGVNVAGVALKTLDPKLGTDSDKEHWKNIHKQVIQSAYEIIKLKGYTSWAIGLSVMDLVGSILKNLRRVHPVSTMVKGLYGIKEELFLSIPCVLGRNGVSDVVKINLNSEEEALFKKSAETLWNIQKDLIF

SEQ ID NO: 771754 - protein, 387 aa, Homo sapiens; identical to SEQ ID NO: 771752

SEQ ID NO: 771755 - protein, 332 aa, Homo sapiens; identical to SEQ ID NO: 771753

SEQ ID NO: 771756 - protein, 759 aa, Homo sapiens
MAGLTLFVGRLPPSARSEQLEELFSQVGPVKQCFVVTEKGSKACRGFGYVTFSMLEDVQRALKEITTFEGCKINVTVAKKKLRNKTKEKGKNENSECPKKEPKAKKAKVADKKARLIIRNLSFKCSEDDLKTVFAQFGAVLEVNIPRKPDGKMRGFGFVQFKNLLEAGKALKGMNMKEIKGRTVAVDWAVAKDKYKDTQSVSAIGEEKSHESKHQESVKKKGREEEDMEEEENDDDDDDDDEEDGVFDDEDEEEENIESKVTKPVQIQKRAVKRPAPAKSSDHSEEDSDLEESDSIDDGEELAQSDTSTEEQEDKAVQVSNKKKRKLPSDVNEGKTVFIRNLSFDSEEEELGELLQQFGELKYVRIVLHPDTEHSKGCAFAQFMTQEAAQKCLLAASPENEAGGLKLDGRQLKVDLAVTRDEAAKLQTTKVKKPTGTRNLYLAREGLIRAGTKAAEGVSAADMAKRERFELLKHQKLKDQNIFVSRTRLCLHNLPKAVDDKQLRKLLLSATSGEKGVRIKECRVMRDLKGVHGNMKGQSLGYAFAEFQEHEHALKALRLINNNPEIFGPLKRPIVEFSLEDRRKLKMKELRIQRSLQKMRSKPATGEPQKGQPEPAKDQQQKAAQHHTEEQSKVPPEQKRKAGSTSWTGFQTKAEVEQVELPDGKKRRKVLALPSHRGPKIRLRDKGKVKPVHPKKPKPQINQWKQEKQQLSSEQVSRKKAKGNKTETRFNQLVEQYKQKLLGPSKGAPLAKRSKWFDS

SEQ ID NO: 771757 - protein, 759 aa, Homo sapiens; identical to SEQ ID NO: 771756

SEQ ID NO: 771758 - protein, 684 aa, Homo sapiens
MAGLTLFVGRLPPSARSEQLEELFSQVGPVKQCFVVTEKGSKACRGFGYVTFSMLEDVQRALKEITTFEGCKINVTVAKKKLRNKTKEKGKNENSECPKKEPKAKKAKVADKKARLIIRNLSFKCSEDDLKTVFAQFGAVLEVNIPRKPDGKMRGFGFVQFKNLLEAGKALKGMNMKEIKGRTVAVDWAVAKDKYKDTQSVSAIGEEKSHESKHQESVKKKGREEEDMEEEENDDDDDDDDEEDGVFDDEDEEEENIESKVTKPVQIQKRAVKRPAPAKSSDHSEEDSDLEESDSIDDGEELAQSDTSTEEQEDKAVQVSNKKKRKLPSDVNEGKTVFIRNLSFDSEEEELGELLQQFGELKYVRIVLHPDTEHSKGCAFAQFMTQEAAQKCLLAASPENEAGGLKLDGRQLKVDLAVTRDEAAKLQTTKVKKPTGTRNLYLAREGLIRAGTKAAEGVSAADMAKRERFELLKHQKLKDQNIFVSRTRLCLHNLPKAVDDKQLRKLLLSATSGEKGVRIKEQKMRSKPATGEPQKGQPEPAKDQQQKAAQHHTEEQSKVPPEQKRKAGSTSWTGFQTKAEVEQVELPDGKKRRKVLALPSHRGPKIRLRDKGKVKPVHPKKPKPQINQWKQEKQQLSSEQVSRKKAKGNKTETRFNQLVEQYKQKLLGPSKGAPLAKRSKWFDS

SEQ ID NO: 771759 - protein, 732 aa, Homo sapiens [sequence omitted]

SEQ ID NO: 771760 - protein, 602 aa, Homo sapiens
MAGLTLFVGRLPPSARSEQLEELFSQVGPVKQCFVVTEKGSKACRGFGYVTFSMLEDVQRALKEITTFEGCKINVTVAKKKLRNKTKEKGKNENSECPKKEPKAKKAKVADKKARLIIRNLSFKCSEDDLKTVFAQFGAVLEVNIPRKPDGKMRGFGFVQFKNLLEAGKALKGMNMKEIKGRTVAVDWAVAKDKYKDTQSVSAIGEEKSHESKHQESVKKKGREEEDMEEEENDDDDDDDDEEDGVFDDEDEEEENIESKVTKPVQIQKRAVKRPAPAKSSDHSEEDSDLEESDSIDDGEELAQSDTSTEEQEDKAVQVSNKKKRKLPSDVNEGKTVFIRNLSFDSEEEELGELLQQFGELKYVRIVLHPDTEHSKGCAFAQFMTQEAAQKCLLAASPENEAGGLKLDGRQLKVDLAVTRDEAAKLQTTKVKKPTGTRNLYLAREGLIRAGTKAAEGVSAADMAKRERFELLKHQKLKDQNIFVSRTRLCLHNLPKAVDDKQLRKLLLSATSGEKGVRIKECRVMRDLKGVHGNMKGQSLGYAFAEFQEHEHALKALRLINNNPEIFGPLKRPIVEFSLEDRRKLKMKELRIQRSLVQKLNG

SEQ ID NO: 771761 - protein, 376 aa, Homo sapiens
GGWSGEEKGIPTCGTLGGPRGRRLPIDCGRCKGRSLWRLVGVLGSAGGGRGVSECERGTGIPNLRASRLWRRGGRAQAAMRDRTHELRQGDDSSDEEDKERVALVVHPGTARLGSPDEEFFHKVRTIRQTIVKLGNKVQELEKQQVTILATPLPEESMKQELQNLRDEIKQLGREIRLQLKAIEPQKEEADENYNSVNTRMRKTQHGVLSQQFVELINKCNSMQSEYREKNVERIRRQLKITNAGMVSDEELEQMLDSGQSEVFVSNILKDTQVTRQALNEISARHSEIQQLERSIRELHDIFTFLATEVEMQGEMINRIEKNILSSADYVERGQEHVKTALENQKKARKKKVLIAICVSITVVLLAVIIGVTVVG

SEQ ID NO: 771762 - protein, 422 aa, Homo sapiens
GGWSGEEKGIPTCGTLGGPRGRRLPIDCGRCKGRSLWRLVGVLGSAGGGRGVSECERGTGIPNLRASRLWRRGGRAQAAMRDRTHELRQGDDSSDEEDKERVALVVHPGTARLGSPDEEFFHKVRTIRQTIVKLGNKVQELEKQQVTILATPLPEESELKPRLQGACSAPGIVGVVVPRRWWPEWFVEVGAAVWESLAFSYSGMKQELQNLRDEIKQLGREIRLQLKAIEPQKEEADENYNSVNTRMRKTQHGVLSQQFVELINKCNSMQSEYREKNVERIRRQLKITNAGMVSDEELEQMLDSGQSEVFVSNILKDTQVTRQALNEISARHSEIQQLERSIRELHDIFTFLATEVEMQGEMINRIEKNILSSADYVERGQEHVKTALENQKKARKKKVLIAICVSITVVLLAVIIGVTVVG

SEQ ID NO: 771763 - protein, 376 aa, Homo sapiens; identical to SEQ ID NO: 771761

SEQ ID NO: 771764 - protein, 176 aa, Homo sapiens
MRKTQHGVLSQQFVELINKCNSMQSEYREKNVERIRRQLKITNAGMVSDEELEQMLDSGQSEVFVSNILKDTQVTRQALNEISARHSEIQQLERSIRELHDIFTFLATEVEMQGEMINRIEKNILSSADYVERGQEHVKTALENQKKARKKKVLIAICVSITVVLLAVIIGVTVVG

SEQ ID NO: 771765 - protein, 376 aa, Homo sapiens; identical to SEQ ID NO: 771761

SEQ ID NO: 771766 - protein, 396 aa, Homo sapiens
GGWSGEEKGIPTCGTLGGPRGRRLPIDCGRCKGRSLWRLVGVLGSAGGGRGVSECERGTGIPNLRASRLWRRGGRAQAAMRDRTHELRQGDDSSDEEDKERVALVVHPGTARLGSPDEEFFHKVRTIRQTIVKLGNKVQELEKQQVTILATPLPEESMKQELQNLRDEIKQLGREIRLQLKAIEPQKEEADENYNSVNTRMRKTQVEFKKSGRGTSLGNTEEKTQHGVLSQQFVELINKCNSMQSEYREKNVERIRRQLKITNAGMVSDEELEQMLDSGQSEVFVSNILKDTQVTRQALNEISARHSEIQQLERSIRELHDIFTFLATEVEMQGEMINRIEKNILSSADYVERGQEHVKTALENQKKARKKKVLIAICVSITVVLLAVIIGVTVVG

SEQ ID NO: 771767 - protein, 156 aa, Homo sapiens
MLSEVSYTRLLPNILLRNRTGSSHDSMAAGRLEQMLDSGQSEVFVSNILKDTQVTRQALNEISARHSEIQQLERSIRELHDIFTFLATEVEMQGEMINRIEKNILSSADYVERGQEHVKTALENQKKARKKKVLIAICVSITVVLLAVIIGVTVVG

SEQ ID NO: 771768 - protein, 377 aa, Homo sapiens
GGWSGEEKGIPTCGTLGGPRGRRLPIDCGRCKGRSLWRLVGVLGSAGGGRGVSECERGTGIPNLRASRLWRRGGRAQAAMRDRTHELRQGDDSSDEEDKERVALVVHPGTARLGSPDEEFFHKVRTIRQTIVKLGNKVQELEKQQVTILATPLPEESMKQELQNLRDEIKQLGREIRLQLKAIEPQKEEADENYNSVNTRMRKTQHGVLSQQFVELINKCNSMQSEYREKNVERIRRQLKITNAGMVSDEELEQMLDSGQSEVFVSNILKDTQVTRQALNEISARHSEIQQLERSIRELHDIFTFLATEVEMQGEMINRIEKNILSSADYVERGQEHVKTALENQKKARKVSLPGPATAPGTLCDFPDPLLSHRRKS

SEQ ID NO: 771769 - protein, 348 aa, Homo sapiens
GGWSGEEKGIPTCGTLGGPRGRRLPIDCGRCKGRSLWRLVGVLGSAGGGRGVSECERGTGIPNLRASRLWRRGGRAQAAMRDRTHELRQGDDSSDEEDKERVALVVHPGTARLGSPDEEFFHKVRTIRQTIVKLGNKVQELEKQQVTILATPLPEETQKEEADENYNSVNTRMRKTQHGVLSQQFVELINKCNSMQSEYREKNVERIRRQLKITNAGMVSDEELEQMLDSGQSEVFVSNILKDTQVTRQALNEISARHSEIQQLERSIRELHDIFTFLATEVEMQGEMINRIEKNILSSADYVERGQEHVKTALENQKKARKKKVLIAICVSITVVLLAVIIGVTVVG

SEQ ID NO: 771770 - protein, 183 aa, Homo sapiens
GPVLAGIRMKTQHGVLSQQFVELINKCNSMQSEYREKNVERIRRQLKITNAGMVSDEELEQMLDSGQSEVFVSNILKDTQVTRQALNEISARHSEIQQLERSIRELHDIFTFLATEVEMQGEMINRIEKNILSSADYVERGQEHVKTALENQKKARKKKVLIAICVSITVVLLAVIIGVTVVG

SEQ ID NO: 771771 - protein, 377 aa, Homo sapiens; identical to SEQ ID NO: 771768

SEQ ID NO: 771772 - protein, 377 aa, Homo sapiens; identical to SEQ ID NO: 771768

SEQ ID NO: 771773 - protein, 1061 aa, Homo sapiens
AGQCFWALCCSCLSVARRWDAPPEGCGAQVASSGWTAPGRGRGHRGRPGLREAMEPGKRRTKDDTWKADDLRKHLWAIQSGGSKEERKHREKKLRKESEMDLPEHKEPRCRDPDQDARSRDRVAEVHTAKESPRGERDRDRQRERRRDAKDREKEKLKEKHREAEKSHSRGKDREKEKDRRARKEELRQTVAHHNLLGQETRDRQLLERAERKGRSVSKVRSEEKDEDSERGDEDRERRYRERKLQYGDSKDNPLKYWLYKEEGERRHRKPREPDRDKKHREKSSTREKREKYSKEKSNSFSDKGEERHKEKRHKEGFHFDDERHRSNVDRKEKSAKDEPRKRESQNGEHRNRGASSKRDGTSSQHAENLVRNHGKDKDSRRKHGHEEGSSVWWKLDQRPGGEETVEIEKEETDLENARADAYTASCEDDFEDYEDDFEVCDGDDDESSNEPESREKLEELPLAQKKEIQEIQRAINAENERIGELSLKLFQKRGRTEFEKEPRTDTNSSPSRASVCGIFVDFASASHRQKSRTQALKQKMRSTKLLRLIDLDFSFTFSLLDLPPVNEYDMYIRNFGKKNTKQAYVQCNEDNVERDIQTEEIETREVWTQHPGESTVVSGGSEQRDTSDAVVMPKIDTPRLCSFLRAACQVMAVLLEEDRLAAEPSWNLRAQDRALYFSDSSSQLNTSLPFLQSHVLLLEPFESIFTVCRNSARLSCRLGFERRLKAALLCDAERWLLDVPDRHVFHRWNPYLSKPPKPSSSSRTYLNVRPQKAELCAFTLFYSEEMSGLSFHIASLDESGVLNVWVVVELPKADIAGSISDLGLMPGGRVKLVHSALIQLGDSLSHKGNEFWGTTQTLNVKFLPSDPNHFIIGTDMGLISHGTRQDLRVAPKLFKPQQHGIRPVKVNVIDFSPFGEPIFLAGCSDGSIRLHQLSSAFPLLQWDSSTDSHAVTGLQWSPTRPAVFLVQDDTSNIYIWDLLQSDLGPVAKQQVSPNRLVAMAAVGEPEKAGGSFLALVLARASGSIDIQHLKRRWAAPEVDECNRLRLLLQEALWPEGKLHK

SEQ ID NO: 771774 - protein, 1026 aa, Homo sapiens
SVLGRAQRRRRSTDSLCVHSIWKRRTKDDTWKADDLRKHLWAIQSGGSKEERKHREKKLRKESEMDLPEHKEPRCRDPDQDARSRDRVAEVHTAKESPRGERDRDRQRERRRDAKDREKEKLKEKHREAEKSHSRGKDREKEKDRRARKEELRQTVAHHNLLGQETRDRQLLERAERKGRSVSKVRSEEKDEDSERGDEDRERRYRERKLQYGDSKDNPLKYWLYKEEGERRHRKPREPDRDKKHREKSSTREKREKYSKEKSNSFSDKGEERHKEKRHKEGFHFDDERHRSNVDRKEKSAKDEPRKRESQNGEHRNRGASSKRDGTSSQHAENLVRNHGKDKDSRRKHGHEEGSSVWWKLDQRPGGEETVEIEKEETDLENARADAYTASCEDDFEDYEDDFEVCDGDDDESSNEPESREKLEELPLAQKKEIQEIQRAINAENERIGELSLKLFQKRGRTEFEKEPRTDTNSSPSRASVCGIFVDFASASHRQKSRTQALKQKMRSTKLLRLIDLDFSFTFSLLDLPPVNEYDMYIRNFGKKNTKQAYVQCNEDNVERDIQTEEIETREVWTQHPGESTVVSGGSEQRDTSDAVVMPKIDTPRLCSFLRAACQVMAVLLEEDRLAAEPSWNLRAQDRALYFSDSSSQLNTSLPFLQSHVLLLEPFESIFTVCRNSARLSCRLGFERRLKAALLCDAERWLLDVPDRHVFHRWNPYLSKPPKPSSSSRTYLNVRPQKAELCAFTLFYSEEMSGLSFHIASLDESGVLNVWVVVELPKADIAGSISDLGLMPGGRVKLVHSALIQLGDSLSHKGNEFWGTTQTLNVKFLPSDPNHFIIGTDMGLISHGTRQDLRVAPKLFKPQQHGIRPVKVNVIDFSPFGEPIFLAGCSDGSIRLHQLSSAFPLLQWDSSTDSHAVTGLQWSPTRPAVFLVQDDTSNIYIWDLLQSDLGPVAKQQVSPNRLVAMAAVGEPEKAGGSFLALVLARASGSIDIQHLKRRWAAPEVDECNRLRLLLQEALWPEGKLHK

SEQ ID NO: 771775 - protein, 928 aa, Homo sapiens
FKFSENYIWFNAIFINSDREKEKLKEKHREAEKSHSRGKDREKEKDRRARKEELRQTVAHHNLLGQETRDRQLLERAERKGRSVSKVRSEEKDEDSERGDEDRERRYRERKLQYGDSKDNPLKYWLYKEEGERRHRKPREPDRDKKHREKSSTREKREKYSKEKSNSFSDKGEERHKEKRHKEGFHFDDERHRSNVDRKEKSAKDEPRKRESQNGEHRNRGASSKRDGTSSQHAENLVRNHGKDKDSRRKHGHEEGSSVWWKLDQRPGGEETVEIEKEETDLENARADAYTASCEDDFEDYEDDFEVCDGDDDESSNEPESREKLEELPLAQKKEIQEIQRAINAENERIGELSLKLFQKRGRTEFEKEPRTDTNSSPSRASVCGIFVDFASASHRQKSRTQALKQKMRSTKLLRLIDLDFSFTFSLLDLPPVNEYDMYIRNFGKKNTKQAYVQCNEDNVERDIQTEEIETREVWTQHPGESTVVSGGSEQRDTSDAVVMPKIDTPRLCSFLRAACQVMAVLLEEDRLAAEPSWNLRAQDRALYFSDSSSQLNTSLPFLQSHVLLLEPFESIFTVCRNSARLSCRLGFERRLKAALLCDAERWLLDVPDRHVFHRWNPYLSKPPKPSSSSRTYLNVRPQKAELCAFTLFYSEEMSGLSFHIASLDESGVLNVWVVVELPKADIAGSISDLGLMPGGRVKLVHSALIQLGDSLSHKGNEFWGTTQTLNVKFLPSDPNHFIIGTDMGLISHGTRQDLRVAPKLFKPQQHGIRPVKVNVIDFSPFGEPIFLAGCSDGSIRLHQLSSAFPLLQWDSSTDSHAVTGLQWSPTRPAVFLVQDDTSNIYIWDLLQSDLGPVAKQQVSPNRLVAMAAVGEPEKAGGSFLALVLARASGSIDIQHLKRRWAAPEVDECNRLRLLLQEALWPEGKLHK

SEQ ID NO: 771776 - protein, 548 aa, Homo sapiens
AGQCFWALCCSCLSVARRWDAPPEGCGAQVASSGWTAPGRGRGHRGRPGLREAMEPGKRRTKDDTWKADDLRKHLWAIQSGGSKEERKHREKKLRKESEMDLPEHKEPRCRDPDQDARSRDRVAEVHTAKESPRGERDRDRQRERRRDAKDREKEKLKEKHREAEKSHSRGKDREKEKDRRARKEELRQTVAHHNLLGQETRDRQLLERAERKGRSVSKVRSEEKDEDSERGDEDRERRYRERKLQYGDSKDNPLKYWLYKEEGERRHRKPREPDRDKKHREKSSTREKREKYSKEKSNSFSDKGEERHKEKRHKEGFHFDDERHRSNVDRKEKSAKDEPRKRESQNGEHRNRGASSKRDGTSSQHAENLVRNHGKDKDSRRKHGHEEGSSVWWKLDQRPGGEETVEIEKEETDLENARADAYTASCEDDFEDYEDDFEVCDGDDDESSNEPESREKLEELPLAQKKEIQEIQRAINAENERIGELSLKLFQKRGRTEFEKEPRTDTNSSPSRASVCGIFVDFASASHRQKSRTQALKQKVDSGDSVV

SEQ ID NO: 771777 - protein, 247 aa, Homo sapiens
AGQCFWALCCSCLSVARRWDAPPEGCGAQVASSGWTAPGRGRGHRGRPGLREAMEPGKRRTKDDTWKADDLRKHLWAIQSGGSKEERKHREKKLRKESEMDLPEHKEPRCRDPDQDARSRDRVAEVHTAKESPRGERDRDRQRERRRDAKDREKEKLKEKHREAEKSHSRGKDREKEKDRRARKEELRQTVAHHNLLGQETRDRQLLERAERKGRSVSKVRSEEKDEDSERGDEDRERRYRERKLQY

SEQ ID NO: 771778 - protein, 582 aa, Homo sapiens
ISAHCNLHFLDSSDSSASASRVAGTTDTNSSPSRASVCGIFVDFASASHRQKSRTQALKQKMRSTKLLRLIDLDFSFTFSLLDLPPVNEYDMYIRNFGKKNTKQAYVQCNEDNVERDIQTEEIETREVWTQHPGESTVVSGGSEQRDTSDAVVMPKIDTPRLCSFLRAACQVMAVLLEEDRLAAEPSWNLRAQDRALYFSDSSSQLNTSLPFLQSHVLLLEPFESIFTVCRNSARLSCRLGFERRLKAALLCDAERWLLDVPDRHVFHRWNPYLSKPPKPSSSSRTYLNVRPQKAELCAFTLFYSEEMSGLSFHIASLDESGVLNVWVVVELPKADIAGSISDLGLMPGGRVKLVHSALIQLGDSLSHKGNEFWGTTQTLNVKFLPSDPNHFIIGTDMGLISHGTRQDLRVAPKLFKPQQHGIRPVKVNVIDFSPFGEPIFLAGCSDGSIRLHQLSSAFPLLQWDSSTDSHAVTGLQWSPTRPAVFLVQDDTSNIYIWDLLQSDLGPVAKQQVSPNRLVAMAAVGEPEKAGGSFLALVLARASGSIDIQHLKRRWAAPEVDECNRLRLLLQEALWPEGKLHK

SEQ ID NO: 771779 - protein, 132 aa, Homo sapiens
  misc_feature (2)..(2): Xaa can be any naturally occurring amino acid
  misc_feature (4)..(5): Xaa can be any naturally occurring amino acid
  misc_feature (12)..(12): Xaa can be any naturally occurring amino acid
  misc_feature (15)..(15): Xaa can be any naturally occurring amino acid
DXPXXREAIGAXEDXESHSVTRLECNGTNLAYCNLRLQGSRDSPASVSRAIQSGGSKEERKHREKKLRKESEMDLPEHKEPRCRDPDQDARSRDRVAEVHTAKESPRGERDRDRQRERRRDAKGKKGLLTGF

SEQ ID NO: 771780 - protein, 962 aa, Homo sapiens
MDLPEHKEPRCRDPDQDARSRDRVAEVHTAKESPRGERDRDRQRERRRDAKDREKEKLKEKHREAEKSHSRGKDREKEKDRRARKEELRQTVAHHNLLGQETRDRQLLERAERKGRSVSKVRSEEKDEDSERGDEDRERRYRERKLQYGDSKDNPLKYWLYKEEGERRHRKPREPDRDKKHREKSSTREKREKYSKEKSNSFSDKGEERHKEKRHKEGFHFDDERHRSNVDRKEKSAKDEPRKRESQNGEHRNRGASSKRDGTSSQHAENLVRNHGKDKDSRRKHGHEEGSSVWWKLDQRPGGEETVEIEKEETDLENARADAYTASCEDDFEDYEDDFEVCDGDDDESSNEPESREKLEELPLAQKKEIQEIQRAINAENERIGELSLKLFQKRGRTEFEKEPRTDTNSSPSRASVCGIFVDFASASHRQKSRTQALKQKMRSTKLLRLIDLDFSFTFSLLDLPPVNEYDMYIRNFGKKNTKQAYVQCNEDNVERDIQTEEIETREVWTQHPGESTVVSGGSEQRDTSDAVVMPKIDTPRLCSFLRAACQVMAVLLEEDRLAAEPSWNLRAQDRALYFSDSSSQLNTSLPFLQSHVLLLEPFESIFTVCRNSARLSCRLGFERRLKAALLCDAERWLLDVPDRHVFHRWNPYLSKPPKPSSSSRTYLNVRPQKAELCAFTLFYSRRNVRFVFHIASLDESGVLNVWVVVELPKADIAGSISDLGLMPGGRVKLVHSALIQLGDSLSHKGNEFWGTTQTLNVKFLPSDPNHFIIGTDMGLISHGTRQDLRVAPKLFKPQQHGIRPVKVNVIDFSPFGEPIFLAGCSDGSIRLHQLSSAFPLLQWDSSTDSHAVTGLQWSPTRPAVFLVQDDTSNIYIWDLLQSDLGPVAKQQVSPNRLVAMAAVGEPEKAGGSFLALVLARASGSIDIQHLKRRWAAPEVDECNRLRLLLQEALWPEGKLHK

SEQ ID NO: 771781 - protein, 830 aa, Homo sapiens
MCSCVSQLVVFYSCSTETARTTLSSTGFIKKKARGDTGSPESQIETRNTEKKAAQGKKERNIPKRKVIHSLTKGKKDIKKSDTKKVFILMMRGTEATWIEKRNRQKMSPGKGNPRMVNTEIEVQAQKEDGTSSQHAENLVRNHGKDKDSRRKHGHEEGSSVWWKLDQRPGGEETVEIEKEETDLENARADAYTASCEDDFEDYEDDFEVCDGDDDESSNEPESREKLEELPLAQKKEIQEIQRAINAENERIGELSLKLFQKRGRTEFEKEPRTDTNSSPSRASVCGIFVDFASASHRQKSRTQALKQKMRSTKLLRLIDLDFSFTFSLLDLPPVNEYDMYIRNFGKKNTKQAYVQCNEDNVERDIQTEEIETREVWTQHPGESTVVSGGSEQRDTSDAVVMPKIDTPRLCSFLRAACQVMAVLLEEDRLAAEPSWNLRAQDRALYFSDSSSQLNTSLPFLQSHVLLLEPFESIFTVCRNSARLSCRLGFERRLKAALLCDAERWLLDVPDRHVFHRWNPYLSKPPKPSSSSRTYLNVRPQKAELCAFTLFYSEEMSGLSFHIASLDESGVLNVWVVVELPKADIAGSISDLGLMPGGRVKLVHSALIQLGDSLSHKGNEFWGTTQTLNVKFLPSDPNHFIIGTDMGLISHGTRQDLRVAPKLFKPQQHGIRPVKVNVIDFSPFGEPIFLAGCSDGSIRLHQLSSAFPLLQWDSSTDSHAVTGLQWSPTRPAVFLVQDDTSNIYIWDLLQSDLGPVAKQQVSPNRLVAMAAVGEPEKAGGSFLALVLARASGSIDIQHLKRRWAAPEVDECNRLRLLLQEALWPEGKLHK

SEQ ID NO: 771782 - protein, 334 aa, Homo sapiens
AGQCFWALCCSCLSVARRWDAPPEGCGAQVASSGWTAPGRGRGHRGRPGLREAMEPGKRRTKDDTWKADDLRKHLWAIQSGGSKEERKHREKKLRKESEMDLPEHKEPRCRDPDQDARSRDRVAEVHTAKESPRGERDRDRQRERRRDAKDREKEKLKEKHREAEKSHSRGKDREKEKDRRARKEELRQTVAHHNLLGQETRDRQLLERAERKGRSVSKVRSEEKDEDSERGDEDRERRYRERKRRTKDDTWKADDLRKHLWAIQSGGSKEERKHREKKLRKESEMDLPEHKEPRCRDPDQDARSRDRVAEVHTAKESPRGERDRDRQRERRRD

SEQ ID NO: 771783 - protein, 166 aa, Homo sapiens
LGSASGPSAAPACRLLGAGTRLPKGAGHRWPLRGGPRLAGAEDTAAARACGKRWSPGRSVRRWVWARGGRASRTPSGAASSAAAALPLRSGSLGRAGASRRSRGASEAGRETEARLAVGARDGRTPGSRRSGEAVCAASGLGSPPRPVSSRPAWRRPRPLLRGRGG

SEQ ID NO: 771784 - protein, 2689 aa, Homo sapiens
MVPPVWTLLLLVGAALFRKEKPPDQKLVVRSSRDNYVLTQCDFEDDAKPLCDWSQVSADDEDWVRASGPSPTGSTGAPGGYPNGEGSYLHMESNSFHRGGVARLLSPDLWEQGPLCVHFAHHMFGLSWGAQLRLLLLSGEEGRRPDVLWKHWNTQRPSWMLTTVTVPAGFTLPTRLMFEGTRGSTAYLDIALDALSIRRGSCNRVCMMQTCSFDIPNDLCDWTWIPTASGAKWTQKKGSSGKPGVGPDGDFSSPGSGCYMLLDPKNARPGQKAVLLSPVSLSSGCLSFSFHYILRGQSPGAALHIYASVLGSIRKHTLFSGQPGPNWQAVSVNYTAVGRIQFAVVGVFGKTPEPAVAVDATSIAPCGEGFPQCDFEDNAHPFCDWVQTSGDGGHWALGHKNGPVHGMGPAGGFPNAGGHYIYLEADEFSQAGQSVRLVSRPFCAPGDICVEFAYHMYGLGEGTMLELLLGSPAGSPPIPLWKRVGSQRPYWQNTSVTVPSGHQQPMQLIFKGIQGSNTASVVAMGFILINPGTCPVKVLPELPPVSPVSSTGPSETTGLTENPTISTKKPTVSIEKPSVTTEKPTVPKEKPTIPTEKPTISTEKPTIPSEKPNMPSEKPTIPSEKPTILTEKPTIPSEKPTIPSEKPTISTEKPTVPTEEPTTPTEETTTSMEEPVIPTEKPSIPTEKPSIPTEKPTISMEETIISTEKPTISPEKPTIPTEKPTIPTEKSTISPEKPTTPTEKPTIPTEKPTISPEKPTTPTEKPTISPEKLTIPTEKPTIPTEKPTIPTEKPTISTEEPTTPTEETTISTEKPSIPMEKPTLPTEETTTSVEETTISTEKLTIPMEKPTISTEKPTIPTEKPTISPEKLTIPTEKLTIPTEKPTIPIEETTISTEKLTIPTEKPTISPEKPTISTEKPTIPTEKPTIPTEETTISTEKLTIPTEKPTISPEKLTIPTEKPTISTEKPTIPTEKLTIPTEKPTIPTEKPTIPTEKLTALRPPHPSPTATGLAALVMSPHAPSTPMTSVILGTTTTSRSSTERCPPNARYESCACPASCKSPRPSCGPLCREGCVCNPGFLFSDNHCIQASSCNCFYNNDYYEPGAEWFSPNCTEHCRCWPGSRVECQISQCGTHTVCQLKNGQYGCHPYAGTATCLVYGDPHYVTFDGRHFGFMGKCTYILAQPCGNSTDPFFRVTAKNEEQGQEGVSCLSKVYVTLPESTVTLLKGRRTLVGGQQVTLPAIPSKGVFLGASGRFVELQTEFGLRVRWDGDQQLYVTVSSTYSGKLCGLCGNYDGNSDNDHLKLDGSPAGDKEELGNSWQTDQDEDQECQKYQVVNSPSCDSSLQSSMSGPGFCGRLVDTHGPFETCLLHVKAASFFDSCMLDMCGFQGLQHLLCTHMSTMTTTCQDAGHAVKPWREPHFCPMACPPNSKYSLCAKPCPDTCHSGFSGMFCSDRCVEACECNPGFVLSGLECIPRSQCGCLHPAGSYFKVGERWYKPGCKELCVCESNNRIRCQPWRCRAQEFCGQQDGIYGCHAQGAATCTASGDPHYLTFDGALHHFMGTCTYVLTRPCWSRSQDSYFVVSATNENRGGILEVSYIKAVHVTVFDLSISLLRGCKVMLNGHRVALPVWLAQGRVTIRLSSNLVLLYTNFGLQVRYDGSHLVEVTVPSSYGGQLCGLCGNYNNNSLDDNLRPDRKLAGDSMQLGAAWKLPESSEPGCFLVGGKPSSCQENSMADAWNKNCAILINPQGPFSQCHQVVPPQSSFASCVHGQCGTKGDTTALCRSLQAYASLCAQAGQAPAWRNRTFCPMRCPPGSSYSPCSSPCPDTCSSINNPRDCPKALPCAESCECQKGHILSGTSCVPLGQCGCTDPAGSYHPVGERWYTENTCTRLCTCSVHNNITCFQSTCKPNQICWALDGLLRCRASGVGVCQLPGESHYVSFDGSNHSIPDACTLVLVKVCHPAMALPFFKISAKHEKEEGGTEAFRLHEVYIDIYDAQVTLQKGHRVLINSKQVTLPAISQIPGVSVKSSSIYSIVNIKIGVQVKFDGNHLLEIEIPTTYYGKVCGMCGNFNDEEEDELMMPSDEVANSDSEFVNSWKDKDIDPSCQSLLVDEQQIPAEQQENPSGNCRAADLRRAREKCEAALRAPVWAQCASRIDLTPFLVDCANTLCEFGGLYQALCQALQAFGATCQSQGLKPPLWRNSSFCPLECPAYSSYTNCLPSCSPSCWDLDGRCEGAKVPSACAEGCICQPGYVLSEDKCVPRSQCGCKDAHGGSIPLGKSWVSSGCTEKCVCTGGAIQCGDFRCPSGSHCQLTSDNSNSNCVSDKSEQCSVYGDPRYLTFDGFSYRLQGRMTYVLIKTVDVLPEGVEPLLVEGRNKMDPPRSSIFLQEVITTVYGYKVQLQAGLELVVNNQKMAVPYRPNEHLRVTLWGQRLYLVTDFELVVSFGGRKNAVISLPSMYEGLVSGLCGNYDKNRKNDMMLPSGALTQNLNTFGNSWEVKTEDALLRFPRAIPAEEEGQGAELGLRTGLQVSECSPEQLASNSTQACRVLADPQGPFAACHQTVAPEPFQEHCVLDLCSAQDPREQEELRCQVLSGYAILCQEAGAALAGWRDRTLCAMECPAGTIYQSCMTPCPASCANLADPGDCEGPCVEGCASIPGYAYSGTQSLPWLTVAAPAMASTTSWAAAF

SEQ ID NO: 771785 - protein, 2812 aa, Homo sapiens
MVPPVWTLLLLVGAALFRKEKPPDQKLVVRSSRDNYVLTQCDFEDDAKPLCDWSQVSADDEDWVRASGPSPTGSTGAPGGYPNGEGSYLHMESNSFHRGGVARLLSPDLWEQGPLCVHFAHHMFGLSWGAQLRLLLLSGEEGRRPDVLWKHWNTQRPSWMLTTVTVPAGFTLPTRLMFEGTRGSTAYLDIALDALSIRRGSCNRVCMMQTCSFDIPNDLCDWTWIPTASGAKWTQKKGSSGKPGVGPDGDFSSPGSGCYMLLDPKNARPGQKAVLLSPVSLSSGCLSFSFHYILRGQSPGAALHIYASVLGSIRKHTLFSGQPGPNWQAVSVNYTAVGRIQFAVVGVFGKTPEPAVAVDATSIAPCGEGFPQCDFEDNAHPFCDWVQTSGDGGHWALGHKNGPVHGMGPAGGFPNAGGHYIYLEADEFSQAGQSVRLVSRPFCAPGDICVEFAYHMYGLGEGTMLELLLGSPAGSPPIPLWKRVGSQRPYWQNTSVTVPSGHQQPMQLIFKGIQGSNTASVVAMGFILINPGTCPVKVLPELPPVSPVSSTGPSETTGLTENPTISTKKPTVSIEKPSVTTEKPTVPKEKPTIPTEKPTISTEKPTIPSEKPNMPSEKPTIPSEKPTILTEKPTIPSEKPTIPSEKPTISTEKPTVPTEEPTTPTEETTTSMEEPVIPTEKPSIPTEKPSIPTEKPTISMEETIISTEKPTISPEKPTIPTEKPTIPTEKSTISPEKPTTPTEKPTIPTEKPTISPEKPTTPTEKPTISPEKLTIPTEKPTIPTEKPTIPTEKPTISTEEPTTPTEETTISTEKPSIPMEKPTLPTEETTTSVEETTISTEKLTIPMEKPTISTEKPTIPTEKPTISPEKLTIPTEKLTIPTEKPTIPIEETTISTEKLTIPTEKPTISPEKPTISTEKPTIPTEKPTIPTEETTISTEKLTIPTEKPTISPEKLTIPTEKPTISTEKPTIPTEKLTIPTEKPTIPTEKPTIPTEKLTALRPPHPSPTATGLAALVMSPHAPSTPMTSVILGTTTTSRSSTERCPPNARYESCACPASCKSPRPSCGPLCREGCVCNPGFLFSDNHCIQASSCNCFYNNDYYEPGAEWFSPNCTEHCRCWPGSRVECQISQCGTHTVCQLKNGQYGCHPYAGTATCLVYGDPHYVTFDGRHFGFMGKCTYILAQPCGNSTDPFFRVTAKNEEQGQEGVSCLSKVYVTLPESTVTLLKGRRTLVGGQQVTLPAIPSKGVFLGASGRFVELQTEFGLRVRWDGDQQLYVTVSSTYSGKLCGLCGNYDGNSDNDHLKLDGSPAGDKEELGNSWQTDQDEDQECQKYQVVNSPSCDSSLQSSMSGPGFCGRLVDTHGPFETCLLHVKAASFFDSCMLDMCGFQGLQHLLCTHMSTMTTTCQDAGHAVKPWREPHFCPMACPPNSKYSLCAKPCPDTCHSGFSGMFCSDRCVEACECNPGFVLSGLECIPRSQCGCLHPAGSYFKVGERWYKPGCKELCVCESNNRIRCQPWRCRAQEFCGQQDGIYGCHAQGAATCTASGDPHYLTFDGALHHFMGTCTYVLTRPCWSRSQDSYFVVSATNENRGGILEVSYIKAVHVTVFDLSISLLRGCKVMLNGHRVALPVWLAQGRVTIRLSSNLVLLYTNFGLQVRYDGSHLVEVTVPSSYGGQLCGLCGNYNNNSLDDNLRPDRKLAGDSMQLGAAWKLPESSEPGCFLVGGKPSSCQENSMADAWNKNCAILINPQGPFSQCHQVVPPQSSFASCVHGQCGTKGDTTALCRSLQAYASLCAQAGQAPAWRNRTFCPMRCPPGSSYSPCSSPCPDTCSSINNPRDCPKALPCAESCECQKGHILSGTSCVPLGQCGCTDPAGSYHPVGERWYTENTCTRLCTCSVHNNITCFQSTCKPNQICWALDGLLRCRASGVGVCQLPGESHYVSFDGSNHSIPDACTLVLVKVCHPAMALPFFKISAKHEKEEGGTEAFRLHEVYIDIYDAQVTLQKGHRVLINSKQVTLPAISQIPGVSVKSSSIYSIVNIKIGVQVKFDGNHLLEIEIPTTYYGKVCGMCGNFNDEEEDELMMPSDEVANSDSEFVNSWKDKDIDPSCQSLLVDEQQIPAEQQENPSGNCRAADLRRAREKCEAALRAPVWAQCASRIDLTPFLVDCANTLCEFGGLYQALCQALQAFGATCQSQGLKPPLWRNSSFCPLECPAYSSYTNCLPSCSPSCWDLDGRCEGAKVPSACAEGCICQPGYVLSEDKCVPRSQCGCKDAHGGSIPLGKSWVSSGCTEKCVCTGGAIQCGDFRCPSGSHCQLTSDNSNSNCVSDKSEQCSVYGDPRYLTFDGFSYRLQGRMTYVLIKTVDVLPEGVEPLLVEGRNKMDPPRSSIFLQEVITTVYGYKVQLQAGLELVVNNQKMAVPYRPNEHLRVTLWGQRLYLVTDFELVVSFGGRKNAVISLPSMYEGLVSGLCGNYDKNRKNDMMLPSGALTQNLNTFGNSWEVKTEDALLRFPRAIPAEEEGQGAELGLRTGLQVSECSPEQLASNSTQACRVLADPQGPFAACHQTVAPEPFQEHCVLDLCSAQDPREQEELRCQVLSGHGVSSRYHISELYDTLPSILCQPGRPRGLRGPLRGRLRQHPRLCLQWHPEPPLADCGCTSNGIYYQLGSSFLTEDCSQRCTCASSRILLCEPFSCRAGEVCTLGNHTQGCFPESPCLQNPCQNDGQCREQGATFTCECEVGYGGGLCMEPRDAPPPRKPASNLVAVLLGLLVPVVVVLLAVTRECIYRTRRKREKTQEGDRLARLVDTDTVLDCAC

SEQ ID NO: 771786 - protein, 2601 aa, Homo sapiens
MVPPVWTLLLLVGAALFRKEKPPDQKLVVRSSRDNYVLTQCDFEDDAKPLCDWSQVSADDEDWVRASGPSPTGSTGAPGGYPNGEGSYLHMESNSFHRGGVARLLSPDLWEQGPLCVHFAHHMFGLSWGAQLRLLLLSGEEGRRPDVLWKHWNTQRPSWMLTTVTVPAGFTLPTRLMFEGTRGSTAYLDIALDALSIRRGSCNRVCMMQTCSFDIPNDLCDWTWIPTASGAKWTQKKGSSGKPGVGPDGDFSSPGSGCYMLLDPKNARPGQKAVLLSPVSLSSGCLSFSFHYILRGQSPGAALHIYASVLGSIRKHTLFSGQPGPNWQAVSVNYTAVGRIQFAVVGVFGKTPEPAVAVDATSIAPCGEGFPQCDFEDNAHPFCDWVQTSGDGGHWALGHKNGPVHGMGPAGGFPNAGGHYIYLEADEFSQAGQSVRLVSRPFCAPGDICVEFAYHMYGLGEGTMLELLLGSPAGSPPIPLWKRVGSQRPYWQNTSVTVPSGHQQPMQLIFKGIQGSNTASVVAMGFILINPGTCPVKVLPELPPVSPVSSTGPSETTGLTENPTISTKKPTVSIEKPSVTTEKPTVPKEKPTIPTEKPTISTEKPTIPSEKPNMPSEKPTIPSEKPTILTEKPTIPSEKPTIPSEKPTISTEKPTVPTEEPTTPTEETTTSMEEPVIPTEKPSIPTEKPSIPTEKPTISMEETIISTEKPTISPEKPTIPTEKPTIPTEKSTISPEKPTTPTEKPTIPTEKPTISPEKPTTPTEKPTISPEKLTIPTEKPTIPTEKPTIPTEKPTISTEEPTTPTEETTISTEKPSIPMEKPTLPTEETTTSVEETTISTEKLTIPMEKPTISTEKPTIPTEKPTISPEKLTIPTEKLTIPTEKPTIPIEETTISTEKLTIPTEKPTISPEKPTISTEKPTIPTEKPTIPTEETTISTEKLTIPTEKPTISPEKLTIPTEKPTISTEKPTIPTEKLTIPTEKPTIPTEKPTIPTEKLTALRPPHPSPTATGLAALVMSPHAPSTPMTSVILGTTTTSRSSTERCPPNARYESCACPASCKSPRPSCGPLCREGCVCNPGFLFSDNHCIQASSCNCFYNNDYYEPGAEWFSPNCTEHCRCWPGSRVECQISQCGTHTVCQLKNGQYGCHPYAGTATCLVYGDPHYVTFDGRHFGFMGKCTYILAQPCGNSTDPFFRVTAKNEEQGQEGVSCLSKVYVTLPESTVTLLKGRRTLVGGQQVTLPAIPSKGVFLGASGRFVELQTEFGLRVRWDGDQQLYVTVSSTYSGKLCGLCGNYDGNSDNDHLKLDGSPAGDKEELGNSWQTDQDEDQECQKYQVVNSPSCDSSLQSSMSGPGFCGRLVDTHGPFETCLLHVKAASFFDSCMLDMCGFQGLQHLLCTHMSTMTTTCQDAGHAVKPWREPHFCPMACPPNSKYSLCAKPCPDTCHSGFSGMFCSDRCVEACECNPGFVLSGLECIPRSQCGCLHPAGSYFKVGERWYKPGCKELCVCESNNRIRCQPWRCRAQEFCGQQDGIYGCHAQGAATCTASGDPHYLTFDGALHHFMGTCTYVLTRPCWSRSQDSYFVVSATNENRGGILEVSYIKAVHVTVFDLSISLLRGCKVMLNGHRVALPVWLAQGRVTIRLSSNLVLLYTNFGLQVRYDGSHLVEVTVPSSYGGQLCGLCGNYNNNSLDDNLRPDRKLAGDSMQLGAAWKLPESSEPGCFLVGGKPSSCQENSMADAWNKNCAILINPQGPFSQCHQVVPPQSSFASCVHGQCGTKGDTTALCRSLQAYASLCAQAGQAPAWRNRTFCPMRCPPGSSYSPCSSPCPDTCSSINNPRDCPKALPCAESCECQKGHILSGTSCVPLGQCGCTDPAGSYHPVGERWYTENTCTRLCTCSVHNNITCFQSTCKPNQICWALDGLLRCRASGVGVCQLPGESHYVSFDGSNHSIPDACTLVLVKVCHPAMALPFFKISAKHEKEEGGTEAFRLHEVYIDIYDAQVTLQKGHRVLINSKQVTLPAISQIPGVSVKSSSIYSIVNIKIGVQVKFDGNHLLEIEIPTTYYGKVCGMCGNFNDEEEDELMMPSDEVANSDSEFVNSWKDKDIDPSCQSLLVDEQQIPAEQQENPSGNCRAADLRRAREKCEAALRAPVWAQCASRIDLTPFLVDCANTLCEFGGLYQALCQALQAFGATCQSQGLKPPLWRNSSFCPLECPAYSSYTNCLPSCSPSCWDLDGRCEGAKVPSACAEGCICQPGYVLSEDKCVPRSQCGCKDAHGGSIPLGKSWVSSGCTEKCVCTGGAIQCGDFRCPSGSHCQLTSDNSNSNCVSDKSEQCSVYGDPRYLTFDGFSYRLQGRMTYVLIKTVDVLPEGVEPLLVEGRNKMDPPRSSIFLQEVITTVYGYKVQLQAGLELVVNNQKMAVPYRPNEHLRVTLWGQRLYLVTDFELVVSFGGRKNAVISLPSMYEGLVSGLCGNYDKNRKNDMMLPSGALTQNLNTFGNSWEVKTEDALLRFPRAIPAEEEGQGAELGLRTGLQVSECSPEQLASNSTQACRVLADPQGPFAACHQTVAPEPFQEHCVLDLCSAQDPREQEELRCQVLSGWAAAF

SEQ ID NO: 771787 - protein, 2724 aa, Homo sapiens
MVPPVWTLLLLVGAALFRKEKPPDQKLVVRSSRDNYVLTQCDFEDDAKPLCDWSQVSADDEDWVRASGPSPTGSTGAPGGYPNGEGSYLHMESNSFHRGGVARLLSPDLWEQGPLCVHFAHHMFGLSWGAQLRLLLLSGEEGRRPDVLWKHWNTQRPSWMLTTVTVPAGFTLPTRLMFEGTRGSTAYLDIALDALSIRRGSCNRVCMMQTCSFDIPNDLCDWTWIPTASGAKWTQKKGSSGKPGVGPDGDFSSPGSGCYMLLDPKNARPGQKAVLLSPVSLSSGCLSFSFHYILRGQSPGAALHIYASVLGSIRKHTLFSGQPGPNWQAVSVNYTAVGRIQFAVVGVFGKTPEPAVAVDATSIAPCGEGFPQCDFEDNAHPFCDWVQTSGDGGHWALGHKNGPVHGMGPAGGFPNAGGHYIYLEADEFSQAGQSVRLVSRPFCAPGDICVEFAYHMYGLGEGTMLELLLGSPAGSPPIPLWKRVGSQRPYWQNTSVTVPSGHQQPMQLIFKGIQGSNTASVVAMGFILINPGTCPVKVLPELPPVSPVSSTGPSETTGLTENPTISTKKPTVSIEKPSVTTEKPTVPKEKPTIPTEKPTISTEKPTIPSEKPNMPSEKPTIPSEKPTILTEKPTIPSEKPTIPSEKPTISTEKPTVPTEEPTTPTEETTTSMEEPVIPTEKPSIPTEKPSIPTEKPTISMEETIISTEKPTISPEKPTIPTEKPTIPTEKSTISPEKPTTPTEKPTIPTEKPTISPEKPTTPTEKPTISPEKLTIPTEKPTIPTEKPTIPTEKPTISTEEPTTPTEETTISTEKPSIPMEKPTLPTEETTTSVEETTISTEKLTIPMEKPTISTEKPTIPTEKPTISPEKLTIPTEKLTIPTEKPTIPIEETTISTEKLTIPTEKPTISPEKPTISTEKPTIPTEKPTIPTEETTISTEKLTIPTEKPTISPEKLTIPTEKPTISTEKPTIPTEKLTIPTEKPTIPTEKPTIPTEKLTALRPPHPSPTATGLAALVMSPHAPSTPMTSVILGTTTTSRSSTERCPPNARYESCACPASCKSPRPSCGPLCREGCVCNPGFLFSDNHCIQASSCNCFYNNDYYEPGAEWFSPNCTEHCRCWPGSRVECQISQCGTHTVCQLKNGQYGCHPYAGTATCLVYGDPHYVTFDGRHFGFMGKCTYILAQPCGNSTDPFFRVTAKNEEQGQEGVSCLSKVYVTLPESTVTLLKGRRTLVGGQQVTLPAIPSKGVFLGASGRFVELQTEFGLRVRWDGDQQLYVTVSSTYSGKLCGLCGNYDGNSDNDHLKLDGSPAGDKEELGNSWQTDQDEDQECQKYQVVNSPSCDSSLQSSMSGPGFCGRLVDTHGPFETCLLHVKAASFFDSCMLDMCGFQGLQHLLCTHMSTMTTTCQDAGHAVKPWREPHFCPMACPPNSKYSLCAKPCPDTCHSGFSGMFCSDRCVEACECNPGFVLSGLECIPRSQCGCLHPAGSYFKVGERWYKPGCKELCVCESNNRIRCQPWRCRAQEFCGQQDGIYGCHAQGAATCTASGDPHYLTFDGALHHFMGTCTYVLTRPCWSRSQDSYFVVSATNENRGGILEVSYIKAVHVTVFDLSISLLRGCKVMLNGHRVALPVWLAQGRVTIRLSSNLVLLYTNFGLQVRYDGSHLVEVTVPSSYGGQLCGLCGNYNNNSLDDNLRPDRKLAGDSMQLGAAWKLPESSEPGCFLVGGKPSSCQENSMADAWNKNCAILINPQGPFSQCHQVVPPQSSFASCVHGQCGTKGDTTALCRSLQAYASLCAQAGQAPAWRNRTFCPMRCPPGSSYSPCSSPCPDTCSSINNPRDCPKALPCAESCECQKGHILSGTSCVPLGQCGCTDPAGSYHPVGERWYTENTCTRLCTCSVHNNITCFQSTCKPNQICWALDGLLRCRASGVGVCQLPGESHYVSFDGSNHSIPDACTLVLVKVCHPAMALPFFKISAKHEKEEGGTEAFRLHEVYIDIYDAQVTLQKGHRVLINSKQVTLPAISQIPGVSVKSSSIYSIVNIKIGVQVKFDGNHLLEIEIPTTYYGKVCGMCGNFNDEEEDELMMPSDEVANSDSEFVNSWKDKDIDPSCQSLLVDEQQIPAEQQENPSGNCRAADLRRAREKCEAALRAPVWAQCASRIDLTPFLVDCANTLCEFGGLYQALCQALQAFGATCQSQGLKPPLWRNSSFCPLECPAYSSYTNCLPSCSPSCWDLDGRCEGAKVPSACAEGCICQPGYVLSEDKCVPRSQCGCKDAHGGSIPLGKSWVSSGCTEKCVCTGGAIQCGDFRCPSGSHCQLTSDNSNSNCVSDKSEQCSVYGDPRYLTFDGFSYRLQGRMTYVLIKTVDVLPEGVEPLLVEGRNKMDPPRSSIFLQEVITTVYGYKVQLQAGLELVVNNQKMAVPYRPNEHLRVTLWGQRLYLVTDFELVVSFGGRKNAVISLPSMYEGLVSGLCGNYDKNRKNDMMLPSGALTQNLNTFGNSWEVKTEDALLRFPRAIPAEEEGQGAELGLRTGLQVSECSPEQLASNSTQACRVLADPQGPFAACHQTVAPEPFQEHCVLDLCSAQDPREQEELRCQVLSGYAILCQEAGAALAGWRDRTLCAMECPAGTIYQSCMTPCPASCANLADPGDCEGPCVEGCASIPGYAYSGTQSLPWLTVAAPAMASTTRSELAAGGPGEQRRQGEPDQGWNWNVSSWPFPFLAGQQLSD

SEQ ID NO: 771788 - protein, 2624 aa, Homo sapiens
MVPPVWTLLLLVGAALFRKEKPPDQKLVVRSSRDNYVLTQCDFEDDAKPLCDWSQVSADDEDWVRASGPSPTGSTGAPGGYPNGEGSYLHMESNSFHRGGVARLLSPDLWEQGPLCVHFAHHMFGLSWGAQLRLLLLSGEEGRRPDVLWKHWNTQRPSWMLTTVTVPAGFTLPTRLMFEGTRGSTAYLDIALDALSIRRGSCNRVCMMQTCSFDIPNDLCDWTWIPTASGAKWTQKKGSSGKPGVGPDGDFSSPGSGCYMLLDPKNARPGQKAVLLSPVSLSSGCLSFSFHYILRGQSPGAALHIYASVLGSIRKHTLFSGQPGPNWQAVSVNYTAVGRIQFAVVGVFGKTPEPAVAVDATSIAPCGEGFPQCDFEDNAHPFCDWVQTSGDGGHWALGHKNGPVHGMGPAGGFPNAGGHYIYLEADEFSQAGQSVRLVSRPFCAPGDICVEFAYHMYGLGEGTMLELLLGSPAGSPPIPLWKRVGSQRPYWQNTSVTVPSGHQQPMQLIFKGIQGSNTASVVAMGFILINPGTCPVKVLPELPPVSPVSSTGPSETTGLTENPTISTKKPTVSIEKPSVTTEKPTVPKEKPTIPTEKPTISTEKPTIPSEKPNMPSEKPTIPSEKPTILTEKPTIPSEKPTIPSEKPTISTEKPTVPTEEPTTPTEETTTSMEEPVIPTEKPSIPTEKPSIPTEKPTISMEETIISTEKPTISPEKPTIPTEKPTIPTEKSTISPEKPTTPTEKPTIPTEKPTISPEKPTTPTEKPTISPEKLTIPTEKPTIPTEKPTIPTEKPTISTEEPTTPTEETTISTEKPSIPMEKPTLPTEETTTSVEETTISTEKLTIPMEKPTISTEKPTIPTEKPTISPEKLTIPTEKLTIPTEKPTIPIEETTISTEKLTIPTEKPTISPEKPTISTEKPTIPTEKPTIPTEETTISTEKLTIPTEKPTISPEKLTIPTEKPTISTEKPTIPTEKLTIPTEKPTIPTEKPTIPTEKLTALRPPHPSPTATGLAALVMSPHAPSTPMTSVILGTTTTSRSSTERCPPNARYESCACPASCKSPRPSCGPLCREGCVCNPGFLFSDNHCIQASSCNCFYNNDYYEPGAEWFSPNCTEHCRCWPGSRVECQISQCGTHTVCQLKNGQYGCHPYAGTATCLVYGDPHYVTFDGRHFGFMGKCTYILAQPCGNSTDPFFRVTAKNEEQGQEGVSCLSKVYVTLPESTVTLLKGRRTLVGGQQVTLPAIPSKGVFLGASGRFVELQTEFGLRVRWDGDQQLYVTVSSTYSGKLCGLCGNYDGNSDNDHLKLDGSPAGDKEELGNSWQTDQDEDQECQKYQVVNSPSCDSSLQSSMSGPGFCGRLVDTHGPFETCLLHVKAASFFDSCMLDMCGFQGLQHLLCTHMSTMTTTCQDAGHAVKPWREPHFCPMACPPNSKYSLCAKPCPDTCHSGFSGMFCSDRCVEACECNPGFVLSGLECIPRSQCGCLHPAGSYFKVGERWYKPGCKELCVCESNNRIRCQPWRCRAQEFCGQQDGIYGCHAQGAATCTASGDPHYLTFDGALHHFMGTCTYVLTRPCWSRSQDSYFVVSATNENRGGILEVSYIKAVHVTVFDLSISLLRGCKVMLNGHRVALPVWLAQGRVTIRLSSNLVLLYTNFGLQVRYDGSHLVEVTVPSSYGGQLCGLCGNYNNNSLDDNLRPDRKLAGDSMQLGAAWKLPESSEPGCFLVGGKPSSCQENSMADAWNKNCAILINPQGPFSQCHQVVPPQSSFASCVHGQCGTKGDTTALCRSLQAYASLCAQAGQAPAWRNRTFCPMRCPPGSSYSPCSSPCPDTCSSINNPRDCPKALPCAESCECQKGHILSGTSCVPLGQCGCTDPAGSYHPVGERWYTENTCTRLCTCSVHNNITCFQSTCKPNQICWALDGLLRCRASGVGVCQLPGESHYVSFDGSNHSIPDACTLVLVKVCHPAMALPFFKISAKHEKEEGGTEAFRLHEVYIDIYDAQVTLQKGHRVLINSKQVTLPAISQIPGVSVKSSSIYSIVNIKIGVQVKFDGNHLLEIEIPTTYYGKVCGMCGNFNDEEEDELMMPSDEVANSDSEFVNSWKDKDIDPSCQSLLVDEQQIPAEQQENPSGNCRAADLRRAREKCEAALRAPVWAQCASRIDLTPFLVDCANTLCEFGGLYQALCQALQAFGATCQSQGLKPPLWRNSSFCPLECPAYSSYTNCLPSCSPSCWDLDGRCEGAKVPSACAEGCICQPGYVLSEDKCVPRSQCGCKDAHGGSIPLGKSWVSSGCTEKCVCTGGAIQCGDFRCPSGSHCQLTSDNSNSNCVSDKSEQCSVYGDPRYLTFDGFSYRLQGRMTYVLIKTVDVLPEGVEPLLVEGRNKMDPPRSSIFLQEVITTVYGYKVQLQAGLELVVNNQKMAVPYRPNEHLRVTLWGQRLYLVTDFELVVSFGGRKNAVISLPSMYEGLVSGLCGNYDKNRKNDMMLPSGALTQNLNTFGNSWEVKTEDALLRFPRAIPAEEEGQGAELGLRTGLQVSECSPEQLASNSTQACRVLADPQGPFAACHQTVAPEPFQEHCVLDLCSAQDPREQEELRCQVLSGYAILCQEAGAALAGWRDRTLCAGQQLSD

SEQ ID NO: 771789 - protein, 2721 aa, Homo sapiens
MVPPVWTLLLLVGAALFRKEKPPDQKLVVRSSRDNYVLTQCDFEDDAKPLCDWSQVSADDEDWVRASGPSPTGSTGAPGGYPNGEGSYLHMESNSFHRGGVARLLSPDLWEQGPLCVHFAHHMFGLSWGAQLRLLLLSGEEGRRPDVLWKHWNTQRPSWMLTTVTVPAGFTLPTRLMFEGTRGSTAYLDIALDALSIRRGSCNRVCMMQTCSFDIPNDLCDWTWIPTASGAKWTQKKGSSGKPGVGPDGDFSSPGSGCYMLLDPKNARPGQKAVLLSPVSLSSGCLSFSFHYILRGQSPGAALHIYASVLGSIRKHTLFSGQPGPNWQAVSVNYTAVGRIQFAVVGVFGKTPEPAVAVDATSIAPCGEGFPQCDFEDNAHPFCDWVQTSGDGGHWALGHKNGPVHGMGPAGGFPNAGGHYIYLEADEFSQAGQSVRLVSRPFCAPGDICVEFAYHMYGLGEGTMLELLLGSPAGSPPIPLWKRVGSQRPYWQNTSVTVPSGHQQPMQLIFKGIQGSNTASVVAMGFILINPGTCPVKVLPELPPVSPVSSTGPSETTGLTENPTISTKKPTVSIEKPSVTTEKPTVPKEKPTIPTEKPTISTEKPTIPSEKPNMPSEKPTIPSEKPTILTEKPTIPSEKPTIPSEKPTISTEKPTVPTEEPTTPTEETTTSMEEPVIPTEKPSIPTEKPSIPTEKPTISMEETIISTEKPTISPEKPTIPTEKPTIPTEKSTISPEKPTTPTEKPTIPTEKPTISPEKPTTPTEKPTISPEKLTIPTEKPTIPTEKPTIPTEKPTISTEEPTTPTEETTISTEKPSIPMEKPTLPTEETTTSVEETTISTEKLTIPMEKPTISTEKPTIPTEKPTISPEKLTIPTEKLTIPTEKPTIPIEETTISTEKLTIPTEKPTISPEKPTISTEKPTIPTEKPTIPTEETTISTEKLTIPTEKPTISPEKLTIPTEKPTISTEKPTIPTEKLTIPTEKPTIPTEKPTIPTEKLTALRPPHPSPTATGLAALVMSPHAPSTPMTSVILGTTTTSRSSTERCPPNARYESCACPASCKSPRPSCGPLCREGCVCNPGFLFSDNHCIQASSCNCFYNNDYYEPGAEWFSPNCTEHCRCWPGSRVECQISQCGTHTVCQLKNGQYGCHPYAGTATCLVYGDPHYVTFDGRHFGFMGKCTYILAQPCGNSTDPFFRVTAKNEEQGQEGVSCLSKVYVTLPESTVTLLKGRRTLVGGQQVTLPAIPSKGVFLGASGRFVELQTEFGLRVRWDGDQQLYVTVSSTYSGKLCGLCGNYDGNSDNDHLKLDGSPAGDKEELGNSWQTDQDEDQECQKYQVVNSPSCDSSLQSSMSGPGFCGRLVDTHGPFETCLLHVKAASFFDSCMLDMCGFQGLQHLLCTHMSTMTTTCQDAGHAVKPWREPHFCPMACPPNSKYSLCAKPCPDTCHSGFSGMFCSDRCVEACECNPGFVLSGLECIPRSQCGCLHPAGSYFKVGERWYKPGCKELCVCESNNRIRCQPWRCRAQEFCGQQDGIYGCHAQGAATCTASGDPHYLTFDGALHHFMGTCTYVLTRPCWSRSQDSYFVVSATNENRGGILEVSYIKAVHVTVFDLSISLLRGCKVMLNGHRVALPVWLAQGRVTIRLSSNLVLLYTNFGLQVRYDGSHLVEVTVPSSYGGQLCGLCGNYNNNSLDDNLRPDRKLAGDSMQLGAAWKLPESSEPGCFLVGGKPSSCQENSMADAWNKNCAILINPQGPFSQCHQVVPPQSSFASCVHGQCGTKGDTTALCRSLQAYASLCAQAGQAPAWRNRTFCPMRCPPGSSYSPCSSPCPDTCSSINNPRDCPKALPCAESCECQKGHILSGTSCVPLGQCGCTDPAGSYHPVGERWYTENTCTRLCTCSVHNNITCFQSTCKPNQICWALDGLLRCRASGVGVCQLPGESHYVSFDGSNHSIPDACTLVLVKVCHPAMALPFFKISAKHEKEEGGTEAFRLHEVYIDIYDAQVTLQKGHRVLINSKQVTLPAISQIPGVSVKSSSIYSIVNIKIGVQVKFDGNHLLEIEIPTTYYGKVCGMCGNFNDEEEDELMMPSDEVANSDSEFVNSWKDKDIDPSCQSLLVDEQQIPAEQQENPSGNCRAADLRRAREKCEAALRAPVWAQCASRIDLTPFLVDCANTLCEFGGLYQALCQALQAFGATCQSQGLKPPLWRNSSFCPLECPAYSSYTNCLPSCSPSCWDLDGRCEGAKVPSACAEGCICQPGYVLSEDKCVPRSQCGCKDAHGGSIPLGKSWVSSGCTEKCVCTGGAIQCGDFRCPSGSHCQLTSDNSNSNCVSDKSEQCSVYGDPRYLTFDGFSYRLQGRMTYVLIKTVDVLPEGVEPLLVEGRNKMDPPRSSIFLQEVITTVYGYKVQLQAGLELVVNNQKMAVPYRPNEHLRVTLWGQRLYLVTDFELVVSFGGRKNAVISLPSMYEGLVSGLCGNYDKNRKNDMMLPSGALTQNLNTFGNSWEVKTEDALLRFPRAIPAEEEGQGAELGLRTGLQVSECSPEQLASNSTQACRVLADPQGPFAACHQTVAPEPFQEHCVLDLCSAQDPREQEELRCQVLSGYAILCQEAGAALAGWRDRTLCESPCLQNPCQNDGQCREQGATFTCECEVGYGGGLCMEPRDAPPPRKPASNLVAVLLGLLVPVVVVLLAVTRECIYRTRRKREKTQEGDRLARLVDTDTVLDCAC

SEQ ID NO: 771790 - protein, 1960 aa, Homo sapiens [sequence omitted]

SEQ ID NO: 771791 - protein, 1938 aa, Homo sapiens
MQSFREQSSYHGNQQSYPQEVHGSSRLEEFSPRQAQMFQNFGGTGGSSGSSGSGSGGGRRGAAAAAAAMASETSGHQGYQGFRKEAGDFYYMAGNKDPVTTGTPQPPQRRPSGPVQSYGPPQGSSFGNQYGSEGHVGQFQAQHSGLGGVSHYQQDYTGPFSPGSAQYQQQASSQQQQQQVQQLRQQLYQSHQPLPQATGQPASSSSHLQPMQRPSTLPSSAAGYQLRVGQFGQHYQSSASSSSSSSFPSPQRFSQSGQSYDGSYNVNAGSQYEGHNVGSNAQAYGTQSNYSYQPQSMKNFEQAKIPQGTQQGQQQQQPQQQQHPSQHVMQYTNAATKLPLQSQVGQYNQPEVPVRSPMQFHQNFSPISNPSPAASVVQSPSCSSTPSPLMQTGENLQCGQGSVPMGSRNRILQLMPQLSPTPSMMPSPNSHAAGFKGFGLEGVPEKRLTDPGLSSLSALSTQVANLPNTVQHMLLSDALTPQKKTSKRPSSSKKADSCTNSEGSSQPEEQLKSPMAESLDGGCSSSSEDQGERVRQLSGQSTSSDTTYKGGASEKAGSSPAQGAQNEPPRLNASPAAREEATSPGAKDMPLSSDGNPKVNEKTVGVIVSREAMTGRVEKPGGQDKGSQEDDPAATQRPPSNGGAKETSHASLPQPEPPGGGGSKGNKNGDNNSNHNGEGNGQSGHSAAGPGFTSRTEPSKSPGSLRYSYKDSFGSAVPRNVSGFPQYPTGQEKGDFTGHGERKGRNEKFPSLLQEVLQGYHHHPDRRYSRSTQEHQGMAGSLEGTTRPNVLVSQTNELASRGLLNKSIGSLLENPHWGPWERKSSSTAPEMKQINLTDYPIPRKFEIEPQSSAHEPGGSLSERRSVICDISPLRQIVRDPGAHSLGHMSADTRIGRNDRLNPTLSQSVILPGGLVSMETKLKSQSGQIKEEDFEQSKSQASFNNKKSGDHCHPPSIKHESYRGNASPGAATHDSLSDYGPQDSRPTPMRRVPGRVGGREGMRGRSPSQYHDFAEKLKMSPGRSRGPGGDPHHMNPHMTFSERANRSSLHTPFSPNSETLASAYHANTRAHAYGDPNAGLNSQLHYKRQMYQQQPEEYKDWSSGSAQGVIAAAQHRQEGPRKSPRQQQFLDRVRSPLKNDKDGMMYGPPVGTYHDPSAQEAGRCLMSSDGLPNKGMELKHGSQKLQESCWDLSRQTSPAKSSGPPGMSSQKRYGPPHETDGHGLAEATQSSKPGSVMLRLPGQEDHSSQNPLIMRRRVRSFISPIPSKRQSQDVKNSSTEDKGRLLHSSKEGADKAFNSYAHLSHSQDIKSIPKRDSSKDLPSPDSRNCPAVTLTSPAKTKILPPRKGRGLKLEAIVQKITSPNIRRSASSNSAEAGGDTVTLDDILSLKSGPPEGGSVAVQDADIEKRKGEVASDLVSPANQELHVEKPLPRSSEEWRGSVDDKVKTETHAETVTAGKEPPGAMTSTTSQKPGSNQGRPDGSLGGTAPLIFPDSKNVPPVGILAPEANPKAEEKENDTVTISPKQEGFPPKGYFPSGKKKGRPIGSVNKQKKQQQPPPPPPQPPQIPEGSADGEPKPKKQRQRRERRKPGAQPRKRKTKQAVPIVEPQEPEIKLKYATQPLDKTDAKNKSFYPYIHVVNKCELGAVCTIINAEEEEQTKLVRGRKGQRSLTPPPSSTESKALPASSFMLQGPVVTESSVMGHLVCCLCGKWASYRNMGDLFGPFYPQDYAATLPKNPPPKRATEMQSKVKVRHKSASNGSKTDTEEEEEQQQQQKEQRSLAAHPRFKRRHRSEDCGGGPRSLSRGLPCKKAATEGSSEKTVLDSKPSVPTTSEGGPELELQIPELPLDSNEFWVHEGCILWANGIYLVCGRLYGLQEALEIAREMKCSHCQEAGATLGCYNKGCSFRYHYPCAIDADCLLHEENFSVRCPKHKVRLWR

SEQ ID NO: 771792 - protein, 1949 aa, Homo sapiens
MQSFREQSSYHGNQQSYPQEVHGSSRLEEFSPRQAQMFQNFGGTGGSSGSSGSGSGGGRRGAAAAAAAMASETSGHQGYQGFRKEAGDFYYMAGNKDPVTTGTPQPPQRRPSGPVQSYGPPQGSSFGNQYGSEGHVGQFQAQHSGLGGVSHYQQDYTGPFSPGSAQYQQQASSQQQQQQVQQLRQQLYQSHQPLPQATGQPASSSSHLQPMQRPSTLPSSAAGYQLRVGQFGQHYQSSASSSSSSSFPSPQRFSQSGQSYDGSYNVNAGSQYEGHNVGSNAQAYGTQSNYSYQPQSMKNFEQAKIPQGTQQGQQQQQPQQQQHPSQHVMQYTNAATKLPLQSQVGQYNQPEVPVRSPMQFHQNFSPISNPSPAASVVQSPSCSSTPSPLMQTGENLQCGQGSVPMGSRNRILQLMPQLSPTPSMMPSPNSHAAGFKGFGLEGVPEKRLTDPGLSSLSALSTQVANLPNTVQHMLLSDALTPQKKTSKRPSSSKKADSCTNSEGSSQPEEQLKSPMAESLDGGCSSSSEDQGERVRQLSGQSTSSDTTYKGGASEKAGSSPAQGAQNEPPRLNASPAAREEATSPGAKDMPLSSDGNPKVNEKTVGVIVSREAMTGRVEKPGGQDKGSQEDDPAATQRPPSNGGAKETSHASLPQPEPPGGGGSKGNKNGDNNSNHNGEGNGQSGHSAAGPGFTSRTEPSKSPGSLRYSYKDSFGSAVPRNVSGFPQYPTGQEKGDFTGHGERKGRNEKFPSLLQEVLQGYHHHPDRRYSRSTQEHQGMAGSLEGTTRPNVLVSQTNELASRGLLNKSIGSLLENPHWGPWERKSSSTAPEMKQINLTDYPIPRKFEIEPQSSAHEPGGSLSERRSVICDISPLRQIVRDPGAHSLGHMSADTRIGRNDRLNPTLSQSVILPGGLVSMETKLKSQSGQIKEEDFEQSKSQASFNNKKSGDHCHPPSIKHESYRGNASPGAATHDSLSDYGPQDSRPTPMRRVPGRVGGREGMRGRSPSQYHDFAEKLKMSPGRSRGPGGDPHHMNPHMTFSERANRSSLHTPFSPNSETLASAYHANTRAHAYGDPNAGLNSQLHYKRQMYQQQPEEYKDWSSGSAQGVIAAAQHRQEGPRKSPRQQQFLDRVRSPLKNDKDGMMYGPPVGTYHDPSAQEAGRCLMSSDGLPNKGMELKHGSQKLQESCWDLSRQTSPAKSSGPPGMSSQKRYGPPHETDGHGLAEATQSSKPGSVMLRLPGQEDHSSQNPLIMRRRVRSFISPIPSKRQSQDVKNSSTEDKGRLLHSSKEGADKAFNSYAHLSHSQDIKSIPKRDSSKDLPSPDSRNCPAVTLTSPAKTKILPPRKGRGLKLEAIVQKITSPNIRRSASSNSAEAGGDTVTLDDILSLKSGPPEGGSVAVQDADIEKRKGEVASDLVSPANQELHVEKPLPRSSEEWRGSVDDKVKTETHAETVTAGKEPPGAMTSTTSQKPGSNQGRPDGSLGGTAPLIFPDSKNVPPVGILAPEANPKAEEKENDTVTISPKQEGFPPKGYFPSGKKKGRPIGSVNKQKKQQQPPPPPPQPPQIPEGSADGEPKPKKQRQRRERRKPGAQPRKRKTKQAVPIVEPQEPEIKLKYATQPLDKTDAKNKSFYPYIHVVNKCELGAVCTIINAEEEEQTKLVRGRKGQRSLTPPPSSTESKALPASSFMLQGPVVTESSVMGHLVCCLCGKWASYRNMGDLFGPFYPQDYAATLPKNPPPKRATEMQSKVKVRHKSASNGSKTDTEEEEEQQQQQKEQRSLAAHPRFKRRHRSEDCGGGPRSLSRGLPCKKAATEGSSEKTVLDSKPSVPTTSEGGPELELQIPELPLDSNEFWVHEGCILWANGIYLVCGRLYGLQEALEIAREMKCSHCQEAGATLGCYNKGCSFRYHYPCAIDADCLLHEENFSVRCPKHKNKTAKGSLSTEQSERG

SEQ ID NO: 771793 - protein, 528 aa, Homo sapiens
MPGEWRGSVDDKVKTETHAETVTAGKEPPGAMTSTTSQKPGSNQGRPDGSLGGTAPLIFPDSKNVPPVGILAPEANPKAEEKENDTVTISPKQEGFPPKGYFPSGKKKGRPIGSVNKQKKQQQPPPPPPQPPQIPEGSADGEPKPKKQRQRRERRKPGAQPRKRKTKQAVPIVEPQEPEIKLKYATQPLDKTDAKNKSFYPYIHVVNKCELGAVCTIINAEEEEQTKLVRGRKGQRSLTPPPSSTESKALPASSFMLQGPVVTESSVMGHLVCCLCGKWASYRNMGDLFGPFYPQDYAATLPKNPPPKRATEMQSKVKVRHKSASNGSKTDTEEEEEQQQQQKEQRSLAAHPRFKRRHRSEDCGGGPRSLSRGLPCKKAATEGSSEKTVLDSKPSVPTTSEGGPELELQIPELPLDSNEFWVHEGCILWANGIYLVCGRLYGLQEALEIAREMKCSHCQEAGATLGCYNKGCSFRYHYPCAIDADCLLHEENFSVRCPKHKPPLPCPLPPLQNKTAKGSLSTEQSERG

SEQ ID NO: 771794 - protein, 1986 aa, Homo sapiens [sequence omitted]

SEQ ID NO: 771795 - protein, 1774 aa, Homo sapiens
MQSFREQSSYHGNQQSYPQEVHGSSRLEEFSPRQAQMFQNFGGTGGSSGSSGSGSGGGRRGAAAAAAAMASETSGHQGYQGFRKEAGDFYYMAGNKDPVTTGTPQPPQRRPSGPVQSYGPPQGSSFGNQYGSEGHVGQFQAQHSGLGGVSHYQQDYTGPFSPGSAQYQQQASSQQQQQQVQQLRQQLYQSHQPLPQATGQPASSSSHLQPMQRPSTLPSSAAGYQLRVGQFGQHYQSSASSSSSSSFPSPQRFSQSGQSYDGSYNVNAGSQYEGHNVGSNAQAYGTQSNYSYQPQSMKNFEQAKIPQGTQQGQQQQQPQQQQHPSQHVMQYTNAATKLPLQSQVGQYNQPEVPVRSPMQFHQNFSPISNPSPAASVVQSPSCSSTPSPLMQTGENLQCGQGSVPMGSRNRILQLMPQLSPTPSMMPSPNSHAAGFKGFGLEGVPEKRLTDPGLSSLSALSTQVANLPNTVQHMLLSDALTPQKKTSKRPSSSKKADSCTNSEGSSQPEEQLKSPMAESLDGGCSSSSEDQGERVRQLSGQSTSSDTTYKGGASEKAGSSPAQGAQNEPPRLNASPAAREEATSPGAKDMPLSSDGNPKVNEKTVGVIVSREAMTGRVEKPGGQDKGSQEDDPAATQRPPSNGGAKETSHASLPQPEPPGGGGSKGNKNGDNNSNHNGEGNGQSGHSAAGPGFTSRTEPSKSPGSLRYSYKDSFGSAVPRNVSGFPQYPTGQEKGDFTGHGERKGRNEKFPSLLQEVLQGYHHHPDRRYSRSTQEHQGMAGSLEGTTRPNVLVSQTNELASRGLLNKSIGSLLENPHWGPWERKSSSTAPEMKQINLTDYPIPRKFEIEPQSSAHEPGGSLSERRSVICDISPLRQIVRDPGAHSLGHMSADTRIGRNDRLNPTLSQSVILPGGLVSMETKLKSQSGQIKEEDFEQSKSQASFNNKKSGDHCHPPSIKHESYRGNASPGAATHDSLSDYGPQDSRPTPMRRVPGRVGGREGMRGRSPSQYHDFAEKLKMSPGRSRGPGGDPHHMNPHMTFSERANRSSLHTPFSPNSETLASAYHANTRAHAYGDPNAGLNSQLHYKRQMYQQQPEEYKDWSSGSAQGVIAAAQHRQEGPRKSPRQQQFLDRVRSPLKNDKDGMMYGPPVGTYHDPSAQEAGRCLMSSDGLPNKGMELKHGSQKLQESCWDLSRQTSPAKSSGPPGMSSQKRYGPPHETDGHGLAEATQSSKPGSVMLRLPGQEDHSSQNPLIMRRRVRSFISPIPSKRQSQDVKNSSTEDKGRLLHSSKEGADKAFNSYAHLSHSQDIKSIPKRDSSKDLPSPDSRNCPAVTLTSPAKTKILPPRKGRGLKLEAIVQKITSPNIRRSASSNSAEAGGDTVTLDDILSLKSGPPEGGSVAVQDADIEKRKGEVASDLVSPANQELHVEKPLPRSSEEWRGSVDDKVKTETHAETVTAGKEPPGAMTSTTSQKPGSNQGRPDGSLGGTAPLIFPDSKNVPPVGILAPEANPKAEEKENDTVTISPKQEGFPPKGYFPSGKKKGRPIGSVNKQKKQQQPPPPPPQPPQIPEGSADGEPKPKKQRQRRERRKPGAQPRKRKTKQAVPIVEPQEPEIKLKYATQPLDKTDAKNKSFYPYIHVVNKCELGAVCTIINAEEEEQTKLVRGRKGQRSLTPPPSSTESKALPASSFMLQGPVVTESSVMGHLVCCLCGKWASYRNMGDLFGPFYPQDYAATLPKNPPPKRATEMQNTHLTPFSFCFHFYKGKEDLSDRQPHAT

SEQ ID NO: 771796 - protein, 136 aa, Homo sapiens
VDLEDPKYPPALSQGLPCKKAATEGSSEKTVLDSKPSVPTTSEGGPELELQIPELPLDSNEFWVHEGCILWANGIYLVCGRLYGLQEALEIAREMKCSHCQEAGATLGCYNKGCSFRYHYPCAIDAGPFYEKINLV

SEQ ID NO: 771797 - protein, 1375 aa, Homo sapiens
MNARDTLCSSRARETRLALPRGAHDVPLSSYSNLHVNETTVVVIVSRASFTGLVSENPSRIKAPKRMILQPLKGHLAMVGQRKPVMHHFPSQSLQEEEGAKETRMAITTPTIMEKEMARVATLQRALVLRAELSLANLLEVCAIVTKIVSGQPCHEMSVAFLSILQGKKREISLAMGNERVEMKNSQASCRKCFRVTTTTLTGDILGVLKSIMGMAGSLEGTTRPNVLVSQTNELASRGLLNKSIGSLLENPHWGPWERKSSSTAPEMKQINLTDYPIPRKFEIEPQSSAHEPGGSLSERRSVICDISPLRQIVRDPGAHSLGHMSADTRIGRNDRLNPTLSQSVILPGGLVSMETKLKSQSGQIKEEDFEQSKSQASFNNKKSGDHCHPPSIKHESYRGNASPGAATHDSLSDYGPQDSRPTPMRRVPGRVGGREGMRGRSPSQYHDFAEKLKMSPGRSRGPGGDPHHMNPHMTFSERANRSSLHTPFSPNSETLASAYHANTRAHAYGDPNAGLNSQLHYKRQMYQQQPEEYKDWSSGSAQGVIAAAQHRQEGPRKSPRQQQFLDRVRSPLKNDKDGMMYGPPVGTYHDPSAQEAGRCLMSSDGLPNKGMELKHGSQKLQESCWDLSRQTSPAKSSGPPGMSSQKRYGPPHETDGHGLAEATQSSKPGSVMLRLPGQEDHSSQNPLIMRRRVRSFISPIPSKRQSQDVKNSSTEDKGRLLHSSKEGADKAFNSYAHLSHSQDIKSIPKRDSSKDLPSPDSRNCPAVTLTSPAKTKILPPRKGRGLKLEAIVQKITSPNIRRSASSNSAEAGGDTVTLDDILSLKSGPPEGGSVAVQDADIEKRKGEVASDLVSPANQELHVEKPLPRSSEEWRGSVDDKVKTETHAETVTAGKEPPGAMTSTTSQKPGSNQGRPDGSLGGTAPLIFPDSKNVPPVGILAPEANPKAEEKENDTVTISPKQEGFPPKGYFPSGKKKGRPIGSVNKQKKQQQPPPPPPQPPQIPEGSADGEPKPKKQRQRRERRKPGAQPRKRKTKQAVPIVEPQEPEIKLKYATQPLDKTDAKNKSFYPYIHVVNKCELGAVCTIINAEEEEQTKLVRGRKGQRSLTPPPSSTESKALPASSFMLQGPVVTESSVMGHLVCCLCGKWASYRNMGDLFGPFYPQDYAATLPKNPPPKRATEMQSKVKVRHKSASNGSKTDTEEEEEQQQQQKEQRSLAAHPRFKRRHRSEDCGGGPRSLSRGLPCKKAATEGSSEKTVLDSKPSVPTTSEGGPELELQIPELPLDSNEFWVHEGCILWANGIYLVCGRLYGLQEALEIAREMKCSHCQEAGATLGCYNKGCSFRYHYPCAIDADCLLHEENFSVRCPKHKVRLWR

SEQ ID NO: 771798 - protein, 1938 aa, Homo sapiens; identical to SEQ ID NO: 771791

SEQ ID NO: 771799 - protein, 1986 aa, Homo sapiens [sequence omitted]

SEQ ID NO: 771800 - protein, 104 aa, Homo sapiens
MLPIFCEIFYYKKSICIYPNQFGEIAREMKCSHCQEAGATLGCYNKGCSFRYHYPCAIDADCLLHEENFSVRCPKHKPPLPCPLPPLQNKTAKGSLSTEQSERG

SEQ ID NO: 771801 - protein, 479 aa, Homo sapiens
MAPPLLLLLLASGAAACPLPCVCQNLSESLSTLCAHRGLLFVPPNVDRRTVELRLADNFIQALGPPDFRNMTGLVDLTLSRNAITRIGARAFGDLESLRSLHLDGNRLVELGTGSLRGPVNLQHLILSGNQLGRIAPGAFDDFLESLEDLDLSYNNLRQVPWAGIGAMPALHTLNLDHNLIDALPPGAFAQLGQLSRLDLTSNRLATLAPDPLFSRGRDAEASPAPLVLSFSGNPLHCNCELLWLRRLARPDDLETCASPPGLAGRYFWAVPEGEFSCEPPLIARHTQRLWVLEGQRATLRCRALGDPAPTMHWVGPDDRLVGNSSRARAFPNGTLEIGVTGAGDAGGYTCIATNPAGEATARVELRVLALPHGGNSSAEGGRPGPSDIAASARTAAEGEGTLESEPAVQVTEVTATSGLVSWGPGRPADPVWMFQIQGPGAAAWPGSPSLVFILSTSGSPVYLEGQGALSSVLASRPG

SEQ ID NO: 771802 - protein, 635 aa, Homo sapiens
MAPPLLLLLLASGAAACPLPCVCQNLSESLSTLCAHRGLLFVPPNVDRRTVELRLADNFIQALGPPDFRNMTGLVDLTLSRNAITRIGARAFGDLESLRSLHLDGNRLVELGTGSLRGPVNLQHLILSGNQLGRIAPGAFDDFLESLEDLDLSYNNLRQVPWAGIGAMPALHTLNLDHNLIDALPPGAFAQLGQLSRLDLTSNRLATLAPDPLFSRGRDAEASPAPLVLSFSGNPLHCNCELLWLRRLARPDDLETCASPPGLAGRYFWAVPEGEFSCEPPLIARHTQRLWVLEGQRATLRCRALGDPAPTMHWVGPDDRLVGNSSRARAFPNGTLEIGVTGAGDAGGYTCIATNPAGEATARVELRVLALPHGGNSSAEGGRPGPSDIAASARTAAEGEGTLESEPAVQVTEVTATSGLVSWGPGRPADPVWMFQIQYNSSEDETLIYRIVPASSHHFLLKHLVPGADYDLCLLALSPAAGPSDLTATRLLGCAHFSTLPASPLCHALQAHVLGGTLTVAVGGVLVAALLVFTVALLVRGRGAGNGRLPLKLSHVQSQTNGGPSPTPKAHPPRSPPPRPQRSCSLDLGDAGCYGYARRLGGAWARRSHSVHGGLLGAGCRGVGGSAERLEESVV

SEQ ID NO: 771803 - protein, 308 aa, Homo sapiens
AGAQGAAEGPHPEMSQVSLSCAGLPGSRWRLGLSEAHGPRPRVISASAGAIPPPHSPRLPASCASAHTHLLATLSSLFTFLSEPKSPSGPRGRGVWSWEHGSGEVRMGLDPSPGLCPPALACRIVPASSHHFLLKHLVPGADYDLCLLALSPAAGPSDLTATRLLGCAHFSTLPASPLCHALQAHVLGGTLTVAVGGVLVAALLVFTVALLVRGRGAGNGRLPLKLSHVQSQTNGGPSPTPKAHPPRSPPPRPQRSCSLDLGDAGCYGYARRLGGAWARRSHSVHGGLLGAGCRGVGGSAERLEESVV

SEQ ID NO: 771804 - protein, 206 aa, Homo sapiens
MAPPLLLLLLASGAAACPLPCVCQNLSESLSTLCAHRGLLFVPPNVDRRTVELRLADNFIQALGPPDFRNMTGLVDLTLSRNAITRIGARAFGDLESLRSLHLDGNRLVELGTGSLRGPVNLQHLILSGNQLGRIAPGAFDDFLESLEDLDLSYNNLRQVPWAIGQLPEPNRTYFEHAQARNGSPGITHGARGRRFSGDGGPAGEW

SEQ ID NO: 771805 - protein, 348 aa, Homo sapiens
HKCGRAITTRRKREKLLQAVLPATVLFRSQKPRAAEVVTLKKGRGPTLRTRGFAMAMSSGGSGGGVPEQEDSVLFRRGTGQSDDSDIWDDTALIKAYDKAVASFKHALKNGDICETSGKPKTTPKRKPAKKNKSQKKNTAASLQQWKVGDKCSAIWSEDGCIYPATIASIDFKRETCVVVYTGYGNREEQNLSDLLSPICEVANNIEQNAQENENESQVSTDESENSRSPGNKSDNIKPKSAPWNSFLPPPPPMPGPRLGPGKPGLKFNGPPPPPPPPPPHLLSCWLPPFPSGPPIIPPPPPICPDSLDDADALGSMLISWYMSGYHTGYYMGFRQNQKEGRCSHSLN

SEQ ID NO: 771806 - protein, 316 aa, Homo sapiens
HKCGRAITTRRKREKLLQAVLPATVLFRSQKPRAAEVVTLKKGRGPTLRTRGFAMAMSSGGSGGGVPEQEDSVLFRRGTGQSDDSDIWDDTALIKAYDKAVASFKHALKNGDICETSGKPKTTPKRKPAKKNKSQKKNTAASLQQWKVGDKCSAIWSEDGCIYPATIASIDFKRETCVVVYTGYGNREEQNLSDLLSPICEVANNIEQNAQENENESQVSTDESENSRSPGNKSDNIKPKSAPWNSFLPPPPPMPGPRLGPGKIIPPPPPICPDSLDDADALGSMLISWYMSGYHTGYYMGFRQNQKEGRCSHSLN

SEQ ID NO: 771807 - protein, 348 aa, Homo sapiens; identical to SEQ ID NO: 771805

SEQ ID NO: 771808 - protein, 348 aa, Homo sapiens; identical to SEQ ID NO: 771805

SEQ ID NO: 771809 - protein, 214 aa, Homo sapiens
HKCGRAITTRRKREKLLQAVLPATVLFRSQKPRAAEVVTLKKGRGPTLRTRGFAMAMSSGGSGGGVPEQEDSVLFRRGTGQSDDSDIWDDTALIKAYDKAVASFKHALKNGDICETSGKPKTTPKRKPAKKNKSQKKNTAASLQQWKVGDKVLPPFPCGPPIIPPPPPICPDSLDDADALGSMLISWYMSGYHTGYYMGFRQNQKEGRCSHSLN

SEQ ID NO: 771810 - protein, 348 aa, Homo sapiens
HKCGRAITTRRKREKLLQAVLPATVLFRSQKPRAAEVVTLKKGRGPTLRTRGFAMAMSSGGSGGGVPEQEDSVLFRRGTGQSDDSDIWDDTALIKAYDKAVASFKHALKNGDICETSGKPKTTPKRKPAKKNKSQKKNTAASLQQWKVGDKCSAIWSEDGCIYPATIASIDFKRETCVVVYTGYGNREEQNLSDLLSPICEVANNIEQNAQENENESQVSTDESENSRSPGNKSDNIKPKSAPWNSFLPPPPPMPGPRLGPGKPGLKFNGPPPPPPPPPPHLLSCWLPPFPSGPPIIPPPPPICPDSLDDADALGSMLISWYMSGYHTGYYMVSNHSASFPDNFFVVM

SEQ ID NO: 771811 - protein, 336 aa, Homo sapiens
HKCGRAITTRRKREKLLQAVLPATVLFRSQKPRAAEVVTLKKGRGPTLRTRGFAMAMSSGGSGGGVPEQEDSVLFRRGTGQSDDSDIWDDTALIKAYDKAVASFKHALKNGDICETSGKPKTTPKRKPAKKNKSQKKNTAASLQQWKVGDKCSAIWSEDGCIYPATIASIDFKRETCVVVYTGYGNREEQNLSDLLSPICEVANNIEQNAQENENESQVSTDESENSRSPGNKSDNIKPKSAPWNSFLPPPPPMPGPRLGPGKPGLKFNGPPPPPPPPPPHLLSCWLPPFPSGPPIIPPPPPICPDSLDDADALGSMLISWYMSGYHTGYYMEMLA

SEQ ID NO: 771812 - protein, 304 aa, Homo sapiens
HKCGRAITTRRKREKLLQAVLPATVLFRSQKPRAAEVVTLKKGRGPTLRTRGFAMAMSSGGSGGGVPEQEDSVLFRRGTGQSDDSDIWDDTALIKAYDKAVASFKHALKNGDICETSGKPKTTPKRKPAKKNKSQKKNTAASLQQWKVGDKCSAIWSEDGCIYPATIASIDFKRETCVVVYTGYGNREEQNLSDLLSPICEVANNIEQNAQENENESQVSTDESENSRSPGNKSDNIKPKSAPWNSFLPPPPPMPGPRLGPGKIIPPPPPICPDSLDDADALGSMLISWYMSGYHTGYYMEMLA

SEQ ID NO: 771813 - protein, 274 aa, Homo sapiens
HKCGRAITTRRKREKLLQAVLPATVLFRSQKPRAAEVVTLKKGRGPTLRTRGFAMAMSSGGSGGGVPEQEDSVLFRRGTGQSDDSDIWDDTALIKAYDKAVASFKHALKNGDICETSGKPKTTPKRKPAKKNKSQKKNTAASLQQWKVGDKCSAIWSEDGCIYPATIASIDFKRETCVVVYTGYGNREEQNLSDLLSPICEVANNIEQNAQENENESQVSTDESENSRSPGNKSDNIKPKSAPWNSFLPPPPPMPGPRLGPGKKGNEKNPEVVI

SEQ ID NO: 771814 - protein, 348 aa, Homo sapiens; identical to SEQ ID NO: 771805

SEQ ID NO: 771815 - protein, 316 aa, Homo sapiens
HKCGRAITTRRKREKLLQAVLPATVLFRSQKPRAAEVVTLKKGRGPTLRTRGFAMAMSSGGSGGGVPEQEDSVLFRRGTGQSDDSDIWDDTALIKAYDKAVASFKHALKNGDICETSGKPKTTPKRKPAKKNKSQKKNTAASLQQWKVGDKCSAIWSEDGCIYPATIASIDFKRETCVVVYTGYGNREEQNLSDLLSPICEVANNIEQNAQENENESQVSTDESENSRSPGNKSDNIKPKSAPWNSFLPPPPPMPGPRLGPGKIIPPPPPICPDSLDDADALGSMLISWYMSGYHTGYYMVSNHSASFPDNFFVVM

SEQ ID NO: 771816 - protein, 183 aa, Homo sapiens
GNLRAPQPMGGRRPGQLPFLELQPPPGDCSCHLEPCCASRASNSACARDPFLLQPPRPTAHGAGESRRRAPDPQLPALLPPSRFNTHTPQSLPRPRLGGPTESLRGAQRYRETGLAYGSAQITRVGGARAPIPASMTRSPPLRELPPSYTPPARTAAPQVSRGGAGRRKRAEPGLSLGPLQGL

SEQ ID NO: 771817 - protein, 232 aa, Homo sapiens
MVLVLFVCALLLLNPWTAGLIVLVLAMMTVELFGIMGFLGIKLSAIPVVILVASVGIGVEFTVHVALGFLTTQGSRNLRAAHALEHTFAPVTDGAISTLLGLLMLAGSHFDFIVRYFFAALTVLTLLGLLHGLVLLPVLLSILGPPPEVIQMYKESPEILSPPAPQGGGLRWGASSSLPQSFARVTTSMTVAIHPPPLPGAYIHPAPDEPPWSPAATSSGNLSSRGPGPATG

SEQ ID NO: 771818 - protein, 1338 aa, Homo sapiens
GNLRAPQPMGGRRPGQLPFLELQPPPGDCSCHLEPCCASRASNSACARDPFLLQPPRPTAHGAGESRRRAPDPQLPALLPPSRFNTHTPQSLPRPRLGGPTESLRGAQRYRETGLAYGSAQITRVGGARAPIPASMTRSPPLRELPPSYTPPARTAAPQILAGSLKAPLWLRAYFQGLLFSLGCGIQRHCGKVLFLGLLAFGALALGLRMAIIETNLEQLWVEVGSRVSQELHYTKEKLGEEAAYTSQMLIQTARQEGENILTPEALGLHLQAALTASKVQVSLYGKSWDLNKICYKSGVPLIENGMIERMIEKLFPCVILTPLDCFWEGAKLQGGSAYLPGRPDIQWTNLDPEQLLEELGPFASLEGFRELLDKAQVGQAYVGRPCLHPDDLHCPPSAPNHHSRQAPNVAHELSGGCHGFSHKFMHWQEELLLGGMARDPQGELLRAEALQSTFLLMSPRQLYEHFRGDYQTHDIGWSEEQASTVLQAWQRRFVQLAQEALPENASQQIHAFSSTTLDDILHAFSEVSAARVVGGYLLMLAYACVTMLRWDCAQSQGSVGLAGVLLVALAVASGLGLCALLGITFNAATTQVLPFLALGIGVDDVFLLAHAFTEALPGTPLQERMGECLQRTGTSVVLTSINNMAAFLMAALVPIPALRAFSLQAAIVVGCTFVAVMLVFPAILSLDLRRRHCQRLDVLCCFSSPCSAQVIQILPQELGDGTVPVGIAHLTATVQAFTHCEASSQHVVTILPPQAHLVPPPSDPLGSELFSPGGSTRDLLGQEEETRQKAACKSLPCARWNLAHFARYQFAPLLLQSHAKAIVLVLFGALLGLSLYGATLVQDGLALTDVVPRGTKEHAFLSAQLRYFSLYEVALVTQGGFDYAHSQRALFDLHQRFSSLKAVLPPPATQAPRTWLHYYRNWLQGIQAAFDQDWASGRITRHSYRNGSEDGALAYKLLIQTGDAQEPLDFSQLTTRKLVDREGLIPPELFYMGLTVWVSSDPLGLAASQANFYPPPPEWLHDKYDTTGENLRIPPAQPLEFAQFPFLLRGLQKTADFVEAIEGARAACAEAGQAGVHAYPSGSPFLFWEQYLGLRRCFLLAVCILLVCTFLVCALLLLNPWTAGLIVLVLAMMTVELFGIMGFLGIKLSAIPVVILVASVGIGVEFTVHVALGFLTTQGSRNLRAAHALEHTFAPVTDGAISTLLGLLMLAGSHFDFIVRYFFAALTVLTLLGLLHGLVLLPVLLSILGPPPEVIQMYKESPEILSPPAPQGGGLRWGASSSLPQSFARVTTSMTVAIHPPPLPGAYIHPAPDEPPWSPAATSSGNLSSRGPGPATG

SEQ ID NO: 771819 - protein, 93 aa, Homo sapiens
PWVQDPSWNPQQRANIRPEITFWWTSQPPKANSTKINSTKSKPICQNCSLSDSSACFENQTNKQTSCDFPKGFPRPSPSAISPLIMGFLGLGQ

SEQ ID NO: 771820 - protein, 580 aa, Homo sapiens
MPGWPWGLLLTAGTLFAALSPGPPAPADPCHDEGGAPRGCVPGLVNAALGREVLASSTCGRPATRACDASDPRRAHSPALLTSPGGTASPLCWRSESLPRAPLNVTLTVPLGKAFELVFVSLRFCSAPPASVALLKSQDHGRSWAPLGFFSSHCDLDYGRLPAPANGPAGPGPEALCFPAPLAQPDGSGLLAFSMQDSSPPGLDLDSSPVLQDWVTATDVRVVLTRPSTAGDPRDMEAVVPYSYAATDLQVGGRCKCNGHASRCLLDTQGHLICDCRHGTEGPDCGRCKPFYCDRPWQRATARESHACLACSCNGHARRCRFNMELYRLSGRRSGGVCLNCRHNTAGRHCHYCREGFYRDPGRALSDRRACRACDCHPVGAAGKTCNQTTGQCPCKDGVTGLTCNRCAPGFQQSRSPVAPCVKTPIPGPTEDSSPVQPQDCDSHCKPARGSYRISLKKFCKKDYAVQVAVGARGEARGAWTRFPVAVLAVFRSGEERARRGSSALWVPAGDAACGCPRLLPGRRYLLLGGGPGAAAGGAGGRGPGLIAARGSLVLPWRDAWTRRLRRLQRRERRGRCSAA

SEQ ID NO: 771821 - protein, 631 aa, Homo sapiens
IPPAHGGGEIPRHGSGMTGLVSLSYFPLSTRSCALQSCRQPGLGMWSLLLCGLSIALPLSVTADGCKDIFMKNEILSASQPFAFNCTFPPITSGEVSVTWYKNSSKIPVSKIIQSRIHQDETWILFLPMEWGDSGVYQCVIKGRDSCHRIHVNLTVFEKHWCDTSIGGLPNLSDEYKQILHLGKDDSLTCHLHFPKSCVLGPIKWYKDCNEIKGERFTVLETRLLVSNVSAEDRGNYACQAILTHSGKQYEVLNGITVSITERAGYGGSVPKIIYPKNHSIEVQLGTTLIVDCNVTDTKDNTNLRCWRVNNTLVDDYYDESKRIREGVETHVSFREHNLYTVNITFLEVKMEDYGLPFMCHAGVSTAYIILQLPAPDFRAYLIGGLIALVAVAVSVVYIYNIFKIDIVLWYRSAFHSTETIVDGKLYDAYVLYPKPHKESQRHAVDALVLNILPEVLERQCGYKLFIFGRDEFPGQAVANVIDENVKLCRRLIVIVVPESLGFGLLKNLSEEQIAVYSALIQDGMKVILIELEKIEDYTVMPESIQYIKQKHGAIRWHGDFTEQSQCMKTKFWKTVRYHMPPRRCRPFPPVQLLQHTPLLPHRRPRTRLKKKEVYSHDWLRLAGLTPMAGR

SEQ ID NO: 771822 - protein, 69 aa, Homo sapiens
FLWKIEALKCLAPAFADGQHRQRELSKTSAPAPPPSRTELRVQTYPSQAFKTVGHEETMIEPAGNDALN

SEQ ID NO: 771823 - protein, 73 aa, Homo sapiens
GQLVVLGASLPRVRRAGKLAEGVRQRLLPSATRPLSNSSYELKLPRDGDRSGARRQQQQQQQQQQQQPPPPPP

SEQ ID NO: 771824 - protein, 101 aa, Homo sapiens
SAHCNLCLPDSSDSFATASPVAGITGTHHHARLHFVFSVEMGFQPAGQAALEFLTSCDPPASASQSVGITGMSHRARPGINLHQDSLWNFIKRLRSHLLLS

SEQ ID NO: 771825 - protein, 130 aa, Homo sapiens
LSPLGSWYVIKRWYHCPLIALLLVLPLLKWPFLVRSLKLFQHFSTRIPPPPSTKYTCFALLQMLTCQSPEAPEKSAGRHGGLRHSHDLKEIIKMQEGCCEGHTNLVHLSLMKSVRLLVYQMWELLCLFCS

SEQ ID NO: 771826 - protein, 143 aa, Homo sapiens
MGVGPSWLGDVYVIVNEFSRSGHLKVCGISSPTLPLSLSPLYFLCLILSCSYFCHVTYLLSLLPSAMIVSFLRPPQKLMPRCFLYSLQNLSQLNLFSYKLPSLRYFLIAMQEQPNRRSCPKFDNNLKILQTLPIKRVVNLKLF

SEQ ID NO: 771827 - protein, 36 aa, Homo sapiens
METSVKTAMNVNEVYTARAKKIPNKPQSAPGAPGQN

SEQ ID NO: 771828 - protein, 103 aa, Homo sapiens [sequence omitted]

SEQ ID NO: 771829 - protein, 100 aa, Homo sapiens
QALIKTAGCSTLPRVVCWHTLKSLNGYKNLSSGAETREGLRSSSPVDLPLRPRKQATAAGQRKLLSLQLLLCACTSVTDLTYWPSPKAQGHLCQQCESAR

SEQ ID NO: 771830 - protein, 149 aa, Homo sapiens
MPCCSHRRCREDPGTSESQEMEEWALLDISQRKLYKEVMLETFRNLTSVGKSWKDQNIEYEYQNPRRNFRSLIEKKVNEIKDDSHCGETFTQVPDDRLNFQEKKASPEIKSCDSFVCGEVGLGNSSFNMNIRGDIGHKAYEYQEYGPKP

SEQ ID NO: 771831 - protein, 223 aa, Homo sapiens
IPGRFLKLQQKWSYEDKDQRPLNGFKDQLCSLVFMALTDPSTQLQLVGIRTLTVLGAQPDLLSYEDLELAVGHLYRLSFLKEDSQSCRVAALEASGTLAALYPVAFSSHLVPKLAEELRVGESNLTNGDEPTQCSRHLCCLQALSAVSTHPSIVKETLPLLLQHLWQVNRGNMVAQSSDVIAVCQSLRQMAEKCPPYPCVVHSDGQPRFTVSPVPVEKPVSRP

SEQ ID NO: 771832 - protein, 265 aa, Homo sapiens
MIYFWEAQRGNLTERVKTLFLAENSVKLKNLTGYTAYMVSVAAFNAAGDGPRSTPTQGQTQQAAPSAPSSVKFSELTTTSVNVSWEAPQFPNGILEGYRLVYEPCSPVDGVSKIVTVDVKGNSPLWLKVKDLAEGVTYRFRIRAKTFTYGPEIEANVTTGPGEGAPGPPGVPIIVRYSSAIAIHWSSGDPGKGPITRYVIEARPSDEGLWDILIKDIPKEVSSYTFSMDILKPGVSYDFRVIAVNDYGFGTPSSPSQSVPGTGLG

SEQ ID NO: 771833 - protein, 99 aa, Homo sapiens
PTEAGGDAVRAGGTAPLSAQQQHECGDADCRESPENPCDCHREPPPETPDINQLPPSILLKVGLGERRRDARFPPPPAPASEAFSLLPLSAEEGGSLAA

SEQ ID NO: 771834 - protein, 177 aa, Homo sapiens
PAEDMRTRLFAVPGRVAKEDWTLDLEPRGPVHIHPTRVSGGLPRCLCWVAVVVPRGMECPGLLQELSTQGQGEPREKRPGLLSFLICSCPPLSSTPLPFPRLSPPWAFVCFGRCHLTRTLIFNPIPLPPTLPHFDLILWLWAEASQGSWVGWVLRPPQTSTETCPCAVCTLHSLPCL

SEQ ID NO: 771835 - protein, 57 aa, Homo sapiens
MPSCPQYRYWLRQRLEAFQRVGSDSLPHLPEYPILQDALSVLSRVVAAHPFLPISPP

SEQ ID NO: 771836 - protein, 332 aa, Homo sapiens
TAVLSECRRLASWERFKTLWIPPAWVGRASWVPPRFPAPAPHEPTLGSMEPGNYATLDGAKDIEGLLGAGGGRNLVAHSPLTSHPAAPTLMPAVNYAPLDLPGSAEPPKQCHPCPGVPQGTSPAPVPYGYFGGGYYSCRVSRSSLKPCAQAATLAAYPAETPTAGEEYPSRPTEFAFYPGYPGTYQPMASYLDVSVVQTLGAPGEPRHDSLLPVDSYQSWALAGGWNSQMCCQGEQNPPGPFWKAAFADSSGQHPPDACAFRRGRKKRIPYSKGQLRELEREYAANKFITKDKRRKISAATSLSERQITIWFQNRRVKEKKVLAKVKNSATP

SEQ ID NO: 771837 - protein, 198 aa, Homo sapiens
TAVLSECRRLASWERFKTLWIPPAWVGRASWVPPRFPAPAPHEPTLGSMEPGNYATLDGAKDIEGLLGAGGGRNLVAHSPLTSHPAAPTLMPAVNYAPLDLPGSAEPPKQCHPCPGVPQGTSPAPVPYGYFGGGYYSCRVSRSSLKPLLDCSSGAAWVPSMCRETEPHVTAHSTRVPKEPGPVIIIHPDSGNNHDNQY

SEQ ID NO: 771838 - protein, 276 aa, Homo sapiens
MIKKMCPSDSELSIPAKNCYRMVILGSSKVGKTAIVSRFLTGRFEDAYTPTIEDFHRKFYSIRGEVYQLDILDTSGNHPFPAMRRLSILTGDVFILVFSLDNRDSFEEVQRLRQQILDTKSCLKNKTKENVDVPLVICGNKGDRDFYREVDQREIEQLVGDDPQRCAYFEISAKKNSSLDQMFRALFAMAKLPSEMSPDLHRKVSVQYCDVLHKKALRNKKLLRAGSGGGGGDPGDAFGIVAPFARRPSVHSDLMYIREKASAGSQAKDKERCVIS

SEQ ID NO: 771839 - protein, 288 aa, Homo sapiens
AEVTLEDPPQAAMIKKMCPSDSELSIPAKNCYRMVILGSSKVGKTAIVSRFLTGRFEDAYTPTIEDFHRKFYSIRGEVYQLDILDTSGNHPFPAMRRLSILTGDVFILVFSLDNRDSFEEVQRLRQQILDTKSCLKNKTKENVDVPLVICGNKGDRDFYREVDQREIEQLVGDDPQRCAYFEISAKKNSSLDQMFRALFAMAKLPSEMSPDLHRKVSVQYCDVLHKKALRNKKLLRAGSGGGGGDPGDAFGIVAPFARRPSVHSDLMYIREKASAGSQAKDKERCVIS

SEQ ID NO: 771840 - protein, 276 aa, Homo sapiens; identical to SEQ ID NO: 771838

SEQ ID NO: 771841 - protein, 87 aa, Homo sapiens
  misc_feature (79)..(79): Xaa can be any naturally occurring amino acid
AKDAVVGIPSPFRAIQHSFIEYLPTLYQALLVLENRGKNIISPFQEKETFLSLYIQETAQEYKLRHDMGMEGGRSPLGXAASHNIKC

SEQ ID NO: 771842 - protein, 73 aa, Homo sapiens
RFKGYPALFVLHKNWHRVKAGPVGLIFHMEVISPLLHEKKGYYRLGIQAVNYLPLKEACRRLYESSSCVRNTH

SEQ ID NO: 771843 - protein, 640 aa, Homo sapiens
ASGASARVCECAPASAPSAAGGQILGAAGPGQAGRSMMRAVWEALAALAAVACLVGAVRGGPGLSMFAGQAAQPDPCSDENGHPRRCIPDFVNAAFGKDVRVSSTCGRPPARYCVVSERGEERLRSCHLCNASDPKKAHPPAFLTDLNNPHNLTCWQSENYLQFPHNVTLTLSLGKKFEVTYVSLQFCSPRPESMAIYKSMDYGRTWVPFQFYSTQCRKMYNRPHRAPITKQNEQEAVCTDSHTDMRPLSGGLIAFSTLDGRPSAHDFDNSPVLQDWVTATDIRVAFSRLHTFGDENEDDSELARDSYFYAVSDLQVGGRCKCNGHAARCVRDRTDSLVCDCRHNTAGPECDRCKPFHYDRPWQRATAREANECVACNCNLHARRCRFNMELYKLSGRKSGGVCLNCRHNTAGRHCHYCKEGYYRDMGKPITHRKACKACDCHPVGAAGKTCNQTTGQCPCKDGVTGITCNRCAKGYQQSRSPIAPCIKIPVAPPTTAASSVEEPEDCDSYCKASKGKLKINMKKYCKKDYAVQIHILKADKAGDWWKFTVNIISVYKQGTSRIRRGDQSLWIRSRDIACKCPKIKPLKKYLLLGNAEDSPDQSGIVADKSSLVIQWRDTWARRLRKFQQREKKGKCKKA

SEQ ID NO: 771844 - protein, 569 aa, Homo sapiens
ASGASARVCECAPASAPSAAGGQILGAAGPGQAGRSMMRAVWEALAALAAVACLVGAVRGGPGLSMFAGQAAQPDPCSDENGHPRRCIPDFVNAAFGKDVRVSSTCGRPPARYCVVSERGEERLRSCHLCNASDPKKAHPPAFLTDLNNPHNLTCWQSENYLQFPHNVTLTLSLGKKFEVTYVSLQFCSPRPESMAIYKSMDYGRTWVPFQFYSTQCRKMYNRPHRAPITKQNEQEAVCTDSHTDMRPLSGGLIAFSTLDGRPSAHDFDNSPVLQDWVTATDIRVAFSRLHTFGDENEDDSELARDSYFYAVSDLQVGGRCKCNGHAARCVRDRTDSLVCDCRHNTAGPECDRCKPFHYDRPWQRATAREANECVACNCNLHARRCRFNMELYKLSGRKSGGVCLNCRHNTAGRHCHYCKEGYYRDMGKPITHRKACKACDCHPVGAAGKTCNQTTGQCPCKDGVTGITCNRCAKGYQQSRSPIAPCIKIPVAPPTTAASSVEEPEAARQPNTFQAEGLSLLPGAAEKEGARCWGYRRRLGHRVAQAECRGPRSWAWGRITSSFSFASN

SEQ ID NO: 771845 - protein, 162 aa, Homo sapiens
FIKDSLLQPLTLTLLRSNSAHLRVSSRQLWKELCVSPAMHLLAILFCALWSAVLAENSDDYDLMYVNLDNEIDNGLHPTEDPTPCACGQEHSEWDKLFIMLENSQMRERMLLQATDDVLRGELQRLREELGRLAESLARPCAPGAPAEARLTSALDELLQAT

SEQ ID NO: 771846 - protein, 726 aa, Homo sapiens
MSTATTVAPAGIPATPGPVNPPPPEVSNPSKPGRKTNQLQYMQNVVVKTLWKHQFAWPFYQPVDAIKLNLPDYHKIIKNPMDMGTIKKRLENNYYWSASECMQDFNTMFTNCYIYNKPTDDIVLMAQALEKIFLQKVAQMPQEEVELLPPAPKGKGRKPAAGAQSAGTQQVAAVSSVSPATPFQSVPPTVSQTPVIAATPVPTITANVTSVPVPPAAAPPPPATPIVPVVPPTPPVVKKKGVKRKADTTTPTTSAITASRSESPPPLSDPKQAKVVARRESGGRPIKPPKKDLEDGEVPQHAGKKGKLSEHLRYCDSILREMLSKKHAAYAWPFYKPVDAEALELHDYHDIIKHPMDLSTVKRKMDGREYPDAQGFAADVRLMFSNCYKYNPPDHEVVAMARKLQDVFEMRFAKMPDEPVEAPALPAPAAPMVSKGAESSRSSEESSSDSGSSDSEEERATRLAELQEQLKAVHEQLAALSQAPVNKPKKKKEKKEKEKKKKDKEKEKEKHKVKAEEEKKAKVAPPAKQAQQKKAPAKKANSTTTAGRQLKKGGKQASASYDSEEEEEGLPMSYDEKRQLSLDINRLPGEKLGRVVHIIQSREPSLRDSNPDEIEIDFETLKPTTLRELERYVKSCLQKKQRKPFSASGKKQAAKSKEELAQEKKKELEKRLQDVSGQLSSSKKPARKEKPGSAPSGGPSRLSSSSSSESGSSSSSGSSSDSSDSE

SEQ ID NO: 771847 - protein, 212 aa, Homo sapiens
  misc_feature (1)..(2): Xaa can be any naturally occurring amino acid
  misc_feature (9)..(9): Xaa can be any naturally occurring amino acid
XXDSSERIXSKEMSRIWVLYLKAVSFVNTHCPCHLGPELLTLASASYDSEEEEEGLPMSYDEKRQLSLDINRLPGEKLGRVVHIIQSREPSLRDSNPDEIEIDFETLKPTTLRELERYVKSCLQKKQRKPFSASGKKQAAKSKEELAQEKKKELEKRLQDVSGQLSSSKKPARKEKPGSAPSGGPSRLSSSSSSESGSSSSSGSSSDSSDSE

SEQ ID NO: 771848 - protein, 726 aa, Homo sapiens; identical to SEQ ID NO: 771846

SEQ ID NO: 771849 - protein, 647 aa, Homo sapiens
MSTATTVAPAGIPATPGPVNPPPPEVSNPSKPGRKTNQLQYMQNVVVKTLWKHQFAWPFYQPVDAIKLNLPDYHKIIKNPMDMGTIKKRLENNYYWSASECMQDFNTMFTNCYIYNKPTDDIVLMAQALEKIFLQKVAQMPQEEVELLPPAPKGKGRKPAAGAQSAGTQQVAAVSSVSPATPFQSVPPTVSQTPVIAATPVPTITANVTSVPVPPAAAPPPPATPIVPVVPPTPPVVKKKGVKRKADTTTPTTSAITASRSESPPPLSDPKQAKVVARRESGGRPIKPPKKDLEDGEVPQHAGKKGKLSEHLRYCDSILREMLSKKHAAYAWPFYKPVDAEALELHDYHDIIKHPMDLSTVKRKMDGREYPDAQGFAADVRLMFSNCYKYNPPDHEVVAMARKLQDVFEMRFAKMPDEPVEAPALPAPAAPMVSKGAESSRSSEESSSDSGSSDSEEERAPGWRSCRSRQLKKGGKQASASYDSEEEEEGLPMSYDEKRQLSLDINRLPGEKLGRVVHIIQSREPSLRDSNPDEIEIDFETLKPTTLRELERYVKSCLQKKQRKPFSASGKKQAAKSKEELAQEKKKELEKRLQDVSGQLSSSKKPARKEKPGSAPSGGPSRLSSSSSSESGSSSSSGSSSDSSDSE

SEQ ID NO: 771850 - protein, 122 aa, Homo sapiens
IGCDHPHHLARICCSHSSRRPHPGSPPPGGDPGAGMPGGGGVATTWMGNQILILVPELASGDHHHHLEQALVTIVGAGKGGCGTILGNKKWGQKRVQIRNLEGKLSVSMWYSDENKKTLTIK

SEQ ID NO: 771851 - protein, 69 aa, Homo sapiens
GQKDLVPTHHTMGQKDLVPTTPHHRGSKDLVLTTPHHGPEGPGADTPHHGPEGPGADHTTLIGARRTRY

SEQ ID NO: 771852 - protein, 165 aa, Homo sapiens
MLMPKKNRIAIYELLFKEGVMVAKKDVHMPKHPELADKNVPNLHVMKAMQSLKSRGYVKEQFAWRHFYWYLTNEGIQYLRDYLHLPPEIVPATLRRSRPETGRPRPKGLEGERPARLTRGEADRDTYRRSAVPPGADKKAEAGAGSATEFQFRGGFGRGRGQPPQ

SEQ ID NO: 771853 - protein, 138 aa, Homo sapiens
MLMPKKNRIAIYELLFKEGVMVAKKDVHMPKHPELADKNVPNLHVMKAMQSLKSRGYVKEQFAWRHFYWYLTNEGIQYLRDYLHLPPEIVPATLRRSRPETGRPRPKGLEGERPARLTRGEADRDTYRRHVLRKTGGA

SEQ ID NO: 771854 - protein, 198 aa, Homo sapiens
  misc_feature (74)..(74): Xaa can be any naturally occurring amino acid
RHEGMCVDALLREEPREVGPHLYEHSLCLKERESPCVAPQKESCPTTCLSHPARSGHRPTEMLPTPCHMSTEGXTGTFFSQFPRANAERRPRFALRRPHFYWYLTNEGIQYLRDYLHLPPEIVPATLRRSRPETGRPRPKGLEGERPARLTRGEADRDTYRRSAVPPGADKKAEAGAGSATEFQFRGGFGRGRGQPPQ

SEQ ID NO: 771855 - protein, 879 aa, Homo sapiens
MNLCWNEIKKKSHNLRARLEAFSDHSGKLQLPLQEIIDWLSQKDEELSAQLPLQGDVALVQQEKETHAAFMEEVKSRGPYIYSVLESAQAFLSQHPFEELEEPHSESKDTSPKQRIQNLSRFVWKQATVASELWEKLTARCVDQHRHIERTLEQLLEIQGAMEELSTTLSQAEGVRATWEPIGDLFIDSLPEHIQAIKLFKEEFSPMKDGVKLVNDLAHQLAISDVHLSMENSQALEQINVRWKQLQASVDERLKQLQDAHRDFGPGSQHFLSSSVQVPWERAISPNKVPYYINHQAQTTCWDHPKMTELYQTLADLNNIKFSAYRTAMKLRRVQKALRLDLVTLTTALEIFNEHDLQASEHVMDVVEVIHCLTALYERLEEERGILVNVPLCVDMSLNWLLNVFDSGRSGKMRALSFKTGIACLCGTEVKEKLQYLFSQVANSGSQCDQRHLGVLLHEAIQVPRQLGEVAAFGGSNVEPSVRSCFRFSTGKPVIEASQFLEWVNLEPQSMVWLPVLHRVTIAEQVKHQTKCSICRQCPIKGFRYRSLKQFNVDICQTCFLTGRASKGNKLHYPIMEYYTPTTSSENMRDFATTLKNKFRSKHYFSKHPQRGYLPVQSVLEADYSETPASSPMWPHADTHSRIEHFASRLAEMESQNCSFFNDSLSPDDSIDEDQYLLRHSSPITDREPAFGQQAPCSVATESKGELQKILAHLEDENRILQGELRRLKWQHEEAAEAPSLADGSTEAATDHRNEELLAEARILRQHKSRLETRMQILEDHNKQLESQLQRLRELLLQPPTESDGSGSAGSSLASSPQQSEGSHPREKGQTTPDTEAADDVGSKSQDVSLCLEDIMEKLRHAFPSVRSSDVTANTLLAS

SEQ ID NO: 771856 - protein, 957 aa, Homo sapiens
MQPMVMQGCPYTLPRCHDWQAADQFHHSSSLRSTCPHPQVRAAVTSPAPPQDGAGVPCLSLKLLNGSVGASGPLEPPAMNLCWNEIKKKSHNLRARLEAFSDHSGKLQLPLQEIIDWLSQKDEELSAQLPLQGDVALVQQEKETHAAFMEEVKSRGPYIYSVLESAQAFLSQHPFEELEEPHSESKDTSPKQRIQNLSRFVWKQATVASELWEKLTARCVDQHRHIERTLEQLLEIQGAMEELSTTLSQAEGVRATWEPIGDLFIDSLPEHIQAIKLFKEEFSPMKDGVKLVNDLAHQLAISDVHLSMENSQALEQINVRWKQLQASVDERLKQLQDAHRDFGPGSQHFLSSSVQVPWERAISPNKVPYYINHQAQTTCWDHPKMTELYQTLADLNNIKFSAYRTAMKLRRVQKALRLDLVTLTTALEIFNEHDLQASEHVMDVVEVIHCLTALYERLEEERGILVNVPLCVDMSLNWLLNVFDSGRSGKMRALSFKTGIACLCGTEVKEKLQYLFSQVANSGSQCDQRHLGVLLHEAIQVPRQLGEVAAFGGSNVEPSVRSCFRFSTGKPVIEASQFLEWVNLEPQSMVWLPVLHRVTIAEQVKHQTKCSICRQCPIKGFRYRSLKQFNVDICQTCFLTGRASKGNKLHYPIMEYYTPTTSSENMRDFATTLKNKFRSKHYFSKHPQRGYLPVQSVLEADYSETPASSPMWPHADTHSRIEHFASRLAEMESQNCSFFNDSLSPDDSIDEDQYLLRHSSPITDREPAFGQQAPCSVATESKGELQKILAHLEDENRILQGELRRLKWQHEEAAEAPSLADGSTEAATDHRNEELLAEARILRQHKSRLETRMQILEDHNKQLESQLQRLRELLLQPPTESDGSGSAGSSLASSPQQSEGSHPREKGQTTPDTEAADDVGSKSQDVSLCLEDIMEKLRHAFPSVRSSDVTANTLLAS

SEQ ID NO: 771857 - protein, 591 aa, Homo sapiens
KPERRESPARPTAMRQQDAPKPTPAARRCSGLARRVLTIAFALLILGLMTWAYAAGVPLASDRYGLLAFGLYGAFLSAHLVAQSLFAYLEHRRVAAAARGPLDAATARSVALTISAYQEDPAYLRQCLASARALLYPRARLRVLMVVDGNRAEDLYMVDMFREVFADEDPATYVWDGNYHQPWEPAAAGAVGAGAYREVEAEDPGRLAVEALVRTRRCVCVAQRWGGKREVMYTAFKALGDSVDYVQVCDSDTRLDPMALLELVRVLDEDPRVGAVGGDVRILNPLDSWVSFLSSLRYWVAFNVERACQSYFHCVSCISGPLGLYRNNLLQQFLEAWYNQKFLGTHCTFGDDRHLTNRMLSMGYATKYTSRSRCYSETPSSFLRWLSQQTRWSKSYFREWLYNALWWHRHHAWMTYEAVVSGLFPFFVAATVLRLFYAGRPWALLWVLLCVQGVALAKAAFAAWLRGCLRMVLLSLYAPLYMCGLLPAKFLALVTMNQSGWGTSGRRKLAANYVPLLPLALWALLLLGGLVRSVAHEARADWSGPSRAAEAYHLAAGAGAYVGYWVAMLTLYWVGVRRLCRRRTGGYRVQV

SEQ ID NO: 771858 - protein, 592 aa, Homo sapiens
RLMRPGLMPLPFPSRSQQDAPKPTPAARRCSGLARRVLTIAFALLILGLMTWAYAAGVPLASDRYGLLAFGLYGAFLSAHLVAQSLFAYLEHRRVAAAARGPLDAATARSVALTISAYQEDPAYLRQCLASARALLYPRARLRVLMVVDGNRAEDLYMVDMFREVFADEDPATYVWDGNYHQPWEPAAAGAVGAGAYREVEAEDPGRLAVEALVRTRRCVCVAQRWGGKREVMYTAFKALGDSVDYVQVCDSDTRLDPMALLELVRVLDEDPRVGAVGGDVRILNPLDSWVSFLSSLRYWVAFNVERACQSYFHCVSCISGPLGLYRNNLLQQFLEAWYNQKFLGTHCTFGDDRHLTNRMLSMGYATKYTSRSRCYSETPSSFLRWLSQQTRWSKSYFREWLYNALWWHRHHAWMTYEAVVSGLFPFFVAATVLRLFYAGRPWALLWVLLCVQGVALAKAAFAAWLRGCLRMVLLSLYAPLYMCGLLPAKFLALVTMNQSGWGTSGRRKLAANYVPLLPLALWALLLLGGLVRSVAHEARADWSGPSRAAEAYHLAAGAGAYVGYWVAMLTLYWVGVRRLCRRRTGGYRVQV

SEQ ID NO: 771859 - protein, 461 aa, Homo sapiens
MDYSYDEDLDELCPVCGDKVSGYHYGLLTCESCKGFFKRTVQNNKHYTCTESQSCKIDKTQRKRCPFCRFQKCLTVGMRLEAVRADRMRGGRNKFGPMYKRDRALKQQKKAQIRANGFKLETGPPMGVPPPPPPAPDYVLPPSLHGPEPKGLAAGPPAGPLGDFGAPALPMAVPGAHGPLAGYLYPAFPGRAIKSEYPEPYASPPQPGLPYGYPEPFSGGPNVPELILQLLQLEPDEDQVRARILGCLQEPTKSRPDQPAAFGLLCRMADQTFISIVDWARRCMVFKELEVADQMTLLQNCWSELLVFDHIYRQVQHGKEGSILLVTGQEVELTTVATQAGSLLHSLVLRAQELVLQLLALQLDRQEFVCLKFIILFSLDLKFLNNHILVKDAQEKANAALLDYTLCHYPHCGDKFQQLLLCLVEVRALSMQAKEYLYHKHLGNEMPRNNLLIEMLQAKQT

SEQ ID NO: 771860 - protein, 245 aa, Homo sapiens
VEEEGDVSNRGVELLQLEPDEDQVRARILGCLQEPTKSRPDQPAAFGLLCRMADQTFISIVDWARRCMVFKELEVADQMTLLQNCWSELLVFDHIYRQVQHGKEGSILLVTGQEVELTTVATQAGSLLHSLVLRAQELVLQLLALQLDRQEFVCLKFIILFSLDLKFLNNHILVKDAQEKANAALLDYTLCHYPHCGDKFQQLLLCLVEVRALSMQAKEYLYHKHLGNEMPRNNLLIEMLQAKQT

SEQ ID NO: 771861 - protein, 461 aa, Homo sapiens; identical to SEQ ID NO: 771859

SEQ ID NO: 771862 - protein, 407 aa, Homo sapiens
CEGTSCCYIQQSELSISQKKSMFAEIQIQDKDRMGTAGKVIKCKAAVLWEQKQPFSIEEIEVAPPKTKEVRIKILATGICRTDDHVIKGTMVSKFPVIVGHEATGIVESIGEGVTTVKPGDKVIPLFLPQCRECNACRNPDGNLCIRSDITGRGVLADGTTRFTCKGKPVHHFMNTSTFTEYTVVDESSVAKIDDAAPPEKVCLIGCGFSTGYGAAVKTGKVKPGSTCVVFGLGGVGLSVIMGCKSAGASRIIGIDLNKDKFEKAMAVGATECISPKDSTKPISEVLSEMTGNNVGYTFEVIGHLETMIDALASCHMNYGTSVVVGVPPSAKMLTYDPMLLFTGRTWKGCVFGGLKSRDDVPKLVTEFLAKKFDLDQLITHVLPFKKISEGFELLNSGQSIRTVLTF

SEQ ID NO: 771863 - protein, 58 aa, Homo sapiens
RVEVCAYVRSRIYHVPAHISFFKRALQVLRIGTGCVACVCTNSLVTKFLATCVLSHPP

SEQ ID NO: 771864 - protein, 114 aa, Homo sapiens
IPHTHSQPQTHSYLPPHSRRDGWMPWPSAHGMALCPHFGFCAQWDTRACSHSYTHTHTTLPHGACVCMTLHTQPHRDSHRHTQACLETDVTHTGVHRHTWADTLTDTNTALAGG

SEQ ID NO: 771865 - protein, 241 aa, Homo sapiens
MAVFLQLLPLLLSRAQGNPGASLDGRPGDRVNLSCGGVSHPIRWVWAPSFPACKGLSKGRRPILWASSSGTPTVPPLQPFVGRLRSLDSGIRRLELLLSAGDSGTFFCKGRHEDESRTVLHVLGDRTYCKAPGPTHGSVYPQLLIPLLGAGLVLGLGALGLVWWLHRRLPPQPIRPLPRFAPLVKTEPQRPVKEEEPKIPGDLDQEPSLLYADLDHLALSRPRRLSTADPADASTIYAVVV

SEQ ID NO: 771866 - protein, 81 aa, Homo sapiens
LTQLSVQLPGGVRTASHLAELAGNRRQEQELGCSGPHGGLDGESGSVGSGAFPLHAIAIPVMGGTEIPVVPVTAPASTCRA

SEQ ID NO: 771867 - protein, 127 aa, Homo sapiens
DHKCMPPCLANFKNIYFVETGSSYIAQTGLKLLGSSSPPAFASQSARIPGMSYHAWLLLIFFKALHKYSQRSHHIVEKQKYIQLNVLCWMYTFEEEHRKKVWKRNVDRAFMLKQQMKIEPRSLKASV

SEQ ID NO: 771868 - protein, 54 aa, Homo sapiens
MTPSLQPSSSEGPLPTSTSWAFLGGPETYGNLDVCPPGPEPGLRYSPTYLSTAA

SEQ ID NO: 771869 - protein, 408 aa, Homo sapiens
MSHYTDEPRFTIEQIDLLQRLRRTGMTKHEILHALETLDRLDQEHSDKFGRRSSYGGSSYGNSTNNVPASSSTATASTQTQHSGMSPSPSNSYDTSPQPCTTNQNGRENNERLSTSNGKMSPTRYHANSMGQRSYSFEASEEDLDVDDKVEELMRRDSSVIKEEIKAFLANRRISQAVVAQVTGISQSRISHWLLQQGSDLSEQKKRAFYRWYQLEKTNPGATLSMRPAPIPIEDPEWRQTPPPVSATSGTFRLRRGSRFTWRKECLAVMESYFNENQYPDEAKREEIANACNAVIQKPGKKLSDLERVTSLKVYNWFANRRKEIKRRANIEAAILESHGIDVQSPGGHSNSDDVDGNDYSEQDDSTSHSDHQDPISLAVEMAAVNHTILALARQGANEIKTEALDDD

SEQ ID NO: 771870 - protein, 408 aa, Homo sapiens; identical to SEQ ID NO: 771869

SEQ ID NO: 771871 - protein, 432 aa, Homo sapiens
MSHYTDEPRFTIEQIDLLQRLRRTGMTKHEILHALETLDRLDQEHSDKFGRRSSYGGSSYGNSTNNVPASSSTATASTQTQHSGMSPSPSNSYDTSPQPCTTNQNGRENNERLSTSNGKMSPTRYHANSMGQRSYSFEASEEDLDVDDKVEELMRRDSSVIKEEIKAFLANRRISQAVVAQVTGISQSRISHWLLQQGSDLSEQKKRAFYRWYQLEKTNPGATLSMRPAPIPIEDPEWRQTPPPVSATSGTFRLRRGSRFTWRKECLAVMESYFNENQYPDEAKREEIANACNAVIQKPGKKLSDLERVTSLKVYNWFANRRKEIKRRANIEAAILESHGIDVQSPGGHSNSDDVDGNDYSEQDTWQVRNGEEEEGRSSEGGREAEKDDSTSHSDHQDPISLAVEMAAVNHTILALARQGANEIKTEALDDD

SEQ ID NO: 771872 - protein, 394 aa, Homo sapiens
MSHYTDEPRFTIEQIDLLQRLRRTGMTKHEILHALETLDRLDQEHSDKFGRRSSYGGSSYGNSTNNVPASSSTATASTQTQHSGMSPSPSNSYDTSPQPCTTNQNGRENNERLSTSNGKMSPTRYHANSMGQRSYSFEASEEDLDVDDKVEELMRRDSSVIKEEIKAFLANRRISQAVVAQVTGISQSRISHWLLQQGSDLSEQKKRAFYRWYQLEKTNPGATLSMRPAPIPIEDPEWRQTPPPVSATSGTFRLRRGSRFTWRKECLAVMESYFNENQYPDEAKREEIANACNAVIQKPGKKLSDLERVTSLKVYNWFANRRKEIKRRANIEAAILESHGIDVQSPGGHSNSDDVDGNDYSEQDTWQVRNGEEEEGRSSEGGREAEKVEEERRI

SEQ ID NO: 771873 - protein, 432 aa, Homo sapiens; identical to SEQ ID NO: 771871

SEQ ID NO: 771874 - protein, 408 aa, Homo sapiens; identical to SEQ ID NO: 771869

SEQ ID NO: 771875 - protein, 79 aa, Homo sapiens
EHGHRKASAGPSLRSLSHHSTGVFRHTLAARQDTPPAERHHVRHHCLPWKSPQPSMISPPGSPCLPRPWSRWVCSTFQG

SEQ ID NO: 771876 - protein, 79 aa, Homo sapiens; identical to SEQ ID NO: 771875

SEQ ID NO: 771877 - protein, 432 aa, Homo sapiens; identical to SEQ ID NO: 771871

SEQ ID NO: 771878 - protein, 79 aa, Homo sapiens; identical to SEQ ID NO: 771875

SEQ ID NO: 771879 - protein, 375 aa, Homo sapiens
MSHYTDEPRFTIEQIDLLQRLRRTGMTKHEILHALETLDRLDQEHSDKFGRRSSYGGSSYGNSTNNVPASSSTATASTQTQHSGMSPSPSNSYDTSPQPCTTNQNGRENNERLSTSNGKMSPTRYHANSMGQRSYSFEASEEDLDVDDKVEELMRRDSSVIKEEIKAFLANRRISQAVVAQVTGISQSRISHWLLQQGSDLSEQKKRAFYRWYQLEKTNPGATLSMRPAPIPIEDPEWRQTPPPVSATSGTFRLRRGSRFTWRKECLAVMESYFNENQYPDEAKREEIANACNAVIQKPGKKLSDLERVTSLKVYNWFANRRKEIKRRANIEAAILESHGIDVQSPGGHSNSDDVDGNDYSEQTDRMQAEVVAQE

SEQ ID NO: 771880 - protein, 66 aa, Homo sapiens
STCERYNNKHNYSSLPDEAYGQVERIQTLGWVQWLTPVIPALWEAEVGGSQGQEIKTILANMAQSH

SEQ ID NO: 771881 - protein, 130 aa, Homo sapiens
MDDFAKPRPQTAQRGERVAARTQGGLGARRRGSGSQPEGDLSSPESGPVTRHIFAGTEAGEPAAPEGRAARSDGQRPPPLAPPPTGRSNLGAPESQLSGPGTRLDSPPRPTRAGSVPRPSRNFPPVRPRA

SEQ ID NO: 771882 - protein, 89 aa, Homo sapiens
GESSQQAGHLCTSMTDHPMVPQIYLPKTLFFLPGTHSSGTAKPPFQLSDQLQQQDPPGPASSSAPTLGLLPAIATTIAVCFLLHSLGPS

SEQ ID NO: 771883 - protein, 427 aa, Homo sapiens
MEAMAASTSLPDPGDFDRNVPRICGVCGDRATGFHFNAMTCEGCKGFFRRSMKRKALFTCPFNGDCRITKDNRRHCQACRLKRCVDIGMMKEFILTDEEVQRKREMILKRKEEEALKDSLRPKLSEEQQRIIAILLDAHHKTYDPTYSDFCQFRPPVRVNDGGGSHPSRPNSRHTPSFSGDSSSSCSDHCITSSDMMDSSSFSNLDLSEEDSDDPSVTLELSQLSMLPHLADLVSYSIQKVIGFAKMIPGFRDLTSEDQIVLLKSSAIEVIMLRSNESFTMDDMSWTCGNQDYKYRVSDVTKAGHSLELIEPLIKFQVGLKKLNLHEEEHVLLMAICIVSPDRPGVQDAALIEAIQDRLSNTLQTYIRCRHPPPGSHLLYAKMIQKLADLRSLNEEHSKQYRCLSFQPECSMKLTPLVLEVFGNEIS

SEQ ID NO: 771884 - protein, 427 aa, Homo sapiens; identical to SEQ ID NO: 771883

SEQ ID NO: 771885 - protein, 70 aa, Homo sapiens
GAVCAGSAEQLVHPPAGPEAFGSEVSVRPHRRAPLGSTYLPPAPSGMEAMAASTSLPPQCGCKAAVHPQG

SEQ ID NO: 771886 - protein, 119 aa, Homo sapiens
GAVCAGSAEQLVHPPAGPGLLNLAQLDGEMDSASSDSLMPGPVHIALLASLNPHSFSLEAFGSEVSVRPHRRAPLGSTYLPPAPSGMEAMAASTSLPDPGDFDRNVPRICGVCGDRDVG

SEQ ID NO: 771887 - protein, 88 aa, Homo sapiens
SEEASVIHLEERLSVPVPHTYSSLSQRPHLGVNGQTLPTSWAGLAAESMHLKLYHSAPASQVHLYYSLIYRVAGTTDLEIFMGGELTL

SEQ ID NO: 771888 - protein, 473 aa, Homo sapiens
GAVCAGSAEQLVHPPAGPEAFGSEVSVRPHRRAPLGSTYLPPAPSGMEAMAASTSLPDPGDFDRNVPRICGVCGDRATGFHFNAMTCEGCKGFFRRSMKRKALFTCPFNGDCRITKDNRRHCQACRLKRCVDIGMMKEFILTDEEVQRKREMILKRKEEEALKDSLRPKLSEEQQRIIAILLDAHHKTYDPTYSDFCQFRPPVRVNDGGGSHPSRPNSRHTPSFSGDSSSSCSDHCITSSDMMDSSSFSNLDLSEEDSDDPSVTLELSQLSMLPHLADLVSYSIQKVIGFAKMIPGFRDLTSEDQIVLLKSSAIEVIMLRSNESFTMDDMSWTCGNQDYKYRVSDVTKAGHSLELIEPLIKFQVGLKKLNLHEEEHVLLMAICIVSPDRPGVQDAALIEAIQDRLSNTLQTYIRCRHPPPGSHLLYAKMIQKLADLRSLNEEHSKQYRCLSFQPECSMKLTPLVLEVFGNEIS

SEQ ID NO: 771889 - protein, 346 aa, Homo sapiens
RVSATLAMMKEFILTDEEVQRKREMILKRKEEEALKDSLRPKLSEEQQRIIAILLDAHHKTYDPTYSDFCQFRPPVRVNDGGGSHPSRPNSRHTPSFSGDSSSSCSDHCITSSDMMDSSSFSNLDLSEEDSDDPSVTLELSQLSMLPHLADLVSYSIQKVIGFAKMIPGFRDLTSEDQIVLLKSSAIEVIMLRSNESFTMDDMSWTCGNQDYKYRVSDVTKAGHSLELIEPLIKFQVGLKKLNLHEEEHVLLMAICIVSPDRPGVQDAALIEAIQDRLSNTLQTYIRCRHPPPGSHLLYAKMIQKLADLRSLNEEHSKQYRCLSFQPECSMKLTPLVLEVFGNEIS

SEQ ID NO: 771890 - protein, 427 aa, Homo sapiens; identical to SEQ ID NO: 771883

SEQ ID NO: 771891 - protein, 191 aa, Homo sapiens
GAVCAGSAEQLVHPPAGPGLLNLAQLEEKWTLASSDSLMPGPVHIALLASLILIASLWEAFGSEVSVRPHRRAPLGSTYLPPAPSGMEAMAASTSLPDPGDFDRNVPRICGVCGDRATGFHFNAMTCEGCKGFFRRSMKRKALFTCPFNGDCRITKAHSTRSGPFNSAPGHPTAPAQSTLPAVHAAAKCIA

SEQ ID NO: 771892 - protein, 111 aa, Homo sapiens
WYSLALFPRLECSGLISAYCNLCLLSSSNSPASASQVAGITGAHHHSQLIFVFLVETGFRDVGQAGFELLTSGDPPASASQSSGITDVSHHTWPRNAFSSIPIQNYSVGPE

SEQ ID NO: 771893 - protein, 67 aa, Homo sapiens
PLVHGPLALPQSRPIELWLTFPGPHMANLRGPFLSSCALPCLPLVFALPDVPPAPIWASAFLVFSVF

SEQ ID NO: 771894 - protein, 103 aa, Homo sapiens
MVNLVPNWSSIYWFLIFFFFLRRSLALSSRLERNGSISAHCNFRFLGSSDSPASASQVAGITVAHRHARLIFVFLWRPGFTMLARLVFELDLRSLVLFLTRGF

SEQ ID NO: 771895 - protein, 72 aa, Homo sapiens
VGRPLPCPESNVFSMGQHGPWMGLSIADHVVTCACVDMCACVDMYAPECICMSFLHTQCSPPMLPACGDFLF

SEQ ID NO: 771896 - protein, 85 aa, Homo sapiens
ASTKQGGGSTHQAEKSLPPLLQPNSVAPYGSPWTNGCGLGGGVLWPGLDHLSILSGSGGSPQRQTQERGSARMSPRCPVLPRGQL

SEQ ID NO: 771897 - protein, 258 aa, Homo sapiens
GRFHPQRMIISRHLPSVSSLPFHPQLHPQQMIISRHLPSVCGGRFHPQRMIISRHLPSVSSLPFHPSADDNIKTPAERLRGPLPPSADDNLKTPSERQLTPLPPSAPPSADDNIKTPAERLRGPLPPSADDNLKTPPLATQEAEAEKPRKPKRQRAAEMEPPPEPKRRRVGDVEPSRKPKRRRAADVEPSSPEPKRRRVGDVEPSRKPKRRRAADVEPSSPEPKRRRVGDVEPSRKPKRRRAADVEPSLPEPKRRRLS

SEQ ID NO: 771898 - protein, 271 aa, Homo sapiens
GPLPPSADDNLKTPSERQLTPLPPSAPPSADDNIKTPAERLRGPLPPSADDNLKTPSERQLTPLPPSAPPSADDNIKTPAERLRGPLPPSADDNLKTPSERQLTPLPPQLHPQQMIISRHLPSVCGERLRGPLPPSADDNLKTPSERQLTPLPPSAPPSADDNIKTPAERLRGPLPPSADDNLKTPSERQLTPLPPSAPPSADDNIKTPAERLRGPLPPSADDNLKTPSERQLTPLPPSAPPSADDNIKTPAERLRGPLPPSADDNLKTPS

SEQ ID NO: 771899 - protein, 448 aa, Homo sapiens
MDPKYFILILFCGHLNNTFFSKTETITTEKQSQPTLFTSSMSQVLANSQNTTGNPLGQPTQFSDTFSGQSISPAKVTAGQPTPAVYTSSEKPEAHTSAGQPLAYNTKQPTPIANTSSQQAVFTSARQLPSARTSTTQPPKSFVYTFTQQSSSVQIPSRKQITVHNPSTQPTSTVKNSPRSTPGFILDTTSNKQTPQKNNYNSIAAILIGVLLTSMLVAIIIIVLWKCLRKPVLNDQNWAGRSPFADGETPDICMDNIRENEISTKRTSIISLTPWKPSKSTLLADDLEIKLFESSENIEDSNNPKTEKIKDQVNGTSEDSADGSTVGTAVSSSDDADLPPPPPLLDLEGQESNQSDKPTMTIVSPLPNDSTSLPPSLDCLNQDCGDHKSEIIQSFPPLDSLNLPLPPVDFMKNQEDSNLEIQCQEFSIPPNSDQDLNESLPPPPAELL

SEQ ID NO: 771900 - protein, 448 aa, Homo sapiens; identical to SEQ ID NO: 771899

SEQ ID NO: 771901 - protein, 463 aa, Homo sapiens
MLFRYAEKITRKYSEMDPKYFILILFCGHLNNTFFSKTETITTEKQSQPTLFTSSMSQVLANSQNTTGNPLGQPTQFSDTFSGQSISPAKVTAGQPTPAVYTSSEKPEAHTSAGQPLAYNTKQPTPIANTSSQQAVFTSARQLPSARTSTTQPPKSFVYTFTQQSSSVQIPSRKQITVHNPSTQPTSTVKNSPRSTPGFILDTTSNKQTPQKNNYNSIAAILIGVLLTSMLVAIIIIVLWKCLRKPVLNDQNWAGRSPFADGETPDICMDNIRENEISTKRTSIISLTPWKPSKSTLLADDLEIKLFESSENIEDSNNPKTEKIKDQVNGTSEDSADGSTVGTAVSSSDDADLPPPPPLLDLEGQESNQSDKPTMTIVSPLPNDSTSLPPSLDCLNQDCGDHKSEIIQSFPPLDSLNLPLPPVDFMKNQEDSNLEIQCQEFSIPPNSDQDLNESLPPPPAELL

SEQ ID NO: 771902 - protein, 112 aa, Homo sapiens
LLLLRRGLRQHLRPQETPPGAQGREPRGAWSRGGHLGREGCLTEGFPSHSHQKPPSGLPPPRTDQTLPPSSLLPHPSELHTDWRPSGRTPDRLKTESLPSSTSLPSPHPIRH

SEQ ID NO: 771903 - protein, 223 aa, Homo sapiens
GQVSRKCHQWGGATTSLPFCEVLLSLLQQGQDETMTDKTEKVAVDPETVFKRPRECDSPSYQKRQRMALLARKQGAGDSLIAGSAMSKAKKLMTGHAIPPSQLDSQIDDFTGFSKDRMMQKPGSNAPVGGNVTSSFSGDDLECRETASSPKSQREINADIKRKLVKELRCVGQKYEKIFEMLEGVQGPTAVRKRFFESIIKEAARCMRRDFVKHLKKKLKRMI

SEQ ID NO: 771904 - protein, 205 aa, Homo sapiens
GQVSRKCHQWGGATTSLPFCEVLLSLLQQGQDETMTDKTEKVAVDPETVFKRPRECDSPSYQIAGSAMSKAKKLMTGHAIPPSQLDSQIDDFTGFSKDRMMQKPGSNAPVGGNVTSSFSGDDLECRETASSPKSQREINADIKRKLVKELRCVGQKYEKIFEMLEGVQGPTAVRKRFFESIIKEAARCMRRDFVKHLKKKLKRMI

SEQ ID NO: 771905 - protein, 70 aa, Homo sapiens
PGLQKQTSKPADQQVDSQTMRQRKKEEEEHLNTERSSAGGGWRGVQPLGSPTPGEDHHPIPSPASGFPSI

SEQ ID NO: 771906 - protein, 118 aa, Homo sapiens
YTGLRKHVCDMHRLLCYAQALGNTHVTCTGCPAHACLCPAPWASWYLPAALVPQPPCLSSPRPLGFWGKFSTCRTNSETTCVLALPICHHLQCPQTQQTVPTMPSCPFSLTHQLSFNT

SEQ ID NO: 771907 - protein, 332 aa, Homo sapiens
MKAFVQISGKDGTVVFSLGPVVQNLIEEKADLIASDLAQIATEGRPTTLSETMRKADVWLIRNSWNFQFPHPLLPNVDFVGGLHCKPAKPLPKEMEEFVQSSGENGVVVFSLGSMVSNMTEERANVIASALAQIPQKVLWRFDGNKPDALGLNTRLYKWIPQNDLLGHPKTRAFITHGGANGIYEAIYHGIPMVGIPLFFDQPDNIAHMKAKGAAVRVDFNTMSSTDLLNALKTVINDPSYKENIMKLSRIQHDQPVKPLDRAVFWIEFVMRHKGAKHLRVAAHNLTWFQYHSLDVIGFLLACVATVLFIITKCCLFCFWKFARKGKKGKRD

SEQ ID NO: 771908 - protein, 345 aa, Homo sapiens
CTRMALKWTTVLLIQLSFYFSSGSCGKVLVWAAEYSLWMNMKTILKELVQRGHEVTVLASSASILFDPNDSSTLKLEVYPTSLTKTEFENIIMQLVKRLSEIQKDTFWLPFSQEQEILWAINDIIRNFCKDVVSNKKLMKKLQESRFDIVFADAYLPCGELLAELFNIPFVYSHSFSPGYSFERHSGGFIFPPSYVPVVMSKLSDQMTFMERVKNMLYVLYFDFWFQIFNMKKWDQFYSEVLGRPTTLSETMRKADVWLIRNSWNFQFPHPLLPNVDFVGGLHCKPAKPLPKEMEEFVQSSGENGVVVFSLGSMVSNMTEERANVIASALAQIPQKSAVQVDTPE

SEQ ID NO: 771909 - protein, 129 aa, Homo sapiens
MRKADVWLIRNSWNFQFPHPLLPNVDFVGGLHCKPAKPLPKEMEEFVQSSGENGVVVFSLGSMVSNMTEERANVIASALAQIPQKVLWRFDGNKPDALGLNTRLYKWIPQNDLLGNLPWDPYGGHSIVF

SEQ ID NO: 771910 - protein, 106 aa, Homo sapiens
LTFSVGIFIFILQIYKENIMKLSRIQHDQPVKPLDRAVFWIEFVMRHKGAKHLRVAAHNLTWFQYHSLDVIGFLLACVATVLFIITKCCLFCFWKFARKGKKGKRD

SEQ ID NO: 771911 - protein, 531 aa, Homo sapiens
CTRMALKWTTVLLIQLSFYFSSGSCGKVLVWAAEYSLWMNMKTILKELVQRGHEVTVLASSASILFDPNDSSTLKLEVYPTSLTKTEFENIIMQLVKRLSEIQKDTFWLPFSQEQEILWAINDIIRNFCKDVVSNKKLMKKLQESRFDIVFADAYLPCGELLAELFNIPFVYSHSFSPGYSFERHSGGFIFPPSYVPVVMSKLSDQMTFMERVKNMLYVLYFDFWFQIFNMKKWDQFYSEVLGRPTTLSETMRKADVWLIRNSWNFQFPHPLLPNVDFVGGLHCKPAKPLPKEMEEFVQSSGENGVVVFSLGSMVSNMTEERANVIASALAQIPQKVLWRFDGNKPDALGLNTRLYKWIPQNDLLGHPKTRAFITHGGANGIYEAIYHGIPMVGIPLFFDQPDNIAHMKAKGAAVRVDFNTMSSTDLLNALKTVINDPSYKENIMKLSRIQHDQPVKPLDRAVFWIEFVMRHKGAKHLRVAAHNLTWFQYHSLDVIGFLLACVATVLFIITKCCLFCFWKFARKGKKGKRD

SEQ ID NO: 771912 - protein, 332 aa, Homo sapiens; identical to SEQ ID NO: 771907

SEQ ID NO: 771913 - protein, 172 aa, Homo sapiens
MKAFVQISGKDGTVVFSLGPVVQNLIEEKADLIASDLAQIATEGRPTTLSETMRKADVWLIRNSWNFQFPHPLLPNVDFVGGLHCKPAKPLPKEMEEFVQSSGENGVVVFSLGSMVSNMTEERANVIASALAQIPQKVLWRFDGNKPDALGLNTRLYKWIPQNDLLDIKRIL

SEQ ID NO: 771914 - protein, 112 aa, Homo sapiens
PHLPYTDMLVRSRVVFLSSTYKENIMKLSRIQHDQPVKPLDRAVFWIEFVMRHKGAKHLRVAAHNLTWFQYHSLDVIGFLLACVATVLFIITKCCLFCFWKFARKGKKGKRD

SEQ ID NO: 771915 - protein, 120 aa, Homo sapiens
MSYMAGAGGRERSGRCYTLLFIFIYYFETKSGSTTRLECSGAILVHCNLCLLGSSHPPTSASRVVGTTGMHHNAQLIFEFFVETGFCHVSRAGLKLLCASNPHTLASQSTEITGVSLCAW

SEQ ID NO: 771916 - protein, 550 aa, Homo sapiens
MAFNDLLQQVGGVGRFQQIQVTLVVLPLLLMASHNTLQNFTAAIPTHHCRPPADANLSKNGGLEVWLPRDRQGQPESCLRFTSPQWGLPFLNGTEANGTGATEPCTDGWIYDNSTFPSTIVTEWDLVCSHRALRQLAQSLYMVGVLLGAMVFGYLADRLGRRKVLILNYLQTAVSGTCAAFAPNFPIYCAFRLLSGMALAGISLNCMTLNVEWMPIHTRACVGTLIGYVYSLGQFLLAGVAYAVPHWRHLQLLVSAPFFAFFIYSWFFIESARWHSSSGRLDLTLRALQRVARINGKREEGAKLSMEVLRASLQKELTMGKGQASAMELLRCPTLRHLFLCLSMLWFATSFAYYGLVMDLQGFGVSIYLIQVIFGAVDLPAKLVGFLVINSLGRRPAQMAALLLAGICILLNGVIPQDQSIVRTSLAVLGKGCLAASFNCIFLYTGELYPTMIRQTGMGMGSTMARVGSIVSPLVSMTAELYPSMPLFIYGAVPVAASAVTVLLPETLGQPLPDTVQDLESRKGKQTRQQQEHQKYMVPLQASAQEKNGL

SEQ ID NO: 771917 - protein, 563 aa, Homo sapiens
MAFNDLLQQVGGVGRFQQIQVTLVVLPLLLMASHNTLQNFTAAIPTHHCRPPADANLSKNGGLEVWLPRDRQGQPESCLRFTSPQWGLPFLNGTEANGTGATEPCTDGWIYDNSTFPSTIVTEWDLVCSHRALRQLAQSLYMVGVLLGAMVFGYLADRLGRRKVLILNYLQTAVSGTCAAFAPNFPIYCAFRLLSGMALAGISLNCMTLNVEWMPIHTRACVGTLIGYVYSLGQFLLAGVAYAVPHWRHLQLLVSAPFFAFFIYSWFFIESARWHSSSGRLDLTLRALQRVARINGKREEGAKLSMEVLRASLQKELTMGKGQASAMELLRCPTLRHLFLCLSMLWFATSFAYYGLVMDLQGFGVSIYLIQVIFGAVDLPAKLVGFLVINSLGRRPAQMAALLLAGICILLNGVIPQDQSIVRTSLAVLGKGCLAASFNCIFLYTGELYPTMIRQTGMGMGSTMARVGSIVSPLVSMTAELYPSMPLFIYGAVPVAASAVTVLLPETLGQPLPDTVQDLESRWAPTQKEAGIYPRKGKQTRQQQEHQKYMVPLQASAQEKNGL

SEQ ID NO: 771918 - protein, 519 aa, Homo sapiens
MAFNDLLQQVGGVGRFQQIQVTLVVLPLLLMASHNTLQNFTAAIPTHHCRPPADANLSKNGGLEVWLPRDRQGQPESCLRFTSPQWGLPFLNGTEANGTGATEPCTDGWIYDNSTFPSTIVTEWDLVCSHRALRQLAQSLYMVGVLLGAMVFGYLADRLGRRKVLILNYLQTAVSGTCAAFAPNFPIYCAFRLLSGMALAGISLNCMTLNVEWMPIHTRACVGTLIGYVYSLGQFLLAGVAYAVPHWRHLQLLVSAPFFAFFIYSWFFIESARWHSSSGRLDLTLRALQRVARINGKREEGAKLSMEVLRASLQKELTMGKGQASAMELLRCPTLRHLFLCLSMLWFATSFAYYGLVMDLQGFGVSIYLIQVIFGAVDLPAKLVGFLVINSLGRRPAQMAALLLAGICILLNGVIPQDQSIVRTSLAVLGKGCLAASFNCIFLYTGELYPTMIRAVTVLLPETLGQPLPDTVQDLESRWAPTQKEAGIYPRKGKQTRQQQEHQKYMVPLQASAQEKNGL

SEQ ID NO: 771919 - protein, 506 aa, Homo sapiens
MAFNDLLQQVGGVGRFQQIQVTLVVLPLLLMASHNTLQNFTAAIPTHHCRPPADANLSKNGGLEVWLPRDRQGQPESCLRFTSPQWGLPFLNGTEANGTGATEPCTDGWIYDNSTFPSTIVTEWDLVCSHRALRQLAQSLYMVGVLLGAMVFGYLADRLGRRKVLILNYLQTAVSGTCAAFAPNFPIYCAFRLLSGMALAGISLNCMTLNVEWMPIHTRACVGTLIGYVYSLGQFLLAGVAYAVPHWRHLQLLVSAPFFAFFIYSWFFIESARWHSSSGRLDLTLRALQRVARINGKREEGAKLSMEVLRASLQKELTMGKGQASAMELLRCPTLRHLFLCLSMLWFATSFAYYGLVMDLQGFGVSIYLIQVIFGAVDLPAKLVGFLVINSLGRRPAQMAALLLAGICILLNGVIPQDQSIVRTSLAVLGKGCLAASFNCIFLYTGELYPTMIRAVTVLLPETLGQPLPDTVQDLESRKGKQTRQQQEHQKYMVPLQASAQEKNGL

SEQ ID NO: 771920 - protein, 433 aa, Homo sapiens
AGLRVSRWELGIASRRWFEDLQHQPHTSEVLKRPQPRHHPGLGRRKVLILNYLQTAVSGTCAAFAPNFPIYCAFRLLSGMALAGISLNCMTLNVEWMPIHTRACVGTLIGYVYSLGQFLLAGVAYAVPHWRHLQLLVSAPFFAFFIYSWFFIESARWHSSSGRLDLTLRALQRVARINGKREEGAKLSMEVLRASLQKELTMGKGQASAMELLRCPTLRHLFLCLSMLWFATSFAYYGLVMDLQGFGVSIYLIQVIFGAVDLPAKLVGFLVINSLGRRPAQMAALLLAGICILLNGVIPQDQSIVRTSLAVLGKGCLAASFNCIFLYTGELYPTMIRQTGMGMGSTMARVGSIVSPLVSMTAELYPSMPLFIYGAVPVAASAVTVLLPETLGQPLPDTVQDLESRKGKQTRQQQEHQKYMVPLQASAQEKNGL

SEQ ID NO: 771921 - protein, 196 aa, Homo sapiens
RIFPSRAASASRSQREPPPPSLPLPSPPPAAPAMSATAATAPPAAPAGEGGPPAPPPNLTSNRRLQQTQAQVDEVVDIMRVNVDKVLERDQKLSELDDRADALQAGASQFETSAAKLKRKYWWKNLKMMIILGVICAIILIIIIEFTSALKSPRSLPCLEKGLSPNPQPFLHLSAISFSPPSPGSVCVCVRVCVPL

SEQ ID NO: 771922 - protein, 60 aa, Homo sapiens
  misc_feature (50)..(50): Xaa can be any naturally occurring amino acid
  misc_feature (54)..(54): Xaa can be any naturally occurring amino acid
  misc_feature (56)..(56): Xaa can be any naturally occurring amino acid
MSATAATAPPAAPAGEGGPPAPPPNLTSNRRLQQTQAQVDEVLKSASPWXPIKXAXSAPS

SEQ ID NO: 771923 - protein, 165 aa, Homo sapiens
MDRSATAATAPPAAPAGEGGPPAPPPNLTSNRRLQQTQAQVDEVVDIMRVNVDKVLERDQKLSELDDRADALQAGASQFETSAAKLKRKYWWKNLKMMIILGVICAIILIIIIEFTSALKSPRSLPCLEKGLSPNPQPFLHLSAISFSPPSPGSVCVCVRVCVPL

SEQ ID NO: 771924 - protein, 162 aa, Homo sapiens
GPQASSETSTSGDGLGPISPTPLHPEQSATAATAPPAAPAGEGGPPAPPPNLTSNRRLQQTQAQVDEVVDIMRVNVDKVLERDQKLSELDDRADALQAGASQFETSAAKLKRKYWWKNLKMMIILGVICAIILIIIIVSRVRMAGALSLERFPQWILGFEGH

SEQ ID NO: 771925 - protein, 196 aa, Homo sapiens; identical to SEQ ID NO: 771921

SEQ ID NO: 771926 - protein, 169 aa, Homo sapiens
RIFPSRAASASRSQREPPPPSLPLPSPPPAAPAMSATAATAPPAAPAGEGGPPAPPPNLTSNRRLQQTQAQVDEVVDIMRVNVDKVLERDQKLSELDDRADALQAGASQFETSAAKLKRKYWWKNLKMMIILGVICAIILIIIIVSRVRMAGALSLERFPQWILGFEGH

SEQ ID NO: 771927 - protein, 153 aa, Homo sapiens
MDRSATAATAPPAAPAGEGGPPAPPPNLTSNRRLQQTQAQVDEVVDIMRVNVDKVLERDQKLSELDDRADALQAGASQFETSAAKLKRKYWWKNLKMMIILGVICAIILIIIIASAVPPPLSHIFQPPLPWIRVCVCPCVCPPVNSQLLFIHI

SEQ ID NO: 771928 - protein, 196 aa, Homo sapiens; identical to SEQ ID NO: 771921

SEQ ID NO: 771929 - protein, 196 aa, Homo sapiens; identical to SEQ ID NO: 771921

SEQ ID NO: 771930 - protein, 196 aa, Homo sapiens; identical to SEQ ID NO: 771921

SEQ ID NO: 771931 - protein, 196 aa, Homo sapiens; identical to SEQ ID NO: 771921

SEQ ID NO: 771932 - protein, 138 aa, Homo sapiens
MDRSATAATAPPAAPAGEGGPPAPPPNLTSNRRLQQTQAQVDEVVDIMRVNVDKVLERDQKLSELDDRADALQAGASQFETSAAKLKRKYWWKNLKMMIILGVICAIILIIIIVSRVRMAGALSLERFPQWILGFEGH

SEQ ID NO: 771933 - protein, 83 aa, Homo sapiens
DSYENGYSADPFQVDEVVDIMRVNVDKVLERDQKLSELDDRADALQAGASQFETSAAKLKRKYWWKNLKSLLQHLNPRGVCPA

SEQ ID NO: 771934 - protein, 196 aa, Homo sapiens; identical to SEQ ID NO: 771921

SEQ ID NO: 771935 - protein, 196 aa, Homo sapiens; identical to SEQ ID NO: 771921

SEQ ID NO: 771936 - protein, 110 aa, Homo sapiens
MDRSATAATAPPAAPAGEGGPPAPPPNLTSNRRLQQTQAQVDEVVDIMRVNVDKVLERDQKLSELDDRADALQAGASQFETSAAKLKRKYWWKNLKSLLQHLNPRGVCPA

SEQ ID NO: 771937 - protein, 133 aa, Homo sapiens
KVTQLIGGRAGPRPGLTSGGLPPEKEDWRDEDGQVDGRSPGCGAGRLQALGLNPSLLLRSATAATAPPAAPAGEGGPPAPPPNLTSNRRLQQTQAQVDEVSVGGVKSSRRDPGGWRIGVGAHVGLGVMTVHAC

SEQ ID NO: 771938 - protein, 191 aa, Homo sapiens
MMRMKTFVMIHFHLMNGGKAKLYSRPHAKLLPEQRVTDKTGAPVEWPGQTQCSTADSDPGSHACAGSDESDMYFVDMHKSRVCTGTDMKLRLPASPETHLDMLRHLYQGQQVVQGNLELTYLPTNASLSFLQDIQEVQGYVLIAHNQVRQVPLQRLRIVRGTQLFEDNYALSVLHNGDPLNHTTPVTGAST

SEQ ID NO: 771939 - protein, 135 aa, Homo sapiens
PPPCHCFWIPVSKGVLSSALEHLRLFECWKRIRSGYITSQLEGQILAMLSSDDRLVTTDQTKTVFVCWQWPPQGDLANMQILTSLISDLSGWDKFFWPVSSCHTQSWSLLALSCSFAFGHRVLVRGTPLSPTLPP

SEQ ID NO: 771940 - protein, 394 aa, Homo sapiens
MVTMEELREMDCSVLKRLMNRDENGGGAGGSGSHGTLGLPSGGKCLLLDCRPFLAHSAGYILGSVNVRCNTIVRRRAKGSVSLEQILPAEEEVRARLRSGLYSAVIVYDERSPRAESLREDSTVSLVVQALRRNAERTDICLLKGGYERFSSEYPEFCSKTKALAAIPPPVPPSATEPLDLGCSSCGTPLHDQGGPVEILPFLYLGSAYHAARRDMLDALGITALLNVSSDCPNHFEGHYQYKCIPVEDNHKADISSWFMEAIEYIDAVKDCRGRVLVHCQAGISRSATICLAYLMMKKRVRLEEAFEFVKQRRSIISPNFSFMGQLLQFESQVLATSCAAEAASPSGPLRERGKTPATPTSQFVFSFPVSVGVHSAPSSLPYLHSPITTSPSC

SEQ ID NO: 771941 - protein, 210 aa, Homo sapiens
  misc_feature (203)..(203): Xaa can be any naturally occurring amino acid
MVTMEELREMDCSVLKRLMNRDENGGGAGGSGSHGTLGLPSGGKCLLLDCRPFLAHSAGYILGSVNVRCNTIVRRRAKGSVSLEQILPAEEEVRARLRSGLYSAVIVYDERSPRAESLREDSTVSLVVQALRRNAERTDICLLKGGYERFSSEYPEFCSKTKALAAIPPPVPPSATEPLDLGCSSCGTPLHDQGVCGIFLLYXHATCAGK

SEQ ID NO: 771942 - protein, 371 aa, Homo sapiens
MVTMEELREMDCSVLKRLMNRDENGGGAGGSGSHGTLGLPSGGKCLLLDCRPFLAHSAGYILGSVNVRCNTIVRRRAKGSVSLEQILPAEEEVRARLRSGLYSAVIVYDERSPRADFFLLTGGYERFSSEYPEFCSKTKALAAIPPPVPPSATEPLDLGCSSCGTPLHDQGGPVEILPFLYLGSAYHAARRDMLDALGITALLNVSSDCPNHFEGHYQYKCIPVEDNHKADISSWFMEAIEYIDAVKDCRGRVLVHCQAGISRSATICLAYLMMKKRVRLEEAFEFVKQRRSIISPNFSFMGQLLQFESQVLATSCAAEAASPSGPLRERGKTPATPTSQFVFSFPVSVGVHSAPSSLPYLHSPITTSPSC

SEQ ID NO: 771943 - protein, 394 aa, Homo sapiens; identical to SEQ ID NO: 771940

SEQ ID NO: 771944 - protein, 303 aa, Homo sapiens
MGRKVHSNGSQFAEHSRSPRRTGRDCKPVRAPSMALGVSQLAGRSRCLCSESQGGYERFSSEYPEFCSKTKALAAIPPPVPPSATEPLDLGCSSCGTPLHDQGGPVEILPFLYLGSAYHAARRDMLDALGITALLNVSSDCPNHFEGHYQYKCIPVEDNHKADISSWFMEAIEYIDAVKDCRGRVLVHCQAGISRSATICLAYLMMKKRVRLEEAFEFVKQRRSIISPNFSFMGQLLQFESQVLATSCAAEAASPSGPLRERGKTPATPTSQFVFSFPVSVGVHSAPSSLPYLHSPITTSPSC

SEQ ID NO: 771945 - protein, 33 aa, Homo sapiens
MVTMEELREMDCSVLKRLIIAGHEMVPSSIHCL

SEQ ID NO: 771946 - protein, 303 aa, Homo sapiens; identical to SEQ ID NO: 771944

SEQ ID NO: 771947 - protein, 205 aa, Homo sapiens
ELGHALRGSGTPARQARPRLLPLPARGSGGGAGLGTPASAAGRRPPSSRGFPGGSAPTVDSRPARRGRSRGSADLGALSPWPLGDPPRPRGENLGTAPRPRPSLRRSFSPATVDSSSRAWVGGSCGGRGRTTWRGRAGGGRRDPRPRGEPLGGAGRSREDPQWGAGRNLAPAPTRRAHACRGRLFPAGARPRSGGGARAAGAAWV

SEQ ID NO: 771948 - protein, 69 aa, Homo sapiens
MDPSIWKGPRKEHWVWRSGEDLKSQQKVRGEVDQQQKVDAEQKVDAEQKVDAEQKVDAEQKVDAEHKVD

SEQ ID NO: 771949 - protein, 99 aa, Homo sapiens
RHTGQSMARLQTALLVVLVLLAVALQATEAGPYGANMEDSVCCRDYVRYRLPLRVVKHFYWTSDSCPRPGVVLLTFRDKEICADPRVPWVKMILNKLSQ

SEQ ID NO: 771950 - protein, 99 aa, Homo sapiens; identical to SEQ ID NO: 771949

SEQ ID NO: 771951 - protein, 333 aa, Homo sapiens
PEQKRARKKMPRPGRNTYSDQKPPYSYISLTAMAIQSSPEKMLPLSEIYKFIMDRFPYYRENTQRWQNSLRHNLSFNDCFIKIPRRPDQPGKGSFWALHPSCGDMFENGSFLRRCKRFKVLKSDHLAPSKPADAQYLQQQAKLRLSALAASGTHLPQMPAAAYNLGGVAQPSGFKHPFAIENIIAREYKMPGGLAFSAMQPVPAAYPLPNQLTTMGSSLGTGWPHVYGSAGMIDSATPISMASGDYSAYGVPLKPLCHAAGQTLPAIPVPIKPTPAAVPALPALPAPIPTLLSNSPPSLSPTSSQTATSQSSPATPSETLTSPASALHSVAVH

SEQ ID NO: 771952 - protein, 1137 aa, Homo sapiens
MVEPLEDRRQENFFCGPPEKSYAKLVFMSTSSGSLWNLHAIHSMCRMEQDQIRSHTSFGALCQRTAANQCCPSWSLGNYLAVLSNRSSCLDTTQADAARTLALLRTCALYYHSGALVPSCLGPGQNKSPRCAQVPTKCSQSSAIYQLLHFLLDRDFLSPQTTDYQVPSLKYSLLFLPTPKGASLMDIYLDRLATPWGLADNYTSVTGMDLGLKQELLRHFLVQDTVYPLLALVAIFFGMALYLRSLFLTLMVLLGVLGSLLVAFFLYQVAFRMAYFPFVNLAALLLLSSVCANHTLIFFDLWRLSKSQLPSGGLAQRVGRTMHHFGYLLLVSGLTTSAAFYASYLSRLPAVRCLALFMGTAVLVHLALTLVWLPASAVLHERYLARGCARRARGRWEGSAPRRLLLALHRRLRGLRRAAAGTSRLLFQRLLPCGVIKFRYIWICWFAALAAGGAYIAGVSPRLRLPTLPPPGGQVFRPSHPFERFDAEYRQLFLFEQLPQGEGGHMPVVLVWGVLPVDTGDPLDPRSNSSLVRDPAFSASGPEAQRWLLALCHRARNQSFFDTLQEGWPTLCFVETLQRWMESPSCARLGPDLCCGHSDFPWAPQFFLHCLKMMALEQGPDGTQDLGLRFDAHGSLAALVLQFQTNFRNSPDYNQTQLFYNEVSHWLAAELGMAPPGLRRGWFTSRLELYSLQHSLSTEPAVVLGLALALAFATLLLGTWNVPLSLFSVAAVAGTVLLTVGLLVLLEWQLNTAEALFLSASVGLSVDFTVNYCISYHLCPHPDRLSRVAFSLRQTSCATAVGAAALFAAGVLMLPATVLLYRKLGIILMMVKCVSCGFASFFFQSLCCFFGPEKNCGQILWPCAHLPWDAGTGDPGGEKAGRPRPGSVGGMPGSCSEQYELQPLARRRSPSFDTSTATSKLSHRPSVLSEDLQLHDGPCCSRPPPAPASPRELLLDHQAVFSQCPALQTSSPYKQAGPSPKTRARQDSQGEEAEPLPASPEAPAHSPKAKAADPPDGFCSSASTLEGLSVSDETCLSTSEPSARVPDSVGVSPDDLDDTGQPVLERGQLNGKRDTLWLALRETVYDPSLPASHHSSLSWKGRGGPGDGSPVVLPNSQPDLPDVWLRRPSTHTSGYSS

SEQ ID NO: 771953 - protein, 126 aa, Homo sapiens
SLASSESSNPNGAWHRYSLHFSSSSHNTLRPAPRGSAQESAVRPRRMVEPLEDRRQENFFCGPPGKLQPGQFLVLIVVPTPPSRTGRPRTNLGRQKGKVASWPQSSQGSRVTAGIGEFSDAPARQG

SEQ ID NO: 771954 - protein, 1188 aa, Homo sapiens
LVVWRALQALTGPRKLLFLSPDLELNSSSSHNTLRPAPRGSAQESAVRPRRMVEPLEDRRQENFFCGPPEKSYAKLVFMSTSSGSLWNLHAIHSMCRMEQDQIRSHTSFGALCQRTAANQCCPSWSLGNYLAVLSNRSSCLDTTQADAARTLALLRTCALYYHSGALVPSCLGPGQNKSPRCAQVPTKCSQSSAIYQLLHFLLDRDFLSPQTTDYQVPSLKYSLLFLPTPKGASLMDIYLDRLATPWGLADNYTSVTGMDLGLKQELLRHFLVQDTVYPLLALVAIFFGMALYLRSLFLTLMVLLGVLGSLLVAFFLYQVAFRMAYFPFVNLAALLLLSSVCANHTLIFFDLWRLSKSQLPSGGLAQRVGRTMHHFGYLLLVSGLTTSAAFYASYLSRLPAVRCLALFMGTAVLVHLALTLVWLPASAVLHERYLARGCARRARGRWEGSAPRRLLLALHRRLRGLRRAAAGTSRLLFQRLLPCGVIKFRYIWICWFAALAAGGAYIAGVSPRLRLPTLPPPGGQVFRPSHPFERFDAEYRQLFLFEQLPQGEGGHMPVVLVWGVLPVDTGDPLDPRSNSSLVRDPAFSASGPEAQRWLLALCHRARNQSFFDTLQEGWPTLCFVETLQRWMESPSCARLGPDLCCGHSDFPWAPQFFLHCLKMMALEQGPDGTQDLGLRFDAHGSLAALVLQFQTNFRNSPDYNQTQLFYNEVSHWLAAELGMAPPGLRRGWFTSRLELYSLQHSLSTEPAVVLGLALALAFATLLLGTWNVPLSLFSVAAVAGTVLLTVGLLVLLEWQLNTAEALFLSASVGLSVDFTVNYCISYHLCPHPDRLSRVAFSLRQTSCATAVGAAALFAAGVLMLPATVLLYRKLGIILMMVKCVSCGFASFFFQSLCCFFGPEKNCGQILWPCAHLPWDAGTGDPGGEKAGRPRPGSVGGMPGSCSEQYELQPLARRRSPSFDTSTATSKLSHRPSVLSEDLQLHDGPCCSRPPPAPASPRELLLDHQAVFSQCPALQTSSPYKQAGPSPKTRARQDSQGEEAEPLPASPEAPAHSPKAKAADPPDGFCSSASTLEGLSVSDETCLSTSEPSARVPDSVGVSPDDLDDTGQPVLERGQLNGKRDTLWLALRETVYDPSLPASHHSSLSWKGRGGPGDGSPVVLPNSQPDLPDVWLRRPSTHTSGYSS

SEQ ID NO: 771955 - protein, 1059 aa, Homo sapiens
MVEPLEDRRQENFFCGPPEKSYAKLVFMSTSSGSLWNLHAIHSMCRMEQDQIRSHTSFGALCQRTAANQCCPSWSLGNYLAVLSNRSSCLDTTQADAARTLALLRTCALYYHSGALVPSCLGPGQNKSPRCAQVPTKCSQSSAIYQLLHFLLDRDFLSPQTTDYQVPSLKYSLLFLPTPKGASLMDIYLDRLATPWGLADNYTSVTGMDLGLKQELLRHFLVQDTVYPLLALVAIFFGMALYLRSLFLTLMVLLGVLGSLLVAFFLYQVAFRMAYFPFVNLAALLLLSSVCANHTLIFFDLWRLSKSQLPSGGLAQRVGRTMHHFGYLLLVSGLTTSAAFYASYLSRLPAVRCLALFMGTAVLVHLALTLVWLPASAVLHERYLARGCARRARGRWEGSAPRRLLLALHRRLRGLRRAAAGTSRLLFQRLLPCGVIKFRYIWICWFAALAAGGAYIAGVSPRLRLPTLPPPGGQVFRPSHPFERFDAEYRQLFLFEQLPQGEGGHMPVVLVWGVLPVDTGDPLDPRSNSSLVRDPAFSASGPEAQRWLLALCHRARNQSFFDTLQEGWPTLCFVETLQRWMESPSCARLGPDLCCGHSDFPWAPQFFLHCLKMMALEQGPDGTQDLGLRFDAHGSLAALVLQFQTNFRNSPDYNQTQLFYNEVSHWLAAELGMAPPGLRRGWFTSRLELYSLQHSLSTEPAVVLGLALALAFSLRQTSCATAVGAAALFAAGVLMLPATVLLYRKLGIILMMVKCVSCGFASFFFQSLCCFFGPEKNCGQILWPCAHLPWDAGTGDPGGEKAGRPRPGSVGGMPGSCSEQYELQPLARRRSPSFDTSTATSKLSHRPSVLSEDLQLHDGPCCSRPPPAPASPRELLLDHQAVFSQCPALQTSSPYKQAGPSPKTRARQDSQGEEAEPLPASPEAPAHSPKAKAADPPDGFCSSASTLEGLSVSDETCLSTSEPSARVPDSVGVSPDDLDDTGQPVLERGQLNGKRDTLWLALRETVYDPSLPASHHSSLSWKGRGGPGDGSPVVLPNSQPDLPDVWLRRPSTHTSGYSS

SEQ ID NO: 771956 - protein, 1690 aa, Homo sapiens
MAGASVKVAVRVRPFNSREMSRDSKCIIQMSGSTTTIVNPKQPKETPKSFSFDYSYWSHTSPEDINYASQKQVYRDIGEEMLQHAFEGYNVCIFAYGQTGAGKSYTMMGKQEKDQQGIIPQLCEDLFSRINDTTNDNMSYSVEVSYMEIYCERVRDLLNPKNKGNLRVREHPLLGPYVEDLSKLAVTSYNDIQDLMDSGNKARTVAATNMNETSSRSHAVFNIIFTQKRHDAETNITTEKVSKISLVDLAGSERADSTGAKGTRLKEGANINKSLTTLGKVISALAEMDSGPNKNKKKKKTDFIPYRDSVLTWLLRENLGGNSRTAMVAALSPADINYDETLSTLRYADRAKQIRCNAVINEDPNNKLIRELKDEVTRLRDLLYAQGLGDITDMTNALVGMSPSSSLSALSSRAASVSSLHERILFAPGSEEAIERLKETEKIIAELNETWEEKLRRTEAIRMEREALLAEMGVAMREDGGTLGVFSPKKTPHLVNLNEDPLMSECLLYYIKDGITRVGREDGERRQDIVLSGHFIKEEHCVFRSDSRGGSEAVVTLEPCEGADTYVNGKKVTEPSILRSGNRIIMGKSHVFRFNHPEQARQERERTPCAETPAEPVDWAFAQRELLEKQGIDMKQEMEQRLQELEDQYRREREEATYLLEQQRLDYESKLEALQKQMDSRYYPEVNEEEEEPEDEVQWTERECELALWAFRKWKWYQFTSLRDLLWGNAIFLKEANAISVELKKKVQFQFVLLTDTLYSPLPPDLLPPEAAKDRETRPFPRTIVAVEVQDQKNGATHYWTLEKLRQRLDLMREMYDRAAEVPSSVIEDCDNVVTGGDPFYDRFPWFRLVGRAFVYLSNLLYPVPLVHRVAIVSEKGEVKGFLRVAVQAISADEEAPDYGSGVRQSGTAKISFDDQHFEKFQSESCPVVGMSRSGTSQEELRIVEGQGQGADVGPSADEVNNNTCSAVPPEGLLLDSSEKAALDGPLDAALDHLRLGNTFTFRVTVLQASSISAEYADIFCQFNFIHRHDEAFSTEPLKNTGRGPPLGFYHVQNIAVEVTKSFIEYIKSQPIVFEVFGHYQQHPFPPLCKDVLSPLRPSRRHFPRVMPLSKPVPATKLSTLTRPCPGPCHCKYDLLVYFEICELEANGDYIPAVVDHRGGMPCMGTFLLHQGIQRRITVTLLHETGSHIRWKEVRELVVGRIRNTPETDESLIDPNILSLNILSSGYIHPAQDDRTFYQFEAAWDSSMHNSLLLNRVTPYREKIYMTLSAYIEMENCTQPAVVTKDFCMVFYSRDAKLPASRSIRNLFGSGSLRASESNRVTGVYELSLCHVADAGSPGMQRRRRRVLDTSVAYVRGEENLAGWRPRSDSLILDHQWELEKLSLLQEVEKTRHYLLLREKLETAQRPVPEALSPAFSEDSESHGSSSASSPLSAEGRPSPLEAPNERQRELAVKCLRLLTHTFNREYTHSHVCVSASESKLSEMSVTLLRDPSMSPLGVATLTPSSTCPSLVEGRYGATDLRTPQPCSRPASPEPELLPEADSKKLPSPARATETDKEPQRLLVPDIQEIRVSPIVSKKGYLHFLEPHTSGWARRFVVVRRPYAYMYNSDKDTVERFVLNLATAQVEYSEDQQAMLKTPNTFAVCTEHRGILLQAASDKDMHDWLYAFNPLLAGTIRSKLSRRRSAQMRV

SEQ ID NO: 771957 - protein, 143 aa, Homo sapiens
EGLVSCLKVEKTRHYLLLREKLETAQRPVPEALSPAFSEDSESHGSSSASSPLSAEGRPSPLEAPNERQRELAVKCLRLLTHTFNREYTHSHVCVSASESKLSEMSVTLLRDPSMSPLGVATLTPSSTCPSLVEGRYGATDLR

SEQ ID NO: 771958 - protein, 137 aa, Homo sapiens
GFPGHSRDGHGTPGWITSYGRGLHGSLGPRVDQGPGEAHLHSRGETASQMGGPLGWVGGAATHQVGWNVHVPHAGMQRRRRRVLDTSVAYVRGEENLAGWRPRSDSLILDHQWELEKLSLLQEVRQPQRMRPARWCP

SEQ ID NO: 771959 - protein, 1699 aa, Homo sapiens
MAGASVKVAVRVRPFNSREMSRDSKCIIQMSGSTTTIVNPKQPKETPKSFSFDYSYWSHTSPEDINYASQKQVYRDIGEEMLQHAFEGYNVCIFAYGQTGAGKSYTMMGKQEKDQQGIIPQLCEDLFSRINDTTNDNMSYSVEVSYMEIYCERVRDLLNPKNKGNLRVREHPLLGPYVEDLSKLAVTSYNDIQDLMDSGNKARTVAATNMNETSSRSHAVFNIIFTQKRHDAETNITTEKVSKISLVDLAGSERADSTGAKGTRLKEGANINKSLTTLGKVISALAEMDSGPNKNKKKKKTDFIPYRDSVLTWLLRENLGGNSRTAMVAALSPADINYDETLSTLRYADRAKQIRCNAVINEDPNNKLIRELKDEVTRLRDLLYAQGLGDITDTNTVPGGPKLTNALVGMSPSSSLSALSSRAASVSSLHERILFAPGSEEAIERLKETEKIIAELNETWEEKLRRTEAIRMEREALLAEMGVAMREDGGTLGVFSPKKTPHLVNLNEDPLMSECLLYYIKDGITRVGREDGERRQDIVLSGHFIKEEHCVFRSDSRGGSEAVVTLEPCEGADTYVNGKKVTEPSILRSGNRIIMGKSHVFRFNHPEQARQERERTPCAETPAEPVDWAFAQRELLEKQGIDMKQEMEQRLQELEDQYRREREEATYLLEQQRLDYESKLEALQKQMDSRYYPEVNEEEEEPEDEVQWTERECELALWAFRKWKWYQFTSLRDLLWGNAIFLKEANAISVELKKKVQFQFVLLTDTLYSPLPPDLLPPEAAKDRETRPFPRTIVAVEVQDQKNGATHYWTLEKLRQRLDLMREMYDRAAEVPSSVIEDCDNVVTGGDPFYDRFPWFRLVGRAFVYLSNLLYPVPLVHRVAIVSEKGEVKGFLRVAVQAISADEEAPDYGSGVRQSGTAKISFDDQHFEKFQSESCPVVGMSRSGTSQEELRIVEGQGQGADVGPSADEVNNNTCSAVPPEGLLLDSSEKAALDGPLDAALDHLRLGNTFTFRVTVLQASSISAEYADIFCQFNFIHRHDEAFSTEPLKNTGRGPPLGFYHVQNIAVEVTKSFIEYIKSQPIVFEVFGHYQQHPFPPLCKDVLSPLRPSRRHFPRVMPLSKPVPATKLSTLTRPCPGPCHCKYDLLVYFEICELEANGDYIPAVVDHRGGMPCMGTFLLHQGIQRRITVTLLHETGSHIRWKEVRELVVGRIRNTPETDESLIDPNILSLNILSSGYIHPAQDDRTFYQFEAAWDSSMHNSLLLNRVTPYREKIYMTLSAYIEMENCTQPAVVTKDFCMVFYSRDAKLPASRSIRNLFGSGSLRASESNRVTGVYELSLCHVADAGSPGMQRRRRRVLDTSVAYVRGEENLAGWRPRSDSLILDHQWELEKLSLLQEVEKTRHYLLLREKLETAQRPVPEALSPAFSEDSESHGSSSASSPLSAEGRPSPLEAPNERQRELAVKCLRLLTHTFNREYTHSHVCVSASESKLSEMSVTLLRDPSMSPLGVATLTPSSTCPSLVEGRYGATDLRTPQPCSRPASPEPELLPEADSKKLPSPARATETDKEPQRLLVPDIQEIRVSPIVSKKGYLHFLEPHTSGWARRFVVVRRPYAYMYNSDKDTVERFVLNLATAQVEYSEDQQAMLKTPNTFAVCTEHRGILLQAASDKDMHDWLYAFNPLLAGTIRSKLSRRRSAQMRV

SEQ ID NO: 771960 - protein, 1359 aa, Homo sapiens
MVSVSCLLWAPSLTFSHLHLFSLPPSVCLPALPLLPIDVSDLENNNLNRGGTVNEAPDPLSTVTNALVGMSPSSSLSALSSRAASVSSLHERILFAPGSEEAIERLKETEKIIAELNETWEEKLRRTEAIRMEREALLAEMGVAMREDGGTLGVFSPKKTPHLVNLNEDPLMSECLLYYIKDGITRVGREDGERRQDIVLSGHFIKEEHCVFRSDSRGGSEAVVTLEPCEGADTYVNGKKVTEPSILRSGNRIIMGKSHVFRFNHPEQARQERERTPCAETPAEPVDWAFAQRELLEKQGIDMKQEMEQRLQELEDQYRREREEATYLLEQQRLDYESKLEALQKQMDSRYYPEVNEEEEEPEDEVQWTERECELALWAFRKWKWYQFTSLRDLLWGNAIFLKEANAISVELKKKVQFQFVLLTDTLYSPLPPDLLPPEAAKDRETRPFPRTIVAVEVQDQKNGATHYWTLEKLRQRLDLMREMYDRAAEVPSSVIEDCDNVVTGGDPFYDRFPWFRLVGRAFVYLSNLLYPVPLVHRVAIVSEKGEVKGFLRVAVQAISADEEAPDYGSGVRQSGTAKISFDDQHFEKFQSESCPVVGMSRSGTSQEELRIVEGQGQGADVGPSADEVNNNTCSAVPPEGLLLDSSEKAALDGPLDAALDHLRLGNTFTFRVTVLQASSISAEYADIFCQFNFIHRHDEAFSTEPLKNTGRGPPLGFYHVQNIAVEVTKSFIEYIKSQPIVFEVFGHYQQHPFPPLCKDVLSPLRPSRRHFPRVMPLSKPVPATKLSTLTRPCPGPCHCKYDLLVYFEICELEANGDYIPAVVDHRGGMPCMGTFLLHQGIQRRITVTLLHETGSHIRWKEVRELVVGRIRNTPETDESLIDPNILSLNILSSGYIHPAQDDRTFYQFEAAWDSSMHNSLLLNRVTPYREKIYMTLSAYIEMENCTQPAVVTKDFCMVFYSRDAKLPASRSIRNLFGSGSLRASESNRVTGVYELSLCHVADAGSPGMQRRRRRVLDTSVAYVRGEENLAGWRPRSDSLILDHQWELEKLSLLQEVEKTRHYLLLREKLETAQRPVPEALSPAFSEDSESHGSSSASSPLSAEGRPSPLEAPNERQRELAVKCLRLLTHTFNREYTHSHVCVSASESKLSEMSVTLLRDPSMSPLGVATLTPSSTCPSLVEGRYGATDLRTPQPCSRPASPEPELLPEADSKKLPSPARATETDKEPQRLLVPDIQEIRVSPIVSKKGYLHFLEPHTSGWARRFVVVRRPYAYMYNSDKDTVERFVLNLATAQVEYSEDQQAMLKTPNTFAVCTEHRGILLQAASDKDMHDWLYAFNPLLAGTIRSKLSRRRSAQMRV

SEQ ID NO: 771961 - protein, 1690 aa, Homo sapiens; identical to SEQ ID NO: 771956

SEQ ID NO: 771962 - protein, 1668 aa, Homo sapiens
MAGASVKVAVRVRPFNSREMSRDSKCIIQMSGSTTTIVNPKQPKETPKSFSFDYSYWSHTSPEDINYASQKQVYRDIGEEMLQHAFEGYNVCIFAYGQTGAGKSYTMMGKQEKDQQGIIPQLCEDLFSRINDTTNDNMSYSVEVSYMEIYCERVRDLLNPKNKGNLRVREHPLLGPYVEDLSKLAVTSYNDIQDLMDSGNKARTVAATNMNETSSRSHAVFNIIFTQKRHDAETNITTEKVSKISLVDLAGSERADSTGAKGTRLKEGANINKSLTTLGKVISALAEMDSGPNKNKKKKKTDFIPYRDSVLTWLLRENLGGNSRTAMVAALSPADINYDETLSTLRYADRAKQIRCNAVINEDPNNKLIRELKDEVTRLRDLLYAQGLGDITDMTNALVGMSPSSSLSALSSRAASVSSLHERILFAPGSEEAIERLKETEKIIAELNETWEEKLRRTEAIRMEREALLAEMGVAMREDGGTLGVFSPKKTPHLVNLNEDPLMSECLLYYIKDGITRVGREDGERRQDIVLSGHFIKEEHCVFRSDSRGGSEAVVTLEPCEGADTYVNGKKVTEPSILRSGNRIIMGKSHVFRFNHPEQARQERERTPCAETPAEPVDWAFAQRELLEKQGIDMKQEMEQRLQELEDQYRREREEATYLLEQQRLDYESKLEALQKQMDSRYYPEVNEEEEEPEDEVQWTERECELALWAFRKWKWYQFTSLRDLLWGNAIFLKEANAISVELKKKVQFQFVLLTDTLYSPLPPDLLPPEAAKDRETRPFPRTIVAVEVQDQKNGATHYWTLEKLRQRLDLMREMYDRAAEVPSSVIEDCDNVVTGGDPFYDRFPWFRLVGRAFVYLSNLLYPVPLVHRVAIVSEKGEVKGFLRVAVQAISADEEAPDYGSGVRQSGTAKISFDDQHFEKFQSESCPVVGMSRSGTSQEELRIVEGQGQGADVGPSADEVNNNTCSAVPPEGLLLDSSEKAALDGPLDAALDHLRLGNTFTFRVTVLQASSISAEYADIFCQFNFIHRHDEAFSTEPLKNTGRGPPLGFYHVQNIAVEVTKSFIEYIKSQPIVFEVFGHYQQHPFPPLCKDVLSPLRPSRRHFPRVMPLSKPVPATKLSTLTRPCPGPCHCKYDLLVYFEICELEANGDYIPAVVDHRGGMPCMGTFLLHQGIQRRITVTLLHETGSHIRWKEVRELVVGRIRNTPETDESLIDPNILSLNILSSGYIHPAQDDRTFYQFEAAWDSSMHNSLLLNRVTPYREKIYMTLSAYIEMENCTQPAVVTKDFCMVFYSRDAKLPASRSIRNLFGSGSLRASESNRVTGVYELSLCHVADAGSPGMQRRRRRVLDTSVAYVRGEENLAGWRPRSDSLILDHQWELEKLSLLQEVEKTRHYLLLREKLETAQRPVPEALSPAFSEDSESHGSSSASSPLSAEGRPSPLEAPNERQRELAVKCLRLLTHTFNREYTHSHVCVSASESKLSEMSVTLLRDPSMSPLGVATLTPSSTCPSLVEGRYGATDLRTPQPCSRPASPEPELLPEADSKKLPSPARATETDKEPQRLLEPHTSGWARRFVVVRRPYAYMYNSDKDTVERFVLNLATAQVEYSEDQQAMLKTPNTFAVCTEHRGILLQAASDKDMHDWLYAFNPLLAGTIRSKLSRRRSAQMRV

SEQ ID NO: 771963 - protein, 1690 aa, Homo sapiens; identical to SEQ ID NO: 771956

SEQ ID NO: 771964 - protein, 1690 aa, Homo sapiens; identical to SEQ ID NO: 771956

SEQ ID NO: 771965 - protein, 1690 aa, Homo sapiens; identical to SEQ ID NO: 771956

SEQ ID NO: 771966 - protein, 1690 aa, Homo sapiens; identical to SEQ ID NO: 771956

SEQ ID NO: 771967 - protein, 127 aa, Homo sapiens
VSYIQEIQVSPIVSKKGYLHFLEPHTSGWARRFVVVRRPYAYMYNSDKDTVERFVLNLATAQVEYSEDQQAMLKTPNTFAVCTEHRGILLQAASDKDMHDWLYAFNPLLAGTIRSKLSRRRSAQMRV

SEQ ID NO: 771968 - protein, 1690 aa, Homo sapiens; identical to SEQ ID NO: 771956

SEQ ID NO: 771969 - protein, 1522 aa, Homo sapiens
MAGASVKVAVRVRPFNSREMSRDSKCIIQMSGSTTTIVNPKQPKETPKSFSFDYSYWSHTSPEDINYASQKQVYRDIGEEMLQHAFEGYNVCIFAYGQTGAGKSYTMMGKQEKDQQGIIPQLCEDLFSRINDTTNDNMSYSVEVSYMEIYCERVRDLLNPKNKGNLRVREHPLLGPYVEDLSKLAVTSYNDIQDLMDSGNKARTVAATNMNETSSRSHAVFNIIFTQKRHDAETNITTEKVSKISLVDLAGSERADSTGAKGTRLKEGANINKSLTTLGKVISALAEMDSGPNKNKKKKKTDFIPYRDSVLTWLLRENLGGNSRTAMVAALSPADINYDETLSTLRYADRAKQIRCNAVINEDPNNKLIRELKDEVTRLRDLLYAQGLGDITDMTNALVGMSPSSSLSALSSRAASVSSLHERILFAPGSEEAIERLKETEKIIAELNETWEEKLRRTEAIRMEREALLAEMGVAMREDGGTLGVFSPKKTPHLVNLNEDPLMSECLLYYIKDGITRVGREDGERRQDIVLSGHFIKEEHCVFRSDSRGGSEAVVTLEPCEGADTYVNGKKVTEPSILRSGNRIIMGKSHVFRFNHPEQARQERERTPCAETPAEPVDWAFAQRELLEKQGIDMKQEMEQRLQELEDQYRREREEATYLLEQQRLDYESKLEALQKQMDSRYYPEVNEEEEEPEDEVQWTERECELALWAFRKWKWYQFTSLRDLLWGNAIFLKEANAISVELKKKVQFQFVLLTDTLYSPLPPDLLPPEAAKDRETRPFPRTIVAVEVQDQKNGATHYWTLEKLRQRLDLMREMYDRAAEVPSSVIEDCDNVVTGGDPFYDRFPWFRLVGRAFVYLSNLLYPVPLVHRVAIVSEKGEVKGFLRVAVQAISADEEAPDYGSGVRQSGTAKISFDDQHFEKFQSESCPVVGMSRSGTSQEELRIVEGQGQGADVGPSADEVNNNTCSAVPPEGLLLDSSEKAALDGPLDAALDHLRLGNTFTFRVTVLQASSISAEYADIFCQFNFIHRHDEAFSTEPLKNTGRGPPLGFYHVQNIAVEVTKSFIEYIKSQPIVFEVFGHYQQHPFPPLCKDVLSPLRPSRRHFPRVMPLSKPVPATKLSTLTRPCPGPCHCKYDLLVYFEICELEANGDYIPAVVDHRGGMPCMGTFLLHQGIQRRITVTLLHETGSHIRWKEVRELVVGRIRNTPETDESLIDPNILSLNILSSGYIHPAQDDRTFYQFEAAWDSSMHNSLLLNRVTPYREKIYMTLSAYIEMENCTQPAVVTKDFCMVFYSRDAKLPASRSIRNLFGSGSLRASESNRVTGVYELSLCHVADAGSPGMQRRRRRVLDTSVAYVRGEENLAGWRPRSDSLILDHQWELEKLSLLQEVEKTRHYLLLREKLETAQRPVPEALSPAFSEDSESHGSSSASSPLSAEGRPSPLEAPNERQRELAVKCLRLLTHTFNREYTHSHVCVSASESKLSEMSVTLLRDPSMSPLGVATLTPSSTCPSLVEGRYGATDLR

SEQ ID NO: 771970 - protein, 1348 aa, Homo sapiens
MAGASVKVAVRVRPFNSREMSRDSKCIIQMSGSTTTIVNPKQPKETPKSFSFDYSYWSHTSPEDINYASQKQVYRDIGEEMLQHAFEGYNVCIFAYGQTGAGKSYTMMGKQEKDQQGIIPQLCEDLFSRINDTTNDNMSYSVEVSYMEIYCERVRDLLNPKNKGNLRVREHPLLGPYVEDLSKLAVTSYNDIQDLMDSGNKARTVAATNMNETSSRSHAVFNIIFTQKRHDAETNITTEKVSKISLVDLAGSERADSTGAKGTRLKEGANINKSLTTLGKVISALAEMDSGPNKNKKKKKTDFIPYRDSVLTWLLRENLGGNSRTAMVAALSPADINYDETLSTLRYADRAKQIRCNAVINEDPNNKLIRELKDEVTRLRDLLYAQGLGDITDMTNALVGMSPSSSLSALSSRAASVSSLHERILFAPGSEEAIERLKETEKIIAELNETWEEKLRRTEAIRMEREALLAEMGVAMREDGGTLGVFSPKKTPHLVNLNEDPLMSECLLYYIKDGITRVGREDGERRQDIVLSGHFIKEEHCVFRSDSRGGSEAVVTLEPCEGADTYVNGKKVTEPSILRSGNRIIMGKSHVFRFNHPEQARQERERTPCAETPAEPVDWAFAQRELLEKQGIDMKQEMEQRLQELEDQYRREREEATYLLEQQRLDYESKLEALQKQMDSRYYPEVNEEEEEPEDEVQWTERECELALWAFRKWKWYQFTSLRDLLWGNAIFLKEANAISVELKKKVQFQFVLLTDTLYSPLPPDLLPPEAAKDRETRPFPRTIVAVEVQDQKNGATHYWTLEKLRQRLDLMREMYDRAAEVPSSVIEDCDNVVTGGDPFYDRFPWFRLVGRAFVYLSNLLYPVPLVHRVAIVSEKGEVKGFLRVAVQAISADEEAPDYGSGVRQSGTAKISFDDQHFEKFQSESCPVVGMSRSGTSQEELRIVEGQGQGADVGPSADEVNNNTCSAVPPEGLLLDSSEKAALDGPLDAALDHLRLGNTFTFRVTVLQASSISAEYADIFCQFNFIHRHDEAFSTEPLKNTGRGPPLGFYHVQNIAVEVTKSFIEYIKSQPIVFEVFGHYQQHPFPPLCKDVLSPLRPSRRHFPRVMPLSKPVPATKLSTLTRPCPGPCHCKYDLLVYFEICELEANGDYIPAVVDHRGGMPCMGTFLLHQGIQRRITVTLLHETGSHIRWKEVRELVVGRIRNTPETDESLIDPNILSLNILSSGYIHPAQDDRTFYQFEAAWDSSMHNSLLLNRVTPYREKIYMTLSAYIEMENCTQPAVVTKDFCMVFYSRDAKLPASRSIRNLFGSGSLRASESNRVTGVYELSLCHVADAGSPGRYLPCSHWV

SEQ ID NO: 771971 - protein, 1071 aa, Homo sapiens
MAGASVKVAVRVRPFNSREMSRDSKCIIQMSGSTTTIVNPKQPKETPKSFSFDYSYWSHTSPEDINYASQKQVYRDIGEEMLQHAFEGYNVCIFAYGQTGAGKSYTMMGKQEKDQQGIIPQLCEDLFSRINDTTNDNMSYSVEVSYMEIYCERVRDLLNPKNKGNLRVREHPLLGPYVEDLSKLAVTSYNDIQDLMDSGNKARTVAATNMNETSSRSHAVFNIIFTQKRHDAETNITTEKVSKISLVDLAGSERADSTGAKGTRLKEGANINKSLTTLGKVISALAEMDSGPNKNKKKKKTDFIPYRDSVLTWLLRENLGGNSRTAMVAALSPADINYDETLSTLRYADRAKQIRCNAVINEDPNNKLIRELKDEVTRLRDLLYAQGLGDITDMTNALVGMSPSSSLSALSSRAASVSSLHERILFAPGSEEAIERLKETEKIIAELNETWEEKLRRTEAIRMEREALLAEMGVAMREDGGTLGVFSPKKTPHLVNLNEDPLMSECLLYYIKDGITRVGREDGERRQDIVLSGHFIKEEHCVFRSDSRGGSEAVVTLEPCEGADTYVNGKKVTEPSILRSGNRIIMGKSHVFRFNHPEQARQERERTPCAETPAEPVDWAFAQRELLEKQGIDMKQEMEQRLQELEDQYRREREEATYLLEQQRLDYESKLEALQKQMDSRYYPEVNEEEEEPEDEVQWTERECELALWAFRKWKWYQFTSLRDLLWGNAIFLKEANAISVELKKKVQFQFVLLTDTLYSPLPPDLLPPEAAKDRETRPFPRTIVAVEVQDQKNGATHYWTLEKLRQRLDLMREMYDRAAEVPSSVIEDCDNVVTGGDPFYDRFPWFRLVGRAFVYLSNLLYPVPLVHRVAIVSEKGEVKGFLRVAVQAISADEEAPDYGSGVRQSGTAKISFDDQHFEKFQSESCPVVGMSRSGTSQEELRIVEGQGQGADVGPSADEVNNNTCSAVPPEGLLLDSSEKAALDGPLDAALDHLRLGNTFTFRVTVLQASSISAEYADIFCQFNFIHRHDEAFSTEPLKNTGRGPPLGFYHVQNIAVEYQSFIEQSVLNRY

SEQ ID NO: 771972 - protein, 191 aa, Homo sapiens
PPWLTVPPFLQLCEDLFSRINDTTNDNMSYSVEVSYMEIYCERVRDLLNPKNKGNLRVREHPLLGPYVEDLSKLAVTSYNDIQDLMDSGNKARTVAATNMNETSSRSHAVFNIIFTQKRHDAETNITTEKVSKISLVDLAGSERADSTGAKGTRLKEGANINKATVNPQATVNPQATVNPRATVNHKPRST

SEQ ID NO: 771973 - protein, 1690 aa, Homo sapiens; identical to SEQ ID NO: 771956

SEQ ID NO: 771974 - protein, 1071 aa, Homo sapiens
ISSVLTVHVHKGIDMKQEMEQRLQELEDQYRREREEATYLLEQQRLDYESKLEALQKQMDSRYYPEVNEEEEEPEDEVQWTERECELALWAFRKWKWYQFTSLRDLLWGNAIFLKEANAISVELKKKVQFQFVLLTDTLYSPLPPDLLPPEAAKDRETRPFPRTIVAVEVQDQKNGATHYWTLEKLRQRLDLMREMYDRAAEVPSSVIEDCDNVVTGGDPFYDRFPWFRLVGRAFVYLSNLLYPVPLVHRVAIVSEKGEVKGFLRVAVQAISADEEAPDYGSGVRQSGTAKISFDDQHFEKFQSESCPVVGMSRSGTSQEELRIVEGQGQGADVGPSADEVNNNTCSAVPPEGLLLDSSEKAALDGPLDAALDHLRLGNTFTFRVTVLQASSISAEYADIFCQFNFIHRHDEAFSTEPLKNTGRGPPLGFYHVQNIAVEVTKSFIEYIKSQPIVFEVFGHYQQHPFPPLCKDVLSPLRPSRRHFPRVMPLSKPVPATKLSTLTRPCPGPCHCKYDLLVYFEICELEANGDYIPAVVDHRGGMPCMGTFLLHQGIQRRITVTLLHETGSHIRWKEVRELVVGRIRNTPETDESLIDPNILSLNILSSGYIHPAQDDRTFYQFEAAWDSSMHNSLLLNRVTPYREKIYMTLSAYIEMENCTQPAVVTKDFCMVFYSRDAKLPASRSIRNLFGSGSLRASESNRVTGVYELSLCHVADAGSPGMQRRRRRVLDTSVAYVRGEENLAGWRPRSDSLILDHQWELEKLSLLQEVEKTRHYLLLREKLETAQRPVPEALSPAFSEDSESHGSSSASSPLSAEGRPSPLEAPNERQRELAVKCLRLLTHTFNREYTHSHVCVSASESKLSEMSVTLLRDPSMSPLGVATLTPSSTCPSLVEGRYGATDLRTPQPCSRPASPEPELLPEADSKKLPSPARATETDKEPQRLLVPDIQEIRVSPIVSKKGYLHFLEPHTSGWARRFVVVRRPYAYMYNSDKDTVERFVLNLATAQVEYSEDQQAMLKTPNTFAVCTEHRGILLQAASDKDMHDWLYAFNPLLAGTIRSKLSRRRSAQMRV

SEQ ID NO: 771975 - protein, 1059 aa, Homo sapiens
QALDGRACPSRGAGTSCVARVHRRTPYLRHARWVLYDSLLGAEWKQMDSRYYPEVNEEEEEPEDEVQWTERECELALWAFRKWKWYQFTSLRDLLWGNAIFLKEANAISVELKKKVQFQFVLLTDTLYSPLPPDLLPPEAAKDRETRPFPRTIVAVEVQDQKNGATHYWTLEKLRQRLDLMREMYDRAAEVPSSVIEDCDNVVTGGDPFYDRFPWFRLVGRAFVYLSNLLYPVPLVHRVAIVSEKGEVKGFLRVAVQAISADEEAPDYGSGVRQSGTAKISFDDQHFEKFQSESCPVVGMSRSGTSQEELRIVEGQGQGADVGPSADEVNNNTCSAVPPEGLLLDSSEKAALDGPLDAALDHLRLGNTFTFRVTVLQASSISAEYADIFCQFNFIHRHDEAFSTEPLKNTGRGPPLGFYHVQNIAVEVTKSFIEYIKSQPIVFEVFGHYQQHPFPPLCKDVLSPLRPSRRHFPRVMPLSKPVPATKLSTLTRPCPGPCHCKYDLLVYFEICELEANGDYIPAVVDHRGGMPCMGTFLLHQGIQRRITVTLLHETGSHIRWKEVRELVVGRIRNTPETDESLIDPNILSLNILSSGYIHPAQDDRTFYQFEAAWDSSMHNSLLLNRVTPYREKIYMTLSAYIEMENCTQPAVVTKDFCMVFYSRDAKLPASRSIRNLFGSGSLRASESNRVTGVYELSLCHVADAGSPGMQRRRRRVLDTSVAYVRGEENLAGWRPRSDSLILDHQWELEKLSLLQEVEKTRHYLLLREKLETAQRPVPEALSPAFSEDSESHGSSSASSPLSAEGRPSPLEAPNERQRELAVKCLRLLTHTFNREYTHSHVCVSASESKLSEMSVTLLRDPSMSPLGVATLTPSSTCPSLVEGRYGATDLRTPQPCSRPASPEPELLPEADSKKLPSPARATETDKEPQRLLVPDIQEIRVSPIVSKKGYLHFLEPHTSGWARRFVVVRRPYAYMYNSDKDTVERFVLNLATAQVEYSEDQQAMLKTPNTFAVCTEHRGILLQAASDKDMHDWLYAFNPLLAGTIRSKLSRRRSAQMRV

SEQ ID NO: 771976 - protein, 730 aa, Homo sapiens
KKHLDTAVPPEGLLLDSSEKAALDGPLDAALDHLRLGNTFTFRVTVLQASSISAEYADIFCQFNFIHRHDEAFSTEPLKNTGRGPPLGFYHVQNIAVEVTKSFIEYIKSQPIVFEVFGHYQQHPFPPLCKDVLSPLRPSRRHFPRVMPLSKPVPATKLSTLTRPCPGPCHCKYDLLVYFEICELEANGDYIPAVVDHRGGMPCMGTFLLHQGIQRRITVTLLHETGSHIRWKEVRELVVGRIRNTPETDESLIDPNILSLNILSSGYIHPAQDDRTFYQFEAAWDSSMHNSLLLNRVTPYREKIYMTLSAYIEMENCTQPAVVTKDFCMVFYSRDAKLPASRSIRNLFGSGSLRASESNRVTGVYELSLCHVADAGSPGMQRRRRRVLDTSVAYVRGEENLAGWRPRSDSLILDHQWELEKLSLLQEVEKTRHYLLLREKLETAQRPVPEALSPAFSEDSESHGSSSASSPLSAEGRPSPLEAPNERQRELAVKCLRLLTHTFNREYTHSHVCVSASESKLSEMSVTLLRDPSMSPLGVATLTPSSTCPSLVEGRYGATDLRTPQPCSRPASPEPELLPEADSKKLPSPARATETDKEPQRLLVPDIQEIRVSPIVSKKGYLHFLEPHTSGWARRFVVVRRPYAYMYNSDKDTVERFVLNLATAQVEYSEDQQAMLKTPNTFAVCTEHRGILLQAASDKDMHDWLYAFNPLLAGTIRSKLSRRRSAQMRV

SEQ ID NO: 771977 - protein, 1690 aa, Homo sapiens; identical to SEQ ID NO: 771956

SEQ ID NO: 771978 - protein, 100 aa, Homo sapiens
TRRFRQLSPGGSGVGITCQCADSGTACCLRTIRVGWWVETRKSGKIGIQGDGLGVEGCGAASSAAARNGVSQGSFWEEMLPLAGFLQRLSSLCSQGREFL

SEQ ID NO: 771979 - protein, 1690 aa, Homo sapiens; identical to SEQ ID NO: 771956

SEQ ID NO: 771980 - protein, 109 aa, Homo sapiens
QEPRAEHSGVRHRDGRRDVGTAAMTWRVWGLVLVWGQPSSTRKGELLPLRLQIDGDAGLQADQHLGSDGTRPVPRGAKSKASHWESSLRRCQCFIHRLHRHKLPHPGRL

SEQ ID NO: 771981 - protein, 110 aa, Homo sapiens
SVSCLLWAPSLTFSHLHLFSLPPSVCLPALPLLPIDVSDLENNNLNRGGTVNEAPDPLSTVTNALVGMSPSSSLSALSSRAASVSSLHERILFAPGSEEAIERLKVRAPP

SEQ ID NO: 771982 - protein, 97 aa, Homo sapiens
EHVVASWNWLLPRVLKKVGSVTQRGARGVCQEQTSSATLDPLTHTGQAPLGSNRTDQLFGVGQYHGVLHALQGAGVPSRLSAGCCVCAVHITAGGSP

SEQ ID NO: 771983 - protein, 350 aa, Homo sapiens [sequence omitted]

SEQ ID NO: 771984 - protein, 86 aa, Homo sapiens
METSATRAGSQVVATTARHSAAYRADPLRVSSRDKLTEMAASSQGNIEGNFESLDLTEFAKKQPWWRKLFGQESGPSAEKYSMATQ

SEQ ID NO: 771985 - protein, 916 aa, Homo sapiens
MESGQPARRIAMAPLLEYERQLVLELLDTDGLVVCARGLGADRLLYHFLQLHCHPACLVLVLNTQPAEEEYFINQLKIEGVEHLPRRVTNEITSNSRYEVYTQGGVIFATSRILVVDFLTDRIPSDLITGILVYRAHRIIESCQEAFILRLFRQKNKRGFIKAFTDNAVAFDTGFCHVERVMRNLFVRKLYLWPRFHVAVNSFLEQHKPEVVEIHVSMTPTMLAIQTAILDILNACLKELKCHNPSLEVEDLSLENAIGKPFDKTIRHYLDPLWHQLGAKTKSLVQDLKILRTLLQYLSQYDCVTFLNLLESLRATEKAFGQNSGWLFLDSSTSMFINARARVYHLPDAKMSKKEKISEKMEIKEGEETKKELVLESNPKWEALTEVLKEIEAENKESEALGGPGQVLICASDDRTCSQLRDYITLGAEAFLLRLYRKTFEKDSKAEEVWMKFRKEDSSKRIRKSHKRPKDPQNKERASTKERTLKKKKRKLTLTQMVGKPEELEEEGDVEEGYRREISSSPESCPEEIKHEEFDVNLSSDAAFGILKEPLTIIHPLLGCSDPYALTRVLHEVEPRYVVLYDAELTFVRQLEIYRASRPGKPLRVYFLIYGGSTEEQRYLTALRKEKEAFEKLIREKASMVVPEEREGRDETNLDLVRGTASADVSTDTRKAGGQEQNGTQQSIVVDMREFRSELPSLIHRRGIDIEPVTLEVGDYILTPEMCVERKSISDLIGSLNNGRLYSQCISMSRYYKRPVLLIEFDPSKPFSLTSRGALFQEISSNDISSKLTLLTLHFPRLRILWCPSPHATAELFEELKQSKPQPDAATALAITADSETLPESEKYNPGPQDFLLKMPGVNAKNCRSLMHHVKNIAELAALSQDELTSILGNAANAKQLYDFIHTSFAEVVSKGKGKK

SEQ ID NO: 771986 - protein, 514 aa, Homo sapiens
MESGQPARRIAMAPLLEYERQLVLELLDTDGLVVCARGLGADRLLYHFLQLHCHPACLVLVLNTQPAEEEYFINQLKIEGVEHLPRRVTNEITSNSRYEVYTQGGVIFATSRILVVDFLTDRIPSDLITGILVYRAHRIIESCQEAFILRLFRQKNKRGFIKAFTDNAVAFDTGFCHVERVMRNLFVRKLYLWPRFHVAVNSFLEQHKPEVVEIHVSMTPTMLAIQTAILDILNACLKELKCHNPSLEVEDLSLENAIGKPFDKTIRHYLDPLWHQLGAKTKSLVQDLKILRTLLQYLSQYDCVTFLNLLESLRATEKAFGQNSGWLFLDSSTSMFINARARVYHLPDAKMSKKEKISEKMEIKEGEETKKELVLESNPKWEALTEVLKEIEAENKESEALGGPGQVLICASDDRTCSQLRDYITLGAEAFLLRLYRKTFEKDSKAEEVWMKFRKEDSSKRIRKSHKRPKDPQNKERASTKERTLKKKKRKLTLTQMAVAQKAARKKLSMKNLM

SEQ ID NO: 771987 - protein, 767 aa, Homo sapiens
MESGQPARRIAMAPLLEYERQLVLELLDTDGLVVCARGLGADRLLYHFLQLHCHPACLVLVLNTQPAEEEYFINQLKIEGVEHLPRRVTNEITSNSRYEVYTQGGVIFATSRILVVDFLTDRIPSDLITGILVYRAHRIIESCQEAFILRLFRQKNKRGFIKAFTDNAVAFDTGFCHVERVMRNLFVRKLYLWPRFHVAVNSFLEQHKPEVVEIHVSMTPTMLAIQTAILDILNACLKELKCHNPSLEVEDLSLENAIGKPFDKTIRHYLDPLWHQLGAKTKSLVQDLKILRTLLQYLSQYDCVTFLNLLESLRATEKAFGQNSGWLFLDSSTSMFINARARVYHLPDAKMSKKEKISEKMEIKEGEETKKELVLESNPKWEALTEVLKEIEAENKESEALGGPGQVLICASDDRTCSQLRDYITLGAEAFLLRLYRKTFEKDSKAEEVWMKFRKEDSSKRIRKSHKRPKDPQNKERASTKERTLKKKKRKLTLTQMVGKPEELEEEGDVEEGYRREISSSPESCPEEIKHEEFDVNLSSDAAFGILKEPLTIIHPLLGCSDPYALTRVLHEVEPRYVVLYDAELTFVRQLEIYRASRPGKPLRVYFLIYGGSTEEQRYLTALRKEKEAFEKLIREKASMVVPEEREGRDETNLDLVRGTASADVSTDTRKAGGQEQNGTQQSIVVDMREFRSELPSLIHRRGIDIEPVTLEVGDYILTPEMCVERKSISDLIGSLNNGRLYSQCISMSRYYKPTIFNSPCYLVQHK

SEQ ID NO: 771988 - protein, 290 aa, Homo sapiens
MVVPEEREGRDETNLDLVRGTASADVSTDTRKAGGQEQNGTQQSIVVDMREFRSELPSLIHRRGIDIEPVTLEVGDYILTPEMCVERKSISDLIGSLNNGRLYSQCISMSRYYKRPVLLIEFDPSKPFSLTSRGALFQEISSNDISSKLTLLTLHFPRLRILWCPSPHATAELFEELKQSKPQPDAATALAITADSETLPESEKYNPGPQDFLLKMPGVNAKNCRSLMHHVKNIAELAALSQDELTSILGNAANAKQLYDFIHTSFAGREKSRHKKATIFNSPCYLVQHK

SEQ ID NO: 771989 - protein, 611 aa, Homo sapiens
MRYFYFSTETKKELVLESNPKWEALTEVLKEIEAENKESEALGGPGQVLICASDDRTCSQLRDYITLGAEAFLLRLYRKTFEKDSKAEEVWMKFRKEDSSKRIRKSHKRPKDPQNKERASTKERTLKKKKRKLTLTQMVGKPEELEEEGDVEEGYRREISSSPESCPEEIKHEEFDVNLSSDAAFGILKEPLTIIHPLLGCSDPYALTRVLHEVEPRYVVLYDAELTFVRQLEIYRASRPGKPLRVYFLIYGGSTEEQRYLTALRKEKEAFEKLIRSTVEDMSHLEDRNSCVITIISKVPESTTQEHSINVFQEMHEEKASMVVPEEREGRDETNLDLVRGTASADVSTDTRKAGGQEQNGTQQSIVVDMREFRSELPSLIHRRGIDIEPVTLEVGDYILTPEMCVERKSISDLIGSLNNGRLYSQCISMSRYYKRPVLLIEFDPSKPFSLTSRGALFQEISSNDISSKLTLLTLHFPRLRILWCPSPHATAELFEELKQSKPQPDAATALAITADSETLPESEKYNPGPQDFLLKMPGVNAKNCRSLMHHVKNIAELAALSQDELTSILGNAANAKQLYDFIHTSFAGREKSRHKKATIFNSPCYLVQHK

SEQ ID NO: 771990 - protein, 113 aa, Homo sapiens
EISSSPESCPEEIKHEEFDVNLSSDAAFGILKEPLTIIHPLLGCSDPYALTRVLHEVEPRYVVLYDAELTFVRQLEIYRASRPGKPLRQVIKNHSFQLHSSLGFNPETIPVAC

SEQ ID NO: 771991 - protein, 638 aa, Homo sapiens
MESGQPARRIAMAPLLEYERQLVLELLDTDGLVVCARGLGADRLLYHFLQLHCHPACLVLVLNTQPAEEEYFINQLKIEGVEHLPRRVTNEITSNSRYEVYTQGGVIFATSRILVVDFLTDRIPSDLITGILVYRAHRIIESCQEAFILRLFRQKNKRGFIKAFTDNAVAFDTGFCHVERVMRNLFVRKLYLWPRFHVAVNSFLEQHKPEVVEIHVSMTPTMLAIQTAILDILNACLKELKCHNPSLEVEDLSLENAIGKPFDKTIRHYLDPLWHQLGAKTKSLVQDLKILRTLLQYLSQYDCVTFLNLLESLRATEKAFGQNSGWLFLDSSTSMFINARARVYHLPDAKMSKKEKISEKMEIKEGEETKKELVLESNPKWEALTEVLKEIEAENKESEALGGPGQVLICASDDRTCSQLRDYITLGAEAFLLRLYRKTFEKDSKAEEVWMKFRKEDSSKRIRKSHKRPKDPQNKERASTKERTLKKKKRKLTLTQMVGKPEELEEEGDVEEGYRREISSSPESCPEEIKHEEFDVNLSSDAAFGILKEPLTIIHPLLGCSDPYALTRVLHEVEPRYVVLYDAELTFVRQLEIYRASRPGKPLRVYFLIYGGSTEEQRYLTALRKEKEAFEKLIRSTV

SEQ ID NO: 771992 - protein, 636 aa, Homo sapiens
MFINARARVYHLPDAKMSKKEKISEKMEIKEGEETKKELVLESNPKWEALTEVLKEIEAENKESEALGGPGQVLICASDDRTCSQLRDYITLGAEAFLLRLYRKTFEKDSKAEEVWMKFRKEDSSKRIRKSHKRPKDPQNKERASTKERTLKKKKRKLTLTQMVGKPEELEEEGDVEEGYRREISSSPESCPEEIKHEEFDVNLSSDAAFGILKEPLTIIHPLLGCSDPYALTRVLHEVEPRYVVLYDAELTFVRQLEIYRASRPGKPLRVYFLIYGGSTEEQRYLTALRKEKEAFEKLIRSTVEDMSHLEDRNSCVITIISKVPESTTQEHSINVFQEMHEEKASMVVPEEREGRDETNLDLVRGTASADVSTDTRKAGGQEQNGTQQSIVVDMREFRSELPSLIHRRGIDIEPVTLEVGDYILTPEMCVERKSISDLIGSLNNGRLYSQCISMSRYYKRPVLLIEFDPSKPFSLTSRGALFQEISSNDISSKLTLLTLHFPRLRILWCPSPHATAELFEELKQSKPQPDAATALAITADSETLPESEKYNPGPQDFLLKMPGVNAKNCRSLMHHVKNIAELAALSQDELTSILGNAANAKQLYDFIHTSFAGREKSRHKKATIFNSPCYLVQHK

SEQ ID NO: 771993 - protein, 312 aa, Homo sapiens
MESGQPARRIAMAPLLEYERQLVLELLDTDGLVVCARGLGADRLLYHFLQLHCHPACLVLVLNTQPAEEEYFINQLKIEGVEHLPRRVTNEITSNSRYEVYTQGGVIFATSRILVVDFLTDRIPSDLITGILVYRAHRIIESCQEAFILRLFRQKNKRGFIKAFTDNAVAFDTGFCHVERVMRNLFVRKLYLWPRFHVAVNSFLEQHKPEVVEIHVSMTPTMLAIQTAILDILNACLKELKCHNPSLEVEDLSLENAIGKPFDKTIRHYLDPLWHQLGAKTKSLVQDLKILRTLLQYLSQYDCVTFLNLLES

SEQ ID NO: 771994 - protein, 297 aa, Homo sapiens
MHEEKASMVVPEEREGRDETNLDLVRGTASADVSTDTRKAGGQEQNGTQQSIVVDMREFRSELPSLIHRRGIDIEPVTLEVGDYILTPEMCVERKSISDLIGSLNNGRLYSQCISMSRYYKRPVLLIEFDPSKPFSLTSRGALFQEISSNDISSKLTLLTLHFPRLRILWCPSPHATAELFEELKQSKPQPDAATALAITADSETLPESEKYNPGPQDFLLKMPGVNAKNCRSLMHHVKNIAELAALSQDELTSILGNAANAKQLYDFIHTSFAGREKSRHKKATIFNSPCYLVQHK

SEQ ID NO: 771995 - protein, 110 aa, Homo sapiens
QASKGPEQGQGIYAGPLSTSKAQNGISKSRWEGGWLGAVQVRGCRDGGKHYQGGRLIHLPPKTQHRASHSAGHANIHEVASTSTSKPLTPGSCSGTPAPGGYTDSQAGNP

SEQ ID NO: 771996 - protein, 349 aa, Homo sapiens
SSLGLPSVSLGVSLCVRSALLEAVVPMLPKRRRARVGSPSGDAASSTPPSTRFPGVAIYLVEPRMGRSRRAFLTGLARSKGFRVLDACSSEATHVVMEETSAEEAVSWQERRMAAAPPGCTPPALLDISWLTESLGAGQPVPVECRHRLEVAGPRKGPLSPAWMPAYACQRPTPLTHHNTGLSEALEILAEAAGFEGSEGRLLTFCRAASVLKALPSPVTTLSQLQGLPHFGEHSSRVVQELLEHGVCEEVERVRRSERYQTMKLFTQIFGVGVKTADRWYREGLRTLDDLREQPQKLTQQQKAGLQHHQDLSTPVLRSDVDALQQVVEEAVGQALPGATVTLTGGFRR

SEQ ID NO: 771997 - protein, 349 aa, Homo sapiens; identical to SEQ ID NO: 771996

SEQ ID NO: 771998 - protein, 385 aa, Homo sapiens
SSLGLPSVSLGVSLCVRSALLEAVVPMLPKRRRARVGSPSGDAASSTPPSTRFPGVAIYLVEPRMGRSRRAFLTGLARSKGFRVLDACSSEATHVVMEETSAEEAVSWQERRMAAAPPGCTPPALLDISWLTESLGAGQPVPVECRHRLEAFLPHQVDDTATPSGMTHGLAGACPLDAIRLPASEQVAGPRKGPLSPAWMPAYACQRPTPLTHHNTGLSEALEILAEAAGFEGSEGRLLTFCRAASVLKALPSPVTTLSQLQGLPHFGEHSSRVVQELLEHGVCEEVERVRRSERYQTMKLFTQIFGVGVKTADRWYREGLRTLDDLREQPQKLTQQQKAGLQHHQDLSTPVLRSDVDALQQVVEEAVGQALPGATVTLTGGFRR

SEQ ID NO: 771999 - protein, 228 aa, Homo sapiens
RLVRSEVLYAKSDVPPAGPGLILYHQHQHSCCESPTRLAQQSHMDAFERSFCIFRLPQPPGAAVGGSTRPCPSWKAVRVDLVVAPVSQFPFALLGWTGSKLFQRELRRFSRKEKGLWLNSHGLFDPEQVHCWGLGTANSTHSPLPDPQSEMAPDPSSLKPIGPESGSPHTVPGPQEHTPPRRWALPHPQSSCREAAVARLLGHGSPASVAEDIFPSGFRGRHLQTPGP

SEQ ID NO: 772000 - protein, 230 aa, Homo sapiens
PLPPALSTPPDGLSHARLSPQGLILYHQHQHSCCESPTRLAQQSHMDAFERSFCIFRLPQPPGAAVGGSTRPCPSWKAVRVDLVVAPVSQFPFALLGWTGSKLFQRELRRFSRKEKGLWLNSHGLFDPEQVHCWGLGTANSTHSPLPDPQSEMAPDPSSLKPIGPESGSPHTVPGPQEHTPPRRWALPHPQSSCREAAVARLLGHGSPASVAEDIFPSGFRGRHLQTPGP

SEQ ID NO: 772001 - protein, 349 aa, Homo sapiens; identical to SEQ ID NO: 771996

SEQ ID NO: 772002 - protein, 520 aa, Homo sapiens
SSLGLPSVSLGVSLCVRSALLEAVVPMLPKRRRARVGSPSGDAASSTPPSTRFPGVAIYLVEPRMGRSRRAFLTGLARSKGFRVLDACSSEATHVVMEETSAEEAVSWQERRMAAAPPGCTPPALLDISWLTESLGAGQPVPVECRHRLEVAGPRKGPLSPAWMPAYACQRPTPLTHHNTGLSEALEILAEAAGFEGSEGRLLTFCRAASVLKALPSPVTTLSQLQGLPHFGEHSSRVVQELLEHGVCEEVERVRRSERYQTMKLFTQIFGVGVKTADRWYREGLRTLDDLREQPQKLTQQQKAGLQHHQDLSTPVLRSDVDALQQVVEEAVGQALPGATVTLTGGFRRGKLQGHDVDFLITHPKEGQEAGLLPRVMCRLQDQGLILYHQHQHSCCESPTRLAQQSHMDAFERSFCIFRLPQPPGAAVGGSTRPCPSWKAVRVDLVVAPVSQFPFALLGWTGSKLFQRELRRFSRKEKGLWLNSHGLFDPEQKTFFQAASEEDIFRHLGLEYLPPEQRNA

SEQ ID NO: 772003 - protein, 349 aa, Homo sapiens; identical to SEQ ID NO: 771996

SEQ ID NO: 772004 - protein, 349 aa, Homo sapiens; identical to SEQ ID NO: 771996

SEQ ID NO: 772005 - protein, 115 aa, Homo sapiens
HHVLVSASHLPSLLNPLLFVPCCCHSPETPLAKVPRVFTLTSQSSSSHCSTPQVFPNIVQGISIHLVAETKYLHSSYPTPDCAQFLLCPPSLVGCSLLILSCHLSLLTCITLVAS

SEQ ID NO: 772006 - protein, 109 aa, Homo sapiens
MVFLCVQHAPLCLHGVSLCIAPASRLFARCFFGHSTCLSVVCTVFLCAQHPPLCLHGVSLCIAPASRLFAQCFFGHSTSLSVVCMAFLCAQHPPLSLHGVSLCVAPDSW

SEQ ID NO: 772007 - protein, 635 aa, Homo sapiens
EFRHTSALTQHTAHTQHTSAHTQHSFITPPTTPQLRRHTKLKPPRTPPPPSRKVFQLLPSFPTLTRSKSHESQLGNRIDDVSSMRFDLSHGSPQMVRRDIGLSVTHRFSTKSWLSQVCHVCQKSMIFGVKCKHCRLKCHNKCTKEAPACRISFLPLTRLRRTESVPSDINNPVDRAAEPHFGTLPKALTKKEHPPAMNHLDSSSNPSSTTSSTPSSPAPFPTSSNPSSATTPPNPSPGQRDSRFNFPAAYFIHHRQQFIFPDISAFAHAAPLPEAADGTRLDDQPKADVLEAHEAEAEEPEAGKSEAEDDEDEVDDLPSSRRPWRGPISRKASQTSVYLQEWDIPFEQVELGEPIGQGRWGRVHRGRWHGEVAIRLLEMDGHNQDHLKLFKKEVMNYRQTRHENVVLFMGACMNPPHLAIITSFCKGRTLHSFVRDPKTSLDINKTRQIAQEIIKGMGYLHAKGIVHKDLKSKNVFYDNGKVVITDFGLFGISGVVREGRRENQLKLSHDWLCYLAPEIVREMTPGKDEDQLPFSKAADVYAFGTVWYELQARDWPLKNQAAEASIWQIGSGEGMKRVLTSVSLGKEVSEILSACWAFDLQERPSFSLLMDMLEKLPKLNRRLSHPGHFWKSAEL

SEQ ID NO: 772008 - protein, 43 aa, Homo sapiens
GPPRAGKGTQAPRLAENFCVCHLATGDMLRAMVASGSELGKKL

SEQ ID NO: 772009 - protein, 74 aa, Homo sapiens
AEKLLSTSPWVGADRNFLWGKRALLPAAGSLNTRLAVTGNWADRAPTLWVPRSASCSSGPAALPVGLGSLLCLS

SEQ ID NO: 772010 - protein, 364 aa, Homo sapiens
MLISKKAADTQVSETLKRFAGKVTTASVKERREILSELGKCVAGKDLPEGAVKGLCKLFCLTLHRYRDAASRRALQAAIQQLAEAQPEATAKNLLHSLQSSGIGSKAGVPSKSSGSAALLALTWTCLLVRIVFPSRAKRQGDIWNKLVEVQCLLLLEVLGGSHKHAVDGAVKKLTKLWKENPGLVEQYLSAILSLEPNQNYAGMLGLLVQFCTSHKEMDVVSQHKSALLDFYMKNILMSKVKPPKYLLDSCAPLLRYLSHSEFKDLILPTIQKSLLRSPENVIETISSLLASVTLDLSQYAMDIVKGLAGHLKSNSPRLMDEAVLALRNLARQCSDSSAMESLTKHLFAILGGSEGKLTVVAQK

SEQ ID NO: 772011 - protein, 228 aa, Homo sapiens
MLISKKAADTQVSETLKRFAGKVTTASVKERREILSELGKCVAGKDLPEGAVKGLCKLFCLTLHRYRDAASRRALQAAIQQLAEAQPEATAKNLLHSLQSSGIGSKAGVPSKSSGSAALLALTWTCLLVRIVFPSRAKRQGDIWNKLVEVQCLLLLEVLGGSHKHAVDGAVKKLTKLWKENPGLVEQYLSAILSLEPNQNYAGMLGLLVQFCTSHKEMDVVSQHKSAP

SEQ ID NO: 772012 - protein, 407 aa, Homo sapiens
MLISKKAADTQVSETLKRFAGKVTTASVKERREILSELGKCVAGKDLPEGAVKGLCKLFCLTLHRYRDAASRRALQAAIQQLAEAQPEATAKNLLHSLQSSGIGSKAGVPSKSSGSAALLALTWTCLLVRIVFPSRAKRQGDIWNKLVEVQCLLLLEVLGGSHKHAVDGAVKKLTKLWKENPGLVEQYLSAILSLEPNQNYAGMLGLLVQFCTSHKEMDVVSQHKSALLDFYMKNILMSKVKPPKYLLVSERWTLLTWTTDPIFNSGMLNSFFASWSVPMRARCLIPFSLQDSCAPLLRYLSHSEFKDLILPTIQKSLLRSPENVIETISSLLASVTLDLSQYAMDIVKGLAGHLKSNSPRLMDEAVLALRNLARQCSDSSAMESLTKHLFAILGGSEGKLTVVAQK

SEQ ID NO: 772013 - protein, 454 aa, Homo sapiens
MPTHMDPHYTTVRAPTLTNSGETKRTLKIRLLFDYESDNNDDTKHQQQQTNTHLIQWMILSKLSTAPIRAEKQNAETPQRGSKRATRDHTEQTRHEENTQYYHHPSTDEQKKTHNAKKTTATDTHHTHTATKLPPTNETTKTKHERHLPTLARTIHLGLYRERERRRAQERKRRRKKGRASRGRHHPKETAEGPNIATQIPRANNTKQKEKKTKQTTHSPDPQEEEEVEPPPHRRLRMISRSSEIRKKQINEYDLTSSITHPSSSRGDKNKKQHNDPDTNRHVRTQRTHATSRHSKVITEIQHKEHYTAQRRKAQDERKRREEMRERRKERRPDDAHRTHAITNRNDEGQQGTDTQSEHATSTTRSHATRTTSHAPSRRERDGTKPVTQPLDHPSRRQPRTRDDPTHRSAQQRPSTTGPTEQRVAHHRRATQQLHTATPVTRVASTQTRHVTTP

SEQ ID NO: 772014 - protein, 122 aa, Homo sapiens
MSMEDYDFLFKIVLIGNAGVGKTCLVRRFTQGLFPPGQGATIGVDFMIKTVEINGEKVKLQIWDTAGQERFRSITQSYYRSANALILTYDITCEESFRCLPEWLREIEQYASNKVITVLVGK

SEQ ID NO: 772015 - protein, 203 aa, Homo sapiens
MSMEDYDFLFKIVLIGNAGVGKTCLVRRFTQGLFPPGQGATIGVDFMIKTVEINGEKVKLQIWDTAGQERFRSITQSYYRSANALILTYDITCEESFRCLPEWLREIEQYASNKVITVLVGNKIDLAERREVSQQRAEEFSEAQDMYYLETSAKESDNVEKLFLDLACRLISEARQNTLVNNVSSPLPGEGKSISYLTCCNFN

SEQ ID NO: 772016 - protein, 203 aa, Homo sapiens; identical to SEQ ID NO: 772015

SEQ ID NO: 772017 - protein, 203 aa, Homo sapiens; identical to SEQ ID NO: 772015

SEQ ID NO: 772018 - protein, 165 aa, Homo sapiens
THASADAWVMIKTVEINGEKELQIWDTAGQERFRSITQSYYRSANALILTYDITCEESFRCLPEWLREIEQYASNKVITVLVGNKIDLAERREVSQQRAEEFSEAQDMYYLETSAKESDNVEKLFLDLACRLISEARQNTLVNNVSSPLPGEGKSISYLTCCNFN

SEQ ID NO: 772019 - protein, 655 aa, Homo sapiens
PASSQDQKIYSGEKSYECAEFGKSFTWKSQFKVHLKVPTGEKLYVCIECGRAFVQKPEFITHQKTHMREKPYKCNECGKSFFQVSSLFRHHRIHTGEKLYECSECGKGFPYNSDLSIHEKIHTGERHHECTDCGKAFTQKSTLKIHQKIHTGERSYICIECGQAFIQKTQLIAHRRIHSGEKPYECNNCGKSFISKSQLQVHQRVHTRVKPYICTEYGKVFSNNSNLITHEKIQSREKSSICTECGKAFTYRSELIIHQRIHTGEKPYECSDCGRAFTQKSALTVHQRIHTGEKSYICMKCGLAFIRKAHLITHQIIHTGEKPYKCGHCGKLFTSKSQLHVHKRIHTGEKPYVCNKCGKAFTNRSNLITHQKTHTGEKSYICSKCGKAFTQRSDLITHQRIHTGEKPYECNTCGKAFTQKSNLNIHQKIHTGERQYECHECGKAFNQKSILIVHQKIHTGEKPYVCTECGRAFIRKSNFITHQRIHTGEKPYECSDCGKSFTSKSQLLVHQPVHTGEKPYVCAECGKAFSGRSNLSKHQKTHTGEKPYICSECGKTFRQKSELITHHRIHTGEKPYECSDCGKSFTKKSQLQVHQRIHTGEKPYVCAECGKAFSNRSNLNKHQTTHTGDKPYKCGICGKGFVQKSVFSVHQSSHA

SEQ ID NO: 772020 - protein, 238 aa, Homo sapiens
SPLAAAAAAAAPAPATLRPPPPPGAPAARPDMSEAVRVPSPATPLVVAAAAPEERKGKESEREKLPPIVSAGAGATAGLDRGAKGQISTFSSFISAVSPKKEAAENRSSPAHLVFPNIKNVREPPPICLDVRQKQRTSMDASSSEMKAPVLPEPILPIQPKTVKDFQEDVEKVKSSGDWKAVHDFYLTTFDSFPELNAAFKKDATASFNTIEDSGINAKFVNAVYDTLLNTVSIMTCK

SEQ ID NO: 772021 - protein, 134 aa, Homo sapiens
MDASSSEMKAPVLPEPILPIQPKTVKDFQEDVEKVKSSGDWKAVHDFYLTTFDSFPELNAAFKKDATASFNTIEDSGINAKFVNAVYDTLLNTPQDVQKTVLKGIINSLLREWKGPRTKDDLRAYFILFTESSV

SEQ ID NO: 772022 - protein, 272 aa, Homo sapiens
SPLAAAAAAAAPAPATLRPPPPPGAPAARPDMSEAVRVPSPATPLVVAAAAPEERKGKESEREKLPPIVSAGAGATAGLDRGAKGQISTFSSFISAVSPKKEAAENRSSPAHLVFPNIKNVREPPPICLDVRQKQRTSMDASSSEMKAPVLPEPILPIQPKTVKDFQEDVEKVKSSGDWKAVHDFYLTTFDSFPELNAAFKKDATASFNTIEDSGINAKFVNAVYDTLLNTPQDVQKTVLKGIINSLLREWKGPRTKDDLRAYFILFTESSV

SEQ ID NO: 772023 - protein, 284 aa, Homo sapiens
LGGLITVLCFFFNHGEATRVMWTPPLRESFSYPFLVLQMCILTLILRTSSNDRRPFIALCLSNVAFMLPWQFAQFILFTQIASLFPMYVVGYIEPSKFQKIIYMNMISVTLSFILMFGNSMYLSSYYSSSLLMTWAIILKRNEIQKLGVSKLNFWLIQGSAWWCGTIILKFLTSKILGVSDHIRLSDLIAARILRYTDFDTLIYTCAPEFDFMEKATPLRYTKTLLLPVVMVITCFIFKKTVRDISYVLATNIYLRQMEHREMCLGILKKNEWRTLDTVPIRST

SEQ ID NO: 772024 - protein, 487 aa, Homo sapiens
LGGLITVLCFFFNHGEATRVMWTPPLRESFSYPFLVLQMCILTLILRTSSNDRRPFIALCLSNVAFMLPWQFAQFILFTQIASLFPMYVVGYIEPSKFQKIIYMNMISVTLSFILMFGNSMYLSSYYSSSLLMTWAIILKRNEIQKLGVSKLNFWLIQGSAWWCGTIILKFLTSKILGVSDHIRLSDLIAARILRYTDFDTLIYTCAPEFDFMEKATPLRYTKTLLLPVVMVITCFIFKKTVRDISYVLATNIYLRKQLLEHSELAFHTLQLLVFTALAILIMRLKMFLTPHMCVMASLICSRQLFGWLFRRVRFEKVIFGILTVMSIQGYANLRNQWSIIGEFNNLPQEELLQWIKYSTTSDAVFAGAMPTMASIKLSTLHPIVNHPHYEDADLRARTKIVYSTYSRKSAKEVRDKLLELHVNYYVLEEAWCVVRTKPGCSMLEIWDVEDPSNAANPPLCSVLLEDARPYFTTVFQNSVYRVLKVN

SEQ ID NO: 772025 - protein, 74 aa, Homo sapiens
MVPTCNSNSPRVQAFPGASPPRRISTISKGTKGNYTSGVGEYSSSIQNSDNDLAVVQGSSSFSRKGYPSLKGAQ

SEQ ID NO: 772026 - protein, 139 aa, Homo sapiens
RSYHSEQLTGSRSHSPGGATLGCLGVCAVLLSPRACVQSCCPQGQVGEVMGEAERAMEGCGVPRSREAHRRTGFLQRWAGSLTFLLSNFSEVCVCVCVCVCVCEVGGVLLPPGILSLWGNGGRSIEPQGLGLPSSPRPL

SEQ ID NO: 772027 - protein, 91 aa, Homo sapiens
GTGRQEVERSASYLTASHVSVNPGKAVHPDSSNWLQLPRKSHFDPRVGTGSSTYRWSPLFRDLNSCSLSLCSEPLRSRHQPGMSLILASSF

SEQ ID NO: 772028 - protein, 132 aa, Homo sapiens
GSCYVAQTGVQWLFAGMIPLLISAGVLTCLFPIWASSPLISKSGGPPSWEVTILMLNLVWTPNWHSTVQPRTLGLKPSSCRSFPSSWDYRHAPPYLATFFINTFPFAACSLLFHFHFFNSLLKPRTVINPFQ

SEQ ID NO: 772029 - protein, 74 aa, Homo sapiens
RNVLGLRKRHLDEERHWDENVIWDEERHFQPRNHCTAPIRHDLIWQFQLKRQQETKKLVEKVISHFLSCPITKD

SEQ ID NO: 772030 - protein, 47 aa, Homo sapiens
YTHGGCISPKTDKSKAVNKHPHLNSIKPKSMLNEVKSVHSIANVNTF

SEQ ID NO: 772031 - protein, 128 aa, Homo sapiens
CAGNERGSVGVGPSEPCAGYNILVCCLLRPLEKCSIRVGVTQFSRCHLSPLPLAMKENSLTPCTSQVRRCLALLRLMVSALHPLSCTHCPTIPSEMNLVPQLEVQKSPAFCVAHAGSYRLELFLFSHL

SEQ ID NO: 772032 - protein, 213 aa, Homo sapiens
WRSTFAPPGRRRMRDSPLARPAAPAGASPFTFKSPRELGNSAQGQGPSLAVTAGSALRVWLWYSLAYPASGLLTALQACPARRNPPPDAEEKKVVSEALEMLRLLRGSPKPNRHPRSGPVPAHGVASAAAGPATMREPPGRGASFETMWPTENLSSRRRAPPQRRRTRAPSIARSLPGSGRLLGLIFPSTGKNVQRHKSPPLPSEESLSQRSR

SEQ ID NO: 772033 - protein, 112 aa, Homo sapiens
GNGMRPEGLGKARGGVAQEVSRMEEEASSKEQEEWTLVRGNHVPPTKCALHKDPARPSVPAGSLSWHQPCPQRERPGDRWRCTCGSLGKSILQPRAPSRLPASRSSFTPWSS

SEQ ID NO: 772034 - protein, 911 aa, Homo sapiens
MAEKAPPGLNRKTSRSTLSLPPEPVDIIRSKTCSRRVKINVGGLNHEVLWRTLDRLPRTRLGKLRDCNTHESLLEVCDDYNLNENEYFFDRHPGAFTSILNFYRTGKLHMMEEMCALSFGQELDYWGIDEIYLESCCQARYHQKKEQMNEELRREAETMREREGEEFDNTCCPDKRKKLWDLLEKPNSSVAAKILAIVSILFIVLSTIALSLNTLPELQETDEFGQLNDNRQLAHVEAVCIAWFTMEYLLRFLSSPNKWKFFKGPLNVIDLLAILPYYVTIFLTESNKSVLQFQNVRRVVQIFRIMRILRILKLARHSTGLQSLGFTLRRSYNELGLLILFLAMGIMIFSSLVFFAEKDEDATKFTSIPASFWWATITMTTVGYGDIYPKTLLGKIVGGLCCIAGVLVIALPIPIIVNNFSEFYKEQKRQEKAIKRREALERAKRNGSIVSMNLKDAFARSMELIDVAVEKAGESANTKDSADDNHLSPSRWKWARKALSETSSNKSFENKYQEVSQKDSHEQLNNTSSSSPQHLSAQKLEMLYNEITKTQPHSHPNPDCQEKPERPSAYEEEIEMEEVVCPQEQLAVAQTEVIVDMKSTSSIDSFTSCATDFTETERSPLPPPSASHLQMKFPTDLPGTEEHQRARGPPFLTLSREKGPAARDGTLEYAPVDITVNLDASGSQCGLHSPLQSDNATDSPKSSLKGSNPLKSRSLKVNFKENRGSAPQTPPSTARPLPVTTADFSLTTPQHISTILLEETPSQGDRPLLGTEVSAPCQGPSKGLSPRFPKQKLFPFSSRERRSFTEIDTGDDEDFLELPGAREEKQVDSSPNCFADKPSDGRDPLREEGSVGSSSPQDTGHNCRQDIYHAVSEVKKDSSQEGCKMENHLFAPEIHSNPGDTGYCPTRETSM

SEQ ID NO: 772035 - protein, 514 aa, Homo sapiens
TPLTDRCYITLAQALGMSMGGAPAGPAGTGKTETTKDMGRCLGKYVVVFNCSDQMDFRGLGRIFKGLAQSGAWGCFDEFNRIDLPVLSVAAQQISIILTCKKEHKKSFIFTDGDNVTMNPEFGLFLTMNPGYAGRQELPENLKINFRSVAMMVPDRQIIIRVKLASCGFIDNVVLARKFFTLYKLCEEQLSKQVHYDFGLRNILSVLRTLGAAKRANPMDTESTIVMRVLRDMNLSKLIDEDEPLFLSLIEDLFPNILLDKAGYPELEAAISRQVEEAGLINHPPWKLKVIQLFETQRVRHGMMTLGPSGAGKTTCIHTLMRAMTDCGKPHREMRMNPKAITAPQMFGRLDVATNDWTDGIFSTLWRKTLRAKKGEHIWIILDGPVDAIWIENLNSVLDDNKTLTLANGDRIPMAPNCKIIFEPHNIDNASPATVSRNGMVFMSSSILDWSPILEGFLKKRSPQEAEILRQLYTESFPDLYRFCIQNLEYKMEVLEAFVITQSINMLQGLIPLK

SEQ ID NO: 772036 - protein, 120 aa, Homo sapiens
LPVPLESVKEMLKSVMQELEDYSEGGPLYKNGSLRNADSEIKHSTPSPTKYSLSPSKSYKVNRKEWNHFIVKLFLSVLNALLLFLFFFLVFSQNTTSMGRRSEFFTENDLPRSKGHYETK

SEQ ID NO: 772037 - protein, 104 aa, Homo sapiens
MNSFQIKIHSVHAEKPVPLSDKFVCARDERANQTRGACNQTPRGPNTGLPRAQECRVILLKEVPTPKSSIEMLAWVETSPLPALSLNQKGRPAGAVEIKPRACG

SEQ ID NO: 772038 - protein, 638 aa, Homo sapiens
AQNAPAMGIRGMLRAAVILLLIRTWLAEGNYPSPIPKFHFEFSSAVPEVVLNLFNCKNCANEAVVQKILDRVLSRYDVRLRPNFGGAPVPVRISIYVTSIEQISEMNMDYTITMFFHQTWKDSRLAYYETTLNLTLDYRMHEKLWVPDCYFLNSKDAFVHDVTVENRVFQLHPDGTVRYGIRLTTTAACSLDLHKFPMDKQACNLVVESYGYTVEDIILFWDDNGNAIHMTEELHIPQFTFLGRTITSKEVYFYTGSYIRLILKFQVQREVNSYLVQVYWPTVLTTITSWISFWMNYDSSAARVTIGLTSMLILTTIDSHLRDKLPNISCIKAIDIYILVCLFFVFLSLLEYVYINYLFYSRGPRRQPRRHRRPRRVIARYRYQQVVVGNVQDGLINVEDGVSSLPITPAQAPLASPESLGSLTSTSEQAQLATSESLSPLTSLSGQAPLATGESLSDLPSTSEQARHSYGVRFNGFQADDSIFPTEIRNRVEAHGHGVTHDHEDSNESLSSDERHGHGPSGKPMLHHGEKGVQEAGWDLDDNNDKSDCLAIKEQFKCDTNSTWGLNDDELMAHGQEKDSSSESEDSCPPSPGCSFTEGFSFDLFNPDYVPKVDKWSRFLFPLAFGLFNIVYWVYHMY

SEQ ID NO: 772039 - protein, 86 aa, Homo sapiens
AQNAPAMGIRGMLRAAVILLLIRTWLAEGNYPSPIPKFHFEFSSAVPEVVLNLFNCKNCANEAVVQKILDRVLSRYDVRLRPNFGV

SEQ ID NO: 772040 - protein, 100 aa, Homo sapiens
AESDGVCLRPAFLWAFEAPSQKARTRWAQERHPSSQANQNSGHLREDGTVPCDPAQEPSSSTASSRIASPNSTRAMSPEARGCLCPSRTEKERGERETGV

SEQ ID NO: 772041 - protein, 541 aa, Homo sapiens
GAAGCVAGMSASTGGGGDSGGSGGSSSSSQASCGPESSGSELALATPVPQMLQGLLGSDDEEQEDPKDYCKGGYHPVKIGDVFNGRYHVVRKLGWGHFSTVWLCWDIQRKRFVALKVVKSAGHYTETAVDEIKLLKCVRDSDPSDPKRETIVQLIDDFRISGVNGVHVCMVLEVLGHQLLKWIIKSNYQGLPVPCVKSIVRQVLHGLDYLHTKCKIIHTDIKPENILLCVGDAYIRRLAAEATEWQQAGAPPPSRSIVSTAPQEVLTGKLSKNKRKKMRRKRKQQKRLLEERLRDLQRLEAMEAATQAEDSGLRLDGGSGSTSSSGFSGSLFSPASCSILSGSSNQRETGGLLSPSTPFGASNLLVNPLEPQNADKIKIKIADLGNACWVHKHFTEDIQTRQYRAVEVLIGAEYGPPADIWSTACMAFELATGDYLFEPHSGEDYSRDEDHIAHIVELLGDIPPAFALSGRYSREFFNRRGELRHIHNLKHWGLYEVLMEKYEWPLEQATQFSAFLLPMMEYIPEKRASAADCLQHPWLNP

SEQ ID NO: 772042 - protein, 491 aa, Homo sapiens
MLQGLLGSDDEEQEDPKDYCKGGYHPVKIGDVFNGRYHVVRKLGWGHFSTVWLCWDIQRKRFVALKVVKSAGHYTETAVDEIKLLKCVRDSDPSDPKRETIVQLIDDFRISGVNGVHVCMVLEVLGHQLLKWIIKSNYQGLPVPCVKSIVRQVLHGLDYLHTKCKIIHTDIKPENILLCVGDAYIRRLAAEATEWQQAGAPPPSRSIGTKGPHEGWTGKLSKNKRKKMRRKRKQQKRLLEERLRDLQRLEAMEAATQAEDSGLRLDGGSGSTSSSGFSGSLFSPASCSILSGSSNQRETGGLLSPSTPFGASNLLVNPLEPQNADKIKIKIADLGNACWVHKHFTEDIQTRQYRAVEVLIGAEYGPPADIWSTACMAFELATGDYLFEPHSGEDYSRDEDHIAHIVELLGDIPPAFALSGRYSREFFNRRGELRHIHNLKHWGLYEVLMEKYEWPLEQATQFSAFLLPMMEYIPEKRASAADCLQHPWLNP

SEQ ID NO: 772043 - protein, 166 aa, Homo sapiens
TALAPARPQGSPCFQHKHFTEDIQTRQYRAVEVLIGAEYGPPADIWSTACMAFELATGDYLFEPHSGEDYSRDEDHIAHIVELLGDIPPAFALSGRYSREFFNRRGELRHIHNLKHWGLYEVLMEKYEWPLEQATQFSAFLLPMMEYIPEKRASAADCLQHPWLNP

SEQ ID NO: 772044 - protein, 574 aa, Homo sapiens
GAAGCVAGMSASTGGGGDSGGSGGSSSSSQASCGPESSGSELALATPVPQMLQGLLGSDDEEQEDPKDYCKGGYHPVKIGDVFNGRYHVVRKLGWGHFSTVWLCWDIQRKRFVALKVVKSAGHYTETAVDEIKLLKCVRDSDPSDPKRETIVQLIDDFRISGVNGVHVCMVLEVLGHQLLKWIIKSNYQGLPVPCVKSIVRQVLHGLDYLHTKCKIIHTDIKPENILLCVGDAYIRRLAAEATEWQQAGAPPPSRSIVSTAPQEVLTGKLSKNKRKKMRRKRKQQKRLLEERLRDLQRLEAMEAATQAEDSGLRLDGGSGSTSSSGCHPGGARAGPSPASSSPAPGGGRSLSAGSQTSGFSGSLFSPASCSILSGSSNQRETGGLLSPSTPFGASNLLVNPLEPQNADKIKIKIADLGNACWVHKHFTEDIQTRQYRAVEVLIGAEYGPPADIWSTACMAFELATGDYLFEPHSGEDYSRDEDHIAHIVELLGDIPPAFALSGRYSREFFNRRGELRHIHNLKHWGLYEVLMEKYEWPLEQATQFSAFLLPMMEYIPEKRASAADCLQHPWLNP

SEQ ID NO: 772045 - protein, 574 aa, Homo sapiens; identical to SEQ ID NO: 772044

SEQ ID NO: 772046 - protein, 336 aa, Homo sapiens
MDYPTLLLALLHVYRALCEEVLWHTSVPFAENMSLECVYPSMGILTQVEWFKIGTQQDSIAIFSPTHGMVIRKPYAERVYFLNSTMASNNMTLFFRNASEDDVGYYSCSLYTYPQGTWQKVIQVVQSDSFEAAVPSNSHIVSEPGKNVTLTCQPQMTWPVQAVRWEKIQPRQIDLLTYCNLVHGRNFTSKFPRQIVSNCSHGRWSVIVIPDVTVSDSGLYRCYLQASAGENETFVMRLTVAEGKTDNQYTLFVAGGTVLLLLFVISITTIIVIFLNRRRRRERRDLFTESWDTQKAPNNYRSPISTGQPTNQSMDDTREDIYVNYPTFSRRPKTRV

SEQ ID NO: 772047 - protein, 351 aa, Homo sapiens
MFLSKPSVYICLFTCVLQLSHSWSVNNFLMTGPKAYLIYSSSVAAGAQSGIEECKYQFAWDRWNCPERALQLSSHGGLRSANRETAFVHAISSAGVMYTLTRNCSLGDFDNCGCDDSRNGQLGGQGWLWGGCSDNVGFGEAISKQFVDALETGQDARAAMNLHNNEAGRKAVKGTMKRTCKCHGVSGSCTTQTCWLQLPEFREVGAHLKEKYHAALKVDLLQGAGNSAAARGAIADTFRSISTRELVHLEDSPDYCLENKTLGLLGTEGRECLRRGRALGRWELRSCRRLCGDCGLAVEERRAETVSSCNCKFHWCCAVRCEQCRRRVTKYFCSRAERPRGGAAHKPGRKP

SEQ ID NO: 772048 - protein, 573 aa, Homo sapiens
DDQSIGRTWAHSLQEKGSTFLQLGSSTEQQLQVIFEVLEEYDWTSFVAVTTRAPGHRAFLSYIEVLTDGSLVGWEHRGALTLDPGAGEAVLSAQLRSVSAQIRLLFCAREEAEPVFRAAEEAGLTGSGYVWFMVGPQLAGGGGSGAPGEPPLLPGGAPLPAGLFAVRSAGWRDDLARRVAAGVAVVARGAQALLRDYGFLPELGHDCRAQNRTHRGESLHRYFMNITWDNRDYSFNEDGFLVNPSLVVISLTRDRTWEVVGSWEQQTLRLKYPLWSRYGRFLQPVDDTQHLTVATLEERPFVIVEPADPISGTCIRDSVPCRSQLNRTHSPPPDAPRPEKRCCKGFCIDILKRLAHTIGFSYDLYLVTNGKHGKKIDGVWNGMIGEVFYQRADMAIGSLTINEERSEIVDFSVPFVETGISVMVARSNGTVSPSAFLEPYSPAVWVMMFVMCLTVVAVTVFIFEYLSPVGYNRSLATGKRPGGSTFTIGKSIWLLWALVFNNSVPVENPRGTTSKIMVLVWAFFAVIFLASYTANLALRPFDASVHSTPPAIHSLRPFTPPAIQRLRPFNASA

SEQ ID NO: 772049 - protein, 1403 aa, Homo sapiens
MRGAGGPRGPRGPAKMLLLLALACASPFPEEAPGPGGAGGPGGGLGGARPLNVALVFSGPAYAAEAARLGPAVAAAVRSPGLDVRPVALVLNGSDPRSLVLQLCDLLSGLRVHGVVFEDDSRAPAVAPILDFLSAQTSLPIVAVHGGAALVLTPKEKGSTFLQLGSSTEQQLQVIFEVLEEYDWTSFVAVTTRAPGHRAFLSYIEVLTDGSLVGWEHRGALTLDPGAGEAVLSAQLRSVSAQIRLLFCAREEAEPVFRAAEEAGLTGSGYVWFMVGPQLAGGGGSGAPGEPPLLPGGAPLPAGLFAVRSAGWRDDLARRVAAGVAVVARGAQALLRDYGFLPELGHDCRAQNRTHRGESLHRYFMNITWDNRDYSFNEDGFLVNPSLVVISLTRDRTWEVVGSWEQQTLRLKYPLWSRYGRFLQPVDDTQHLTVATLEERPFVIVEPADPISGTCIRDSVPCRSQLNRTHSPPPDAPRPEKRCCKGFCIDILKRLAHTIGFSYDLYLVTNGKHGKKIDGVWNGMIGEVFYQRADMAIGSLTINEERSEIVDFSVPFVETGISVMVARSNGTVSPSAFLEPYSPAVWVMMFVMCLTVVAVTVFIFEYLSPVGYNRSLATGKRPGGSTFTIGKSIWLLWALVFNNSVPVENPRGTTSKIMVLVWAFFAVIFLASYTANLAAFMIQEEYVDTVSGLSDRKFQRPQEQYPPLKFGTVPNGSTEKNIRSNYPDMHSYMVRYNQPRVEEALTQLKAGKLDAFIYDAAVLNYMARKDEGCKLVTIGSGKVFATTGYGIALHKGSRWKRPIDLALLQFLGDDEIEMLERLWLSGICHNDKIEVMSSKLDIDNMAGVFYMLLVAMGLSLLVFAWEHLVYWRLRHCLGPTHRMDFLLAFSRGMYSCCSAEAAPPPAKPPPPPQPLPSPAYPAPGPAPGPAPFVPRERASVDRWRRTKGAGPPGGAGLADGFHRYYGPIEPQGLGLGLGEARAAPRGAAGRPLSPPAAQPPQKPPASYFAIVRDKEPAEPPAGAFPGFPSPPAPPAAAATAVGPPLCRLAFEDESPPAPARWPRSDPESQPLLGPGAGGAGGTGGAGGGAPAAPPPCCAAPPPCPYLDLEPSPSDSEDSESLGGASLGGLDPWWFADFPYPYAERLGPPPGRYWSVDKLGGWRAGSWDYLPPRSGPAAWHCRHCASLELLPPPRHLSCSHDGLDGGWWAPPPPPWAAGPLPRRRARCGCPRSHPHRPRASHRTPAAAAPHHHRHRRAAGGWDLPPPAPTSRSLEDLSSCPRAAPARRLTGPSRHARRCPHAAHWGPPLPTASHRRHRGGDLGTRRGSAHFSSLESEVMTRPRGPHRPLGQRRPRPEGAPAVDRTRVGWEGKQWNWPDPAWSSVLRPLVLEEPQAGEDLVPQLSP

SEQ ID NO: 772050 - protein, 35 aa, Homo sapiens
MLLLLALACASPFPEEAPGPGGAGGPGGGLGGARP

SEQ ID NO: 772051 - protein, 196 aa, Homo sapiens
MGNIFEKLFKSLLGKKKMRILILSLDTAGKTTILYKLKLGETVPAVPTVGFCVETVEYKNNTFAVWDVGSHFKIRPLWQHFFQNTKGARSPGSTHQGSLASGVLPIKCSHVEFGMWKGGRSHPFLPHSSRCAGSGGQLDSILPHQSPAWGPWGCKDLSSGFPSFLTSSILWKSAVVREPHISPHQAPPYKTSDCIT

SEQ ID NO: 772052 - protein, 125 aa, Homo sapiens
MGNIFEKLFKSLLGKKKMRILILSLDTAGKTTILYKLKLGETVPAVPTVGFCVETVEYKNNTFAVWDVGSHFKIRPLWQHFFQNTKELSASQFAQFIKKLCGVTGTNDEASPGSLTSYPSHLLDR

SEQ ID NO: 772053 - protein, 125 aa, Homo sapiens; identical to SEQ ID NO: 772052

SEQ ID NO: 772054 - protein, 125 aa, Homo sapiens; identical to SEQ ID NO: 772052

SEQ ID NO: 772055 - protein, 55 aa, Homo sapiens
EDTFAIHRHLLRERNPLTPASEPRFYEILKVMQEAADRHTQTLPEVPMNSEVPMN

SEQ ID NO: 772056 - protein, 583 aa, Homo sapiens
MPLRKMKIPFLLLFFLWEAESHAASRPNIILVMADDLGIGDPGCYGNKTIRTPNIDRLASGGVKLTQHLAASPLCTPSRAAFMTGRYPVRSGMASWSRTGVFLFTASSGGLPTDEITFAKLLKDQGYSTALIGKWHLGMSCHSKTDFCHHPLHHGFNYFYGISLTNLRDCKPGEGSVFTTGFKRLVFLPLQIVGVTLLTLAALNCLGLLHVPLGVFFSLLFLAALILTLFLGFLHYFRPLNCFMMRNYEIIQQPMSYDNLTQRLTVEAAQFIQRNTETPFLLVLSYLHVHTALFSSKDFAGKSQHGVYGDAVEEMDWSVGQILNLLDELRLANDTLIYFTSDQGAHVEEVSSKGEIHGGSNGIYKGGKANNWEGGIRVPGILRWPRVIQAGQKIDEPTSNMDIFPTVAKLAGAPLPEDRIIDGRDLMPLLEGKSQRSDHEFLFHYCNAYLNAVRWHPQNSTSIWKAFFFTPNFNPVGSNGCFATHVCFCFGSYVTHHDPPLLFDISKDPRERNPLTPASEPRFYEILKVMQEAADRHTQTLPEVPDQFSWNNFLWKPWLQLCCPSTGLSCQCDREKQDKRLSR

SEQ ID NO: 772057 - protein, 583 aa, Homo sapiens; identical to SEQ ID NO: 772056

SEQ ID NO: 772058 - protein, 583 aa, Homo sapiens; identical to SEQ ID NO: 772056

SEQ ID NO: 772059 - protein, 583 aa, Homo sapiens; identical to SEQ ID NO: 772056

SEQ ID NO: 772060 - protein, 583 aa, Homo sapiens; identical to SEQ ID NO: 772056

SEQ ID NO: 772061 - protein, 109 aa, Homo sapiens
PFIRSALRDSSAASGALPSIERTAATRRTSDEIQTPSQSCKLPHDPAAVRLSKPPIPPLSLVCCSQTGLLTVSRKPHAHYSLKHLTCSLCLGCFASSVSRAASFSSFRS

SEQ ID NO: 772062 - protein, 738 aa, Homo sapiens
MLERPKEPGLGRVLCKLLKEWNLIRISGNLLKILKNNTMKTNILYFSVLEKAPDYCVNYGLEGHKSRGSGTVEISYFFFPVLNFAFYSFFLFLTAMTSLSFVKVIHDCYKIDIVETEKQSQNSTTQKSEIFCIWICLSRRVDCLIKRQSFINVEANMTYMLPLNNKKLNLLLSQDKIKIGGVKLKKLLKFGWCFFKARDLESQSFLSQVSIFISGKFSAILSEVNFFFLRNANYVKSLLSLYNSPQLFWQQARVRVGEWFSDEIVPSQIIRHESILIRSGQPCMPSYENLNAAANLTGGRAQAIMLNGCHSPPVVLPNSYQVMDKYWSVAQGLGTTALYLFTVFFVTTLVSLKFSLTFVNHNPSEFSVVIILFVTSNVLFNFIMVNFVFHCFLGHCHFIFLLFLYFYHCFIEISSLSFSCFSINEIMSIIFFETTETYLYKLFLYFLKKFLSGVSFICFFIEVLSPLPIFGAGFFLLITEQSQLFTELQCGKWWEGESDQPTEAIEISGFKPTSPKPFYVFFLLPRHHIFISIFDIWAAYVVHSVKLSVSTFFMLLLVIIACSPTPFPTLALVFYIIQQACSQLSNIVYQNFYLYLYISTIRKYIVKSYEDRFCLFLACLHSILQRFQTNHLCLKHRRIMILIEIYILPKIYASQFPFSYSVQMATYLKAADYEFVINYLLITDMVFIFFSQFFIMLFLETVLGGEWIINIFISPPLTESPYVICTSNRPGIDQSIFY

SEQ ID NO: 772063 - protein, 108 aa, Homo sapiens
MKLQTLLAEFSTSLSSLGFPTTSKSWKTQGRAPGAMASPSRSSEATGKPRGRDGRPRREEDDVPPEEKRLRLLLEGGSAQPQDGEDGEDAPRPGRVETGTQTGGDGRG

SEQ ID NO: 772064 - protein, 67 aa, Homo sapiens
  misc_feature (23)..(23): Xaa can be any naturally occurring amino acid
RRAAEGGVIIQTVSERVELVIKXAGAEPRGKICSTKLIPVDQNKEQNAESINIPPAIHFQGESVTPS

SEQ ID NO: 772065 - protein, 152 aa, Homo sapiens
QVPPQRVLSCSLGRPRSRSHCRAREMLPRAAWSLVLRKGGGGRRGMHSSEGTTRGGGKMSPYTNCYAQRYYPMPEEPFCTELNAEEQALKEKEKGSWTQLTHAEKVALFPPKPITLTDERKAQQLQRMLDMKVNPVQGLASRWDYEKKQWKK

SEQ ID NO: 772066 - protein, 196 aa, Homo sapiens
QVPPQRVLSCSLGRPRSRSHCRAREMLPRAAWSLVLRKGGGGRRGMHSSEGTTRGGGKMSPYTNCYAQRYYPMPEEPFCTELNAEEQALKEKEKGSWTQLTHAEKVALYRLQFNETFAEMNRRSNEWKTVMGCVFFFIGFAALVIWWQRVYVFPPKPITLTDERKAQQLQRMLDMKVNPVQGLASRWDYEKKQWKK

SEQ ID NO: 772067 - protein, 155 aa, Homo sapiens
  misc_feature (2)..(2): Xaa can be any naturally occurring amino acid
MXGRWHSSEGTTRGGGKMSPYTNCYAQRYYPMPEEPFCTELNAEEQALKEKEKGSWTQLTHAEKVALYRLQFNETFAEMNRRSNEWKTVMGCVFFFIGFAALVIWWQRVYVFPPKPITLTDERKAQQLQRMLDMKVNPVQGLASRWDYEKKQWKK

SEQ ID NO: 772068 - protein, 1800 aa, Homo sapiens
AQPSVVTRRSPSRGHPSRTFRVASDQGHQSMANWGSQNLAQPSMDSGEPSSLAQPSQAPGVTSNLAQPSQAFGVSPSPDYPSQSVGEYPMLAQPFQPTEVSPSPTYPSQAIREYPTLAQPFQPTEVSPSPAHPYQLTEVSPSAAYSYQPTEVSPNPGYLSMAIEMSPSPEYPSVATEVSPSPTYPYQPTEISPSSGYLSVATEVSPSPGYPSQLTEVSPSSGYLSVATEVSPSPDYSSQPTEMSPSSGYLSMATEVSPSPGYPFQPTEVSPSPDYPCVATGESPSLAQPSQPTEVSPSSAYPSVVTGESPSLAQSYQRTEVFPSPAYPFMATEVSPSPGDPSVVTGESPSPAYPSQPTGESPSLTQPSLTIRVSPSLAMSSQTIGVSPSLAMPSQTIGVSPSLAMPFHTIGVSPTLAHPSMAIRESPSLAQPPQSTGESPSLTWPSQATGVSPSVAHQSVASRVSSSLAQPSQASGMSPRQDYPPVASRVSPNQAHASITSRMSPSRAHASMTCMVSPSQVHRSMPSEVSPSLAQLSQATTAVPLRPAHQPMACGVSPSLAQPSQATGMSSRLAHQPMTCVVSLSPAQPSQAIGVSPSLAHPSGPHGLSPSLAHPYVASGAGSSLAHPSQTTAVSPRQAQPSVASSPGKTNSSCTLASSLAEPAIAPSLFPPSVAHTEALSLAQSPPDTRLAPSRSQPSVVSGTCHGLNEPCWGSRLDSNLQCSRVDSVAPCLCHPSAFVSVSLGGPYPSVAGNMDQGLNQPSLGTGVNLCEEPLMVSEMVSSPPDFKFNDVSLGFHHPPRVGGRHVCPPSVVSVSTPNLSHADEEACCVGQGITPLFRGVAVSHPQEPLADAMFPSGSQGTTSPGLAGNLPWRTIATGMGQSQCQVANGMASLASQVLEAGGPLTHPSGTTGMAPSPSLASVPNRLAVTQSNLSLNSMDPSSSQISVVIPKNIDCWHPSEASMVPPSYQQRDVIPQDSLKSRAGRGAAGGFVASRMSTGAVPGTLPGGITSSLPPGSTIRGMGHSLPAGSVSSWVAPSLMADRKKPSLSVRPSASLAAPNLLPGSVVSRVSPVVPPGSVPMMGASSVAQSCSKGPMVIDITAPPYLKALAGERSLAPLQMPHTTSLAPGHSSAPAASGTVRSLHRVPTVLSRALQLSQDARIMPSGVTGDQAKLGELDEAVFQVSGSSGSNDLFSKARVTGATQWMYSSPLGADGGHDHRSLSEKGSLPQGRWLPAMLSGMVPVPFQAPGLATKSPSVYQQGSVTHVIPPNHSQGTVASNVVSGSPQLARGSTEAFRLLSVSVGRMGNPSLLQRSGTTSMVSHVPLYPSSARRALSSPFQTEAVPNPLQKTVSGNMAPSSRWDAMGPKNSYRSVHGRIVPELLESSVARVRPLQYVQRQPSQASARSGANPTHRPSAEVRPVIRTGEMTHSSVIPPLAPGVRRVSLGYESSPSGSLPPLFNQESPWRRQDSYSPQNPAVSHKASLNSTILQGPADAGVVGGQSWNRAWEPARGAASWDTWRNKAVVPPRRSGEPMVSMQAAEEIRILAVITIQAGVRGYLARRRIRLWHRGAMVIQATWRGYRVRRNLAHLCRATTTIQSAWRGYSTRRDQARHWQMLHPVTWVELGSRAGVMSDRSWFQDGRARTVSDHRCFQSCQAHACSVCHSLSSRIGSPPSVVMLVGSSPRTCHTCGRTQPTRVVQGMGQGTEGPGAVSWASAYQLAALSPRQPHRQDKAATAIQSAWRGFKIRQQMRQQQMAAKIVQATWRGHHTRSCLKNTEALLGPADPSASSRHMHWPGI

SEQ ID NO: 772069 - protein, 1180 aa, Homo sapiens
MTLQGRADLSGNQGNAAGRLATVHEPVVTQWAVHPPAPAHPSLLDKMEKAPPQPQHEGLKSKEHLPQQPAEGKTASRRVPRLRAVVESQAFKNILVDEMDMMHARAATLIQANWRGYWLRQKLISQMMAAKAIQEAWRRFNKRHILHSSKSLVKKTRAEEGDIPYHAPQQVRFQHPEENRLLSPPIMVNKETQFPSCDNLVLCRPQSSPLLQPPAAQGTPEPCVQGPHAARVRGLAFLPHQTVTIRFPCPVSLDAKCQPCLLTRTIRSTCLVHIEGDSVKTKRVSARTNKARAPETPLSRRYDQAVTRPSRAQTQGPVKAETPKAPFQICPGPMITKTLLQTYPVVSVTLPQTYPASTMTTTPPKTSPVPKVTIIKTPAQMYPGPTVTKTAPHTCPMPTMTKIQVHPTASRTGTPRQTCPATITAKNRPQVSLLASIMKSLPQVCPGPAMAKTPPQMHPVTTPAKNPLQTCLSATMSKTSSQRSPVGVTKPSPQTRLPAMITKTPAQLRSVATILKTLCLASPTVANVKAPPQVAVAAGTPNTSGSIHENPPKAKATVNVKQAAKVVKASSPSYLAEGKIRCLAQPHPGTGVPRAAAELPLEAEKIKTGTQKQAKTDMAFKTSVAVEMAGAPSWTKVAEEGDKPPHVYVPVDMAVTLPRGQLAAPLTNASSQRHPPCLSQRPLAAPLTKASSQGHLPTELTKTPSLAHLDTCLSKMHSQTHLATGAVKVQSQAPLATCLTKTQSRGQPITDITTCLIPAHQAADLSSNTHSQVLLTGSKVSNHACQRLGGLSAPPWAKPEDRQTQPQPHGHVPGKTTQGGPCPAACEVQGMLVPPMAPTGHSTCNVESWGDNGATRAQPSMPGQAVPCQEDTGPADAGVVGGQSWNRAWEPARGAASWDTWRNKAVVPPRRSGEPMVSMQAAEEIRILAVITIQAGVRGYLARRRIRLWHRGAMVIQATWRGYRVRRNLAHLCRATTTIQSAWRGYSTRRDQARHWQMLHPVTWVELGSRAGVMSDRSWFQDGRARTVSDHRCFQSCQAHACSVCHSLSSRIGSPPSVVMLVGSSPRTCHTCGRTQPTRVVQGMGQGTEGPGAVSWASAYQLAALSPRQPHRQDKAATAIQSAWRGFKIRQQMRQQQMAAKIVQATWRGHHTRSCLKNTEALLGPADPSASSRHMHWPGI

SEQ ID NO: 772070 - protein, 817 aa, Homo sapiens
MTLQGRADLSGNQGNAAGRLATVHEPVVTQWAVHPPAPAHPSLLDKMEKAPPQPQHEGLKSKEHLPQQPAEGKTASRRVPRLRAVVESQAFKNILVDEMDMMHARAATLIQANWRGYWLRQKLISQMMAAKAIQEAWRRFNKRHILHSSKSLVKKTRAEEGDIPYHAPQQVRFQHPEENRLLSPPIMVNKETQFPSCDNLVLCRPQSSPLLQPPAAQGTPEPCVQGPHAARVRGLAFLPHQTVTIRFPCPVSLDAKCQPCLLTRTIRSTCLVHIEGDSVKTKRVSARTNKARAPETPLSRRYDQAVTRPSRAQTQGPVKAETPKAPFQICPGPMITKTLLQTYPVVSVTLPQTYPASTMTTTPPKTSPVPKVTIIKTPAQMYPGPTVTKTAPHTCPMPTMTKIQVHPTASRTGTPRQTCPATITAKNRPQVSLLASIMKSLPQVCPGPAMAKTPPQMHPVTTPAKNPLQTCLSATMSKTSSQRSPVGVTKPSPQTRLPAMITKTPAQLRSVATILKTLCLASPTVANVKAPPQVAVAAGTPNTSGSIHENPPKAKATVNVKQAAKVVKASSPSYLAEGKIRCLAQPHPGTGVPRAAAELPLEAEKIKTGTQKQAKTDMAFKTSVAVEMAGAPSWTKVAEEGDKPPHVYVPVDMAVTLPRGQLAAPLTNASSQRHPPCLSQRPLAAPLTKASSQGHLPTELTKTPSLAHLDTCLSKMHSQTHLATGAVKVQSQAPLATCLTKTQSRGQPITDITTCLIPAHQAADLSSNTHSQVLLTGSKVSNHACQRLGGLSAPPWPSQRTDRPMGTSWEALMALWV

SEQ ID NO: 772071 - protein, 1595 aa, Homo sapiens
AQPSVVTRRSPSRGHPSRTFRVASDQGHQSMANWGSQNLAQPSMDSGEPSSLAQPSQAPGVTSNLAQPSQAFGVSPSPDYPSQSVGEYPMLAQPFQPTEVSPSPTYPSQAIREYPTLAQPFQPTEVSPSPAHPYQLTEVSPSAAYSYQPTEVSPNPGYLSMAIEMSPSPEYPSVATEVSPSPTYPYQPTEISPSSGYLSVATEVSPSPGYPSQLTEVSPSSGYLSVATEVSPSPDYSSQPTEMSPSSGYLSMATEVSPSPGYPFQPTEVSPSPDYPCVATGESPSLAQPSQPTEVSPSSAYPSVVTGESPSLAQSYQRTEVFPSPAYPFMATEVSPSPGDPSVVTGESPSPAYPSQPTGESPSLTQPSLTIRVSPSLAMSSQTIGVSPSLAMPSQTIGVSPSLAMPFHTIGVSPTLAHPSMAIRESPSLAQPPQSTGESPSLTWPSQATGVSPSVAHQSVASRVSSSLAQPSQASGMSPRQDYPPVASRVSPNQAHASITSRMSPSRAHASMTCMVSPSQVHRSMPSEVSPSLAQLSQATTAVPLRPAHQPMACGVSPSLAQPSQATGMSSRLAHQPMTCVVSLSPAQPSQAIGVSPSLAHPSGPHGLSPSLAHPYVASGAGSSLAHPSQTTAVSPRQAQPSVASSPGKTNSSCTLASSLAEPAIAPSLFPPSVAHTEALSLAQSPPDTRLAPSRSQPSVVSGTCHGLNEPCWGSRLDSNLQCSRVDSVAPCLCHPSAFVSVSLGGPYPSVAGNMDQGLNQPSLGTGVNLCEEPLMVSEMVSSPPDFKFNDVSLGFHHPPRVGGRHVCPPSVVSVSTPNLSHADEEACCVGQGITPLFRGVAVSHPQEPLADAMFPSGSQGTTSPGLAGNLPWRTIATGMGQSQCQVANGMASLASQVLEAGGPLTHPSGTTGMAPSPSLASVPNRLAVTQSNLSLNSMDPSSSQISVVIPKNIDCWHPSEASMVPPSYQQRDVIPQDSLKSRAGRGAAGGFVASRMSTGAVPGTLPGGITSSLPPGSTIRGMGHSLPAGSVSSWVAPSLMADRKKPSLSVRPSASLAAPNLLPGSVVSRVSPVVPPGSVPMMGASSVAQSCSKGPMVIDITAPPYLKALAGERSLAPLQMPHTTSLAPGHSSAPAASGTVRSLHRVPTVLSRALQLSQDARIMPSGVTGDQAKLGELDEAVFQVSGSSGSNDLFSKARVTGATQWMYSSPLGADGGHDHRSLSEKGSLPQGRWLPAMLSGMVPVPFQAPGLATKSPSVYQQGSVTHVIPPNHSQGTVASNVVSGSPQLARGSTEAFRLLSVSVGRMGNPSLLQRSGTTSMVSHVPLYPSSARRALSSPFQTEAVPNPLQKTVSGNMAPSSRWDAMGPKNSYRSVHGRIVPELLESSVARVRPLQYVQRQPSQASARSGANPTHRPSAEVRPVIRTGEMTHSSVIPPLAPGVRRVSLGYESSPSGSLPPLFNQESPWRRQDSYSPQNPAVSHKASLNSTILQGPADAGVVGGQSWNRAWEPARGAASWDTWRNKAVVPPRRSGEPMVSMQAAEEIRILAVITIQAGVRGYLARRRIRLPAGCPESQAAASPGQSGHSHPVRLEGL

SEQ ID NO: 772072 - protein, 372 aa, Homo sapiens
MACNSTSLEAYTYLLLNTSNASDSGSTQLPAPLRISLAIVMLLMTVVGFLGNTVVCIIVYQRPAMRSAINLLLATLAFSDIMLSLCCMPFTAVTLITVRWHFGDHFCRLSATLYWFFVLEGVAILLIISVDRFLIIVQRQDKLNPRRAKVIIAVSWVLSFCIAGPSLTGWTLVEVPARAPQCVLGYTELPADRAYVVTLVVAVFFAPFGVMLCAYMCILNTVRKNAVRVHNQSDSLDLRQLTRAGLRRLQRQQQVSVDLSFKTKAFTTILILFVGFSLCWLPHSVYSLLSVFSQRFYCGSSFYATSTCVLWLSYLKSVFNPIVYCWRIKKFREACIELLPQTFQILPKVPERIRRRIQPSTVYVCNENQSAV

SEQ ID NO: 772073 - protein, 279 aa, Homo sapiens
ILQRIKYEEGKNKIGLNRLLTNGSYEAAFPLHEGSYRSKNSIRTHGAENHRHLLYECWASWGVWYKYQPLDLVRRYFGEKIGLYFAWLGWYTGMLFPAAFIGLFVFLYGVTTLDHSQVSKEVCQATDIIMCPVCDKYCPFMRLSDSCVYAKVTHLFDNGATVFFAVFMAVWATVFLEFWKRRRAVIAYDWDLIDWEEEEEEIRPQFEAKYSKKERMNPISGKPEPYQAFTDKCSRLIVSASGIFFMICVVIAAVFGIVIYRVVTVSTFAAFKWALIRNN

SEQ ID NO: 772074 - protein, 500 aa, Homo sapiens
DEEFSRTRVAGRSRALARGNGALAVGAGLKGGERPGSLEAELGELPHAGRGSGGSGICSSDSARHSRCSSLHSGGPAALRGSRGSAGCSDLARGRPGLSLPRWGLDGRGTGNMEPSPAAGGLETTRLVSPRDRGGAGGSLRLKSLFTEPSEPLPEESKPVEMPFHHCHRDPLPPPGLTPERLHARRQLYAACAVCFVFMAGEVVGGYLAHSLAIMTDAAHLLADVGSMMGSLFSLWLSTRPATRTMTFGWHRSETLGALASVVSLWMVTGILLYLAFVRLLHSDYHIEGGAMLLTASIAVCANLLMAFVLHQAGPPHSHGSRGAEYAPLEEGPEEPLPLGNTSVRAAFVHVLGDLLQSFGVLAASILIYFKPQYKAADPISTFLFSICALGSTAPTLRDVLRILMEGTPRNVGFEPVRDTLLSVPGVRATHELHLWALTLTYHVASAHLAIDSTADPEAVLAEASSRLYSRFGFSSCTLQVEQYQPEMAQCLRCQEPPQA

SEQ ID NO: 772075 - protein, 392 aa, Homo sapiens
PGEGDGLMRPALGTKDVEEQASLWARPRLNHVACLSLFTEPSEPLPEESKPVEMPFHHCHRDPLPPPGLTPERLHARRQLYAACAVCFVFMAGEVVGGYLAHSLAIMTDAAHLLADVGSMMGSLFSLWLSTRPATRTMTFGWHRSETLGALASVVSLWMVTGILLYLAFVRLLHSDYHIEGGAMLLTASIAVCANLLMAFVLHQAGPPHSHGSRGAEYAPLEEGPEEPLPLGNTSVRAAFVHVLGDLLQSFGVLAASILIYFKPQYKAADPISTFLFSICALGSTAPTLRDVLRILMEGTPRNVGFEPVRDTLLSVPGVRATHELHLWALTLTYHVASAHLAIDSTADPEAVLAEASSRLYSRFGFSSCTLQVEQYQPEMAQCLRCQEPPQA

SEQ ID NO: 772076 - protein, 449 aa, Homo sapiens
DEEFSRTRVAGRSRALARGNGALAVGAGLKGGERPGSLEAELGELPHAGRGSGGSGICSSDSARHSRCSSLHSGGPAALRGSRGSAGCSDLARGRPGLSLPRWGLDGRGTGNMEPSPAAGGLETTRLVSPRDRGGAGGSLRLKSLFTEPSEPLPEESKPVEMPFHHCHRDPLPPPGLTPERLHARRQLYAACAVCFVFMAGEVVGGYLAHSLAIMTDAAHLLADVGSMMGSLFSLWLSTRPATRTMTFGWHRSEWPLCCTRLGPPTATGLGEQSMHLLEEGPEEPLPLGNTSVRAAFVHVLGDLLQSFGVLAASILIYFKPQYKAADPISTFLFSICALGSTAPTLRDVLRILMEGTPRNVGFEPVRDTLLSVPGVRATHELHLWALTLTYHVASAHLAIDSTADPEAVLAEASSRLYSRFGFSSCTLQVEQYQPEMAQCLRCQEPPQA

SEQ ID NO: 772077 - protein, 164 aa, Homo sapiens
MKSKNFCHSSPQLFFFFFFFLNSRVFGETGVVGSMENFLRGGFPKFGGPLPPEQGYNFNTQIVVCLYYSLTPPSQHFFPKVCGKGSMWIPHYFLALMENPTRYRGRNWDNITTDVGILITAASHQPLLSLGNGKCRGPPRRGPPGWKTSVKNDLSGAGGAGNQD

SEQ ID NO: 772078 - protein, 49 aa, Homo sapiens
CQSGIVVEIQAGRGLALLASYRAQAMWPCGQTMAVFELSIRAHCTQRPA

SEQ ID NO: 772079 - protein, 129 aa, Homo sapiens
VERWTRRLRASLAGQVGGTGLRIPRPRFGPAGDMASSGEVLSATVSALLLPRRPRSPWVLPSRPGFPCILSIPTPTPPRPSHPDPGLAPAPVLPASCPQDSYPVSEGTSCLPLRSCIPDRQSCPRLSVP

SEQ ID NO: 772080 - protein, 690 aa, Homo sapiens
VERWTRRLRASLAGQVGGTGLRIPRPRFGPAGDMASSGEDISNDDDDMHPAAAGMADGVHLLGFSDEILLHILSHVPSTDLILNVRRTCRKLAALCLDKSLIHTVLLQKDYQASEDKVRQLVKEIGREIQQLSMAGCYWLPGSTVEHVARCRSLVKVNLSGCHLTSLRLSKMLSALQHLRSLAIDVSPGFDASQLSSECKATLSRVRELKQTLFTPSYGVVPCCTSLEKLLLYFEILDRTREGAILSGQLMVGQSNVPHYQNLRVFYARLAPGYINQEVVRLYLAVLSDRTPQNLHAFLISVPGSFAESGATKNLLDSMARNVVLDALQLPKSWLNGSSLLQHMKFNNPFYFSFSRCTLSGGHLIQQVINGGKDLRSLASLNLSGCVHCLSPDSLSVADSAPRADRAPAQPAMHAVPRGFGKKVRVGVQSCPSPFSGQACPQPSSVFWSLLKNLPFLEHLELIGSNFSSAMPRNEPAIRNSLPPCSRAQSVGDSEVAAIGQLAFLRHLTLAQLPSVLTGSGLVNIGLQCQQLRSLSLANLGMMGKVVYMPALSDMLKHCKRLRDLRLEQPYFSANAQFFQALSQCPSLQRLCLVSRSGTLQPDAVLAFMARCLQVVMCHLFTGESLATCKSLQQSLLRSFQAERPALNVVIFPLLHEGLTDVIRDVPLVHLDEITLFKSRVAEEPPNLWW

SEQ ID NO: 772081 - protein, 690 aa, Homo sapiens; identical to SEQ ID NO: 772080

SEQ ID NO: 772082 - protein, 184 aa, Homo sapiens
MWGVTHFKTSQEDGLTAGVIRAPERGVRPAKGAAGHERPECSCPCRWGEVTGRRPQLFTELREEPSARTSRATGRRQPCLPDSGVVCCPCGRPLAVSGIILVGVSPSLVVKTTCVYRVLFKNLDYASIFFLVCLFETESHSVVQAGVQWRDLSSLQPLLSGLQPQPPEQLENELEIGFSYCFVI

SEQ ID NO: 772083 - protein, 475 aa, Homo sapiens
VERWTRRLRASLAGQVGGTGLRIPRPRFGPAGDMASSGEDISNDDDDMHPAAAGMADGVHLLGFSDEILLHILSHVPSTDLILNVRRTCRKLAALCLDKSLIHTVLLQKDYQASEDKVRQLVKEIGREIQQLSMAGCYWLPGSTVEHVARCRSLVKVNLSGCHLTSLRLSKMLSALQHLRSLAIDVSPGFDASQLSSECKATLSRVRELKQTLFTPSYGVVPCCTSLEKLLLYFEILDRTREGAILSGQLMVGQSNVPHYQNLRVFYARLAPGYINQEVVRLYLAVLSDRTPQNLHAFLISVPGSFAESGATKNLLDSMARNVVLDALQLPKSWLNGSSLLQHMKFNNPFYFSFSRCTLSGGHLIQQVINGGKDLRSLASLNLSGCVHCLSPDSLSVADSAPRADRAPAQPAMHAVPRGFGKKVRVGVQSCPSPFSGQACPQPSSVFWSLLKNLPSLGRSMRVPGEIDTHSALLE

SEQ ID NO: 772084 - protein, 777 aa, Homo sapiens
VERWTRRLRASLAGQVGGTGLRIPRPRFGPAGDMASSGEDISNDDDDMHPAAAGMADGVHLLGFSDEILLHILSHVPSTDLILNVRRTCRKLAALCLDKSLIHTVLLQKDYQASEDKVRQLVKEIGREIQQLSMAGCYWLPGSTVEHVARCRSLVKVNLSGCHLTSLRLSKMLSALQHLRSLAIDVSPGFDASQLSSECKATLSRVRELKQTLFTPSYGVVPCCTSLEKLLLYFEILDRTREGAILSGQLMVGQSNVPHYQNLRVFYARLAPGYINQEVVRLYLAVLSDRTPQNLHAFLISVPGSFAESGATKNLLDSMARNVVLDALQLPKSWLNGSSLLQHMKFNNPFYFSFSRCTLSGGHLIQQVINGGKDLRSLASLNLSGCVHCLSPDSLSVADSAPRADRAPAQPAMHAVPRGFGKKVRVGVQSCPSPFSGQACPQPSSVFWSLLKNLPFLEHLELIGSNFSSAMPRNEPAIRNSLPPCSRAQSVGDSEVAAIGQLAFLRHLTLAQLPSVLTGSGLVNIGLQCQQLRSLSLANLGMMGKVVYMPALSDMLKHCKRLRDLRLEQPYFSANAQFFQALSQCPSLQRLCLVSRSGTLQPDAVLAFMARCLQVVMCHLFTGESLATCKSLQQSLLRRWGEVTGRRPQLFTELREEPSARTSRATGRRQPCLPDSGVVCCPCGRPLAVSGIILVGVSPSLVVKTTCVYRVLFKNLDYASIFFLVCLFETESHSVVQAGVQWRDLSSLQPLLSGLQPQPPEQLENELEIGFSYCFVI

SEQ ID NO: 772085 - protein, 639 aa, Homo sapiens
VERWTRRLRASLAGQVGGTGLRIPRPRFGPAGDMASSGEDISNDDDDMHPAAAGMADGVHLLGFSDEILLHILSHVPSTDLILNVRRTCRKLAALCLDKSLIHTVLLQKDYQASEDKVRQLVKEIGREIQQLSMAGCYWLPGSTVEHVARCRSLVKVNLSGCHLTSLRLSKMLSALQHLRSLAIDVSPGFDASQLSSECKATLSRVRELKQTLFTPSYGVVPCCTSLEKLLLYFEILDRTREGAILSGQLMVGQSNVPHYQNLRVFYARLAPGYINQEVVRLYLAVLSDRTPQNLHAFLISVPGSFAESGATKNLLDSMARNVVLDALQLPKSWLNGSSLLQHMKFNNPFYFSFSRCTLSGGHLIQQVINGGKDLRSLASLNLSGCVHCLSPDSLSVADSAPRADRAPAQPAMHAVPRGFGKKVRVGVQSCPSPFSGQACPQPSSVFWSLLKNLPFLEHLELIGSNFSSAMPRNEPAIRNSLPPCSRAQSVGDSEVAAIGQLAFLRHLTLAQLPSVLTGSGLVNIGLQCQQLRSLSLANLGMMGKVVYMPALSDMLKHCKRLRDLRLEQPYFSANAQFFQALSQCPSLQRLCLVSRSGTLQPDAVLAFMARCLQVVMCHLFTGESLATCKSLQQSLLRR

SEQ ID NO: 772086 - protein, 271 aa, Homo sapiens
ELKQTLFTPSYGVVPCCTSLEKLLLYFEILDRTREGAILSGQLMVGQSNVPHYQNLRVFYARLAPGYINQEVVRLYLAVLSDRTPQNLHAFLISVPGSFAESGATKNLLDSMARNVVLDALQLPKSWLNGSSLLQHMKFNNPFYFSFSRCTLSGGHLIQQVINGGKDLRSLASLNLSGCVHCLSPDSLLRKAEDDIDSSILETLVASCCNLRHLNLSAAHHHSSEGLGRHLCQLLARLRHLRSLSLPVCSVADSAPRADRAPAQPAMHAVP

SEQ ID NO: 772087 - protein, 567 aa, Homo sapiens
MEAERRPAPGSPSEGLFADGHLILWTLCSVLLPVFITFWCSLQRSRRQLHRRDIFRKSKHGWRDTDLFSQPTYCCVCAQHILQGAFCDCCGLRVDEGCLRKADKRFQCKEIMLKNDTKVLDAMPHHWIRGNVPLCSYCMVCKQQCGCQPKLCDYRCIWCQKTVHDECMKNSLKNEKCDFGEFKNLIIPPSYLTSINQMRKDKKTDYEVLASKLGKQWTPLIILANSRSGTNMGEGLLGEFRILLNPVQVFDVTKTPPIKALQLCTLLPYYSARVLVCGGDGTVGWVLDAVDDMKIKGQEKYIPQVAVLPLGTGNDLSNTLGWGTGYAGEIPVAQVLRNVMEADGIKLDRWKVQVTNKGYYNLRKPKEFTMNNYFSVGPDALMALNFHAHREKAPSLFSSRILNKAVYLFYGTKDCLVQECKDLNKKVELELDGERVALPSLEGIIVLNIGYWGGGCRLWEGMGDETYPLARHDDGLLEVVGVYGSFHCAQIQVKLANPFRIGQAHTVRLILKCSMMPMQVDGEPWAQGPCTVTITHKTHAMMLYFSGEQTDDDISSTSDQEDIKATE

SEQ ID NO: 772088 - protein, 177 aa, Homo sapiens
MEAERRPAPGSPSEGLFADGHLILWTLCSVLLPVFITFWCSLQRSRRQLHRRDIFRKSKHGWRDTDLFSQPTYCCVCAQHILQGAFCDCCGLRVDEGCLRKADKRFQCKEIMLKNDTKVLDAMPHHWIRGNVPLCSYCMVCKQQCGCQPKLCDYRYGLRGHSLSQNAPWESGFHRVV

SEQ ID NO: 772089 - protein, 74 aa, Homo sapiens
MALSPSADLSGLCLLFEPVWLGSLQGVLHPPRPSEEAPGTVLGLPPRPPAAAGAKGPAVPAGPLASSQWLQLSH

SEQ ID NO: 772090 - protein, 314 aa, Homo sapiens
MGLLDSEPGSVLNVVSTALNDTVEFYRWTWSIADKRVENWPLMQSPWPTLSISTLYLLFVWLGPKWMKDREPFQMRLVLIIYNFGMVLLNLFIFRELFMGSYNAGYSYICQSVDYSNNVHEVRIAAALWWYFVSKGVEYLDTVFFILRKKNNQVSFLHVYHHCTMFTLWWIGIKWVAGGQAFFGAQLNSFIHVIMYSYYGLTAFGPWIQKYLWWKRYLTMLQLIQFHVTIGHTALSLYTDCPFPKWMHWALIAYAISFIFLFLNFYIRTYKEPKKPKAGKTAMNGISANGVSKSEKQLMIENGKKQKNGKAKGD

SEQ ID NO: 772091 - protein, 189 aa, Homo sapiens
MPCLLKVADAGCSVGLGKVHCSCHLPNPRVLRHCDILTGVLTLGLDMSCHACLSAGTGLGEELVGLGPGSTCLVNICGCYFPVTGWQVRTTQIHLHSNVLQSSDYVALQQGEGDIHEQVCKMHLMPANGVQPSIALVCPVSVSLSFDTRGQVSLGNSFQFLQFWDSYPSPSTMSIWAHDSSQPIRVHFP

SEQ ID NO: 772092 - protein, 39 aa, Homo sapiens
MLDSFATDEARNQKTCLLFSTSLHSRAIKKSDFVIMLLA

SEQ ID NO: 772093 - protein, 231 aa, Homo sapiens
RLAELNQFHLRGHVTHSPHEIPQILTRDEPISVLIELKKCFPQLFNLILSQWSFPLFLSNAFPQEDAGGAHGELHGGVGWSSQGTSLKMAPPPCSLSELSLLIFSSTPLPPLPASLGFSFGPGVFRAVTAGLEIRMNLGGRVDFDDFVELMTPKLLAETAGMIGVQEMRDAFKEFDTNGDGEITLVELQQAMQRLLGERLTPREISEVVREADVNGDGTVDFEEFVKMMSR

SEQ ID NO: 772094 - protein, 217 aa, Homo sapiens
GEAKRGRKRWQRSAGEDKEAELRQGAGRRGHLETGALRAPPHPSMQFPMGPACIFLRKGIAEKQRERPLGQDEIEELREAFLEFDKDRDGFISCKDLGNLMRTMGYMPTEMELIELGQQIRMNLGGRVDFDDFVELMTPKLLAETAGMIGVQEMRDAFKEFDTNGDGEITLVELQQAMQRLLGERLTPREISEVVREADVNGDGTVDFEEFVKMMSR

SEQ ID NO: 772095 - protein, 483 aa, Homo sapiens
APGPCGPRGLPAPASELSPAPERGARRGVAAAMGKLQSKHAAAARKRRESPEGDSFVASAYASGRKGAEEAERRARDKQELPNGDPKEGPFREDQCPLQVALPAEKAEGREHPGQLLSADDGERAANREGPRGPGGQRLNIDALQCDVSVEEDDRQEWTFTLYDFDNCGKVTREDMSSLMHTIYEVVDASVNHSSGSSKTLRVKLTVSPEPSSKRKEGPPAGQDREPTRCRMEGELAEEPRVADRRLSAHVRRPSTDPQPCSERGPYCVDENTERRNHYLDLAGIENYTSRFGPGSPPVQAKQEPQGRASHLQARSRSQEPDTHAVHHRRSQVLVEHVVPASEPAARALDTQPRPKGPEKQFLKSPKGSGKPPGVPASSKSGKAFSYYLPAVLPPQAPQDGHHLPQPPPPPYGHKRYRQKGREGHSPLKAPHAQPATVEHEVVRDLPPTPAGEGYAVPVIQRHEHHHHHEHHHHHHHHHFHPS

SEQ ID NO: 772096 - protein, 72 aa, Homo sapiens
EDLCNPTPGFPLPAVMGITPPSASTLTWVSLRPHLREHVPGAGGSGTGMCCPKLGICGHGVVHSVFPTVHPV

SEQ ID NO: 772097 - protein, 483 aa, Homo sapiens; identical to SEQ ID NO: 772095

SEQ ID NO: 772098 - protein, 447 aa, Homo sapiens
ALRGSRAAVAAAGVPGPCARCWLEGPLGKAPEDPSPCGVGRVGVGRRRGPGPHVPPQALQCDVSVEEDDRQEWTFTLYDFDNCGKVTREDMSSLMHTIYEVVDASVNHSSGSSKTLRVKLTVSPEPSSKRKEGPPAGQDREPTRCRMEGELAEEPRVADRRLSAHVRRPLSFLLCEEVGAGQDAPRTPAACCRHPVIRGAPPSLCGGQALLCAPSRRPSTDPQPCSERGPYCVDENTERRNHYLDLAGIENYTSRFGPGSPPVQAKQEPQGRASHLQARSRSQEPDTHAVHHRRSQVLVEHVVPASEPAARALDTQPRPKGPEKQFLKSPKGSGKPPGVPASSKSGKAFSYYLPAVLPPQAPQDGHHLPQPPPPPYGHKRYRQKGREGHSPLKAPHAQPATVEHEVVRDLPPTPAGEGYAVPVIQRHEHHHHHEHHHHHHHHHFHPS

SEQ ID NO: 772099 - protein, 142 aa, Homo sapiens
GRKGAEEAERRARDKQVGGGAEAGVALRTRPGAGSGVRAVPGARPRTGETWAAMAARVTGGQESQSLPSLHDVWGSRWGEPLLVSHAEWRVGESEFLVLGWEPCGGSMFRAGGAGRVGGAGPRRPGLGVPGSGNAVPRLDEL

SEQ ID NO: 772100 - protein, 543 aa, Homo sapiens
APGPCGPRGLPAPASELSPAPERGARRGVAAAMGKLQSKHAAAARKRRESPEGDSFVASAYASGRKGAEEAERRARDKQELPNGDPKEGPFREDQCPLQVALPAEKAEGREHPGQLLSADDGERAANREGPRGPGGQRLNIDALQCDVSVEEDDRQEWTFTLYDFDNCGKVTREDMSSLMHTIYEVVDASVNHSSGSSKTLRVKLTVSPEPSSKRKEGPPAGQDREPTRCRMEGELAEEPRVADRRLSAHVRRPSTDPQPCSERGPYCVDENTERRNHYLDLAGIENYTSRFGPGSQLCEKRSSAPRTHSGDKARGVGLCRELWSQAGHPQWPGPFPSGLVAVLTADLANRLASGSPPVQAKQEPQGRASHLQARSRSQEPDTHAVHHRRSQVLVEHVVPASEPAARALDTQPRPKGPEKQFLKSPKGSGKPPGVPASSKSGKAFSYYLPAVLPPQAPQDGHHLPQPPPPPYGHKRYRQKGREGHSPLKAPHAQPATVEHEVVRDLPPTPAGEGYAVPVIQRHEHHHHHEHHHHHHHHHFHPS

SEQ ID NO: 772101 - protein, 419 aa, Homo sapiens
GNRITGHKAGSPQEGLELGKKGSAGSGLELQPRCPLGSAFPSWLEGPLGKAPEDPSPCGVGRVGVGRRRGPGPHVPPQALQCDVSVEEDDRQEWTFTLYDFDNCGKVTREDMSSLMHTIYEVVDASVNHSSGSSKTLRVKLTVSPEPSSKRKEGPPAGQDREPTRCRMEGELAEEPRVADRRLSAHVRRPSTDPQPCSERGPYCVDENTERRNHYLDLAGIENYTSRFGPGSPPVQAKQEPQGRASHLQARSRSQEPDTHAVHHRRSQVLVEHVVPASEPAARALDTQPRPKGPEKQFLKSPKGSGKPPGVPASSKSGKAFSYYLPAVLPPQAPQDGHHLPQPPPPPYGHKRYRQKGREGHSPLKAPHAQPATVEHEVVRDLPPTPAGEGYAVPVIQRHEHHHHHEHHHHHHHHHFHPS

SEQ ID NO: 772102 - protein, 331 aa, Homo sapiens
MSGVIGEGVQLYDLTLREEYQEDMSSLMHTIYEVVDASVNHSSGSSKTLRVKLTVSPEPSSKRKEGPPAGQDREPTRCRMEGELAEEPRVADRRLSAHVRRPSTDPQPCSERGPYCVDENTERRNHYLDLAGIENYTSRFGPGSPPVQAKQEPQGRASHLQARSRSQEPDTHAVHHRRSQVLVEHVVPASEPAARALDTQPRPKGPEKQFLKSPKGSGKPPGVPASSKSGKAFSYYLPAVLPPQAPQDGHHLPQPPPPPYGHKRYRQKGREGHSPLKAPHAQPATVEHEVVRDLPPTPAGEGYAVPVIQRHEHHHHHEHHHHHHHHHFHPS

SEQ ID NO: 772103 - protein, 146 aa, Homo sapiens
SNMAAPSGGVNCEEFAEFQELLKVMRTIDDRIVHELNTTVPTASFAGKIDASQTCKQLYESLMAAHASRDRVIKNCIAQTSAVVKNLREEREKNLDDLTLLKQLRKEQTKLKWMQSELNVEEVVNDRSWKVFNERCRIHFKPPKNE

SEQ ID NO: 772104 - protein, 140 aa, Homo sapiens
KELVSVMDLSLAKELLKVMRTIDDRIVHELNTTVPTASFAGKIDASQTCKQLYESLMAAHASRDRVIKNCIAQTSAVVKNLREEREKNLDDLTLLKQLRKEQTKLKWMQSELNVEEVVNDRSWKVFNERCRIHFKPPKNE

SEQ ID NO: 772105 - protein, 146 aa, Homo sapiens; identical to SEQ ID NO: 772103

SEQ ID NO: 772106 - protein, 829 aa, Homo sapiens
MKKTPVFLESLVTNMLRLRAICPFSWRVFQFRPISCEPLIIQMNKCTDEEQMFGFIERNKAILSEKQVGCAFDMLWKLQKQKTSLLTTNKFKLMNDDTLVNVLYVTQQFAGEAHDPLVEALVTEAWRRLERFDIKLLSEFSSCLADQHLYFSPLMGKIADIVHRNLETTQDLSSLSVLMVNISSLISRHFQQQLVNKTELLFDTIDSSEVNVAKSIAKFLRNVRYRYQPLLERCNNVFLSNVDHLDLDSISKILSVYKFLQFNSFEFIIMAKKKLTEMIPLCNHPASFVKLFVALGPIAGPEEKKQLKSTMLLMSEDLTGEQALAVLGAMGDMESRNSCLIKRVTSVLHKHLDGYKPLELLKITQELTFLHFQRKEFFAKLRELLLSYLKNSFIPTEVSVLVRAISLLPSPHLDEVGISRIEAVLPQCDLNNLSSFATSVLRWIQHDHVYLDNMTAKQLKLLQKLDHYGRQRLQHSNSLDLLRKELKSLKGNTFPESLLEEMIATLQHFMDDINYINVGEIASFISSTDYLSTLLLDRIASVAVQQIEKIHPFTIPAIIRPFSVLNYDPPQRDEFLGTCVQHLNSYLGILDPFILVFLGFSLATLEYFPEDLLKAIFNIKFLARLDSQLEILSPSRSARVQFHLMELNRSVCLECPEFQIPWFHDRFCQQYNKGIGGMDGTQQQIFKMLAEVLGGINCVKASVLTPYYHKVDFECILDKRKKPLPYGSHNIALGQLPEMPWESNIEIVGSRLPPGAERIALEFLDSKALCRNIPHMKGKSAMKKRHLEILGYRVIQISQFEWNSMALSTKDARMDYLRECIFGEVKSCL

SEQ ID NO: 772107 - protein, 675 aa, Homo sapiens
MGKIADIVHRNLETTQDLSSLSVLMVNISSLISRHFQQQLVNKTELLFDTIDSSEVNVAKSIAKFLRNVRYRYQPLLERCNNVFLSNVDHLDLDSISKILSVYKFLQFNSFEFIIMAKKKLTEMIPLCNHPASFVKLFVALGPIAGPEEKKQLKSTMLLMSEDLTGEQALAVLGAMGDMESRNSCLIKRVTSVLHKHLDGYKPLELLKITQELTFLHFQRKEFFAKLRELLLSYLKNSFIPTEVSVLVRAISLLPSPHLDEVGISRIEAVLPQCDLNNLSSFATSVLRWIQHDHVYLDNMTAKQLKLLQKLDHYGRQRLQHSNSLDLLRKELKSLKGNTFPESLLEEMIATLQHFMDDINYINVGEIASFISSTDYLSTLLLDRIASVAVQQIEKIHPFTIPAIIRPFSVLNYDPPQRDEFLGTCVQHLNSYLGILDPFILVFLGFSLATLEYFPEDLLKAIFNIKFLARLDSQLEILSPSRSARVQFHLMELNRSVCLECPEFQIPWFHDRFCQQYNKGIGGMDGTQQQIFKMLAEVLGGINCVKASVLTPYYHKVDFECILDKRKKPLPYGSHNIALGQLPEMPWESNIEIVGSRLPPGAERIALEFLDSKALCRNIPHMKGKSAMKKRHLEILGYRVIQISQFEWNSMALSTKDARMDYLRECIFGEVKSCL

SEQ ID NO: 772108 - protein, 824 aa, Homo sapiens
MKKTPVFLESLVTNMLRLRAICPFSWRVFQFRPISCEPLIIQMNKCTDEEQMFGFIERNKAILSEKQVGCAFDMLWKLQKQKTSLLKNAEYVRDHPQFLTLHNLATNKFKLMNDDTLVNVLYVTQQFDIKLLSEFSSCLADQHLYFSPLMGKIADIVHRNLETTQDLSSLSVLMVNISSLISRHFQQQLVNKTELLFDTIDSSEVNVAKSIAKFLRNVRYRYQPLLERCNNVFLSNVDHLDLDSISKILSVYKFLQFNSFEFIIMAKKKLTEMIPLCNHPASFVKLFVALGPIAGPEEKKQLKSTMLLMSEDLTGEQALAVLGAMGDMESRNSCLIKRVTSVLHKHLDGYKPLELLKITQELTFLHFQRKEFFAKLRELLLSYLKNSFIPTEVSVLVRAISLLPSPHLDEVGISRIEAVLPQCDLNNLSSFATSVLRWIQHDHVYLDNMTAKQLKLLQKLDHYGRQRLQHSNSLDLLRKELKSLKGNTFPESLLEEMIATLQHFMDDINYINVGEIASFISSTDYLSTLLLDRIASVAVQQIEKIHPFTIPAIIRPFSVLNYDPPQRDEFLGTCVQHLNSYLGILDPFILVFLGFSLATLEYFPEDLLKAIFNIKFLARLDSQLEILSPSRSARVQFHLMELNRSVCLECPEFQIPWFHDRFCQQYNKGIGGMDGTQQQIFKMLAEVLGGINCVKASVLTPYYHKVDFECILDKRKKPLPYGSHNIALGQLPEMPWESNIEIVGSRLPPGAERIALEFLDSKALCRNIPHMKGKSAMKKRHLEILGYRVIQISQFEWNSMALSTKDARMDYLRECIFGEVKSCL

SEQ ID NO: 772109 - protein, 298 aa, Homo sapiens
LIYIFEDLITVSAEGCSTIHPFTIPAIIRPFSVLNYDPPQRDEFLGTCVQHLNSYLGILDPFILVFLGFSLATLEYFPEDLLKAIFNIKFLARLDSQLEILSPSRSARVQFHLMELNRSVCLECPEFQIPWFHDRFCQQYNKGIGGMDGTQQQIFKMLAEVLGGINCVKASVLTPYYHKVDFECILDKRKKPLPYGSHNIALGQLPEMPWESNIEIVGSRLPPGAERIALEFLDSKALCRNIPHMKGKSAMKKRHLEILGYRVIQISQFEWNSMALSTKDARMDYLRECIFGEVKSCL

SEQ ID NO: 772110 - protein, 324 aa, Homo sapiens
MKKTPVFLESLVTNMLRLRAICPFSWRVFQFRPISCEPLIIQMNKCTDEEQMFGFIERNKAILSEKQVGCAFDMLWKLQKQKTSLLKNAEYVRDHPQFLTLHNLATNKFKLMNDDTLVNVLYVTQQFAGEAHDPLVEALVTEAWRRLERFDIKLLSEFSSCLADQHLYFSPLMGKIADIVHRNLETTQDLSSLSVLMVNISSLISRHFQQQLVNKTELLFDTIDSSEVNVAKSIAKFLRNVRYRYQPLLERCNNVFLSNVDHLDLDSISKILSVYKFLQFNSFEFIIMAKKKLTEMIPLCNHPASFVKLFVALGPIAGPEEKKQ

SEQ ID NO: 772111 - protein, 290 aa, Homo sapiens
MKKTPVFLESLVTNMLRLRAICPFSWRVFQFRPISCEPLIIQMNKCTDEEQMFGFIERNKAILSEKQVGCAFDMLWKLQKQKTSLLKNAEYVRDHPQFLTLHNLATNKFKLMNDDTLVNVLYVTQQFAGEAHDPLVEALVTEAWRRLERFDIKLLSEFSSCLADQHLYFSPLMGKIADIVHRNLETTQDLSSLGLVCMANSISLTLMRTFHNNCWTKRDTHLWTHNISWARRNKHSESPRHVRYRYQLVPKSITDPQPVDPWQGLNAAPRRTCNTQHNTQARTPQPGNPR

SEQ ID NO: 772112 - protein, 847 aa, Homo sapiens [sequence omitted]

SEQ ID NO: 772113 - protein, 847 aa, Homo sapiens [sequence omitted]

SEQ ID NO: 772114 - protein, 804 aa, Homo sapiens
MKKTPVFLESLVTNMLRLRAICPFSWRVFQFRPISCEPLIIQMNKCTDEEQMFGFIERNKAILSEKQVGCAFDMLWKLQKQKTSLLKNAEYVRDHPQFLTLHNLATNKFKLMNDDTLVNVLYVTQQFAGEAHDPLVEALVTEAWRRLERFDIKLLSEFSSCLADQHLYFSPLMGKIADIVHRNLETTQDLSSLSVLMVNISSLISRHFQQQLVNKTELLFDTIDSSEVNVAKSIAKFLRNVRYRYQPLLERCNNVFLSNVDHLDLDSISKILSVYKFLQFNSFEFIIMAKKKLTEMIPLCNHPASFVKLFVALGPIAGPEEKKQLKSTMLLMSEDLTGEQALAVLGAMGDMESRNSCLIKRVTSVLHKHLDGYKPLELLKITQELTFLHFQRKEFFAKLRELLLSYLKNSFIPTEVSVLVRAISLLPSPHLDEVGISRIEAVLPQCDLNNLSSFATSVLRWIQHDHVYLDNMTAKQLKLLQKLDHYGRQRLQHSNSLDLLRKELKSLKGNTFPESLLEEMIATLQHFMDDINYINVGEIASFISSTDYLSTLLLDRIASVAVQQIEKIHPFTIPAIIRPFSVLNYDPPQRDEFLGTCVQHLNSYLGILDPFILVFLGFSLATLEYFPEDLLKAIFNIKFLARLDSQLESIGGMDGTQQQIFKMLAEVLGGINCVKASVLTPYYHKVDFECILDKRKKPLPYGSHNIALGQLPEMPWESNIEIVGSRLPPGAERIALEFLDSKALCRNIPHMKGKSAMKKRHLEILGYRVIQISQFEWNSMALSTKDARMDYLRECIFGEVKSCL

SEQ ID NO: 772115 - protein, 744 aa, Homo sapiens
MKKTPVFLESLVTNMLRLRAICPFSWRVFQFRPISCEPLIIQMNKCTDEEQMFGFIERNKAILSEKQVGCAFDMLWKLQKQKTSLLKNAEYVRDHPQFLTLHNLATNKFKLMNDDTLVNVLYVTQQFAGEAHDPLVEALVTEAWRRLERFDIKLLSEFSSCLADQHLYFSPLMGKIADIVHRNLETTQDLSSLSVLMVNISSLISRHFQQQLVNKTELLFDTIDSSEVNVAKSIAKFLRNVRYRYQPLLERCNNVFLSNVDHLDLDSISKILSVYKFLQFNSFEFIIMAKKKLTEMIPLCNHPASFVKLFVALGPIAGPEEKKQLKSTMLLMSEDLTGEQALAVLGAMGDMESRNSCLIKRVTSVLHKHLDGYKPLELLKITQELTFLHFQRKEFFAKLRELLLSYLKNSFIPTEVSVLVRAISLLPSPHLDEVGISRIEAVLPQCDLNNLSSFATSVLRWIQHDHVYLDNMTAKQLKLLQKLDHYGRQRLQHSNSLDLLRKELKSLKGNTFPESLLEEMIATLQHFMDDINYINVGEIASFISSTDYLSTLLLDRIASVAVQQIEKIHPFTIPAIIRPFSVLNYDPPQRDEFLGTCVQHLNSYLGILDPFILVFLGFSLATLEYFPEDLLKAIFNIKFLARLDSQLEILSPSRSARVQFHLMELNRSVCLECPEFQIPWFHDRFCQQYNKGIGGMDGTQQQIFKMLAEVLGGINCVKASVLTPYYHKVGKLLGRLLVTFRKSN

SEQ ID NO: 772116 - protein, 374 aa, Homo sapiens
MSGESMNFSDVFDSSEDYFVSVNTSYYSVDSEMLLCSLQEVRQFSRLFVPIAYSLICVFGLLGNILVVITFAFYKKARSMTDVYLLNMAIADILFVLTLPFWAVSHATGAWVFSNATCKLLKGIYAINFNCGMLLLTCISMDRYIAIVQATKSFRLRSRTLPRSKIICLVVWGLSVIISSSTFVFNQKYNTQGSDVCEPKYQTVSEPIRWKLLMLGLELLFGFFIPLMFMIFCYTFIVKTLVQAQNSKRHKAIRVIIAVVLVFLACQIPHNMVLLVTAANLGKMNRSCQSEKLIGYTKTVTEVLAFLHCCLNPVLYAFIGQKFRNYFLKILKDLWCVRRKYKSSGFSCAGRYSENISRQTSETADNDNASSFTM

SEQ ID NO: 772117 - protein, 374 aa, Homo sapiens; identical to SEQ ID NO: 772116

SEQ ID NO: 772118 - protein, 503 aa, Homo sapiens
VGVGVDVGMGVAVGVCGRGHGCGGLTPFALFLPSADGDFAVTHLTKAHLFHDGRVQWTPPAIYKSSCSIDVTFFPFDQQNCTMKFGSWTYDKAKIDLVNMHSRVDQLDFWESGEWVIVDAVGTYNTRKYECCAEIYPDITYAFVIRRLPLFYTINLIIPCLLISCLTVLVFYLPSECGEKITLCISVLLSLTVFLLLITEIIPSTSLVIPLIGEYLLFTMIFVTLSIVITVFVLNVHHRSPRTHTMPTWVRRVFLDIVPRLLLMKRPSVVKDNCRRLIESMHKMASAPRFWPEPEGEPPATSGTQSLHPPSPSFCVPLDVPAEPGPSCKSPSDQLPPQQPLEAEKASPHPSPGPCRPPHGTQAPGLAKARSLSVQHMSSPGEAVEGGVRCRSRSIQYCVPRDDAAPEADGQAAGALASRNTHSAELPPPDQPSPCKCTCKKEPSSVSPSATVKTRSTKAPPPHLPLSPALTRAVEGVQYIADHLKAEDTDFSVSPAHGCVGRL

SEQ ID NO: 772119 - protein, 627 aa, Homo sapiens
MELGGPGAPRLLPPLLLLLGTGLLRASSHVETRAHAEERLLKKLFSGYNKWSRPVANISDVVLVRFGLSIAQLIDVDEKNQMMTTNVWVKQEWHDYKLRWDPADYENVTSIRIPSELIWRPDIVLYNNADGDFAVTHLTKAHLFHDGRVQWTPPAIYKSSCSIDVTFFPFDQQNCTMKFGSWTYDKAKIDLVNMHSRVDQLDFWESGEWVIVDAVGTYNTRKYECCAEIYPDITYAFVIRRLPLFYTINLIIPCLLISCLTVLVFYLPSECGEKITLCISVLLSLTVFLLLITEIIPSTSLVIPLIGEYLLFTMIFVTLSIVITVFVLNVHHRSPRTHTMPTWVRRVFLDIVPRLLLMKRPSVVKDNCRRLIESMHKMASAPRFWPEPEGEPPATSGTQSLHPPSPSFCVPLDVPAEPGPSCKSPSDQLPPQQPLEAEKASPHPSPGPCRPPHGTQAPGLAKARSLSVQHMSSPGEAVEGGVRCRSRSIQYCVPRDDAAPEADGQAAGALASRNTHSAELPPPDQPSPCKCTCKKEPSSVSPSATVKTRSTKAPPPHLPLSPALTRAVEGVQYIADHLKAEDTDFSVKEDWKYVAMVIDRIFLWMFIIVCLLGTVGLFLPPWLAGMI

SEQ ID NO: 772120 - protein, 184 aa, Homo sapiens
RRGPEGCPRWRRPGRAGVTASVLAGEGGLEVRGHGHRPHLPLDVHHRLPAGDGGPLPAALAGWHDLGRDREPAWPGAAVHGASIHAAGLGPGWLLPGLCGATRLPNFPSCSVSAVRRPWTGTRPLGRPSVELLPVGLWPQEAVAWSRGGGRRLLPAGLGLSPVQESPELPCRWNSLLPVSQQIW

SEQ ID NO: 772121 - protein, 627 aa, Homo sapiens; identical to SEQ ID NO: 772119

SEQ ID NO: 772122 - protein, 145 aa, Homo sapiens
GGKGSCEELKEVDVLGRGLGQPGELLDSSRLLSRLHLSPGLPLPAASSHVETRAHAEERLLKKLFSGYNKWSRPVANISDVVLVRFGLSIAQLIDVVGEGVASCTVTEVALQGAQGSGWAEGTQPSTLPVAVSVRPGLVRQNDSH

SEQ ID NO: 772123 - protein, 116 aa, Homo sapiens
MMTTNVWVKQVSGRALPCPTPALPHTPHPAALSWPCPTLALLRTQVLCLRSLGEQSFVELVPRGENREAHAGPGSPPAQALRGGQEHPAPASLETRTLPSRRRARALAGGQGSTGA

SEQ ID NO: 772124 - protein, 161 aa, Homo sapiens
MRGSCERSGEDEEQKEEAMVACGRLSGVPEAEQGPEANWDSDLETEGTDGLGELVRDTLYLRSCRAHSVVPISCFLRQGSAQELNLRHRGLGPQGARALASSLSSNPYVKRLDLRDNGLCGAGAEALAGALSKSSSIHGRCWVWGRWAGVSSFSSGMCLHR

SEQ ID NO: 772125 - protein, 36 aa, Homo sapiens
MMFLGTGSVCGSGASRQALLLTPWKGLPPGAVLTKA

SEQ ID NO: 772126 - protein, 61 aa, Homo sapiens
ISVDPLPLVGPAESLGTAASLLKKENKKPKTLCGRRDKAPWVRREGTRRSAEPRTRVAAAE

SEQ ID NO: 772127 - protein, 487 aa, Homo sapiens
SGRLELESRTTASPTLPRLFTPRHPQTPAQAGAHKPASAPAVLARTRRAPSEPGSAPSSLRPSSQPQSPPGRVGVKMKAARFVLRSAGSLNGAGLVPREVEHFSRYSPSPLSMKQLLDFGSENACERTSFAFLRQELPVRLANILKEIDILPTQLVNTSSVQLVKSWYIQSLMDLVEFHEKSPDDQKALSDFVDTLIKVRNRHHNVVPTMAQGIIEYKDACTVDPVTNQNLQYFLDRFYMNRISTRMLMNQHILIFSDSQTGNPSHIGSIDPNCDVVAVVQDAFECSRMLCDQYYLSSPELKLTQVNGKFPDQPIHIVYVPSHLHHMLFELFKNAMRATVEHQENQPSLTPIEVIVVLGKEDLTIKISDRGGGVPLRIIDRLFSYTYSTAPTPVMDNSRNAPLAGFGYGLPISRLYAKYFQGDLNLYSLSGYGTDAIIYLKALSSESIEKLPVFNKSAFKHYQMSSEADDWCIPSREPKNLAKEVAM

SEQ ID NO: 772128 - protein, 394 aa, Homo sapiens
SGRLELESRTTASPTLPRLFTPRHPQTPAQAGAHKPASAPAVLARTRRAPSEPGSAPSSLRPSSQPQSPPGRVGVKMKAARFVLRSAGSLNGAGLVPREVEHFSRYSPSPLSMKQLLDFGSENACERTSFAFLRQELPVRLANILKEIDILPTQLVNTSSVQLVKSWYIQSLMDLVEFHEKSPDDQKALSDFVDTLIKVRNRHHNVVPTMAQGIIEYKDACTVDPVTNQNLQYFLDRFYMNRISTRMLMNQHILIFSDSQTGNPSHIGSIDPNCDVVAVVQDAFECSRMLCDQYYLSSPELKLTQVNGKFPDQPIHIVYVPSHLHHMLFELFKNAMRATVEHQENQPSLTPIEVIVVLGKEDLTIKVTILCFPFGCLLRELNRVNSNKAVCFLQ

SEQ ID NO: 772129 - protein, 152 aa, Homo sapiens [sequence omitted]

SEQ ID NO: 772130 - protein, 487 aa, Homo sapiens; identical to SEQ ID NO: 772127

SEQ ID NO: 772131 - protein, 487 aa, Homo sapiens; identical to SEQ ID NO: 772127

SEQ ID NO: 772132 - protein, 167 aa, Homo sapiens
SGRLELESRTTASPTLPRLFTPRHPQTPAQAGAHKPASAPAVLARTRRAPSEPGSAPSSLRPSSQPQSPPGRVGVKMKAARFVLRSAGSLNGAGLVPREVEHFSRYSPSPLSMKQLLDFGSENACERTSFAFLRQELPVRLANILKEIDILPTQLVNTSSVQLVKSW

SEQ ID NO: 772133 - protein, 487 aa, Homo sapiens; identical to SEQ ID NO: 772127

SEQ ID NO: 772134 - protein, 315 aa, Homo sapiens [sequence omitted]

SEQ ID NO: 772135 - protein, 487 aa, Homo sapiens; identical to SEQ ID NO: 772127

SEQ ID NO: 772136 - protein, 334 aa, Homo sapiens
SGRLELESRTTASPTLPRLFTPRHPQTPAQAGAHKPASAPAVLARTRRAPSEPGSAPSSLRPSSQPQSPPGRVGVKMKAARFVLRSAGSLNGAGLVPREVEHFSRYSPSPLSMKQLLDFGSENACERTSFAFLRQELPVRLANILKEIDILPTQLVNTSSVQLVKSWYIQSLMDLVEFHEKSPDDQKALSDFVDTLIKVRNRHHNVVPTMAQGIIEYKDACTVDPVTNQNLQYFLDRFYMNRISTRMLMNQHILIFSDSQTGNPSHIGSIDPNCDVVAVVQDAFECSRMLCDQYYLSSPELKLTQVNGKFPDQPIHIVYVPSHLHHMLFELFKV

SEQ ID NO: 772137 - protein, 371 aa, Homo sapiens
LRGVPIRQPDSLKYPFSNHSTNASMSLLCRNKGCGQHFDPNTNLPDSCCHHPGVPIFHDALKGWSCCRKRTVDFSEFLNIKGCTMGPHCAEKLPEAPQPEGPATSSSLQEQKPLNVIPKSAETLRRERPKSELPLKLLPLNISQALEMALEQKELDQEPGAGLDSLIRTGSSCQNPGCDAVYQGPESDATPCTYHPGAPRFHEGMKSWSCCGIQTLDFGAFLAQPGCRVGRHDWGKQLPASCRHDWHQTDSLVVVTVYGQIPLPAFNWVKASQTELHVHIVFDGNRVFQAQMKLWGVINVEQSSVFLMPSRVEISLVKADPGSWAQLEHPDALAKKARAGVVLEMDEEESDDSDDDLSWTEEEEEEEAMGE

SEQ ID NO: 772138 - protein, 286 aa, Homo sapiens
MSLLCRNKGCGQHFDPNTNLPDSCCHHPGVPIFHDALKGWSCCRKRTVDFSEFLNIKGCTMGPHCAEKLPEAPQPEGPATSSSLQEQKPLNVIPKSAETLRRERPKSELPLKLLPLNISQALEMALEQKELDQEPGAGLDSLIRTGSSCQNPGCDAVYQGPESDATPCTYHPGAPRFHEGMKSWSCCGIQTLDFGAFLAQPGCRVGRHDWGKQLPASCRHDWHQTDSLVVVTVYGQIPLPAFNWVKASQTELHVHIVFDGNRVFQAQMKLWGVSEDQGTQEWEADG

SEQ ID NO: 772139 - protein, 180 aa, Homo sapiens
MSLLCRNKGCGQHFDPNTNLPDSCCHHPGVPIFHDALKGWSCCRKRTVDFSEFLNIKGCTMGPHCAEKLPEAPQPEGPATSSSLQEQKPLNVIPKSAETLRRERPKSELPLKLLPLNISQALEMALEQKELDQEPGAGLDSLIRTGSSCQNPGCDAVYQGPESDATPCTYHPGAPRFHEG

SEQ ID NO: 772140 - protein, 224 aa, Homo sapiens
MALEQKELDQEPGAGLDSLIRTGSSCQNPGCDAVYQGPESDATPCTYHPGAPRFHEGMKSWSCCGIQTLDFGAFLAQPGCRVGRHDWGKQLPASCRHDWHQTDSLVVVTVYGQIPLPAFNWVKASQTELHVHIVFDGNRVFQAQMKLWGVINVEQSSVFLMPSRVEISLVKADPGSWAQLEHPDALAKKARAGVVLEMDEEESDDSDDDLSWTEEEEEEEAMGE

SEQ ID NO: 772141 - protein, 237 aa, Homo sapiens [sequence omitted]

SEQ ID NO: 772142 - protein, 204 aa, Homo sapiens [sequence omitted]

SEQ ID NO: 772143 - protein, 183 aa, Homo sapiens
ETGSRCVAQAGLELLGSSDSSASASQSAGITDVSHRARPHFCCLDETAWSCCPKNWKSFSSNCYFISTESASWQDSEKDCARMEAHLLVINTQEEQDFIFQNLQEESAYFVGLSDPEGQRHWQWVDQTPYNESSTFWHPREPSDPNERCVVLNFRKSPKRWGWNDVNCLGPQRSVCEMMKIHL

SEQ ID NO: 772144 - protein, 147 aa, Homo sapiens
MTSEITYAEVRFKNEFKSSGINTASSAETAWSCCPKNWKSFSSNCYFISTESASWQDSEKDCARMEAHLLVINTQEEQDFIFQNLQEESAYFVGLSDPEGQRHWQWVDQTPYNESSTFWHPREPSDPNERCVVLNFRKSPEMMKIHL

SEQ ID NO: 772145 - protein, 83 aa, Homo sapiens
DMLRGLRSCLRIKVPLTFSPKYREALSLEFPNLIEKTSFQKKQNCLPPLSEISSSSEKKTEEGNYAWMDFSQDDACFSGSFKF

SEQ ID NO: 772146 - protein, 197 aa, Homo sapiens
MQRWKAAALASVLCSSVLSIWMCREGLLLSHRLGPALVPLHRLPRTLDARIARLAQYRALLQGAPDAMELRELTPWAGRPPGPRRRAGPRRRRARARLGARPCGLRELEVRVSELGLGYASDETVLFRYCAGACEAAARVYDLGLRRLRQRRRLRRERVRAQPCCRPTAYEDEVSFLDAHSRYHTVHELSARECACV

SEQ ID NO: 772147 - protein, 122 aa, Homo sapiens
MPPASIFKNLVITYNRTYESKEEARWRLSVFVNNMVRAQKIQALDRGTAQYGVTKFSDLTEEEFRTIYLNTLLRKEPGNKMKQAKSVGDLAPPEWDWRSKGAVTKVKDQGTGGIDKHRVRSS

SEQ ID NO: 772148 - protein, 304 aa, Homo sapiens
MPPASIFKNLVITYNRTYESKEEARWRLSVFVNNMVRAQKIQALDRGTAQYGVTKFSDLTEEEFRTIYLNTLLRKEPGNKMKQAKSVGDLAPPEWDWRSKGAVTKVKDQGMCGSCWAFSVTGNVEGQWFLNQGTLLSLSEQELLDCDKMDKACMGGLPSNAYSAIKNLGGLETEDDYSYQGHMQSCNFSAEKAKVYINDSVELSQNEQKLAAWLAKRGPISVAINAFGMQFYRHGISRPLRPLCSPWLIDHAVLLVGYGNRSDVPFWAIKNSWGTDWGEKGYYYLHRGSGACGVNTMASSAVVD

SEQ ID NO: 772149 - protein, 214 aa, Homo sapiens
GRGLDTCQAGAAATLISTQVPSWGPLFSPPPRELAMVCHAQAPALLSLSEQELLDCDKMDKACMGGLPSNAYSAIKNLGGLETEDDYSYQGHMQSCNFSAEKAKVYINDSVELSQNEQKLAAWLAKRGPISVAINAFGMQFYRHGISRPLRPLCSPWLIDHAVLLVGYGNRSDVPFWAIKNSWGTDWGEKGYYYLHRGSGACGVNTMASSAVVD

SEQ ID NO: 772150 - protein, 288 aa, Homo sapiens
MPPASIFKNLVITYNRTYESKEEARWRLSVFVNNMVRAQKIQALDRGTAQYGVTKFSDLTEEEFRTIYLNTLLRKEPGNKMKQAKSVGDLAPPEWDWRSKGAVTKVKDQGMCGSCWAFSVTGNVEGQWFLNQGTLLSLSEQELLDCDKMDKACMGGLPSNAYSAIKNLGGLETEDDYSYQGHMQSCNFSAEKAKVYINDSVELSQNEQKLAAWLAKRGPISVAINAFGMQFYRHGISRPLRPLCSPWLIDHAVLLVGYGNREFRCLSCIQPGHSEGWDHSISGPLEGK

SEQ ID NO: 772151 - protein, 304 aa, Homo sapiens; identical to SEQ ID NO: 772148

SEQ ID NO: 772152 - protein, 330 aa, Homo sapiens
MPPASIFKNLVITYNRTYESKEEARWRLSVFVNNMVRAQKIQALDRGTAQYGVTKFSDLTEEEFRTIYLNTLLRKEPGNKMKQAKSVGDLAPPEWDWRSKGAVTKVKDQGMCGSCWAFSVTGNVEGQWFLNQGTLLSLSEQGEHLALLLCPQPTPQEGFLGPAFCLLELLDCDKMDKACMGGLPSNAYSAIKNLGGLETEDDYSYQGHMQSCNFSAEKAKVYINDSVELSQNEQKLAAWLAKRGPISVAINAFGMQFYRHGISRPLRPLCSPWLIDHAVLLVGYGNRSDVPFWAIKNSWGTDWGEKGYYYLHRGSGACGVNTMASSAVVD

SEQ ID NO: 772153 - protein, 172 aa, Homo sapiens
MPPASIFKNLVITYNRTYESKEEARWRLSVFVNNMVRAQKIQALDRGTAQYGVTKFSDLTEEEFRTIYLNTLLRKEPGNKMKQAKSVGDLAPPEWDWRSKGAVTKVKDQGMCGSCWAFSVTGNVEGQWFLNQGTLLSLSEQGEHLALLLCPQPSPSGGLLGTSLLSPRALGL

SEQ ID NO: 772154 - protein, 304 aa, Homo sapiens; identical to SEQ ID NO: 772148

SEQ ID NO: 772155 - protein, 116 aa, Homo sapiens
PDLKAGTPICSHPFHLWEGGSAGQEMCFSCPWSPLNKPMSVYPHPARVPGVDFLPPQTPKATGGCSLHRFRPGLGTSSGIAKLPSYSIAKTTAPRGLASSSNRQVLTAPPGAQGSQ

SEQ ID NO: 772156 - protein, 594 aa, Homo sapiens
MAGEENFKEELRSQDASRNLNQHEVAGHPHSWSLEMLLRRLRAVHTKQDDKFANLLDAVGEFGTFQQRLVALTFIPSIMSAFFMFADHFVFTAQKPYCNTSWILAVGPHLSKAEQLNLTIPQAPNGSFLTCFMYLPVPWNLDSTIQFGLNDTDTCQDGWIYPDAKKRSLINEFDLVCGMETKKDTAQIMFMAGLPIGSLIFRLITDKMGRYPAILLSLLGLIIFGFGTAFMNSFHLYLFFRFGISQSVVGYAISSISLATEWLVGEHRAHAIILGHCFFAVWAMLLTGIAYGLPHWQLLFLVGGILVIPFISYIWILPESPRWLMMKGKVKEAKQVLCYAASVNKKTIPSNLLDELQLPRKKVTRASVLDFCKNRQLCKVTLVMSCVWFTVSYTYFTLSLRMRELGVSVHFRHVVPSIMEVPARLCCIFLLQQIGRKWSLAVTLLQAIIWCLLLLFLPEGEDGLRLKWPRCPATELKSMTILVLMLREFSLAATVTVFFLYTAELLPTVLRATGLGLVSLASVAGAILSLTIISQTPSLLPIFLCCVLAIVAFSLSSLLPETRDQPLSESLNHSSQIRNKVKDMKTKETSSDDV

SEQ ID NO: 772157 - protein, 124 aa, Homo sapiens
QVSVLISLLRSYPDPCCSASVFIPGSVCTRTCLLASSRFTVSYTYFTLSLRMRELGVSVHFRHVVPSIMEVPARLCCIFLLQQIGRKWSLAVTLLQAIIWCLLLLFLPEGTAHPSPVACPQPSC

SEQ ID NO: 772158 - protein, 111 aa, Homo sapiens
QSQCQHHPLAACPHCWILGWNSTRRDSQPQSPHWGEKGPGPGHCHLPPTPVHRDHSEKSLGHVAAAGAPRCKGEDSPRKGWASAQTGLPEKAGDQVPGGQDSALVGPEDRG

SEQ ID NO: 772159 - protein, 148 aa, Homo sapiens
MHITPCLQHRALLAATDTQATPWSAPHVGVSRASQTHVSSTHPANHTHPFSANGTPLLTPEPYMTSGPSPSPRSVPWPPAPAEGQHWPRVPALCAWKPLPLRVPNLPSVPGLARGQCCPGRKRKPRSRPTWPWLVSPLGGVLQPSAWC

SEQ ID NO: 772160 - protein, 289 aa, Homo sapiens
MWNATPSEEPGFNLTLADLDWDASPGNDSLGDELLQLFPAPLLAGVTATCVALFVVGIAGNLLTMLVVSRFRELRTTTNLYLSSMAFSDLLIFLCMPLDLVRLWQYRPWNFGDLLCKLFQFVSESCTYATVLTITALSVERYFAICFPLRAKVVVTKGRVKLVIFVIWAVAFCSAGPIFVLVGVEHENGTDPWDTNECRPTEFAVRSGLLTVMVWVSSIFFFLPVFCLTVLYSLIGRKLWRRRRGDAVVGASLRDQNHKQTVKMLGGSQRALRLSLAGPILSLCLLPSL

SEQ ID NO: 772161 - protein, 366 aa, Homo sapiens
MWNATPSEEPGFNLTLADLDWDASPGNDSLGDELLQLFPAPLLAGVTATCVALFVVGIAGNLLTMLVVSRFRELRTTTNLYLSSMAFSDLLIFLCMPLDLVRLWQYRPWNFGDLLCKLFQFVSESCTYATVLTITALSVERYFAICFPLRAKVVVTKGRVKLVIFVIWAVAFCSAGPIFVLVGVEHENGTDPWDTNECRPTEFAVRSGLLTVMVWVSSIFFFLPVFCLTVLYSLIGRKLWRRRRGDAVVGASLRDQNHKQTVKMLAVVVFAFILCWLPFHVGRYLFSKSFEPGSLEIAQISQYCNLVSFVLFYLSAAINPILYNIMSKKYRVAVFRLLGFEPFSQRKLSTLKDESSRAWTESSINT

SEQ ID NO: 772162 - protein, 67 aa, Homo sapiens
GGPPPKKSAPSAVVRSNNWMRGQGPISCGRENYGGPTRRRPISSWRNDHMSLRDDGYATKERNHPSS

SEQ ID NO: 772163 - protein, 37 aa, Homo sapiens
GRLSSRSERAALRSSAHWSRPVSPGPSRGQTRGVASR

SEQ ID NO: 772164 - protein, 147 aa, Homo sapiens
MCTPIRGLLMALAVMFGTAMAFAPIPRITWEHREVHLVQFHEPDIYNYSALLLSEDKDTLYIGAREAVFAVNALNISEKQHEVYRKGLRKTRKTQMVQKTGETKHEQSGSTTSRGAAGNQEAEYGYVSGDQGIQAGLVTPEHNILNT

SEQ ID NO: 772165 - protein, 541 aa, Homo sapiens
MNCRELPLTLWVLISVSTAESCTSRPHITVVEGEPFYLKHCSCSLAHEIETTTKSWYKSSGSQEHVELNPRSSSRIALHDCVLEFWPVELNDTGSYFFQMKNYTQKWKLNVIRRNKHSCFTERQVTSKIVEVKKFFQITCENSYYQTLVNSTSLYKNCKKLLLENNKNPTIKKNAEFEDQGYYSCVHFLHHNGKLFNITKTFNITIVEDRSNIVPVLLGPKLNHVAVELGKNVRLNCSALLNEEDVIYWMFGEENGSDPNIHEEKEMRIMTPEGKWHASKVLRIENIGESNLNVLYNCTVASTGGTDTKSFILVRKADMADIPGHVFTRGMIIAVLILVAVVCLVTVCVIYRVDLVLFYRHLTRRDETLTDGKTYDAFVSYLKECRPENGEEHTFAVEILPRVLEKHFGYKLCIFERDVVPGGAVVDEIHSLIEKSRRLIIVLSKSYMSNEVRYELESGLHEALVERKIKIILIEFTPVTDFTFLPQSLKLLKSHRVLKWKADKSLSYNSRFWKNLLYLMPAKTVKPGRDEPEVLPVLSES

SEQ ID NO: 772166 - protein, 392 aa, Homo sapiens
MNCRELPLTLWVLISVSTAESCTSRPHITVVEGEPFYLKHCSCSLAHEIETTTKSWYKSSGSQEHVELNPRSSSRIALHDCVLEFWPVELNDTGSYFFQMKNYTQKWKLNVIRRNKHSCFTERQVTSKIVEVKKFFQITCENSYYQTLVNSTSLYKNCKKLLLENNKNPTIKKNAEFEDQGYYSCVHFLHHNGKLFNITKTFNITIVEDRSNIVPVLLGPKLNHVAVELGKNVRLNCSALLNEEDVIYWMFGEENGSDPNIHEEKEMRIMTPEGKWHASKVLRIENIGESNLNVLYNCTVASTGGTDTKSFILVRKADMADIPGHVFTRGMIIAVLILVAVVCLVTVCVIYRVDLVLFYRHLTRRDETLTGNTYNAGISYLMFSLRNQINRH

SEQ ID NO: 772167 - protein, 541 aa, Homo sapiens; identical to SEQ ID NO: 772165

SEQ ID NO: 772168 - protein, 529 aa, Homo sapiens
MGPSCPVFLSFTKLSLWWLLLTPAGGEEAKRPPPRAPGDPLSSPSPTALPQGGSHTETEDRLFKHLFRGYNRWARPVPNTSDVVIVRFGLSIAQLIDVDEKNQMMTTNVWLKQEWSDYKLRWNPADFGNITSLRVPSEMIWIPDIVLYNNADGEFAVTHMTKAHLFSTGTVHWVPPAIYKSSCSIDVTFFPFDQQNCKMKFGSWTYDKAKIDLEQMEQTVDLKDYWESGEWAIVNATGTYNSKKYDCCAEIYPDVTYAFVIRRLPLFYTINLIIPCLLISCLTVLVFYLPSDCGEKITLCISVLLSLTVFLLLITEIIPSTSLVIPLIGEYLLFTMIFVTLSIVITVFVLNVHHRSPSTHTMPHWVRGALLGCVPRWLLMNRPPPPVELCHPLRLKLSPSYHWLESNVDAEEREVVVEEEDRWACAGHVAPSVGTLCSHGHLHSGASGPKAEALLQEGELLLSPHMQKALEGVHYIADHLRSEDADSSVKEDWKYVAMVIDRIFLWLFIIVCFLGTIGLFLPPFLAGMI

SEQ ID NO: 772169 - protein, 106 aa, Homo sapiens
GRVGPTHASATLFIFQIPTAYQGLMRWYISSTSGQAENILIQRYCYVNEFPSSHIVIFERMNTLSVLNPLLTNDLFSEYYICIESTDSPLVTAPFARQRNGCIKLH

SEQ ID NO: 772170 - protein, 106 aa, Homo sapiens; identical to SEQ ID NO: 772169

SEQ ID NO: 772171 - protein, 78 aa, Homo sapiens
FCSGSPKPSSAPSVPYGLAWQHSRTPRNPYKRGQGPTEATALRFGGQGARGTSLNNYHAVISQHHGHILTLTVRILSQ

SEQ ID NO: 772172 - protein, 75 aa, Homo sapiens
PHLHGDNGLSPESGAVGALGIGWHNRPLCRLQRAGGSTSRGLTEMWSGPSPILMASKSWGAWCPVEREPGLGLAC

SEQ ID NO: 772173 - protein, 431 aa, Homo sapiens
MSVRVRLQQGPDWGFLQSFSGSGLPFPGWTHTFILDYHPEEKEEEEEDSGLSPGPSPGSGVPLPTWPTHTLPDRPQAQQLQSCQGRPSGVCSDSAIVHQQIVGKDQLFQGAFLGSETRNMEFKRGSGEYLSLAFKHHVRRYVCAFLNSEGGSLLVGVEDSGLVQGIRCSHRDEDRARLLVDSILQGFKPQIFPDAYTLTFIPVISTSETSVPLKVSLQDRRASGPVICHHSVRRWPALLPGSAGAGTGLGATGEEAGDGPCASPAGLPKESVSNAEQPGRMGAADREGRRLQSCCCPYQGDPPDRAHPQGPEPAATLPDRPGGGVSAARREHPGPAVCQRHPGVVQAGTEAEASGWGGAELTPDPFSHPLSSPGQATMVPWVLHHPVEPKGLEYNHTTSHTPRVGGWWEGRGPSSLLLKIYAVARRSGSRL

SEQ ID NO: 772174 - protein, 260 aa, Homo sapiens
MTPMKRSVQTQVSEPFMESWGEESLPELPAEQSLTEYSDLEEAPSAHTLYVGHLNPQFSVPVLACLLRDTLERLEMPVAREHIEVVRRPRKAYALVQVTVHRDTLASLPWRLQTALEEHLILKELAARGKDLLLSEAQGPFSHREVSGTFPKQAPKPHPKGEPLSGSGLQSGDGGVSLGKQGQICKLGGCHSNDHGLRLVLPAFSGKNSLPQAQARRLCEERPRGDLLSLGPFTFQPLGLGDPRRHRGPDFLLGPTHLFN

SEQ ID NO: 772175 - protein, 380 aa, Homo sapiens
MTPMKRSVQTQVSEPFMESWGEESLPELPAEQSLTEYSDLEEAPSAHTLYVGHLNPQFSVPVLACLLRDTLERLEMPVAREHIEVVRRPRKAYALVQVTVHRDTLASLPWRLQTALEEHLILKELAARGKDLLLSEAQGPFSHREEKEEEEEDSGLSPGPSPGSGVPLPTWPTHTLPDRPQAQQLQSCQGRPSGVCSDSAIVHQQIVGKDQLFQGAFLGSETRNMEFKRGSGEYLSLAFKHHVRRYVCAFLNSEGGSLLVGVEDSGLVQGIRCSHRDEDRARLLVDSILQGFKPQIFPDAYTLTFIPVISTSETSVPLKVIRLTVHTPKAQSQPQLYQTDQGEVFLRRDGSIQGPLSASAIQEWCRQVRKLRPVGGVERS

SEQ ID NO: 772176 - protein, 260 aa, Homo sapiens; identical to SEQ ID NO: 772174

SEQ ID NO: 772177 - protein, 89 aa, Homo sapiens
MKARKYNSEGFPGSGELALEPAVSVWTGRSPVRKDMGFQGAAGPKPEPSPICPHPVSQWGVRGMVLISRKDTGLIPGGICMGKNPSNVI

SEQ ID NO: 772178 - protein, 137 aa, Homo sapiens
RQAADVLMTFPSPPSLKDDNHNPPRALHTSCSRFIHNRSQDGHHHPGGWPLRRQCASFTDGETEVLTRPSTSQGRDLNSGKSSGFWIGLKLRARLQARSGPMESRPGRVQGPEATPQRCHWGPASVLSLSLRDEAAP

SEQ ID NO: 772179 - protein, 465 aa, Homo sapiens
MNAQLTMEAIGELHGVSHEPVPAPADLLGGSPHARSSVAHRGSHLPPAHPRSMGMASLLDGGSGGGDYHHHHRAPEHSLAGPLHPTMTMACETPPGMSMPTTYTTLTPLQPLPPISTVSDKFPHHHHHHHHHHHPHHHQRLAGNVSGSFTLMRDERGLASMNNLYTPYHKDVAGMGQSLSPLSSSGLGSIHNSQQGLPHYAHPGAAMPTDKMLTPNGFEAHHPAMLGRHGEQHLTPTSAGMVPINGLPPHHPHAHLNAQGHGQLLGTAREPNPSVTGAQVSNGSNSGQMEEINTKEVAQRITTELKRYSIPQAIFAQRVLCRSQGTLSDLLRNPKPWSKLKSGRETFRRMWKWLQEPEFQRMSALRLAACKRKEQEHGKDRGNTPKKPRLVFTDVQRRTLHAIFKENKRPSKELQITISQQLGLELSTVSNFFMNARRRSLDKWQDEGSSNSGNSSSSSSTCTKA

SEQ ID NO: 772180 - protein, 224 aa, Homo sapiens
RPPTTTKFAAASTSRAPALALALAHAMANEVQDLLSPRKGGHPPAVKAGGMRISKKQEIGTLERHTKKTGFEKTSAIANVAKIQTLDALNDALEKEQVQLGVRNERQVQPFHHGCSWKETSGFDTSSEDPERLFLSMCLVTVLGNLLIILAVTPDSHLHIPMCFFLSNLSLPDIGFTSTTVPKMIVDIQSHSRVISYAGCLTQMSLFAIFGGMEERHAPECDGL

SEQ ID NO: 772181 - protein, 107 aa, Homo sapiens
MANEVQDLLSPRKGGHPPAVKAGGMRISKKQEIGTLERHTKKTGFEKTSAIANVAKIQTLDALNDALEKLNYKFPATVHMAHQKPTPALEKVVPLKRIYIIQQPRKC

SEQ ID NO: 772182 - protein, 47 aa, Homo sapiens
GAATAGIQPPEHQHWHWHWHTLWQMKCKTCSPLGKGDILLQVGCHLP

SEQ ID NO: 772183 - protein, 154 aa, Homo sapiens
GRVRRGGMAAAADSFSGGPAGVRLPRSPPLKVLAEQLRRDAEGGPGAWRLSRAAAGRGPLDLAAVWMQGRVVMADRGEARLRDPSGDFSVRGLERVPRGRPCLVPGKYVMVMGVVQACSPEPCLQAVKMTDLSDNPIHESMWELEVEDLHRNIP

SEQ ID NO: 772184 - protein, 90 aa, Homo sapiens
VIGKFPCSLGCLCGWFCGVRPAMERSGPSEVTGSDASGPDPQLAVTMGFTGFGKKARTFDLEAMFEQTRRTAVERSCKTLVQPNGNGLKE

SEQ ID NO: 772185 - protein, 111 aa, Homo sapiens
MVIAHTKALDPSQPVTFVTNSTYAADKGALYVDVIRVNSYYSWYRNYGHLELIQLQLAAQFENWCKTSQSHYSERVWSGNACRVSPDYIYSYQMEIITALKIFIFSFYFTY

SEQ ID NO: 772186 - protein, 325 aa, Homo sapiens
LGRLSFLAPVTGSDASGPDPQLAVTMGFTGFGKKARTFDLEAMFEQTRRTAVERSCKTLGLVNYQISVKCSNQFKLEVCLLKSENKVVDNQAGTQGQLKVLGANLWWPYLMHEHPAYLYSWEMVIAHTKALDPSQPVTFVTNSTYAADKGALYVDVIRVNSYYSWYRNYGHLELIQLQLAAQFENWCKTSQSHYSERVWSGNACRVSPGLVTYQISVKCSNQFKLEVCLLKSGANLWWPYLMHEHPAYLYSWGMVIAHTKALDPSQPVTFVTNSTYAADKGVSLGVPTPFLLPLPGLVPEACSWEQLERTMCCQSELFILFYLER

SEQ ID NO: 772187 - protein, 443 aa, Homo sapiens
LGRLSFLAPVTGSDASGPDPQLAVTMGFTGFGKKARTFDLEAMFEQTRRTAVERSCKTLGLVNYQISVKCSNQFKLEVCLLKSENKVVDNQAGTQGQLKVLGANLWWPYLMHEHPAYLYSWEMVIAHTKALDPSQPVTFVTNSTYAADKGALYVDVIRVNSYYSWYRNYGHLELIQLQLAAQFENWCKTSQSHYSERVWSGNACRVSPGLVTYQISVKCSNQFKLEVCLLKSGANLWWPYLMHEHPAYLYSWGMVIAHTKALDPSQPVTFVTNSTYAADKGVSLGVPTPFLLPLPGLVLKPAHGNSWKEPCAANGVLLCCPGWSAVAQSQLTATSASQALYVDVIRVNSYYSWYRNYGHLELIQLQLAAQFENWCKTSQSHYSERVWSGNACRVSPGSTLMFSEENQKSLLEQYHLGLNQKRRKYVVGELIWNFADFMTNQCK

SEQ ID NO: 772188 - protein, 87 aa, Homo sapiens
VIGKFPCSLGCLCGWFCGVRPAMERSGPSEVTGSDASGPDPQLAVTMGFTGFGKKARTFDLEAMFEQTRRTAVERSCKTLGQITEGY

SEQ ID NO: 772189 - protein, 277 aa, Homo sapiens
VIGKFPCSLGCLCGWFCGVRPAMERSGPSEVTGSDASGPDPQLAVTMGFTGFGKKARTFDLEAMFEQTRRTAVERSCKTLGLVNYQISVKCSNQFKLEVCLLKSENKVVDNQAGTQGQLKVLGANLWWPYLMHEHPAYLYSLGGMVIAHTKALDPSQPVTFVTNSTYAADKGALYVDVIRVNSYYSWYRNYGHLELIQLQLAAQFENWCKTSQSHYSERVWSGNACRVSPGSTLMFSEENQKSLLEQYHLGLNQKRRKYVVGELIWNFADFMTNQCK

SEQ ID NO: 772190 - protein, 269 aa, Homo sapiens
PPTCTRGRMVIAHTKALDPSQPVTFVTNSTYAADKGALYVDVIRVNSYYSWYHNYGHLELIQLQLAAQFENWCKTSQSHYSERVWSGNACRVSPGLVNYQISVKCSNQFKLEVCLLKSENKVVDNQAGTQGQLKVLGANLWWPYLMHEHPAYLYSWEEMVIAHTKALDPSQPVTFVTNSTYAADKGALYVDVIRVNSYYSWYRNYGHLELIQLQLAAQFENWCKTSQSHYSERVWSGNACRVSPDYIYSYQMEIITALKIFIFSFYFTY

SEQ ID NO: 772191 - protein, 87 aa, Homo sapiens; identical to SEQ ID NO: 772188

SEQ ID NO: 772192 - protein, 143 aa, Homo sapiens
MEEALLNLEVQRGSVSIPLRIWCPSPSVSACWSSLMFYLSVPVEGVGRVFLWVCPCGQSVCPPFGSSWSLSPGSASIPAWRGHALCSSVSLRTHVSPLKVYLLLFPVWLEGACPSGNPFAFFEGLGVCGPCLCPWEWCVSIFV

SEQ ID NO: 772193 - protein, 265 aa, Homo sapiens
MKKEVCSVAFLKAVFAEFLATLIFVFFGLGSALKWPSALPTILQIALAFGLAIGTLAQALGPVSGGHINPAITLALLVGNQISLLRAFFYVAAQLVGAIAGAGILYGVAPLNARGNLAVNALNNNTTQGQAMVVELILTFQLALCIFASTDSRRTSPVGSPALSIGLSVTLGHLVGIYFTGCSMNPARSFGPAVVMNRFSPAHWVFWVGPIVGAVLAAILYFYLLFPNSLSLSERVAIIKGTYEPDEDWEEQREERKKTMELTTR

SEQ ID NO: 772194 - protein, 210 aa, Homo sapiens
MKKEVCSVAFLKAVFAEFLATLIFVFFGLGSALKWPSALPTILQIALAFGLAIGTLAQALGPVSGGHINPAITLALLVGNQISLLRAFFYVAAQLVGAIAGAGILYGVAPLNARGNLAVNAIYFTGCSMNPARSFGPAVVMNRFSPAHWVFWVGPIVGAVLAAILYFYLLFPNSLSLSERVAIIKGTYEPDEDWEEQREERKKTMELTTR

SEQ ID NO: 772195 - protein, 215 aa, Homo sapiens
MKKEVCSVAFLKAVFAEFLATLIFVFFGLGSALKWPSALPTILQIALAFGLAIGTLAQALGPVSGGHINPAITLALLVGNQISLLRAFFYVAAQLVGAIAGAGILYGVAPLNARGNLAVNALNNNTTQGQAMVVELILTFQLALCIFASTDSRRTSPVGSPALSIGLSVTLGHLVGIYFTGCSMNPARSFGPAVVMNRFSPAHWVSLSLPLAPWR

SEQ ID NO: 772196 - protein, 185 aa, Homo sapiens
MKKEVCSVAFLKAVFAEFLATLIFVFFGLGSALKWPSALPTILQIALAFGLAIGTLAQALGPVSGGHINPAITLALLVGNQISLLRAFFYVAAQLVGAIAGAGILYGVAPLNARGNLAVNALNNNTTQGQAMVVELILTFQLALCIFASTDSRRTSPVGSPALSIGLSVTLGHLVGVSSTDIGLG

SEQ ID NO: 772197 - protein, 75 aa, Homo sapiens
MPPYLFLVRMHAWGCWCLEWGLPNKSLILTFRLCLSSECLETLWPIASPLCHPTSSTTISTGYRGPQDKCSVGRK

SEQ ID NO: 772198 - protein, 265 aa, Homo sapiens; identical to SEQ ID NO: 772193

SEQ ID NO: 772199 - protein, 156 aa, Homo sapiens
KVAGLLILYPLQLNNNTTQGQAMVVELILTFQLALCIFASTDSRRTSPVGSPALSIGLSVTLGHLVGIYFTGCSMNPARSFGPAVVMNRFSPAHWVFWVGPIVGAVLAAILYFYLLFPNSLSLSERVAIIKGTYEPDEDWEEQREERKKTMELTTR

SEQ ID NO: 772200 - protein, 222 aa, Homo sapiens
MKKEVCSVAFLKAVFAEFLATLIFVFFGLGSALKWPSALPTILQIALAFGLAIGTLAQALGPVSGGHINPAITLALLVGNQISLLRAFFYVAAQLVGAIAGAGILYGVAPLNARGNLAVNALNNNTTQGQAMVVELILTFQLALCIFASTDSRRTSRGLLGTGLSGTDLRDCECSAKLTGCKGQARKGWACSLHPPPSPTLPQELKGSQPLGGQRQTLPRAP

SEQ ID NO: 772201 - protein, 166 aa, Homo sapiens
MKKEVCSVAFLKAVFAEFLATLIFVFFGLGSALKWPSALPTILQIALAFGLAIGTLAQALGPVSGGHINPAITLALLVGNQISLLRAFFYVAAQLVGAIAGAGILYGVAPLNARGNLAVNALNNNTTQGQAMVVELILTFQLALCIFALLRKKTDWFIECRLIYFW

SEQ ID NO: 772202 - protein, 313 aa, Homo sapiens
WTSETQEVIGGGTEGLKKYYKELQNQLNEIVELVRGKLSKQTRTTLGALVTIDVHARDVVMDMIKMGVSHDTDFLWLAQLRYYWENENARVRIINCNVKYAYEYLGNSPRLVITPLTDRCYRTLIGAFYLNLGGAPEGPAGTGKTETTKDLAKALAVQCVVFNCSDGLDYLAMGKFFKGLASSGAWACFDEFNRIELEVLSVVAQQILCIQRAIQQKLVVFVFEGTELKLNPNCFVAITMNPGYAGRSELPDNLKVLFRTVAMMVPNYALIAEISLYSYGFLNARPLSVKIVMTYRLCSEQLSSQFHYDYGMR

SEQ ID NO: 772203 - protein, 355 aa, Homo sapiens
MTTSLDTVETFGTTSYYDDVGLLCEKADTRALMAQFVPPLYSLVFTVGLLGNVVVVMILIKYRRLRIMTNIYLLNLAISDLLFLVTLPFWIHYVRGHNWVFGHGMCKLLSGFYHTGLYSEIFFIILLTIDRYLAIVHAVFALRARTVTFGVITSIVTWGLAVLAALPEFIFYETEELFEETLCSALYPEDTVYSWRHFHTLRMTIFCLVLPLLVMAICYTGIIKTLLRCPSKKKYKAIRLIFVIMAVFFIFWTPYNVAILLSSYQSILFGNDCERSKHLDLVMLVTEVIAYSHCCMNPVIYAFVGERFRKYLRHFFHRHLLMHLGRYIPFLPSEKLERTSSVSPSTAEPELSIVF

SEQ ID NO: 772204 - protein, 355 aa, Homo sapiens; identical to SEQ ID NO: 772203

SEQ ID NO: 772205 - protein, 103 aa, Homo sapiens
MHPFHRCATAVQRGLLEHEASGSTRVLSWVNFPTWRLEVEVSMKSGGHPVFRTLWPPRPPASFFLSARFPCTAVTLASFHGHAWTPRKPFPETGHERSDLHLI

SEQ ID NO: 772206 - protein, 106 aa, Homo sapiens
MVPPWLWEAGIRECGSVPVSRTLPTLAWWQTWLPAAELPVPLSPQRPGHFLHVSPAHVNCRENQGNPRASWRRHQTPGVPRWAPTHPTLKPGWGLEQGVWFLGAGS

SEQ ID NO: 772207 - protein, 106 aa, Homo sapiens; identical to SEQ ID NO: 772206

SEQ ID NO: 772208 - protein, 106 aa, Homo sapiens; identical to SEQ ID NO: 772206

SEQ ID NO: 772209 - protein, 153 aa, Homo sapiens
MYRPRAFIFSDCHSRVLEQLRGNVLLNGLSLEADITANLDSPRVTVAQLDWDVATVHQLSAFQPDVVIAADVLYCPEAIVSLVGILRRLAACWEHQQAPEVYVAFTVHNPETCQLFTTELGRAGIIWEAEAHHDQKLFPYGEHLEMAMLNLTL

SEQ ID NO: 772210 - protein, 106 aa, Homo sapiens; identical to SEQ ID NO: 772206

SEQ ID NO: 772211 - protein, 169 aa, Homo sapiens
MEALDELYEALAETLMAKESTQGHRSYLLPSGGSVTLSESTAIISHGTTGLVTWDATLYLAEWAIENPAAFTNRTVLELGSGAGLTGLAICKMYRPRAFIFSDCHSRVLEQLRGNVLLNGLSLEADITANLDSPRVTVAQLDWDVATVHQLSAFQPDVVIAAGNGQPQA

SEQ ID NO: 772212 - protein, 106 aa, Homo sapiens; identical to SEQ ID NO: 772206

SEQ ID NO: 772213 - protein, 106 aa, Homo sapiens; identical to SEQ ID NO: 772206

SEQ ID NO: 772214 - protein, 69 aa, Homo sapiens
RCTRVRICDHASRMAPEENAGTELLLQSFERRFLAARTLRSFPWQGGGGRAERPAGLAGVQGRRDGSPC

SEQ ID NO: 772215 - protein, 38 aa, Homo sapiens
MVLFEQDVVKGHWSCHSRATGCQGRRESCWPCVLGCGE

SEQ ID NO: 772216 - protein, 435 aa, Homo sapiens
MAASDTERDGLAPEKTSPDRDKKKEQSEVSVSPRASKHHYSRSRSRSRERKRKSDNEGRKHRSRSRSKEGRRHESKDKSSKKHKSEEHNDKEHSSDKGRERLNSSENGEDRHKRKERKSSRGRSHSRSRSRERRHRSRSRERKKSRSRSRERKKSRSRSRERKKSRSRSRERKRRIRSRSRSRSRHRHRTRSRSRTRSRSRDRKKRIEKPRRFSRSLSRTPSPPPFRGRNTAMDAQEALARRLERAKKLQEQREKEMVEKQKQQEIAAAAAATGGSVLNVAALLASGTQVTPQIAMAAQMAALQAKALAETGIAVPSYYNPAAVNPMKFAEQEKKRKMLWQGKKEGDKSQSAEIWEKLNFGNKDQNVKFRKLMGIKSEDEAGCSSVDEESYKTLKQQEEVFRNLDAQYEMARSQTHTQRGMGLGFTSSMRGMDAV

SEQ ID NO: 772217 - protein, 376 aa, Homo sapiens
MIRTNFFLKQGRRHESKDKSSKKHKSEEHNDKEHSSDKGRERLNSSENGEDRHKRKERKSSRGRSHSRSRSRERRHRSRSRERKKSRSRSRERKKSRSRSRERKKSRSRSRERKRRIRSRSRSRSRHRHRTRSRSRTRSRSRDRKKRIEKPRRFSRSLSRTPSPPPFRGRNTAMDAQEALARRLERAKKLQEQREKEMVEKQKQQEIAAAAAATGGSVLNVAALLASGTQVTPQIAMAAQMAALQAKALAETGIAVPSYYNPAAVNPMKFAEQEKKRKMLWQGKKEGDKSQSAEIWEKLNFGNKDQNVKFRKLMGIKSEDEAGCSSVDEESYKTLKQQEEVFRNLDAQYEMARSQTHTQRGMGLGFTSSMRGMDAV

SEQ ID NO: 772218 - protein, 203 aa, Homo sapiens
MDAQEALARRLERAKKLQEQREKEMVEKQKQQEIAAAAAATGGSVLNVAALLASGTQVTPQIAMAAQMAALQAKALAETGIAVPSYYNPAAVNPMKFAEQEKKRKMLWQGKKEGDKSQSAEIWEKLNFGNKDQNVKFRKLMGIKSEDEAGCSSVDEESYKTLKQQEEVFRNLDAQYEMARSQTHTQRGMGLGFTSSMRGMDAV

SEQ ID NO: 772219 - protein, 203 aa, Homo sapiens; identical to SEQ ID NO: 772218

SEQ ID NO: 772220 - protein, 435 aa, Homo sapiens; identical to SEQ ID NO: 772216

SEQ ID NO: 772221 - protein, 435 aa, Homo sapiens; identical to SEQ ID NO: 772216

SEQ ID NO: 772222 - protein, 253 aa, Homo sapiens
MAASDTERDGLAPEKTSPDRDKKKEQSEVSVSPRASKHHYSRSRSRSRERKRKSDNEGRKHRSRSRSKEGRRHESKDKSSKKHKSEEHNDKEHSSDKGRERLNSSENGEDRHKRKERKSSRGRSHSRSRSRERRHRSRSRERKKSRSRSRERKKSRSRSRERKKSRSRSRERKRRIRSRSRSRSRHRHRTRSRSRTRSRSRDRKKRIEKPRRFSRSLSRTPSPPPFRGRNTAMDAQEALARREDGVSLCCPGW

SEQ ID NO: 772223 - protein, 435 aa, Homo sapiens; identical to SEQ ID NO: 772216

SEQ ID NO: 772224 - protein, 271 aa, Homo sapiens
GGNHLNLGGGGYSELEIAPLHSCLNNRVRLCLNKNSGDRKKRIEKPRRFSRSLSRTPSPPPFRGRNTAMDAQEALARRLERAKKLQEQREKEMVEKQKQQEIAAAAAATGGSVLNVAALLASGTQVTPQIAMAAQMAALQAKALAETGIAVPSYYNPAAVNPMKFAEQEKKRKMLWQGKKEGDKSQSAEIWEKLNFGNKDQNVKFRKLMGIKSEDEAGCSSVDEESYKTLKQQEEVFRNLDAQYEMARSQTHTQRGMGLGFTSSMRGMDAV

SEQ ID NO: 772225 - protein, 278 aa, Homo sapiens
MAASDTERDGLAPEKTSPDRDKKKEQSEVSVSPRASKHHYSRSRSRSRERKRKSDNEGRKHRSRSRSKEGRRHESKDKSSKKHKSEEHNDKEHSSDKGRERLNSSENGEDRHKRKERKSSRGRSHSRSRSRERRHRSRSRERKKSRSRSRERKKSRSRSRERKKSRSRSRERKRRIRSRSRSRSRHRHRTRSRSRTRSRSRDRKKRIEKPRRFSRSLSRTPSPPPFRGRNTAMDAQEALARSSCSYWRFCSQCCCPVGIRNTSNTSDSHGSSDGSPAS

SEQ ID NO: 772226 - protein, 179 aa, Homo sapiens
MVEKQKQQEIAAAAAATGGSVLNVAALLASGTQVTPQIAMAAQMAALQAKALAETGIAVPSYYNPAAVNPMKFAEQEKKRKMLWQGKKEGDKSQSAEIWEKLNFGNKDQNVKFRKLMGIKSEDEAGCSSVDEESYKTLKQQEEVFRNLDAQYEMARSQTHTQRGMGLGFTSSMRGMDAV

SEQ ID NO: 772227 - protein, 195 aa, Homo sapiens
VILEDPKITQEQREKEMVEKQKQQEIAAAAAATGGSVLNVAALLASGTQVTPQIAMAAQMAALQAKALAETGIAVPSYYNPAAVNPMKFAEQEKKRKMLWQGKKEGDKSQSAEIWEKLNFGNKDQNVKFRKLMGIKSEDEAGCSSVDEESYKTLKQQEEVFRNLDAQYEMARSQTHTQRGMGLGFTSSMRGMDAV

SEQ ID NO: 772228 - protein, 377 aa, Homo sapiens
MAASDTERDGLAPEKTSPDRDKKKEQSEVSVSPRASKHHYSRSRSRSRERKRKSDNEGRKHRSRSRSKEGRRHESKDKSSKKHKSEEHNDKEHSSDKGRERLNSSENGEDRHKRKERKSSRGRSHSRSRSRERRHRSRSRERKKSRSRSRERKKSRSRSRERKKSRSRSRERKRRIRSRSRSRSRHRHRTRSRSRTRSRSRDRKKRIEKPRRFSRSLSRTPSPPPFRGRNTAMDAQEALARRLERAKKLQEQREKEMVEKQKQQEIAAAAAATGGSVLNVAALLASGTQVTPQIAMAAQMAALQAKALAETGIAVPSYYNPAAVNPMKFAEQEKKRKMLWQGKKEGDKSQSAEIWEKLNFGNKDQNVKFRKLMGIKE

SEQ ID NO: 772229 - protein, 254 aa, Homo sapiens
MAASDTERDGLAPEKTSPDRDKKKEQSEVSVSPRASKHHYSRSRSRSRERKRKSDNEGRKHRSRSRSKEGRRHESKDKSSKKHKSEEHNDKEHSSDKGRERLNSSENGEDRHKRKERKSSRGRSHSRSRSRERRHRSRSRERKKSRSRSRERKKSRSRSRERKKSRSRSRERKRRIRSRSRSRSRHRHRTRSRSRTRSRSRDRKKRIEKPRRFSRSLSRTPSPPPFRGRNTAMDAQEALARRCIFLNSFVPVRL

SEQ ID NO: 772230 - protein, 203 aa, Homo sapiens; identical to SEQ ID NO: 772218

SEQ ID NO: 772231 - protein, 376 aa, Homo sapiens; identical to SEQ ID NO: 772217

SEQ ID NO: 772232 - protein, 435 aa, Homo sapiens; identical to SEQ ID NO: 772216

SEQ ID NO: 772233 - protein, 405 aa, Homo sapiens
MAASDTERDGLAPEKTSPDRDKKKEQSEVSVSPRASKHHYSRSRSRSRERKRKSDNEGRKHRSRSRSKEGRRHESKDKSSKKHKSEEHNDKEHSSDKGRERLNSSENGEDRHKRKERKSSRGRSHSRSRSRERRHRSRSRERKKSRSRSRERKKSRSRSRERKKSRSRSRERKRRIRSRSRSRSRHRHRTRSRSRTRSRSRDRKKRIEKPRRFSRSLSRTPSPPPFRGRNTAMDAQEALARRLERAKKLQEQREKEMVEKQKQQEIAAAAAATGGSVLNVAALLASGTQVTPQIAMAAQMAALQAKALAETGIAVPSYYNPAAVNPMKFAEQEKKRKMLWQGKKEGSEDEAGCSSVDEESYKTLKQQEEVFRNLDAQYEMARSQTHTQRGMGLGFTSSMRGMDAV

SEQ ID NO: 772234 - protein, 203 aa, Homo sapiens; identical to SEQ ID NO: 772218

SEQ ID NO: 772235 - protein, 394 aa, Homo sapiens
MAASDTERDGLAPEKTSPDRDKKKEQSEVSVSPRASKHHYSRSRSRSRERKRKSDNEGRKHRSRSRSKEGRRHESKDKSSKKHKSEEHNDKEHSSDKGRERLNSSENGEDRHKRKERKSSRGRSHSRSRSRERRHRSRSRERKKSRSRSRERKKSRSRSRERKKSRSRSRERKRRIRSRSRSRSRHRHRTRSRSRTRSRSRLERAKKLQEQREKEMVEKQKQQEIAAAAAATGGSVLNVAALLASGTQVTPQIAMAAQMAALQAKALAETGIAVPSYYNPAAVNPMKFAEQEKKRKMLWQGKKEGDKSQSAEIWEKLNFGNKDQNVKFRKLMGIKSEDEAGCSSVDEESYKTLKQQEEVFRNLDAQYEMARSQTHTQRGMGLGFTSSMRGMDAV

SEQ ID NO: 772236 - protein, 179 aa, Homo sapiens; identical to SEQ ID NO: 772226

SEQ ID NO: 772237 - protein, 376 aa, Homo sapiens
MAASDTERDGLAPEKTSPDRDKKKEQSEVSVSPRASKHHYSRSRSRSRERKRKSDNEGRKHRSRSRSKEGRRHESKDKSSKKHKSEEHNDKEHSSDKGRERLNSSENGEDRHKRKERKSSRGRSHSRSRSRERRHRSRSRERKKSRSRSRERKKSRSRSRERKKSRSRSRERKRRIRSRSRSRSRHRHRTRSRSRTRSRSRLERAKKLQEQREKEMVEKQKQQEIAAAAAATGGSVLNVAALLASGTQVTPQIAMAAQMAALQAKALAETGIAVPSYYNPAAVNPMKFAEQEKKRKMLWQGKKEGDKSQSAEIWEKLNFGNKDRSSVDEESYKTLKQQEEVFRNLDAQYEMARSQTHTQRGMGLGFTSSMRGMDAV

SEQ ID NO: 772238 - protein, 110 aa, Homo sapiens [sequence omitted]

SEQ ID NO: 772239 - protein, 267 aa, Homo sapiens
  misc_feature (253)..(253): Xaa can be any naturally occurring amino acid
  misc_feature (257)..(257): Xaa can be any naturally occurring amino acid
MAASDTERDGLAPEKTSPDRDKKKEQSEVSVSPRASKHHYSRSRSRSRERKRKSDNEGRKHRSRSRSKEGRRHESKDKSSKKHKSEEHNDKEHSSDKGRERLNSSENGEDRHKRKERKSSRGRSHSRSRSRERRHRSRSRERKKSRSRSRERKKSRSRSRERKKSRSRSRERKRRIRSRSRSRSRHRHRTRSRSRTRSRSRDRKKRIEKPRRFSRSLSRTPSPPPFRGRNTAMDAQEALARSGKAKNYKNSEXNGDXNHSSCSRAAA

SEQ ID NO: 772240 - protein, 307 aa, Homo sapiens
MGGLTASDVHPTLGVQLFSAGIAACLADVITFPLDTAKVRLQVQGECPTSSVIRYKGVLGTITAVVKTEGRMKLYSGLPAGLQRQISSASLRIGLYDTVQEFLTAGKETAPSLGSKILAGLTTGGVAVFIGQPTEVVKVRLQAQSHLHGIKPRYTGTYNAYRIIATTEGLTGLWKGTTPNLMRSVIINCTELVTYDLMKEAFVKNNILADDVPCHLVSALIAGFCATAMSSPVDVVKTRFINSPPGQYKSVPNCAMKVFTNEGPTAFFKGLVPSFLRLGSWNVIMFVCFEQLKRELSKSRQTMDCAT

SEQ ID NO: 772241 - protein, 118 aa, Homo sapiens
MESMGKITFVVMQTVKLRENTEESHNHVPTGMRTYKEELAPSQGGNTNASVTDEEEHGNILPKLNIEHGEKVNWLLGYKNKGTPNAGITGVSHHAQPNSLFLIVALYHILQMCESAMD

SEQ ID NO: 772242 - protein, 653 aa, Homo sapiens [sequence omitted]

SEQ ID NO: 772243 - protein, 650 aa, Homo sapiens
MISSKMMSSNPEEDPLDTFLQYIEDMGMKAYDGLVIQNASDIARENDRLRNETNLAYLKEKNEKRRRQEEAIKRIGGEVGRGHEGSYVGKHFRMGFMTMPAPQDRLPHPCSSGFSVRSQSLHSVGGTDDDSSCGSRRQPPPKPKRDPSTKLSTSSETVSSTAASKSGKTPERTEASAKPRPHSDEYSKKIPPPKPKRNPNTQLSTSFDETYIKKHGPRRTSLPRDSSLSQMGSPAGDPEEEEPVYIEMVGNILRDFRKEDDDQSEAVYEEMKYPIFDDLGQDAKCDFDHHSCSSQCATPTVPDLDFAKASVPCPPKGLLCDIPPPFPNLLSHRPPLLVFPPAPVHCSPNSDESPLTPLEVTKLPVLENVSYMKQPAGASPSTLPSHVPGHAKLEKEQAAALGPASATPALSSSPPPPSTLYRTQSPHGYPKSHSTSPSPVSMGRSLTPLSLKRPPPYDAVHSGSLSRSSPSVPHSTPRPVSQDGAKMVNAAVNTYGAAPGGSRSRTPTSPLEELTSLFSSGRSLLRKSSSGRRSKEPAEKSTEELKVRSHSTEPLPKLDNKERGHHGASSSREPVKAQEWDGTPGPPVVTSRLGRCSVSPTLLAGNHSSEPKVSCKLGRSASTSGVPPPSVTPLRQSSDLQQSQSFTLVA

SEQ ID NO: 772244 - protein, 248 aa, Homo sapiens
MWRWIRQQLGFDPPHQSDTRTIYVANRFPQNGLYTPQKFIDNRIISSKYTVWNFVPKNLFEQFRRVANFYFLIIFLVQLMIDTPTSPVTSGLPLFFVITVTAIKQGYEDWLRHNSDNEVNGAPVYVVRSGGLVKTRSKNIRVGDIVRIAKDEIFPADLVLLSSDRLDGSCHVTTASLDGETNLKTHVAVPETALLQTVANLDTLVAVIECQQPEADLYRFMGRMIITQQMEEIVRPLGPESLLLRGAR

SEQ ID NO: 772245 - protein, 163 aa, Homo sapiens
QQLGFDPTIIRVITVTAIKQGYEDWLRHNSDNEVNGAPVYVVRSGGLVKTRSKNIRVGDIVRIAKDEIFPADLVLLSSDRLDGSCHVTTASLDGETNLKTHVAVPETALLQTVANLDTLVAVIECQQPEADLYRFMGRMIITQQMEEIVRPLGPESLLLRGAR

SEQ ID NO: 772246 - protein, 80 aa, Homo sapiens
PDPQICGEGFPHTMKTSSQPARRRLPWNLSLSPASDVLGPHVIFNTGGKSTLVAKGLRLTLGILRLPGLGLLCEPEKVDP

SEQ ID NO: 772247 - protein, 244 aa, Homo sapiens
MSCPPSWPYCAPCPTNIGESTSPLRKTIETPTLWDPKAPSCSLELPPWVLASPQRSRGTALPFLPSNVLPSLALPSTSFLCRPLLSHLVTSLLAGPGAHDGHLRKEGWRSTPEMTSLPAPEHPASPCDSVLCSPDVSMCTLGPAARWDAQAKSAPLPPCCTDCKSFPHLQRPWAQPHTSQATSVDSGEAGTKGMSQFTVWTWWRSRPCETRQGEGIGNWGYSVTPGPPGSQNLPARLDGQGLAS

SEQ ID NO: 772248 - protein, 246 aa, Homo sapiens
MGTSVQAEVRARPAEGHFVLSSTAGHILWNVQTCTAHQTGSGVGLPSWAAPPGCLQNAEVTRAKAARQGARLLRNSEQVWSMAGRQLAPQHIARRAARSPGRSWQVPSWRMWGIGLGLVWLAFLDRSGQELKTVTPVSLQLFLMGFLFASQMHLHRTWILNCVTWRGRCERAMLLAQPVPVSVSVVSRPFCEPSVKLFVLQSASVDSVVGNSAAQTPSLPLPQTLQCHGAEGPVDPQLWPRKGCRS

SEQ ID NO: 772249 - protein, 54 aa, Homo sapiens
MESLWFTRLRHSLCLPPQPPKRLGLQCIPDFLDLFYEISPPDSLDRATPRFPCI

SEQ ID NO: 772250 - protein, 154 aa, Homo sapiens
SASEVRRSALGQRGVEGNQAWGSLEGLAGRHRPLWETDCGRGEPQPLSPHPSSLLSHLSPAAVAMRLPKGHCCHSLHSLEGSPQGTYSEQETCATQASWGCPQCSHDDNHSYHSPSPAHSLTYSIHNTPSSKASEVLPSSRLDSSVICLRPHSR

SEQ ID NO: 772251 - protein, 222 aa, Homo sapiens
LEIPQVFSPKHTYKAELSRNTRETRRLSRVGAEAAGEEDWKQRPPPLWGADWHNSYFSAIGEGAQSERWRREGRRSPTSLGAKSGFQIPQGKGLAGVGEGQGGSSGYPPPSALPNAVTVSPSHLSGQQQPWSQYLQVIQRADPPHPSFTPSLGFGRFSRGWVGRREPPRQTLPSLPPDSQTTGLGPQRFLTSALAQPGSRLQKAGATTIRGEGAALFLIPPS

SEQ ID NO: 772252 - protein, 200 aa, Homo sapiens
RTVDRTLVTRRDALLFQRCCRRKRRNLETRNLDPENGSGMALQPLQAAPEPGAQGQREKNSQHPPALAPPGHQGHSHGHQGGTDITWMVLLGDGLHNLTDGLAIGAAFSDGFSSGLSTTLAVFCHELPHELGDFAMLLQSGLSFRRLLLLSLVSGALGLGGAVLGVGLSLGPVPLTPWVFGVTAGVFLYVALVDMVRDVG

SEQ ID NO: 772253 - protein, 242 aa, Homo sapiens
RTVDRTLVTRRDALLFQRCCRRKRRNLETRNLDPENGSGMALQPLQAAPEPGAQGQREKNSQHPPALAPPGHQGHSHGHQGGTDITWMVLLGDGLHNLTDGLAIGAAFSDGFSSGLSTTLAVFCHELPHELGDFAMLLQSGLSFRRLLLLSLVSGALGLGGAVLGVGLSLGPVPLTPWVFGVTAGVFLYVALVDMLPALLRPPEPLPTPHVLLQGLGLLLGGGLMLAITLLEERLLPVTTEG

SEQ ID NO: 772254 - protein, 242 aa, Homo sapiens; identical to SEQ ID NO: 772253

SEQ ID NO: 772255 - protein, 242 aa, Homo sapiens; identical to SEQ ID NO: 772253

SEQ ID NO: 772256 - protein, 242 aa, Homo sapiens; identical to SEQ ID NO: 772253

SEQ ID NO: 772257 - protein, 242 aa, Homo sapiens; identical to SEQ ID NO: 772253

SEQ ID NO: 772258 - protein, 242 aa, Homo sapiens; identical to SEQ ID NO: 772253

SEQ ID NO: 772259 - protein, 242 aa, Homo sapiens; identical to SEQ ID NO: 772253

SEQ ID NO: 772260 - protein, 200 aa, Homo sapiens; identical to SEQ ID NO: 772252

SEQ ID NO: 772261 - protein, 176 aa, Homo sapiens
RTVDRTLVTRRDALLFQRCCRRKRRNLETRNLDPENGSGMALQPLQAAPEPGAQGQREKNSQHPPALAPPGHQGHSHGHQGGTDITWMVLLGDGLHNLTDGLAIGAAFSDGFSSGLSTTLAVFCHELPHELATSPASSSGAPAYAPCAPAGAGAAAGGRPHACHNPAGGAATARDH

SEQ ID NO: 772262 - protein, 186 aa, Homo sapiens
MVLGPRQPCVASWGCASALSLPKKAGMCWRAGMSEGPVSIAQKVEQVRAHLGTASLLGLGGSPVKIGLRRVVLHPLYNPGILDFDLAVLELASPLAFNKYIQPVCLPLAIQKFPVGRKCMISGWGNTQEGNATKPELLQKASVGIIDQKTCSVLYNFSLTDRMICAGFLEGKVDSCQGDSGGPLAA

SEQ ID NO: 772263 - protein, 32 aa, Homo sapiens
MSFSYVLLKLCNLDIDIVIRLLISIAINIIIN

SEQ ID NO: 772264 - protein, 472 aa, Homo sapiens
TREDRGQAQVTVIVQPENNKPPQADAGPDKELTLPVDSTTLDGSKSSDDQKIISYLWEKTQGPDGVQLENANSSVATVTGLQVGTYVFTLTVKDERNLQSQSSVNVIVKEEINKPPIAKITGNVVITLPTSTAELDGSKSSDDKGIVSYLWTRDEGSPAAGEVLNHSDHHPILFLSNLVEGTYTFHLKVTDAKGESDTDRTTVEVKPDPRKNNLVEIILDINVSQLTERLKGMFIRQIGVLLGVLDSDIIVQKIQPYTEQSTKMVFFVQNEPPHQIFKGHEVAAMLKSELRKQKADFLIFRALEVNTVTCQLNCSDHGHCDSFTKRCICDPFWMENFIKVQLRDGDSNCEWSVLYVIIATFVIVVALGILSWTVICCCKRQKGKPKRKSKYKILDATDQESLELKPTSRAGIKQKGLLLSSSLMHSESELDSDDAIFTWPDREKGKLLHGQNGSVPNGQTPLKARSPREEIL

SEQ ID NO: 772265 - protein, 139 aa, Homo sapiens [sequence omitted]

SEQ ID NO: 772266 - protein, 343 aa, Homo sapiens
TREDRGQAQVTVIVQPENNKPPQADAGPDKELTLPVDSTTLDGSKSSDDQKIISYLWEKTQGPDGVQLENANSSVATVTGLQVGTYVFTLTVKDERNLQSQSSVNVIVKEEINKPPIAKITGNVVITLPTSTAELDGSKSSDDKGIVSYLWTRDEGSPAAGEVLNHSDHHPILFLSNLVEGTYTFHLKVTDAKGESDTDRTTVEVKPDPRKNNLVEIILDINVSQLTERLKGMFIRQIGVLLGVLDSDIIVQKIQPYTEQSTKMVFFVQNEPPHQIFKGHEVAAMLKSELRKQKADFLIFRALEVNTVTCQLNCSDREPLCPPWYVFFKLALKSCPSESGAAV

SEQ ID NO: 772267 - protein, 270 aa, Homo sapiens
TREDRGQAQVTVIVQPENNKPPQADAGPDKELTLPVDSTTLDGSKSSDDQKIISYLWEKTQGPDGVQLENANSSVATVTGLQVGTYVFTLTVKDERNLQSQSSVNVIVKEEINKPPIAKITGNVVITLPTSTAELDGSKSSDDKGIVSYLWTRDEGSPAAGEVLNHSDHHPILFLSNLVEGTYTFHLKVTDAKGESDTDRTTVEVKPDPRKNNLVEIILDINVSQLTERLKGMFIRQIGVLLGVLDSDIHGYLGIGEWKLWGSDFLKRHL

SEQ ID NO: 772268 - protein, 472 aa, Homo sapiens; identical to SEQ ID NO: 772264

SEQ ID NO: 772269 - protein, 95 aa, Homo sapiens
  misc_feature (2)..(2): Xaa can be any naturally occurring amino acid
EXTGGGEGQRKSKYKILDATDQESLELKPTSRAGIKQKGLLLSSSLMHSESELDSDDAIFTWPDREKGKLLHGQNGSVPNGQTPLKARSPREEIL

SEQ ID NO: 772270 - protein, 99 aa, Homo sapiens
GPYYYYIRGPSILLLSLALETAGEEAQGDKIIDGAPCARGSHPWQVALLSGNQLHCGGVLVNERWVLTAAHCKMNEYTVHLGSDTLGQQEKMKVYSWNA

SEQ ID NO: 772271 - protein, 254 aa, Homo sapiens
GPYYYYIRGPSILLLSLALETAGEEAQGDKIIDGAPCARGSHPWQVALLSGNQLHCGGVLVNERWVLTAAHCKMNEYTVHLGSDTLGDRRAQRIKASKSFRHPGYSTQTHVNDLMLVKLNSQARLSSMVKKVRLPSRCEPPGTTCTVSGWGTTTSPDVTFPSDLMCVDVKLISPQDCTKVYKDLLENSMLCAGIPDSKKNACNGDSGGPLVCRGTLQGLVSWGTFPCGQPNDPGVYTQVCKFTKWINDTMKKHR

SEQ ID NO: 772272 - protein, 128 aa, Homo sapiens
LWVSVSPPLSVSLSPLLSLGLCPHPVPQVFAHPLCHSVSSESVNVTPRSEYTVHLGSDTLGDRRAQRIKASKSFRHPGYSTQTHVNDLMLVKLNSQARLSSMVKKVRLPSRCEPPGTTCTVSGWGTTT

SEQ ID NO: 772273 - protein, 182 aa, Homo sapiens
FAEPGEAFPVVLSGGGDPISRAAPQPLSLPVLGASGAAAYGADMAKSKNHTTHNQSRKWHRNGIKKPRSQRYESLKGVDPKFLRNMRFAKKHNKKGLKKMQANNAKAMSARAEAIKALVKPKEVKPKIPKGVSRKLDRLAYIAHPKLGKRARARIAKGLRLCRPKARPRPRPRIKPRPRLQL

SEQ ID NO: 772274 - protein, 164 aa, Homo sapiens
  misc_feature (10)..(10): Xaa can be any naturally occurring amino acid
SRVKNKNIYXEKYPFSINVPQVWAGMAKSKNHTTHNQSRKWHRNGIKKPRSQRYESLKGVDPKFLRNMRFAKKHNKKGLKKMQANNAKAMSARAEAIKALVKPKEVKPKIPKGVSRKLDRLAYIAHPKLGKRARARIAKGLRLCRPKARPRPRPRIKPRPRLQL

SEQ ID NO: 772275 - protein, 181 aa, Homo sapiens
SPAGNLVRTPNAFPEIRWAPTITGRSQGAATRCQTKDVGILPQPQGGYRREFWRPPPQIQVAAPRQKSLFFKPGALQARKMADEAHIVASPKRGLKNFEENNGKNCGPPRAQMGEHHPFKMANAPLPGKPGGNKRPLPGKKETHVGPLEKPLGISRKIHATLGICKGNLLVWLRCLETLVN

SEQ ID NO: 772276 - protein, 105 aa, Homo sapiens
PSTHLGSMHAPEFPRTHLGSHAHTWVSMHTPGFPCTHLGSHAHTWVSMHTPGLPCTHLGSHAHTWAPMHTPGFPCTHLGSHAHTWAPMHTPGFPCTHLGSHAHTW

SEQ ID NO: 772277 - protein, 494 aa, Homo sapiens
MLTSKGQGFLHGGLCLWLCVFTPFFKGCVGCATEERLFHKLFSHYNQFIRPVENVSDPVTVHFEVAITQLANVDEVNQIMETNLWLRHIWNDYKLRWDPMEYDGIETLRVPADKIWKPDIVLYNNAVGDFQVEGKTKALLKYNGMITWTPPAIFKSSCPMDITFFPFDHQNCSLKFGSWTYDKAEIDLLIIGSKVDMNDFWENSEWEIIDASGYKHDIKYNCCEEIYTDITYSFYIRRLPMFYTINLIIPCLFISFLTVLVFYLPSDCGEKVTLCISVLLSLTVFLLVITETIPSTSLVVPLVGEYLLFTMIFVTLSIVVTVFVLNIHYRTPTTHTMPRWVKTVFLKLLPQVLLMRWPLDKTRGTGSDAVPRGLARRPAKGKLASHGEPRHLKECFHCHKSNELATSKRRLSHQPLQWVVENSEHSPEVEDVINSVQFIAENMKSHNETKEVEDDWKYVAMVVDRVFLWVFIIVCVFGTAGLFLQPLLGNTGKS

SEQ ID NO: 772278 - protein, 260 aa, Homo sapiens
PGWESRLCGWEDTSLCARVQPSRARKSGQLEKVVTVSRGILLPESPITERAKTTLPHTGRSPCRGGSPGRCWGRSEHRPFFTPDSLELGLGMPTWGTEATGCSEAGGFLLGSEGSRPQQSQERLGDTHCVLHLTQNCPRPAEEARARSLVAGQTFTLLFSIIFYAHIFVKCMAAIHQQLILQEVPPRRIGLSFANLASQVMRFIILLPDLPTTPVGTRSSTHLAELMTAWAQRSAHCANTRTGIAPLPEPPHRAPFKELA

SEQ ID NO: 772279 - protein, 70 aa, Homo sapiens
PDRLSNSPQVAELANGGGILPPYKVVVGHRREAPSIQHTIGAHEMMDIIRKKIRSLLNEQTVMMALPGCT

SEQ ID NO: 772280 - protein, 105 aa, Homo sapiens
SAWRVEVWLSVSGNSGKEGWVRSQRTFSILGSHNLSLLGCLCLPPCMVYPLEKRNLSPATLRVGPLSSLEEIWDSNCSAFTCSFLLVPLPLFVLAVPEPFEESMA

SEQ ID NO: 772281 - protein, 135 aa, Homo sapiens
PNHDTVCNLPKSPPLSATSPSLPHSVQPPQIPPLFATSQNLPMRNLAKSPPLCATSSNPPTVSNLPKSLPLCATSSSPPLCAPPKNPPTVCNLLKSPYCEQPPQISPLCATSPNPPLCATSPNPPTVSNLPKSPH

SEQ ID NO: 772282 - protein, 117 aa, Homo sapiens [sequence omitted]

SEQ ID NO: 772283 - protein, 1484 aa, Homo sapiens [sequence omitted]

SEQ ID NO: 772284 - protein, 176 aa, Homo sapiens
MNQELLSVGSKRRRTGGSLRGNPSSSQVDEEQMNRVVEEEQQQQLRQQEEEHTARNGEVVGVEPRPGGQNDSQQGQLEENNNRFISVDEDSSGNQEEQEEDEEHAGEQDEEDEEEEEMDQESDDFDQSDDSSREDEHTHTNSVTNSSSIVDLPVHQLSSPFYTKTTKVSIFNILLT

SEQ ID NO: 772285 - protein, 68 aa, Homo sapiens
QPGAALHPGQFAKATFDAISKTYSYLTPDLWKETVFTKSPYQEFTDHLVKTHTRVSVQRTQAPAVATT

SEQ ID NO: 772286 - protein, 627 aa, Homo sapiens
MCVPRSGLILSCICLYCGVLLPVLLPNLPFLTCLSMSTLESVTYLPEKGLYCQRLPSSRTHGGTESLKGKNTENMGFYGTLKMIFYKMKRKLDHGSEVRSFSLGKKPCKVSEYTSTTGLVPCSATPTTFGDLRAANGQGQQRRRITSVQPPTGLQEWLKMFQSWSGPEKLLALDELIDSCEPTQVKHMMQVIEPQFQRDFISLLPKELALYVLSFLEPKDLLQAAQTCRYWRILAEDNLLWREKCKEEGIDEPLHIKRRKVIKPGFIHSPWKSAYIRQHRIDTNWRRGELKSPKVLKGHDDHVITCLQFCGNRIVSGSDDNTLKVWSAVTGKCLRTLVGHTGGVWSSQMRDNIIISGSTDRTLKVWNAETGECIHTLYGHTSTVRCMHLHEKRVVSGSRDATLRVWDIETGQCLHVLMGHVAAVRCVQYDGRRVVSGAYDFMVKVWDPETETCLHTLQGHTNRVYSLQFDGIHVVSGSLDTSIRVWDVETGNCIHTLTGHQSLTSGMELKDNILVSGNADSTVKIWDIKTGQCLQTLQGPNKHQSAVTCLQFNKNFVITSSDDGTVKLWDLKTGEFIRNLVTLESGGSGGVVWRIRASNTKLVCAVGSRNGTEETKLLVLDFDVDMK

SEQ ID NO: 772287 - protein, 786 aa, Homo sapiens
SPPLAARKRPGLPPGLATRAPLLPQYRAGAFRSCRFSPKEEGNQPTFSAPRLFSKSNVKTFASSDSLAKVQEVASWLLEMNQELLSVGSKRRRTGGSLRGNPSSSQVDEEQMNRVVEEEQQQQLRQQEEEHTARNGEVVGVEPRPGGQNDSQQGQLEENNNRFISVDEDSSGNQEEQEEDEEHAGEQDEEDEEEEEMDQESDDFDQSDDSSREDEHTHTNSVTNSSSIVDLPVHQLSSPFYTKTTKMKRKLDHGSEVRSFSLGKKPCKVSEYTSTTGLVPCSATPTTFGDLRAANGQGQQRRRITSVQPPTGLQEWLKMFQSWSGPEKLLALDELIDSCEPTQVKHMMQVIEPQFQRDFISLLPKELALYVLSFLEPKDLLQAAQTCRYWRILAEDNLLWREKCKEEGIDEPLHIKRRKVIKPGFIHSPWKSAYIRQHRIDTNWRRGELKSPKVLKGHDDHVITCLQFCGNRIVSGSDDNTLKVWSAVTGKCLRTLVGHTGGVWSSQMRDNIIISGSTDRTLKVWNAETGECIHTLYGHTSTVRCMHLHEKRVVSGSRDATLRVWDIETGQCLHVLMGHVAAVRCVQYDGRRVVSGAYDFMVKVWDPETETCLHTLQGHTNRVYSLQFDGIHVVSGSLDTSIRVWDVETGNCIHTLTGHQSLTSGMELKDNILVSGNADSTVKIWDIKTGQCLQTLQGPNKHQSAVTCLQFNKNFVITSSDDGTVKLWDLKTGEFIRNLVTLESGGSGGVVWRIRASNTKLVCAVGSRNGTEETKLLVLDFDVDMK

SEQ ID NO: 772288 - protein, 707 aa, Homo sapiens
MNQELLSVGSKRRRTGGSLRGNPSSSQVDEEQMNRVVEEEQQQQLRQQEEEHTARNGEVVGVEPRPGGQNDSQQGQLEENNNRFISVDEDSSGNQEEQEEDEEHAGEQDEEDEEEEEMDQESDDFDQSDDSSREDEHTHTNSVTNSSSIVDLPVHQLSSPFYTKTTKMKRKLDHGSEVRSFSLGKKPCKVSEYTSTTGLVPCSATPTTFGDLRAANGQGQQRRRITSVQPPTGLQEWLKMFQSWSGPEKLLALDELIDSCEPTQVKHMMQVIEPQFQRDFISLLPKELALYVLSFLEPKDLLQAAQTCRYWRILAEDNLLWREKCKEEGIDEPLHIKRRKVIKPGFIHSPWKSAYIRQHRIDTNWRRGELKSPKVLKGHDDHVITCLQFCGNRIVSGSDDNTLKVWSAVTGKCLRTLVGHTGGVWSSQMRDNIIISGSTDRTLKVWNAETGECIHTLYGHTSTVRCMHLHEKRVVSGSRDATLRVWDIETGQCLHVLMGHVAAVRCVQYDGRRVVSGAYDFMVKVWDPETETCLHTLQGHTNRVYSLQFDGIHVVSGSLDTSIRVWDVETGNCIHTLTGHQSLTSGMELKDNILVSGNADSTVKIWDIKTGQCLQTLQGPNKHQSAVTCLQFNKNFVITSSDDGTVKLWDLKTGEFIRNLVTLESGGSGGVVWRIRASNTKLVCAVGSRNGTEETKLLVLDFDVDMK

SEQ ID NO: 772289 - protein, 279 aa, Homo sapiens
MRDNIIISGSTDRTLKVWNAETGECIHTLYGHTSTVRCMHLHEKRVVSGSRDATLRVWDIETGQCLHVLMGHVAAVRCVQYDGRRVVSGAYDFMVKVWDPETETCLHTLQGHTNRVYSLQFDGIHVVSGSLDTSIRVWDVETGNCIHTLTGHQSLTSGMELKDNILVSGNADSTVKIWDIKTGQCLQTLQGPNKHQSAVTCLQFNKNFVITSSDDGTVKLWDLKTGEFIRNLVTLESGGSGGVVWRIRASNTKLVCAVGSRNGTEETKLLVLDFDVDMK

SEQ ID NO: 772290 - protein, 589 aa, Homo sapiens
MSKPGKPTLNHGLVPVDLKSAKEPLPHQTVMKIFSISIIAQGLPFCRRRMKRKLDHGSEVRSFSLGKKPCKVSEYTSTTGLVPCSATPTTFGDLRAANGQGQQRRRITSVQPPTGLQEWLKMFQSWSGPEKLLALDELIDSCEPTQVKHMMQVIEPQFQRDFISLLPKELALYVLSFLEPKDLLQAAQTCRYWRILAEDNLLWREKCKEEGIDEPLHIKRRKVIKPGFIHSPWKSAYIRQHRIDTNWRRGELKSPKVLKGHDDHVITCLQFCGNRIVSGSDDNTLKVWSAVTGKCLRTLVGHTGGVWSSQMRDNIIISGSTDRTLKVWNAETGECIHTLYGHTSTVRCMHLHEKRVVSGSRDATLRVWDIETGQCLHVLMGHVAAVRCVQYDGRRVVSGAYDFMVKVWDPETETCLHTLQGHTNRVYSLQFDGIHVVSGSLDTSIRVWDVETGNCIHTLTGHQSLTSGMELKDNILVSGNADSTVKIWDIKTGQCLQTLQGPNKHQSAVTCLQFNKNFVITSSDDGTVKLWDLKTGEFIRNLVTLESGGSGGVVWRIRASNTKLVCAVGSRNGTEETKLLVLDFDVDMK

SEQ ID NO: 772291 - protein, 627 aa, Homo sapiens; identical to SEQ ID NO: 772286

SEQ ID NO: 772292 - protein, 707 aa, Homo sapiens; identical to SEQ ID NO: 772288

SEQ ID NO: 772293 - protein, 249 aa, Homo sapiens
QVQPGCESARIHEKRVVSGSRDATLRVWDIETGQCLHVLMGHVAAVRCVQYDGRRVVSGAYDFMVKVWDPETETCLHTLQGHTNRVYSLQFDGIHVVSGSLDTSIRVWDVETGNCIHTLTGHQSLTSGMELKDNILVSGNADSTVKIWDIKTGQCLQTLQGPNKHQSAVTCLQFNKNFVITSSDDGTVKLWDLKTGEFIRNLVTLESGGSGGVVWRIRASNTKLVCAVGSRNGTEETKLLVLDFDVDMK

SEQ ID NO: 772294 - protein, 356 aa, Homo sapiens
MCVPRSGLILSCICLYCGVLLPVLLPNLPFLTCLSMSTLESVTYLPEKGLYCQRLPSSRTHGGTESLKGKNTENMGFYGTLKMIFYKMKRKLDHGSEVRSFSLGKKPCKVSEYTSTTGLVPCSATPTTFGDLRAANGQGQQRRRITSVQPPTGLQEWLKMFQSWSGPEKLLALDELIDSCEPTQVKHMMQVIEPQFQRDFISLLPKELALYVLSFLEPKDLLQAAQTCRYWRILAEDNLLWREKCKEEGIDEPLHIKRRKVIKPGFIHSPWKSAYIRQHRIDTNWRRGELKSPKVLKGHDDHVITCLQFCGNRIVSGSDDNTLKVWSAVTGKSAERTFAFRSSRPAWPNMVKHCLY

SEQ ID NO: 772295 - protein, 68 aa, Homo sapiens
QTLIKLKSLPTKNLAFLMSRLPSLPSLASPGCLPFSCVLSFLTSTITTITPPMNHEIGIIKTPQIQRG

SEQ ID NO: 772296 - protein, 248 aa, Homo sapiens
PEDALLRDQPRRLWQWWACLRVQEGPSPATADHDESVKTLSKGRALLYTLVSPAEGQLGTPSRPSKSEKSVTQDDSPNQYAGQDETSVSASDRRAHTKHDLSLQAQLQQKVFMEKWNHTSNDFILSGLLPPNQTGIFLLCLIILIFFLASVGNSAMIHLIHVDPRLHTPMYFLLSQLSLMDLMYISTTVPKMAYNFLSGQKGISFLGCGVQSFFFLTMACSEGLLLTSMGYDRYLAIWPLSLLSYPHE

SEQ ID NO: 772297 - protein, 69 aa, Homo sapiens
GKPVRPGFPPLGQVQQGVLGVELLGDVVDTLDEGEGLASICTACSGGPTFMASRKTSRVGSVQKATVTA

SEQ ID NO: 772298 - protein, 137 aa, Homo sapiens
PRAHVLSRGSAQIHAWWAGGGKLGAGFFLPPSGALSPAGMELGACRFFSVPEPALSTGTCPALSSGFCPSSRGWYLSECQDSGRSVQQPFPRACASATLCPGFPGSRGSGPYPPCPQNRKHGALTVLLTKHLLSLCC

SEQ ID NO: 772299 - protein, 107 aa, Homo sapiens
PPILCLGTACLLAISLFYPYSPSSGVQTPAVLLPGTHHSSISGCPELLLLGQGWEVGKGSDGDVGSTSGFLTVPATLLGWINFVGPTKTLGSMLALAADMDVVSGNR

SEQ ID NO: 772300 - protein, 168 aa, Homo sapiens
PPILCLGTACLLAISLFYPYSPSSGVQTPAVLLPGTHHSSISGCPELLLLGQGWEVGKGSDGDVGSTSGFLTVPATLLGWINFVGPTKTLGSMLALAADMDVVSGKQTSSSKALLTPSPLSFSTLPPHFPQTSLGQGRGLMISEPAGGYLDSAWQSPAVRHLGLMLGG

SEQ ID NO: 772301 - protein, 162 aa, Homo sapiens
TARGRGTETGPRKPLSRKSNFIIEKSSVLNSLHHRHKFTYSICRRNGVGPICIMLLEGLTLLLNLNVAGARKQLLSCRRWQGESPQMDFDSKPHSPGLLITEGLDPRLKVDPRAGKNQCELLSPGYVCSQAEARYGGSLSILDDSLPCSAIYSTITGHWTQR

SEQ ID NO: 772302 - protein, 81 aa, Homo sapiens
GKGHTGIYSKGRDLTGIYSDERDLADIYSKGRGHTGSYSKGRGHTGIYSEGKNHPGINSDGGWATSVAVSGAVVGPISWGC

SEQ ID NO: 772303 - protein, 88 aa, Homo sapiens
MGKKQNRKTGNSKTQSASPPPKERSSSPATEQSWMENDFDELREEGFRRSNYSELREDIQTKGKEVENFEKNLEECITRITNTEKCLK

SEQ ID NO: 772304 - protein, 209 aa, Homo sapiens
  misc_feature (1)..(1): Xaa can be any naturally occurring amino acid
  misc_feature (3)..(3): Xaa can be any naturally occurring amino acid
  misc_feature (7)..(7): Xaa can be any naturally occurring amino acid
  misc_feature (10)..(11): Xaa can be any naturally occurring amino acid
  misc_feature (14)..(14): Xaa can be any naturally occurring amino acid
XTXLATXLPXXQSXLAVLGACLCHGPGGNPCSCARMAASTRKLLLQLKQEEILQKSKEEAYVMADAFRIAFEQQLMRKNDQALQLTQMDKMHKKATKWMNWKHLKEDGFPSPRSKKTFGQRLLGMLPSENSSKRMEDQDSPQEVLKMLIDLLNDKEEALAHQRKVSYMLARALEDKDTASNENKEKNPIKENFPFNNPWRWRTDILNGY

SEQ ID NO: 772305 - protein, 238 aa, Homo sapiens
MALPSFESTVIWRLLAMLDIKQQKMAQENMCCDKSGFAEASGLELAVLGACLCHGPGGNPCSCARMAASTRKLLLQLKQEEIFKSKEEAYVMADAFRIAFEQQLMRKNDQALQLTQMDKMHKKATKWMNWKHLKEDGFPSPRSKKTFGQRLLGMLPSENSSKRMEDQDSPQEVLKMLIDLLNDKEEALAHQRKVSYMLARALEDKDTASNENKEKNPIKENFPFNNPWRWRTDILNGY

SEQ ID NO: 772306 - protein, 238 aa, Homo sapiens; identical to SEQ ID NO: 772305

SEQ ID NO: 772307 - protein, 25 aa, Homo sapiens
MIMLMNFDIYRHDALHKGCTNLDHL

SEQ ID NO: 772308 - protein, 25 aa, Homo sapiens
MIMLMNFDIYRHDALHKGCTNLDHL

SEQ ID NO: 772309 - protein, 468 aa, Homo sapiens
MAPPPARVHLGAFLAVTPNPGSAASGTEAAAATPSKVWGSSAGRIEPRGGGRGALPTSMGQHGPSARARAGRAPGPRPAREASPRLRVHKTFKFVVVGVLLQVVPSSAATIKLHDQSIGTQQWEHSPLGELCPPGSHRSERPGACNRCTEGVGYTNASNNLFACLPCTACKSDEEERSPCTTTRNTACQCKPGTFRNDNSAEMCRKCSTGCPRGMVKVKDCTPWSDIECVHKESGNGHNIWVILVVTLVVPLLLVAVLIVCCCIGSGCGGDPKCMDRVCFWRLGLLRGPGAEDNAHNEILSNADSLSTFVSEQQMESQEPADLTGVTVQSPGEAQCLLGPAEAEGSQRRRLLVPANGADPTETLMLFFDKFANIVPFDSWDQLMRQLDLTKNEIDVVRAGTAGPGDALYAMLMKWVNKTGRNASIHTLLDALERMEERHAKEKIQDLLVDSGKFIYLEDGTGSAVSLE

SEQ ID NO: 772310 - protein, 104 aa, Homo sapiens [sequence omitted]

SEQ ID NO: 772311 - protein, 154 aa, Homo sapiens
MESQEPADLTGVTVQSPGEAQCLLGPAEAEGSQRRRLLVPANGADPTETLMLFFDKFANIVPFDSWDQLMRQLDLTKNEIDVVRAGTAGPGDALYAMLMKWVNKTGRNASIHTLLDALERMEERHAKEKIQDLLVDSGKFIYLEDGTGSAVSLE

SEQ ID NO: 772312 - protein, 274 aa, Homo sapiens
RGPRGQAGATRAWRQQSPLPQEAGPGDSTPLAAAWRVSLLPTPHDVSGSFGIDRAQVVPSSAATIKLHDQSIGTQQWEHSPLGELCPPGSHRSERPGACNRCTEGVGYTNASNNLFACLPCTACKSDEEERSPCTTTRNTACQCKPGTFRNDNSAEMCRKCSTGCPRGMVKVKDCTPWSDIECVHKESGNGHNIWVILVVTLVVPLLLVAVLIVCCCIGSGCGGDPKCMARVVFWRLVVSYEGLGLVDMLHRDLGQQTRGHFGSGAMGARAELA

SEQ ID NO: 772313 - protein, 468 aa, Homo sapiens; identical to SEQ ID NO: 772309

SEQ ID NO: 772314 - protein, 261 aa, Homo sapiens
QSGQLISQYKSLLQGGVPLGRQGTCWLTPRPPVPPLQRSTASCHRNRSQTALPTTSPRGTTWWTSACRPPRTDRSPTSCSAARTCDPCASTQRACTSSARPRHGILWPLPAVPLWPARSSPPSELCTAGPGPRKDRSQCYPVLPGEKLEAPVCCTHETRVPTASWRGGEGGRMDGAGQRRGGRADGAAFSPFPWPTLGSDCLPPSVTGWPSQPVVPTQNRALGQSPKNQAAGAGAGGPPGLSAPTRSSAHSSSHRPPTSAC

SEQ ID NO: 772315 - protein, 209 aa, Homo sapiens
RAALRGAGSAPVGCLWWGCGVADPAGSARTMGTRDDEYDYLFKVVLIGDSGVGKSNLLSRFTRNEFNLESKSTIGVEFATRSIQVDGKTIKAQIWDTAGQERYRAITSAYYRGAVGALLVYDIAKHLTYENVERWLKELRDHADSNIVIMLVGNKSDLRHLRAVPTDEARAFAEKNNLSFIETSALDSTNVEEAFKNILTGGRGPDGCG

SEQ ID NO: 772316 - protein, 144 aa, Homo sapiens
AGRSARRRLRPRRVFVVGLRSRRSRRKRQDNGDPGRRVRLPIQRYYRGAVGALLVYDIAKHLTYENVERWLKELRDHADSNIVIMLVGNKSDLRHLRAVPTDEARAFAEKNNLSFIETSALDSTNVEEAFKNILTGGRGPDGCG

SEQ ID NO: 772317 - protein, 248 aa, Homo sapiens
RAALRGAGSAPVGCLWWGCGVADPAGSARTMGTRDDEYDYLFKVVLIGDSGVGKSNLLSRFTRNEFNLESKSTIGVEFATRSIQVDGKTIKAQIWDTAGQERYRAITSAYYRGAVGALLVYDIAKHLTYENVERWLKELRDHADSNIVIMLVGNKSDLRHLRAVPTDEARAFAEKNNLSFIETSALDSTNVEEAFKNILTEIYRIVSQKQIADRAAHDESPGNNVVDISVPPTTDGQKPNKLQCCQNL

SEQ ID NO: 772318 - protein, 209 aa, Homo sapiens; identical to SEQ ID NO: 772315

SEQ ID NO: 772319 - protein, 94 aa, Homo sapiens
LPRAYYRWTRAHDLRGFLNFTLARAPSSFAAAHNRTCRYRAFRDDDGHYSQTYWNLLAIRLAFVIVFEVAEAPAGSPIHGMRPRPCALPNSSTW

SEQ ID NO: 772320 - protein, 50 aa, Homo sapiens [sequence omitted]

SEQ ID NO: 772321 - protein, 407 aa, Homo sapiens
GRVARARSVPCCGRWPLARLRRLSWRSKMAATAAAVVAEEDTELRDLLVQTLENSGVLNRIKAELRAAVFLALEEQEKVENKTPLVNESLKKFLNTKDGRLVASLVAEFLQFFNLDFTLAVFQPETSTLQGLEGRENLARDLGIIEAEGTVGGPLLLEVIRRCQQKEKGPTTGEGALDLSDVHSPPKSPEGKTSAQTTPSKKANDEANQSDTSVSLSEPKSKSSLHLLSHETKIGSFLSNRTLDGKDKAGLCPDEDDMEGDSFFDDPIPKPEKTYGLRKEPRKQAGSLASLSDAPPLKSGLSSLAGAPSLKDSESKRGNTVLKDLKLISDKIGSLGLGTGEDDDYVDDFNSTSHRSEKSEISIGEEIEEDLSVEIDDINTSDKLDDLTQDLTVSQLSDVADYLEDVA

SEQ ID NO: 772322 - protein, 407 aa, Homo sapiens; identical to SEQ ID NO: 772321

SEQ ID NO: 772323 - protein, 407 aa, Homo sapiens; identical to SEQ ID NO: 772321

SEQ ID NO: 772324 - protein, 414 aa, Homo sapiens
GRVARARSVPCCGRWPLARLRRLSWRSKMAATAAAVVAEEDTELRDLLVQTLENSGVLNRIKAELRAAVFLALEEQEKVENKTPLVNESLKKFLNTKDGRLVASLVAEFLQFFNLDFTLAVFQPETSTYFNFFSELQGLEGRENLARDLGIIEAEGTVGGPLLLEVIRRCQQKEKGPTTGEGALDLSDVHSPPKSPEGKTSAQTTPSKKANDEANQSDTSVSLSEPKSKSSLHLLSHETKIGSFLSNRTLDGKDKAGLCPDEDDMEGDSFFDDPIPKPEKTYGLRKEPRKQAGSLASLSDAPPLKSGLSSLAGAPSLKDSESKRGNTVLKDLKLISDKIGSLGLGTGEDDDYVDDFNSTSHRSEKSEISIGEEIEEDLSVEIDDINTSDKLDDLTQDLTVSQLSDVADYLEDVA

SEQ ID NO: 772325 - protein, 427 aa, Homo sapiens
GRVARARSVPCCGRWPLARLRRLSWRSKMAATAAAVVAEEDTELRDLLVQTLENSGVLNRIKAELRAAVFLALEEQEKVENKTPLVNESLKKFLNTKDGRLVASLVAEFLQFFNLDFTLAVFQPETSTLQGLEGRENLARDLGIIEAEGTVGGPLLLEVIRRCQQKEKGPTTGEGALDLSDVHSPPKSPEGKTSAQTTPSKIPRYKGQGKKKTSGQKAGDKKANDEANQSDTSVSLSEPKSKSSLHLLSHETKIGSFLSNRTLDGKDKAGLCPDEDDMEGDSFFDDPIPKPEKTYGLRKEPRKQAGSLASLSDAPPLKSGLSSLAGAPSLKDSESKRGNTVLKDLKLISDKIGSLGLGTGEDDDYVDDFNSTSHRSEKSEISIGEEIEEDLSVEIDDINTSDKLDDLTQDLTVSQLSDVADYLEDVA

SEQ ID NO: 772326 - protein, 172 aa, Homo sapiens
GRVARARSVPCCGRWPLARLRRLSWRSKMAATAAAVVAEEDTELRDLLVQTLENSGVLNRIKAELRAAVFLALEEQEKVENKTPLVNESLKKFLNTKDGRLVASLVAEFLQFFNLDFTLAVFQPETSTLQGLEGRENLARDLGIIEAEGTVGGPLLLEVIRRSYQRIGWGLS

SEQ ID NO: 772327 - protein, 339 aa, Homo sapiens
GRVARARSVPCCGRWPLARLRRLSWRSKMAATAAAVVAEEDTELRDLLVQTLENSGVLNRIKAELRAAVFLALEEQEKVENKTPLVNESLKKFLNTKDGRLVASLVAEFLQFFNLDFTLAVFQPETSTLQGLEGRENLARDLGIIEAEGTVGGPLLLEVIRRCQQKEKGPTTGEGALDLSDVHSPPKSPEGKTSAQTTPSKKANDEANQSDTSVSLSEPKSKSSLHLLSHETKIGSFLSNRTLDGKDKAGLCPDEDDMEGDSFFDDPIPKPEKTYGLRKEPRKQAGSLASLSDAPPLKSGLSSLAGAPSLKDSESKRGNTVLKDLKLISDKIGSLGLEE

SEQ ID NO: 772328 - protein, 194 aa, Homo sapiens
GRVARARSVPCCGRWPLARLRRLSWRSKMAATAAAVVAEEDTELRDLLVQTLENSGVLNRIKVRPEAGAGPGGSAGLAWTAGVTTVAARRPPPWRGTGAGGHWGRAPAWPPSCPPHRGGRLVRSCGPGGHRGLGVPGPSPASFRGGGTAGLGGHTGGPQLGPGVRPQRLFLRLGHDPRRESSASSRSLGVGELV

SEQ ID NO: 772329 - protein, 330 aa, Homo sapiens
GRVARARSVPCCGRWPLARLRRLSWRSKMAATAAAVVAEEDTELRDLLVQTLENSGVLNRIKAELRAAVFLALEEQEKVENKTPLVNESLKKFLNTKDGRLVASLVAEFLQFFNLDFTLAVFQPETSTLQGLEGRENLARDLGIIEAEGTVGGPLLLEVIRRCQQKEKGPTTGEGALDLSDVHSPPKSPEGKTSAQTTPSKKANDEANQSDTSVSLSEPKSKSSLHLLSHETKIGSFLSNRTLDGKDKAGLCPDEDDMEGDSFFDDPIPKPEKTYGLRKEPRKQAGSLASLSDAPPLKSGLSSLAGAPSLKDSESKCPKMWTSILGIFFL

SEQ ID NO: 772330 - protein, 123 aa, Homo sapiens
MPRHLCAIPPTHHTTHASHHLYITPPVHHTDRKSHHPCITPPVHHAACAPHCSQITSHCLCTTLIANHTTPASQHPCITPPMHHTACAPHSLCTTSPVHHTTSSPALSSVLGPHCYGVLNMNL

SEQ ID NO: 772331 - protein, 120 aa, Homo sapiens
MSTTGQCGRRDALGLLRDDHERPYSFCLGLLDTHPGRSQTNLTTCYCQTGRKSVLATKRGLGACSMSPATRVLLGACFTSPATRVLTDETREIMKQQTHTTLSSVLTKKIVTCKKNKFLV

SEQ ID NO: 772332 - protein, 98 aa, Homo sapiens
TKNSNPYWDSGGLVAALCPQDLKKTALQTEAGKLDINLKELRTTTDSPGAAFVPGAAATQAAQERPPLQLLHATCSLQKVTTTGIPMPMPSSQTFTPH

SEQ ID NO: 772333 - protein, 52 aa, Homo sapiens
MRSTLSRVHCNCCVRFRFPATALLGERCHCVPAASGTESWDLRRQEGPALTG

SEQ ID NO: 772334 - protein, 613 aa, Homo sapiens
MGPTLAVPTPYGCIGCKLPQPEYPPALIIFMFCAMVITIVVDLIGNSMVILAVTKNKKLRNSGNIFVVSLSVADMLVAIYPYPLMLHAMSIGGWDLSQLQCQMVGFITGLSVVGSIFNIVAIAINRYCYICHSLQYERIFSVRNTCIYLVITWIMTVLAVLPNMYIGTIEYDPRTYTCIFNYLNNPVFTVTIVCIHFVLPLLIVGFCYVRIWTKVLAARDPAGQNPDNQLAEVRNFLTMFVIFLLFAVCWCPINVLTVLVAVSPKEMAGKIPNWLYLAAYFIAYFNSCLNAVIYGLLNENFRREYWTIFHAMRHPIIFFPGLISDIREMQEARTLARARAHARDQAREQDRAHACPAVEETPMNVRNVPLPGDAAAGHPDRASGHPKPHSRSSSAYRKSASTHHKSVFSHSKAASGHLKPVSGHSKPASGHPKSATVYPKPASVHFKGDSVHFKGDSVHFKPDSVHFKPASSNPKPITGHHVSAGSHSKSAFSAATSHPKPIKPATSHAEPTTADYPKPATTSHPKPAAADNPELSASHCPEIPAIAHPVSDDSDLPESASSPAAGPTKPAASQLESDTIADLPDPTVVTTSTNDYHDVVVVDVEDDPDEMAV

SEQ ID NO: 772335 - protein, 79 aa, Homo sapiens
VFVFSRRLLLHSFSSAGDLGVCILEDCEEPQLLPSSSDQAVGSGSFGVSCGQQRLACSVGFFHITSDIFLLPNHRLMEY

SEQ ID NO: 772336 - protein, 63 aa, Homo sapiens
MTQAKPKPKMITPDSRPKNKNRVKSKQNEAVSPLAKPLVHTAQVLGKQQPLMHARNSFHGKPL

SEQ ID NO: 772337 - protein, 33 aa, Homo sapiens
HVEEVGSEESMATETMFMRGPGGIWRGWSLRLT

SEQ ID NO: 772338 - protein, 69 aa, Homo sapiens
NARVQKHLKALTSELANARDESKKTANDMIHAENMRLGRDKYKTLRQIRLGNTKQRIDECESMYWAPSL

SEQ ID NO: 772339 - protein, 2035 aa, Homo sapiens
GPLLPLLVVAACVLPGAGGTCPERALERREEEANVVLTGTVEEILNVDPVQHTYSCKVRVWRYLKGKDLVARESLLDGGNKVVISGFGDPLICDNQVSTGDTRIFFVNPAPPYLWPAHKNELMLNSSLMRITLRNLEEVEFCVEDKPGTHFTPVPPTPPDACRGMLCGFGAVCEPNAEGPGRASCVCKKSPCPSVVAPVCGSDASTYSNECELQRAQCSQQRRIRLLSRGPCGSRDPCSNVTCSFGSTCARSADGLTASCLCPATCRGAPEGTVCGSDGADYPGECQLLRRACARQENVFKKFDGPCDPCQGALPDPSRSCRVNPRTRRPEMLLRPESCPARQAPVCGDDGVTYENDCVMGRSGAARGLLLQKVRSGQCQGRDQCPEPCRFNAVCLSRRGRPRCSCDRVTCDGAYRPVCAQDGRTYDSDCWRQQAECRQQRAIPSKHQGPCDQAPSPCLGVQCAFGATCAVKNGQAACECLQACSSLYDPVCGSDGVTYGSACELEATACTLGREIQVARKGPCDRCGQCRFGALCEAETGRCVCPSECVALAQPVCGSDGHTYPSECMLHVHACTHQISLHVASAGPCETCGDAVCAFGAVCSAGQCVCPRCEHPPPGPVCGSDGVTYGSACELREAACLQQTQIEEARAGPCEQAECGSGGSGSGEDGDCEQELCRQRGGIWDEDSEDGPCVCDFSCQSVPGSPVCGSDGVTYSTECELKKARCESQRGLYVAAQGACRGPTFAPLPPVAPLHCAQTPYGCCQDNITAARGVGLAGCPSACQCNPHGSYGGTCDPATGQCSCRPGVGGLRCDRCEPGFWNFRGIVTDGRSGCTPCSCDPQGAVRDDCEQMTGLCSCKPGVAGPKCGQCPDGRALGPAGCEADASAPATCAEMRCEFGARCVEESGSAHCVCPMLTCPEANATKVCGSDGVTYGNECQLKTIACRQGLQISIQSLGPCQEAVAPSTHPTSASVTVTTPGLLLSQALPAPPGALPLAPSSTAHSQTTPPPSSRPRTTASVPRTTVWPVLTVPPTAPSPAPSLVASAFGESGSTDGSSDEELSGDQEASGGGSGGLEPLEGSSVATPGPPVERASCYNSALGCCSDGKTPSLDAEGSNCPATKVFQGVLELEGVEGQELFYTPEMADPKSELFGETARSIESTLDDLFRNSDVKKDFRSVRLRDLGPGKSVRAIVDVHFDPTTAFRAPDVARALLRQIQVSRRRSLGVRRPLQEHVRFMDFDWFPAFITGATSGAIAAGATARATTASRLPSSAVTPRAPHPSHTSQPVAKTTAAPTTRRPPTTAPSRVPGRRPPAPQQPPKPCDSQPCFHGGTCQDWALGGGFTCSCPAGRGGAVCEKVLGAPVPAFEGRSFLAFPTLRAYHTLRLALEFRALEPQGLLLYNGNARGKDFLALALLDGRVQLRFDTGSGPAVLTSAVPVEPGQWHRLELSRHWRRGTLSVDGETPVLGESPSGTDGLNLDTDLFVGGVPEDQAAVALERTFVGAGLRGCIRLLDVNNQRLELGIGPGAATRGSGVGECGDHPCLPNPCHGGAPCQNLEAGRFHCQCPPGRVGPTCADEKSPCQPNPCHGAAPCRVLPEGGAQCECPLGREGTFCQTASGQDGSGPFLADFNGFSHLELRGLHTFARDLGEKMALEVVFLARGPSGLLLYNGQKTDGKGDFVSLALRDRRLEFRYDLGKGAAVIRSREPVTLGAWTRVSLERNGRKGALRVGDGPRVLGESPVPHTVLNLKEPLYVGGAPDFSKLARAAAVSSGFDGAIQLVSLGGRQLLTPEHVLRQVDVTSFAGHPCTRASGHPCLNGASCVPREAAYVCLCPGGFSGPHCEKGLVEKSAGDVDTLAFDGRTFVEYLNAVTESEKALQSNHFELSLRTEATQGLVLWSGKATERADYVALAIVDGHLQLSYNLGSQPVVLRSTVPVNTNRWLRVVAHREQREGSLQVGNEAPVTGSSPLGATQLDTDGALWLGGLPELPVGPALPKAYGTGFVGCLRDVVVGRHPLHLLEDAVTKPELRPCPTP

SEQ ID NO: 772340 - protein, 905 aa, Homo sapiens
TYPLAFLPRYPEQHQGSPAWAAPQVLAYPLPQLDDLFRNSDVKKDFRSVRLRDLGPGKSVRAIVDVHFDPTTAFRAPDVARALLRQIQVSRRRSLGVRRPLQEHVRFMDFDWFPAFITGATSGAIAAGATARATTASRLPSSAVTPRAPHPSHTSQPVAKTTAAPTTRRPPTTAPSRVPGRRPPAPQQPPKPCDSQPCFHGGTCQDWALGGGFTCSCPAGRGGAVCEKVLGAPVPAFEGRSFLAFPTLRAYHTLRLALEFRALEPQGLLLYNGNARGKDFLALALLDGRVQLRFDTGSGPAVLTSAVPVEPGQWHRLELSRHWRRGTLSVDGETPVLGESPSGTDGLNLDTDLFVGGVPEDQAAVALERTFVGAGLRGCIRLLDVNNQRLELGIGPGAATRGSGVGECGDHPCLPNPCHGGAPCQNLEAGRFHCQCPPGRVGPTCADEKSPCQPNPCHGAAPCRVLPEGGAQCECPLGREGTFCQTASGQDGSGPFLADFNGFSHLELRGLHTFARDLGEKMALEVVFLARGPSGLLLYNGQKTDGKGDFVSLALRDRRLEFRYDLGKGAAVIRSREPVTLGAWTRVSLERNGRKGALRVGDGPRVLGESPVPHTVLNLKEPLYVGGAPDFSKLARAAAVSSGFDGAIQLVSLGGRQLLTPEHVLRQVDVTSFAGHPCTRASGHPCLNGASCVPREAAYVCLCPGGFSGPHCEKGLVEKSAGDVDTLAFDGRTFVEYLNAVTESEKALQSNHFELSLRTEATQGLVLWSGKATERADYVALAIVDGHLQLSYNLGSQPVVLRSTVPVNTNRWLRVVAHREQREGSLQVGNEAPVTGSSPLGATQLDTDGALWLGGLPELPVGPALPKAYGTGFVGCLRDVVVGRHPLHLLEDAVTKPELRPCPTP

SEQ ID NO: 772341 - protein, 694 aa, Homo sapiens
MGNPRSFSSRPSRSPFAVLGAPVPAFEGRSFLAFPTLRAYHTLRLALEFRALEPQGLLLYNGNARGKDFLALALLDGRVQLRFDTGSGPAVLTSAVPVEPGQWHRLELSRHWRRGTLSVDGETPVLGESPSGTDGLNLDTDLFVGGVPEDQAAVALERTFVGAGLRGCIRLLDVNNQRLELGIGPGAATRGSGVGECGDHPCLPNPCHGGAPCQNLEAGRFHCQCPPGRVGPTCADEKSPCQPNPCHGAAPCRVLPEGGAQCECPLGREGTFCQTASGQDGSGPFLADFNGFSHLELRGLHTFARDLGEKMALEVVFLARGPSGLLLYNGQKTDGKGDFVSLALRDRRLEFRYDLGKGAAVIRSREPVTLGAWTRVSLERNGRKGALRVGDGPRVLGESPVPHTVLNLKEPLYVGGAPDFSKLARAAAVSSGFDGAIQLVSLGGRQLLTPEHVLRQVDVTSFAGHPCTRASGHPCLNGASCVPREAAYVCLCPGGFSGPHCEKGLVEKSAGDVDTLAFDGRTFVEYLNAVTESEKALQSNHFELSLRTEATQGLVLWSGKATERADYVALAIVDGHLQLSYNLGSQPVVLRSTVPVNTNRWLRVVAHREQREGSLQVGNEAPVTGSSPLGATQLDTDGALWLGGLPELPVGPALPKAYGTGFVGCLRDVVVGRHPLHLLEDAVTKPELRPCPTP

SEQ ID NO: 772342 - protein, 2054 aa, Homo sapiens
GPLLPLLVVAACVLPGAGGTCPERALERREEEANVVLTGTVEEILNVDPVQHTYSCKVRVWRYLKGKDLVARESLLDGGNKVVISGFGDPLICDNQVSTGDTRIFFVNPAPPYLWPAHKNELMLNSSLMRITLRNLEEVEFCVEDKPGTHFTPVPPTPPDACRGMLCGFGAVCEPNAEGPGRASCVCKKSPCPSVVAPVCGSDASTYSNECELQRAQCSQQRRIRLLSRGPCGSRDPCSNVTCSFGSTCARSADGLTASCLCPATCRGAPEGTVCGSDGADYPGECQLLRRACARQENVFKKFDGPCDPCQGALPDPSRSCRVNPRTRRPEMLLRPESCPARQAPVCGDDGVTYENDCVMGRSGAARGLLLQKVRSGQCQGRDQCPEPCRFNAVCLSRRGRPRCSCDRVTCDGAYRPVCAQDGRTYDSDCWRQQAECRQQRAIPSKHQGPCDQAPSPCLGVQCAFGATCAVKNGQAACECLQACSSLYDPVCGSDGVTYGSACELEATACTLGREIQVARKGPCDRCGQCRFGALCEAETGRCVCPSECVALAQPVCGSDGHTYPSECMLHVHACTHQISLHVASAGPCETCGDAVCAFGAVCSAGQCVCPRCEHPPPGPVCGSDGVTYGSACELREAACLQQTQIEEARAGPCEQAECGSGGSGSGEDGDCEQELCRQRGGIWDEDSEDGPCVCDFSCQSVPGSPVCGSDGVTYSTECELKKARCESQRGLYVAAQGACRGPTFAPLPPVAPLHCAQTPYGCCQDNITAARGVGLAGCPSACQCNPHGSYGGTCDPATGQCSCRPGVGGLRCDRCEPGFWNFRGIVTDGRSGCTPCSCDPQGAVRDDCEQMTGLCSCKPGVAGPKCGQCPDGRALGPAGCEADASAPATCAEMRCEFGARCVEESGSAHCVCPMLTCPEANATKVCGSDGVTYGNECQLKTIACRQGLQISIQSLGPCQEAVAPSTHPTSASVTVTTPGLLLSQALPAPPGALPLAPSSTAHSQTTPPPSSRPRTTASVPRTTVWPVLTVPPTAPSPAPSLVASAFGESGSTDGSSDEELSGDQEASGGGSGGLEPLEGSSVATPGPPVERASCYNSALGCCSDGKTPSLDAEGSNCPATKVFQGVLELEGVEGQELFYTPEMADPKSELFGETARSIESTLDDLFRNSDVKKDFRSVRLRDLGPGKSVRAIVDVHFDPTTAFRAPDVARALLRQIQVSRRRSLGVRRPLQEHVRFMDFDWFPAFITGATSGAIAAGATARATTASRLPSSAVTPRAPHPSHTSQPVAKTTAAPTTRRPPTTAPSRVPGRRPPAPQQPPKPCDSQPCFHGGTCQDWALGGGFTCSCPAGRGGAVCEKVLGAPVPAFEGRSFLAFPTLRAYHTLRLALEFRALEPQGLLLYNGNARGKDFLALALLDGRVQLRFDTGSGPAVLTSAVPVEPGQWHRLELSRHWRRGTLSVDGETPVLGESPSGTDGLNLDTDLFVGGVPEDQAAVALERTFVGAGLRGCIRLLDVNNQRLELGIGPGAATRGSGVGECGDHPCLPNPCHGGAPCQNLEAGRFHCQCPPGRVGPTCADEKSPCQPNPCHGAAPCRVLPEGGAQCECPLGREGTFCQTASGQDGSGPFLADFNGFSHLELRGLHTFARDLGEKMALEVVFLARGPSGLLLYNGQKTDGKGDFVSLALRDRRLEFRYDLGKGAAVIRSREPVTLGAWTRVSLERNGRKGALRVGDGPRVLGESPVPHTVLNLKEPLYVGGAPDFSKLARAAAVSSGFDGAIQLVSLGGRQLLTPEHVLRQVDVTSFAGHPCTRASGHPCLNGASCVPREAAYVCLCPGGFSGPHCEKGLVEKSAGDVDTLAFDGRTFVEYLNAVTETNWPMRSPSPKLWIPGPFTGEKALQSNHFELSLRTEATQGLVLWSGKATERADYVALAIVDGHLQLSYNLGSQPVVLRSTVPVNTNRWLRVVAHREQREGSLQVGNEAPVTGSSPLGATQLDTDGALWLGGLPELPVGPALPKAYGTGFVGCLRDVVVGRHPLHLLEDAVTKPELRPCPTP

SEQ ID NO: 772343 - protein, 2035 aa, Homo sapiens; identical to SEQ ID NO: 772339

SEQ ID NO: 772344 - protein, 2035 aa, Homo sapiens; identical to SEQ ID NO: 772339

SEQ ID NO: 772345 - protein, 75 aa, Homo sapiens
PRQHAWLIFVGTGFRHVGQAGFELLTSSDPPTSASQNVGITGFVGCLRDVVVGRHPLHLLEDAVTKPELRPCPTP

SEQ ID NO: 772346 - protein, 962 aa, Homo sapiens
GPLLPLLVVAACVLPGAGGTCPERALERREEEANVVLTGTVEEILNVDPVQHTYSCKVRVWRYLKGKDLVARESLLDGGNKVVISGFGDPLICDNQVSTGDTRIFFVNPAPPYLWPAHKNELMLNSSLMRITLRNLEEVEFCVEDKPGTHFTPVPPTPPDACRGMLCGFGAVCEPNAEGPGRASCVCKKSPCPSVVAPVCGSDASTYSNECELQRAQCSQQRRIRLLSRGPCGSRDPCSNVTCSFGSTCARSADGLTASCLCPATCRGAPEGTVCGSDGADYPGECQLLRRACARQENVFKKFDGPCDPCQGALPDPSRSCRVNPRTRRPEMLLRPESCPARQAPVCGDDGVTYENDCVMGRSGAARGLLLQKVRSGQCQGRDQCPEPCRFNAVCLSRRGRPRCSCDRVTCDGAYRPVCAQDGRTYDSDCWRQQAECRQQRAIPSKHQGPCDQAPSPCLGVQCAFGATCAVKNGQAACECLQACSSLYDPVCGSDGVTYGSACELEATACTLGREIQVARKGPCDRCGQCRFGALCEAETGRCVCPSECVALAQPVCGSDGHTYPSECMLHVHACTHQISLHVASAGPCETCGDAVCAFGAVCSAGQCVCPRCEHPPPGPVCGSDGVTYGSACELREAACLQQTQIEEARAGPCEQAECGSGGSGSGEDGDCEQELCRQRGGIWDEDSEDGPCVCDFSCQSVPGSPVCGSDGVTYSTECELKKARCESQRGLYVAAQGACRGPTFAPLPPVAPLHCAQTPYGCCQDNITAARGVGLAGCPSACQCNPHGSYGGTCDPATGQCSCRPGVGGLRCDRCEPGFWNFRGIVTDGRSGCTPCSCDPQGAVRDDCEQMTGLCSCKPGVAGPKCGQCPDGRALGPAGCEADASAPATCAEMRCEFGARCVEESGSAHCVCPMLTCPEANATKVCGSDGVTYGNECQLKTIACRQGPARGYREELTVGWG

SEQ ID NO: 772347 - protein, 963 aa, Homo sapiens
GPLLPLLVVAACVLPGAGGTCPERALERREEEANVVLTGTVEEILNVDPVQHTYSCKVRVWRYLKGKDLVARESLLDGGNKVVISGFGDPLICDNQVSTGDTRIFFVNPAPPYLWPAHKNELMLNSSLMRITLRNLEEVEFCVEDKPGTHFTPVPPTPPDACRGMLCGFGAVCEPNAEGPGRASCVCKKSPCPSVVAPVCGSDASTYSNECELQRAQCSQQRRIRLLSRGPCGSRDPCSNVTCSFGSTCARSADGLTASCLCPATCRGAPEGTVCGSDGADYPGECQLLRRACARQENVFKKFDGPCDPCQGALPDPSRSCRVNPRTRRPEMLLRPESCPARQAPVCGDDGVTYENDCVMGRSGAARGLLLQKVRSGQCQGRDQCPEPCRFNAVCLSRRGRPRCSCDRVTCDGAYRPVCAQDGRTYDSDCWRQQAECRQQRAIPSKHQGPCDQAPSPCLGVQCAFGATCAVKNGQAACECLQACSSLYDPVCGSDGVTYGSACELEATACTLGREIQVARKGPCDRCGQCRFGALCEAETGRCVCPSECVALAQPVCGSDGHTYPSECMLHVHACTHQISLHVASAGPCETCGDAVCAFGAVCSAGQCVCPRCEHPPPGPVCGSDGVTYGSACELREAACLQQTQIEEARAGPCEQAECGSGGSGSGEDGDCEQELCRQRGGIWDEDSEDGPCVCDFSCQSVPGSPVCGSDGVTYSTECELKKARCESQRGLYVAAQGACRGPTFAPLPPVAPLHCAQTPYGCCQDNITAARGVGLAGCPSACQCNPHGSYGGTCDPATGQCSCRPGVGGLRCDRCEPGFWNFRGIVTDGRSGCTPCSCDPQGAVRDDCEQMTGLCSCKPGVAGPKCGQCPDGRALGPAGCEADASAPATCAEMRCEFGARCVEESGSAHCVCPMLTCPEANATKVCGSDGVTYGNECQLKTIACRQGLQISIQSLGPCQGEA

SEQ ID NO: 772348 - protein, 2035 aa, Homo sapiens; identical to SEQ ID NO: 772339

SEQ ID NO: 772349 - protein, 1940 aa, Homo sapiens
MPPLPLARDTRQPPGASLLVRGFMVPCNACLILLATATLGFAVLLFLNNYKPGTHFTPVPPTPPDACRGMLCGFGAVCEPNAEGPGRASCVCKKSPCPSVVAPVCGSDASTYSNECELQRAQCSQQRRIRLLSRGPCGSRDPCSNVTCSFGSTCARSADGLTASCLCPATCRGAPEGTVCGSDGADYPGECQLLRRACARQENVFKKFDGPCDPCQGALPDPSRSCRVNPRTRRPEMLLRPESCPARQAPVCGDDGVTYENDCVMGRSGAARGLLLQKVRSGQCQGRDQCPEPCRFNAVCLSRRGRPRCSCDRVTCDGAYRPVCAQDGRTYDSDCWRQQAECRQQRAIPSKHQGPCDQAPSPCLGVQCAFGATCAVKNGQAACECLQACSSLYDPVCGSDGVTYGSACELEATACTLGREIQVARKGPCDRCGQCRFGALCEAETGRCVCPSECVALAQPVCGSDGHTYPSECMLHVHACTHQISLHVASAGPCETCGDAVCAFGAVCSAGQCVCPRCEHPPPGPVCGSDGVTYGSACELREAACLQQTQIEEARAGPCEQAECGSGGSGSGEDGDCEQELCRQRGGIWDEDSEDGPCVCDFSCQSVPGSPVCGSDGVTYSTECELKKARCESQRGLYVAAQGACRGPTFAPLPPVAPLHCAQTPYGCCQDNITAARGVGLAGCPSACQCNPHGSYGGTCDPATGQCSCRPGVGGLRCDRCEPGFWNFRGIVTDGRSGCTPCSCDPQGAVRDDCEQMTGLCSCKPGVAGPKCGQCPDGRALGPAGCEADASAPATCAEMRCEFGARCVEESGSAHCVCPMLTCPEANATKVCGSDGVTYGNECQLKTIACRQGLQISIQSLGPCQEAVAPSTHPTSASVTVTTPGLLLSQALPAPPGALPLAPSSTAHSQTTPPPSSRPRTTASVPRTTVWPVLTVPPTAPSPAPSLVASAFGESGSTDGSSDEELSGDQEASGGGSGGLEPLEGSSVATPGPPVERASCYNSALGCCSDGKTPSLDAEGSNCPATKVFQGVLELEGVEGQELFYTPEMADPKSELFGETARSIESTLDDLFRNSDVKKDFRSVRLRDLGPGKSVRAIVDVHFDPTTAFRAPDVARALLRQIQVSRRRSLGVRRPLQEHVRFMDFDWFPAFITGATSGAIAAGATARATTASRLPSSAVTPRAPHPSHTSQPVAKTTAAPTTRRPPTTAPSRVPGRRPPAPQQPPKPCDSQPCFHGGTCQDWALGGGFTCSCPAGRGGAVCEKVLGAPVPAFEGRSFLAFPTLRAYHTLRLALEFRALEPQGLLLYNGNARGKDFLALALLDGRVQLRFDTGSGPAVLTSAVPVEPGQWHRLELSRHWRRGTLSVDGETPVLGESPSGTDGLNLDTDLFVGGVPEDQAAVALERTFVGAGLRGCIRLLDVNNQRLELGIGPGAATRGSGVGECGDHPCLPNPCHGGAPCQNLEAGRFHCQCPPGRVGPTCADEKSPCQPNPCHGAAPCRVLPEGGAQCECPLGREGTFCQTASGQDGSGPFLADFNGFSHLELRGLHTFARDLGEKMALEVVFLARGPSGLLLYNGQKTDGKGDFVSLALRDRRLEFRYDLGKGAAVIRSREPVTLGAWTRVSLERNGRKGALRVGDGPRVLGESPVPHTVLNLKEPLYVGGAPDFSKLARAAAVSSGFDGAIQLVSLGGRQLLTPEHVLRQVDVTSFAGHPCTRASGHPCLNGASCVPREAAYVCLCPGGFSGPHCEKGLVEKSAGDVDTLAFDGRTFVEYLNAVTESEKALQSNHFELSLRTEATQGLVLWSGKATERADYVALAIVDGHLQLSYNLGSQPVVLRSTVPVNTNRWLRVVAHREQREGSLQVGNEAPVTGSSPLGATQLDTDGALWLGGLPELPVGPALPKAYGTGFVGCLRDVVVGRHPLHLLEDAVTKPELRPCPTP

SEQ ID NO: 772350 - protein, 2186 aa, Homo sapiens
GPLLPLLVVAACVLPGAGGTCPERALERREEEANVVLTGTVEEILNVDPVQHTYSCKVRVWRYLKGKDLVARESLLDGGNKVVISGFGDPLICDNQVSTGDTRIFFVNPAPPYLWPAHKNELMLNSSLMRITLRNLEEVEFCVEDKPGTHFTPVPPTPPDACRGMLCGFGAVCEPNAEGPGRASCVCKKSPCPSVVAPVCGSDASTYSNECELQRAQCSQQRRIRLLSRGPCGSRDPCSNVTCSFGSTCARSADGLTASCLCPATCRGAPEGTVCGSDGADYPGECQLLRRACARQENVFKKFDGPCDPCQGALPDPSRSCRVNPRTRRPEMLLRPESCPARQAPVCGDDGVTYENDCVMGRSGAARGLLLQKVRSGQCQGRDQCPEPCRFNAVCLSRRGRPRCSCDRVTCDGAYRPVCAQDGRTYDSDCWRQQAECRQQRAIPSKHQGPCDQAPSPCLGVQCAFGATCAVKNGQAACECLQACSSLYDPVCGSDGVTYGSACELEATACTLGREIQVARKGPCDRCGQCRFGALCEAETGRCVCPSECVALAQPVCGSDGHTYPSECMLHVHACTHQISLHVASAGPCETCGDAVCAFGAVCSAGQCVCPRCEHPPPGPVCGSDGVTYGSACELREAACLQQTQIEEARAGPCEQAECGSGGSGSGEDGDCEQELCRQRGGIWDEDSEDGPCVCDFSCQSVPGSPVCGSDGVTYSTECELKKARCESQRGLYVAAQGACRGPTFAPLPPVAPLHCAQTPYGCCQDNITAARGVGLAGCPSACQCNPHGSYGGTCDPATGQCSCRPGVGGLRCDRCEPGFWNFRGIVTDGRSGCTPCSCDPQGAVRDDCEQMTGLCSCKPGVAGPKCGQCPDGRALGPAGCEADASAPATCAEMRCEFGARCVEESGSAHCVCPMLTCPEANATKVCGSDGVTYGNECQLKTIACRQGLQISIQSLGPCQEAVAPSTHPTSASVTVTTPGLLLSQALPAPPGALPLAPSSTAHSQTTPPPSSRPRTTASVPRTTVWPVLTVPPTAPSPAPSLVASAFGESGSTDGSSDEELSGDQEASGGGSGGEQGSRTWGGWAGAERLHQSLGSERVSPGLEPLEGSSVATPGPPVERASCYNSALGCCSDGKTPSLDAEGSNCPGEWTAGRGECEDSLGSAEVLPPRLGSRSVPGVMVLGLGPLKHVRAGDPTPNPSLSLQAGVAHCSEESSWYRHQPHPGVPTEPHDHLTNIHLPLHPCGLLLGPVPGPAWMPGRCQAGPHCTSPTATKVFQGVLELEGVEGQELFYTPEMADPKSELFGETARSIESTLDDLFRNSDVKKDFRSVRLRDLGPGKSVRAIVDVHFDPTTAFRAPDVARALLRQIQVSRRRSLGVRRPLQEHVRFMDFDWFPAFITGATSGAIAAGATARATTASRLPSSAVTPRAPHPSHTSQPVAKTTAAPTTRRPPTTAPSRVPGRRPPAPQQPPKPCDSQPCFHGGTCQDWALGGGFTCSCPAGRGGAVCEKVLGAPVPAFEGRSFLAFPTLRAYHTLRLALEFRALEPQGLLLYNGNARGKDFLALALLDGRVQLRFDTGSGPAVLTSAVPVEPGQWHRLELSRHWRRGTLSVDGETPVLGESPSGTDGLNLDTDLFVGGVPEDQAAVALERTFVGAGLRGCIRLLDVNNQRLELGIGPGAATRGSGVGECGDHPCLPNPCHGGAPCQNLEAGRFHCQCPPGRVGPTCADEKSPCQPNPCHGAAPCRVLPEGGAQCECPLGREGTFCQTASGQDGSGPFLADFNGFSHLELRGLHTFARDLGEKMALEVVFLARGPSGLLLYNGQKTDGKGDFVSLALRDRRLEFRYDLGKGAAVIRSREPVTLGAWTRVSLERNGRKGALRVGDGPRVLGESPVPHTVLNLKEPLYVGGAPDFSKLARAAAVSSGFDGAIQLVSLGGRQLLTPEHVLRQVDVTSFAGHPCTRASGHPCLNGASCVPREAAYVCLCPGGFSGPHCEKGLVEKSAGDVDTLAFDGRTFVEYLNAVTESEKALQSNHFELSLRTEATQGLVLWSGKATERADYVALAIVDGHLQLSYNLGSQPVVLRSTVPVNTNRWLRVVAHREQREGSLQVGNEAPVTGSSPLGATQLDTDGALWLGGLPELPVGPALPKAYGTGFVGCLRDVVVGRHPLHLLEDAVTKPELRPCPTP

SEQ ID NO: 772351 - protein, 1530 aa, Homo sapiens
GPLLPLLVVAACVLPGAGGTCPERALERREEEANVVLTGTVEEILNVDPVQHTYSCKVRVWRYLKGKDLVARESLLDGGNKVVISGFGDPLICDNQVSTGDTRIFFVNPAPPYLWPAHKNELMLNSSLMRITLRNLEEVEFCVEDKPGTHFTPVPPTPPDACRGMLCGFGAVCEPNAEGPGRASCVCKKSPCPSVVAPVCGSDASTYSNECELQRAQCSQQRRIRLLSRGPCGSRDPCSNVTCSFGSTCARSADGLTASCLCPATCRGAPEGTVCGSDGADYPGECQLLRRACARQENVFKKFDGPCDPCQGALPDPSRSCRVNPRTRRPEMLLRPESCPARQAPVCGDDGVTYENDCVMGRSGAARGLLLQKVRSGQCQGRDQCPEPCRFNAVCLSRRGRPRCSCDRVTCDGAYRPVCAQDGRTYDSDCWRQQAECRQQRAIPSKHQGPCDQAPSPCLGVQCAFGATCAVKNGQAACECLQACSSLYDPVCGSDGVTYGSACELEATACTLGREIQVARKGPCDRCGQCRFGALCEAETGRCVCPSECVALAQPVCGSDGHTYPSECMLHVHACTHQISLHVASAGPCETCGDAVCAFGAVCSAGQCVCPRCEHPPPGPVCGSDGVTYGSACELREAACLQQTQIEEARAGPCEQAECGSGGSGSGEDGDCEQELCRQRGGIWDEDSEDGPCVCDFSCQSVPGSPVCGSDGVTYSTECELKKARCESQRGLYVAAQGACRGPTFAPLPPVAPLHCAQTPYGCCQDNITAARGVGLAGCPSACQCNPHGSYGGTCDPATGQCSCRPGVGGLRCDRCEPGFWNFRGIVTDGRSGCTPCSCDPQGAVRDDCEQMTGLCSCKPGVAGPKCGQCPDGRALGPAGCEADASAPATCAEMRCEFGARCVEESGSAHCVCPMLTCPEANATKVCGSDGVTYGNECQLKTIACRQGLQISIQSLGPCQEAVAPSTHPTSASVTVTTPGLLLSQALPAPPGALPLAPSSTAHSQTTPPPSSRPRTTASVPRTTVWPVLTVPPTAPSPAPSLVASAFGESGSTDGSSDEELSGDQEASGGGSGGLEPLEGSSVATPGPPVERASCYNSALGCCSDGKTPSLDAEGSNCPATKVFQGVLELEGVEGQELFYTPEMADPKSELFGETARSIESTLDDLFRNSDVKKDFRSVRLRDLGPGKSVRAIVDVHFDPTTAFRAPDVARALLRQIQVSRRRSLGVRRPLQEHVRFMDFDWFPAFITGATSGAIAAGATARATTASRLPSSAVTPRAPHPSHTSQPVAKTTAAPTTRRPPTTAPSRVPGRRPPASCVPREAAYVCLCPGGFSGPHCEKGLVEKSAGDVDTLAFDGRTFVEYLNAVTESEKALQSNHFELSLRTEATQGLVLWSGKATERADYVALAIVDGHLQLSYNLGSQPVVLRSTVPVNTNRWLRVVAHREQREGSLQVGNEAPVTGSSPLGATQLDTDGALWLGGLPELPVGPALPKAYGTGFVGCLRDVVVGRHPLHLLEDAVTKPELRPCPTP

SEQ ID NO: 772352 - protein, 224 aa, Homo sapiens
MARYEAGFISAAGRAAAYVCLCPGGFSGPHCEKGLVEKSAGDVDTLAFDGRTFVEYLNAVTESEKALQSNHFELSLRTEATQGLVLWSGKATERADYVALAIVDGHLQLSYNLGSQPVVLRSTVPVNTNRWLRVVAHREQREGSLQVGNEAPVTGSSPLGATQLDTDGALWLGGLPELPVGPALPKAYGTGFVGCLRDVVVGRHPLHLLEDAVTKPELRPCPTP

SEQ ID NO: 772353 - protein, 2035 aa, Homo sapiens; identical to SEQ ID NO: 772339

SEQ ID NO: 772354 - protein, 1164 aa, Homo sapiens
GPLLPLLVVAACVLPGAGGTCPERALERREEEANVVLTGTVEEILNVDPVQHTYSCKVRVWRYLKGKDLVARESLLDGGNKVVISGFGDPLICDNQVSTGDTRIFFVNPAPPYLWPAHKNELMLNSSLMRITLRNLEEVEFCVEDKPGTHFTPVPPTPPDACRGMLCGFGAVCEPNAEGPGRASCVCKKSPCPSVVAPVCGSDASTYSNECELQRAQCSQQRRIRLLSRGPCGSRDPCSNVTCSFGSTCARSADGLTASCLCPATCRGAPEGTVCGSDGADYPGECQLLRRACARQENVFKKFDGPCDPCQGALPDPSRSCRVNPRTRRPEMLLRPESCPARQAPVCGDDGVTYENDCVMGRSGAARGLLLQKVRSGQCQGRDQCPEPCRFNAVCLSRRGRPRCSCDRVTCDGAYRPVCAQDGRTYDSDCWRQQAECRQQRAIPSKHQGPCDQAPSPCLGVQCAFGATCAVKNGQAACECLQACSSLYDPVCGSDGVTYGSACELEATACTLGREIQVARKGPCDRCGQCRFGALCEAETGRCVCPSECVALAQPVCGSDGHTYPSECMLHVHACTHQISLHVASAGPCETCGDAVCAFGAVCSAGQCVCPRCEHPPPGPVCGSDGVTYGSACELREAACLQQTQIEEARAGPCEQAECGSGGSGSGEDGDCEQELCRQRGGIWDEDSEDGPCVCDFSCQSVPGSPVCGSDGVTYSTECELKKARCESQRGLYVAAQGACRGPTFAPLPPVAPLHCAQTPYGCCQDNITAARGVGLAGCPSACQCNPHGSYGGTCDPATGQCSCRPGVGGLRCDRCEPGFWNFRGIVTDGRSGCTPCSCDPQGAVRDDCEQMTGLCSCKPGVAGPKCGQCPDGRALGPAGCEADASAPATCAEMRCEFGARCVEESGSAHCVCPMLTCPEANATKVCGSDGVTYGNECQLKTIACRQGLQISIQSLGPCQEAVAPSTHPTSASVTVTTPGLLLSQALPAPPGALPLAPSSTAHSQTTPPPSSRPRTTASVPRTTVWPVLTVPPTAPSPAPSLVASAFGESGSTDGSSDEELSGDQEASGGGSGGEQGSRTWGGWAGAERLHQSLGSERVSPGLEPLEGSSVATPGPPVERASCYNSALGCCSDGKTPSLDMTVSLCHTPGPARGYREELTVGWG

SEQ ID NO: 772355 - protein, 101 aa, Homo sapiens
SLLPFPIPSSSTAPLASPHRGWRGAVGDGRDQGPAEGAGPSLPVATPVPRTHSPPVPSSRRACFCAALHVTVSADTHWDCQGGVSRGPCLCPVLFQCGGQP

SEQ ID NO: 772356 - protein, 402 aa, Homo sapiens
MPPVSRSSYSEDIVGSRRRRRSSSGSPPSPQSRCSSWDGCSRSHSRGREGLRPPWSELDVGALYPFSRSGSRGRLPRFRNYAFASSWSTSYSGYRCHRHCYAEERQSAEDYEKEESHRQRRLKERERIGELGAPEVWGPSPKFPQLDSDEHTPVEDEEEVTHQKSSSSDSNSEEHRKKKTSRSRNKKKRKNKSSKRKHRKYSDSDSNSESDTNSDSDDDKKRVKAKKKKKKKKHKTKKKKNKKTKKESSDSSCKDSEEDLSEATWMEQPNVADTMDLIGPEAPIIHTSQDEKPLKYGHALLPGEGAAMAEYVKAGKRIPRRGEIGLTSEEIGSFECSGYVMSGSRHRRMEAVRLRKENQIYSADEKRALASFNQEERRKRESKILASFREMVHKKTKGKDDK

SEQ ID NO: 772357 - protein, 114 aa, Homo sapiens
CRSKDPCSLPAEEDSVLEKLGERKPCNSQPSELSSETSGIARPEEGRPVVSGTGNDITTPPNKELPPSPEKKTKAGKGGKKKQNKQDKQSPNKREARNSNIPNLIYRQVDTCFR

SEQ ID NO: 772358 - protein, 141 aa, Homo sapiens
MADLSLADALTEPSPDIEGEIKRDFIATLEAEAFDDVVGETVGKTDYIPLLDVDEKTGNSESKKKPCSETSQIEDTPSSKPTLLANGGHGVEGSDTTGSPTEFLEEKMAYQEYPNSQNWPEDTNFCFQPEQVVDPIQTESL

SEQ ID NO: 772359 - protein, 211 aa, Homo sapiens
MADLSLADALTEPSPDIEGEIKRDFIATLEAEAFDDVVGETVGKTDYIPLLDVDEKTGNSESKKKPCSETSQIEDLPLPPHPASLSFHLPLDTPSSKPTLLANGGHGVEGSDTTGSPTEFLEEKMAYQEYPNSQNWPEDTNFCFQPEQVVDPIQTDPFKMYHDDDLADLVFPSSATADTSIFAGQNDPLKDSYDRCCTQGGLGKLKFQTQS

SEQ ID NO: 772360 - protein, 313 aa, Homo sapiens
GSREATPGEMENSITPGCPVIGVVNDNSEQLKCESPLLVSLAHPAPIIEHSPTTIPPITMVFTQEHLNASCHIRDHDKELEKLSSTEEAVLNQAPQQKKAVRRALSECSHLSVPPAVNLADKYPELPAREEPSSGLLPPPSSPMPSPTPGKLGAPAMKRSMTVGEEQTASYKLSPGKLPILSTKEIPPFICEEPVAKKREELAHFSNSSSNSGKKELGTAGLYLHSKLEQIPEGSSKEKGQEDFSETRIDSCSQVCQRGEKQPGQTALAGKKEIEVTATQSTPSFLFEKPPRDGMFLNFASIGNKQTARKEPK

SEQ ID NO: 772361 - protein, 1152 aa, Homo sapiens
MADLSLADALTEPSPDIEGEIKRDFIATLEAEAFDDVVGETVGKTDYIPLLDVDEKTGNSESKKKPCSETSQIEDTPSSKPTLLANGGHGVEGSDTTGSPTEFLEEKMAYQEYPNSQNWPEDTNFCFQPEQVVDPIQTDPFKMYHDDDLADLVFPSSATADTSIFAGQNDPLKDSYGMSPCNTAVVPQGWSVEALNSPHSESFVSPEAVAEPPQPTAVPLELAKEIEMASEERPPAQALEIMMGLKTTDMAPSKETEMALAKDMALATKTEVALAKDMESPTKLDVTLAKDMQPSMESDMALVKDMELPTEKEVALVKDVRWPTETDVSSAKNVVLPTETEVAPAKDVTLLKETERASPIKMDLAPSKDMGPPKENKKETERASPIKMDLAPSKDMGPPKENKIVPAKDLVLLSEIEVAQANDIISSTEISSAEKVALSSETEVALARDMTLPPETNVILTKDKALPLEAEVAPVKDMAQLPETEIAPAKDVAPSTVKEVGLLKDMSPLSETEMALGKDVTPPPETEVVLIKNVCLPPEMEVALTEDQVPALKTEAPLAKDGVLTLANNVTPAKDVPPLSETEATPVPIKDMEIAQTQKGISEDSHLESLQDVGQSAAPTFMISPETVTGTGKKCSLPAEEDSVLEKLGERKPCNSQPSELSSETSGIARPEEGRPVVSGTGNDITTPPNKELPPSPEKKTKPLATTQPAKTSTSKAKTQPTSLPKQPAPTTIGGLNKKPMSLASGLVPAAPPKRPAVASARPSILPSKDVKPKPIADAKAPEKRASPSKPASAPASRSGSKSTQTVAKTTTAAAVASTGPSSRSPSTLLPKKPTAIKTEGKPAEVKKMTAKSVPADLSRPKSTSTSSMKKTTTLSGTAPAAGVVPSRVKATPMPSRPSTTPFIDKKPTSAKPSSTTPRLSRLATNTSAPDLKNVRSKVGSTENIKHQPGGGRAKVEKKTEAAATTRKPESNAVTKTAGPIASAQKQPAGKVQIVSKKVSYSHIQSKCGSKDNIKHVPGGGNVQIQNKKVDISKVSSKCGSKANIKHKPGGGDVKIESQKLNFKEKAQAKVGSLDNVGHLPAGGAVKTEGGGSEAPLCPGPPAGEEPAISEAAPEAGAPTSASGLNGHPTLSGGGDQREAQTLDSQIQETSI

SEQ ID NO: 772362 - protein, 1152 aa, Homo sapiens; identical to SEQ ID NO: 772361

SEQ ID NO: 772363 - protein, 1152 aa, Homo sapiens; identical to SEQ ID NO: 772361

SEQ ID NO: 772364 - protein, 1152 aa, Homo sapiens; identical to SEQ ID NO: 772361

SEQ ID NO: 772365 - protein, 1114 aa, Homo sapiens
MADLSLADALTEPSPDIEGEIKRDFIATLEAEAFDDVVGETVGKTDYIPLLDVDEKTGNSESKKKPCSETSQIEDTPSSKPTLLANGGHGVEGSDTTGSPTEFLEEKMAYQEYPNSQNWPEDTNFCFQPEQVVDPIQTDPFKMYHDDDLADLVFPSSATADTSIFAGQNDPLKDSYGMSPCNTAVVPQGWSVEALNSPHSESFVSPEAVAEPPQPTAVPLELAKEIEMASEERPPAQALEIMMGLKTTDMAPSKETEMALAKDMALATKTEVALAKDMESPTKLDVTLAKDMQPSMESDMALVKDMELPTEKEVALVKDVRWPTETDVSSAKNVVLPTETEVAPAKDVTLLKETERASPIKMDLAPSKDMGPPKENKKETERASPIKMDLAPSKDMGPPKENKIVPAKDLVLLSEIEVAQANDIISSTEISSAEKVALSSETEVALARDMTLPPETNVILTKDKALPLEAEVAPVKDMAQLPETEIAPAKDVAPSTVKEVGLLKDMSPLSETEMALGKDVTPPPETEVVLIKNVCLPPEMEVALTEDQVPALKTEAPLAKDGVLTLANNVTPAKDVPPLSETEATPVPIKDMEIAQTQKGISEDSHLESLQDVGQSAAPTFMISPETVTGTGKKCSLPAEEDSVLEKLGERKPCNSQPSELSSETSGIARPEEGRPVVSGTGNDITTPPNKELPPSPEKKTKPLATTQPAKTSTSKAKTQPTSLPKQPAPTTIGGLNKKPMSLASGLVPAAPPKRPAVASARPSILPSKDVKPKPIADAKAPEKRASPSKPASAPASRSGSKSTQTVAKTTTAAAVASTGPSSRSPSTLLPKKPTAIKTEGKPAEVKKMTAKSVPADLSRPKSTSTSSMKKTTTLSGTAPAAGVVPSRVKATPMPSRPSTTPFIDKKPTSAKPSSTTPRLSRLATNTSAPDLKNVRSKVGSTENIKHQPGGGRVQIVSKKVSYSHIQSKCGSKDNIKHVPGGGNVQIQNKKVDISKVSSKCGSKANIKHKPGGGDVKIESQKLNFKEKAQAKVGSLDNVGHLPAGGAVKTEGGGSEAPLCPGPPAGEEPAISEAAPEAGAPTSASGLNGHPTLSGGGDQREAQTLDSQIQETSI

SEQ ID NO: 772366 - protein, 1200 aa, Homo sapiens
MADLSLADALTEPSPDIEGEIKRDFIATLEAEAFDDVVGETVGKTDYIPLLDVDEKTGNSESKKKPCSETSQIEDTPSSKPTLLANGGHGVEGSDTTGSPTEFLEEKMAYQEYPNSQNWPEDTNFCFQPEQVVDPIQTDPFKMYHDDDLADLVFPSSATADTSIFAGQNDPLKDSYGMSPCNTAVVPQGWSVEALNSPHSESFVSPEAVAEPPQPTAVPLELAKEIEMASEERPPAQALEIMMGLKTTDMAPSKETEMALAKDMALATKTEVALAKDMESPTKLDVTLAKDMQPSMESDMALVKDMELPTEKEVALVKDVRWPTETDVSSAKNVVLPTETEVAPAKDVTLLKETERASPIKMDLAPSKDMGPPKENKKETERASPIKMDLAPSKDMGPPKENKIVPAKDLVLLSEIEVAQANDIISSTEISSAEKVALSSETEVALARDMTLPPETNVILTKDKALPLEAEVAPVKDMAQLPETEIAPAKDVAPSTVKEVGLLKDMSPLSETEMALGKDVTPPPETEVVLIKNVCLPPEMEVALTEDQVPALKTEAPLAKDGVLTLANNVTPAKDVPPLSETEATPVPIKDMEIAQTQKGISEDSHLESLQDVGQSAAPTFMISPETVTGTGKKCSLPAEEDSVLEKLGERKPCNSQPSELSSETSGIARPEEGRPVVSGTGNDITTPPNKELPPSPEKKTKPLATTQPAKTSTSKAKTQPTSLPKQPAPTTIGGLNKKPMSLASGLVPAAPPKRPAVASARPSILPSKDVKPKPIADAKAPEKRASPSKPASAPASRSGSKSTQTVAKTTTAAAVASTGPSSRSPSTLLPKKPTAIKTEGKPAEVKKMTAKSVPADLSRPKSTSTSSMKKTTTLSGTAPAAGVVPSRVKATPMPSRPSTTPFIDKKPTSAKPSSTTPRLSRLATNTSAPDLKNVRSKVGSTENIKHQPGGGRAKVEKKTEAAATTRKPESNAVTKTAGPIASAQKQPAGKVQIVSKKVSYSHIQSKCGSKDNIKHVPGGGNVQIQNKKVDISKVSSKCGSKANIKHKPGGGDVKIESQKLNFKEKAQAKVGSLDNVGHLPAGGAVKTEGGGSEAPLCPGPPAGEEPAISEAAPEAGAPTSASGLNGHPTLSGGGDQREAQTLDSQIQETMQIETYRLTFRANARARTDHGADIVSRPPHFPGGPNSGSRVLGPLSRAVH

SEQ ID NO: 772367 - protein, 1152 aa, Homo sapiens; identical to SEQ ID NO: 772361

SEQ ID NO: 772368 - protein, 1094 aa, Homo sapiens
MADLSLADALTEPSPDIEGEIKRDFIATLEAEAFDDVVGETVGKTDYIPLLDVDEKTGNSESKKKPCSETSQIEDTPSSKPTLLANGGHGVEGSDTTGSPTEFLEEKMAYQEYPNSQNWPEDTNFCFQPEQVVDPIQTDPFKMYHDDDLADLVFPSSATADTSIFAGQNDPLKDSYGMSPCNTAVVPQGWSVEALNSPHSESFVSPEAVAEPPQPTAVPLELAKEIEMASEERPPAQALEIMMGLKTTDMAPSKETEMALAKDMALATKTEVALAKDMESPTKLDVTLAKDMQPSMESDMALVKDMELPTEKEVALVKDVRWPTETDVSSAKNVVLPTETEVAPAKDVTLLKETERASPIKMDLAPSKDMGPPKENKKETERASPIKMDLAPSKDMGPPKENKIVPAKDLVLLSEIEVAQANDIISSTEISSAEKVALSSETEVALARDMTLPPETNVILTKDKALPLEAEVAPVKDMAQLPETEIAPAKDVAPSTVKEVGLLKDMSPLSETEMALGKDVTPPPETEVVLIKNVCLPPEMEVALTEDQVPALKTEAPLAKDGVLTLANNVTPAKDVPPLSETEATPVPIKDMEIAQTQKGISEDSHLESLQDVGQSAAPTFMISPETVTGTGKKCSLPAEEDSVLEKLGERKPCNSQPSELSSETSGIARPEEGRPVVSGTGNDITTPPNKELPPSPEKKTKPLATTQPAKTSTSKAKTQPTSLPKQPAPTTIGGLNKKPMSLASGLVPAAPPKRPAVASARPSILPSKDVKPKPIADAKAPEKRASPSKPASAPASRSGSKSTQTVAKTTTAAAVASTGPSSRSPSTLLPKKPTAIKTEGKPAEVKKMTAKSVPADLSRPKSTSTSSMKKTTTLSGTAPAAGVVPSRVKATPMPSRPSTTPFIDKKPTSAKPSSTTPRLSRLATNTSAPDLKNVRSKVGSTENIKHQPGGGRAKVEKKTEAAATTRKPESNAVTKTAGPIASAQKQPAGKVQIVSKKVSYSHIQSKCGSKDNIKHVPGGGNVQIQNKKVDISKVSSKCGSKANIKHKPGGGDVKIESQKLNFKEKAQAKVGSLDNVGHLPAGGAVKCRLRPTG

SEQ ID NO: 772369 - protein, 1137 aa, Homo sapiens
MADLSLADALTEPSPDIEGEIKRDFIATLEAEAFDDVVGETVGKTDYIPLLDVDEKTGNSESKKKPCSETSQIEDTPSSKPTLLANGGHGVEGSDTTGSPTEFLEEKMAYQEYPNSQNWPEDTNFCFQPEQVVDPIQTDPFKMYHDDDLADLVFPSSATADTSIFAGQNDPLKDSYGMSPCNTAVVPQGWSVEALNSPHSESFVSPEAVAEPPQPTAVPLELAKEIEMASEERPPAQALEIMMGLKTTDMAPSKETEMALAKDMALATKTEVALAKDMESPTKLDVTLAKDMQPSMESDMALVKDMELPTEKEVALVKDVRWPTETDVSSAKNVVLPTETEVAPAKDVTLLKETERASPIKMDLAPSKDMGPPKENKKETERASPIKMDLAPSKDMGPPKENKIVPAKDLVLLSEIEVAQANDIISSTEISSAEKVALSSETEVALARDMTLPPETNVILTKDKALPLEAEVAPVKDMAQLPETEIAPAKDVAPSTVKEVGLLKDMSPLSETEMALGKDVTPPPETEVVLIKNVCLPPEMEVALTEDQVPALKTEAPLAKDGVLTLANNVTPAKDVPPLSETEATPVPIKDMEIAQTQKGISEDSHLESLQDVGQSAAPTFMISPETVTGTGKKCSLPAEEDSVLEKLGERKPCNSQPSELSSETSGIARPEEGRPVVSGTGNDITTPPNKELPPSPEKKTKPLATTQPAKTSTSKAKTQPTSLPKQPAPTTIGGLNKKPMSLASGLVPAAPPKRPAVASARPSILPSKDVKPKPIADAKAPEKRASPSKPASAPASRSGSKSTQTVAKTTTAAAVASTGPSSRSPSTLLPKKPTAIKTEGKPAEVKKMTAKSVPADLSRPKSTSTSSMKKTTTLSGTAPAAGVVPSRVKATPMPSRPSTTPFIDKKPTSAKPSSTTPRLSRLATNTSAPDLKNVRSKAKVEKKTEAAATTRKPESNAVTKTAGPIASAQKQPAGKVQIVSKKVSYSHIQSKCGSKDNIKHVPGGGNVQIQNKKVDISKVSSKCGSKANIKHKPGGGDVKIESQKLNFKEKAQAKVGSLDNVGHLPAGGAVKTEGGGSEAPLCPGPPAGEEPAISEAAPEAGAPTSASGLNGHPTLSGGGDQREAQTLDSQIQETSI

SEQ ID NO: 772370 - protein, 1152 aa, Homo sapiens; identical to SEQ ID NO: 772361

SEQ ID NO: 772371 - protein, 1185 aa, Homo sapiens
MADLSLADALTEPSPDIEGEIKRDFIATLEAEAFDDVVGETVGKTDYIPLLDVDEKTGNSESKKKPCSETSQIEDTPSSKPTLLANGGHGVEGSDTTGSPTEFLEEKMAYQEYPNSQNWPEDTNFCFQPEQVVDPIQTDPFKMYHDDDLADLVFPSSATADTSIFAGQNDPLKDSYGMSPCNTAVVPQGWSVEALNSPHSESFVSPEAVAEPPQPTAVPLELAKEIEMASEERPPAQALEIMMGLKTTDMAPSKETEMALAKDMALATKTEVALAKDMESPTKLDVTLAKDMQPSMESDMALVKDMELPTEKEVALVKDVRWPTETDVSSAKNVVLPTETEVAPAKDVTLLKETERASPIKMDLAPSKDMGPPKENKKETERASPIKMDLAPSKDMGPPKENKIVPAKDLVLLSEIEVAQANDIISSTEISSAEKVALSSETEVALARDMTLPPETNVILTKDKALPLEAEVAPVKDMAQLPETEIAPAKDVAPSTVKEVGLLKDMSPLSETEMALGKDVTPPPETEVVLIKNVCLPPEMEVALTEDQVPALKTEAPLAKDGVLTLANNVTPAKDVPPLSETEATPVPIKDMEIAQTQKGISEDSHLESLQDVGQSAAPTFMISPETVTGTGKKCSLPAEEDSVLEKLGERKPCNSQPSELSSETSGIARPEEGRPVVSGTGNDITTPPNKELPPSPEKKTKPLATTQPAKTSTSKAKTQPTSLPKQPAPTTIGGLNKKPMSLASGLVPAAPPKRPAVASARPSILPSKDVKPKPIADAKAPEKRASPSKPASAPASRSGSKSTQTVAKTTTAAAVASTGPSSRSPSTLLPKKPTAIKTEGKPAEVKKMTAKSVPADLSRPKSTSTSSMKKTTTLSGTAPAAGVVPSRVKATPMPSRPSTTPFIDKKPTSAKPSSTTPRLSRLATNTSAPDLKNVRSKAKVEKKTEAAATTRKPESNAVTKTAGPIASAQKQPAGKVQIVSKKVSYSHIQSKCGSKDNIKHVPGGGNVQIQNKKVDISKVSSKCGSKANIKHKPGGGDVKIESQKLNFKEKAQAKVGSLDNVGHLPAGGAVKTEGGGSEAPLCPGPPAGEEPAISEAAPEAGAPTSASGLNGHPTLSGGGDQREAQTLDSQIQETMQIETYRLTFRANARARTDHGADIVSRPPHFPGGPNSGSRVLGPLSRAVH

SEQ ID NO: 772372 - protein, 1152 aa, Homo sapiens; identical to SEQ ID NO: 772361

SEQ ID NO: 772373 - protein, 1152 aa, Homo sapiens; identical to SEQ ID NO: 772361

SEQ ID NO: 772374 - protein, 1152 aa, Homo sapiens; identical to SEQ ID NO: 772361

SEQ ID NO: 772375 - protein, 1152 aa, Homo sapiens; identical to SEQ ID NO: 772361

SEQ ID NO: 772376 - protein, 1152 aa, Homo sapiens; identical to SEQ ID NO: 772361

SEQ ID NO: 772377 - protein, 1187 aa, Homo sapiens
MADLSLADALTEPSPDIEGEIKRDFIATLEAEAFDDVVGETVGKTDYIPLLDVDEKTGNSESKKKPCSETSQIEDTPSSKPTLLANGGHGVEGSDTTGSPTEFLEEKMAYQEYPNSQNWPEDTNFCFQPEQVVDPIQTDPFKMYHDDDLADLVFPSSATADTSIFAGQNDPLKDSYGMSPCNTAVVPQGWSVEALNSPHSESFVSPEAVAEPPQPTAVPLELAKEIEMASEERPPAQALEIMMGLKTTDMAPSKETEMALAKDMALATKTEVALAKDMESPTKLDVTLAKDMQPSMESDMALVKDMELPTEKEVALVKDVRWPTETDVSSAKNVVLPTETEVAPAKDVTLLKETERASPIKMDLAPSKDMGPPKENKKETERASPIKMDLAPSKDMGPPKENKIVPAKDLVLLSEIEVAQANDIISSTEISSAEKVALSSETEVALARDMTLPPETNVILTKDKALPLEAEVAPVKDMAQLPETEIAPAKDVAPSTVKEVGLLKDMSPLSETEMALGKDVTPPPETEVVLIKNVCLPPEMEVALTEDQVPALKTEAPLAKDGVLTLANNVTPAKDVPPLSETEATPVPIKDMEIAQTQKGISEDSHLESLQDVGQSAAPTFMISPETVTGTGKKCSLPAEEDSVLEKLGERKPCNSQPSELSSETSGIARPEEGRPVVSGTGNDITTPPNKELPPSPEKKTKPLATTQPAKTSTSKAKTQPTSLPKQPAPTTIGGLNKKPMSLASGLVPAAPPKRPAVASARPSILPSKDVKPKPIADAKAPEKRASPSKPASAPASRSGSKSTQTVAKTTTAAAVASTGPSSRSPSTLLPKKPTAIKTEGKPAEVKKMTAKSVPADLSRPKSTSTSSMKKTTTLSGTAPAAGVVPSRVKATPMPSRPSTTPFIDKKPTSAKPSSTTPRLSRLATNTSAPDLKNVRSKVGSTENIKHQPGGGRAKVEKKTEAAATTRKPESNAVTKTAGPIASAQKQPAGKVQIVSKKVSYSHIQSKCGSKDNIKHVPGGGNVQIQNKKVDISKVSSKCGSKANIKHKPGGGDVKIESQKLNFKEKAQAKVGSLDNVGHLPAGGAVKTEGGGSEAPLCPGPPAGEEPAISEAAPEAGAPTSASGLNGHPTLSGGGDQREAQTLDSQIQETMQIETYRLTFRANARARTDHGADIVSRPRESGDRAEY

SEQ ID NO: 772378 - protein, 1094 aa, Homo sapiens; identical to SEQ ID NO: 772368

SEQ ID NO: 772379 - protein, 1079 aa, Homo sapiens
MADLSLADALTEPSPDIEGEIKRDFIATLEAEAFDDVVGETVGKTDYIPLLDVDEKTGNSESKKKPCSETSQIEDTPSSKPTLLANGGHGVEGSDTTGSPTEFLEEKMAYQEYPNSQNWPEDTNFCFQPEQVVDPIQTDPFKMYHDDDLADLVFPSSATADTSIFAGQNDPLKDSYGMSPCNTAVVPQGWSVEALNSPHSESFVSPEAVAEPPQPTAVPLELAKEIEMASEERPPAQALEIMMGLKTTDMAPSKETEMALAKDMALATKTEVALAKDMESPTKLDVTLAKDMQPSMESDMALVKDMELPTEKEVALVKDVRWPTETDVSSAKNVVLPTETEVAPAKDVTLLKETERASPIKMDLAPSKDMGPPKENKKETERASPIKMDLAPSKDMGPPKENKIVPAKDLVLLSEIEVAQANDIISSTEISSAEKVALSSETEVALARDMTLPPETNVILTKDKALPLEAEVAPVKDMAQLPETEIAPAKDVAPSTVKEVGLLKDMSPLSETEMALGKDVTPPPETEVVLIKNVCLPPEMEVALTEDQVPALKTEAPLAKDGVLTLANNVTPAKDVPPLSETEATPVPIKDMEIAQTQKGISEDSHLESLQDVGQSAAPTFMISPETVTGTGKKCSLPAEEDSVLEKLGERKPCNSQPSELSSETSGIARPEEGRPVVSGTGNDITTPPNKELPPSPEKKTKPLATTQPAKTSTSKAKTQPTSLPKQPAPTTIGGLNKKPMSLASGLVPAAPPKRPAVASARPSILPSKDVKPKPIADAKAPEKRASPSKPASAPASRSGSKSTQTVAKTTTAAAVASTGPSSRSPSTLLPKKPTAIKTEGKPAEVKKMTAKSVPADLSRPKSTSTSSMKKTTTLSGTAPAAGVVPSRVKATPMPSRPSTTPFIDKKPTSAKPSSTTPRLSRLATNTSAPDLKNVRSKVGSTENIKHQPGGGRAKVEKKTEAAATTRKPESNAVTKTAGPIASAQKQPAGKVQIVSKKVSYSHIQSKCGSKDNIKHVPGGGNVQIQNKKVDISKVSSKCGSKANIKHKPGGGDVKIESQKGIPARPWDGCSEEKSRELY

SEQ ID NO: 772380 - protein, 1074 aa, Homo sapiens
MADLSLADALTEPSPDIEGEIKRDFIATLEAEAFDDVVGETVGKTDYIPLLDVDEKTGNSESKKKPCSETSQIEDTPSSKPTLLANGGHGVEGSDTTGSPTEFLEEKMAYQEYPNSQNWPEDTNFCFQPEQVVDPIQTDPFKMYHDDDLADLVFPSSATADTSIFAGQNDPLKDSYGMSPCNTAVVPQGWSVEALNSPHSESFVSPEAVAEPPQPTAVPLELAKEIEMASEERPPAQALEIMMGLKTTDMAPSKETEMALAKDMALATKTEVALAKDMESPTKLDVTLAKDMQPSMESDMALVKDMELPTEKEVALVKDVRWPTETDVSSAKNVVLPTETEVAPAKDVTLLKETERASPIKMDLAPSKDMGPPKENKKETERASPIKMDLAPSKDMGPPKENKIVPAKDLVLLSEIEVAQANDIISSTEISSAEKVALSSETEVALARDMTLPPETNVILTKDKALPLEAEVAPVKDMAQLPETEIAPAKDVAPSTVKEVGLLKDMSPLSETEMALGKDVTPPPETEVVLIKNVCLPPEMEVALTEDQVPALKTEAPLAKDGVLTLANNVTPAKDVPPLSETEATPVPIKDMEIAQTQKGISEDSHLESLQDVGQSAAPTFMISPETVTGTGKKCSLPAEEDSVLEKLGERKPCNSQPSELSSETSGIARPEEGRPVVSGTGNDITTPPNKELPPSPEKKTKPLATTQPAKTSTSKAKTQPTSLPKQPAPTTIGGLNKKPMSLASGLVPAAPPKRPAVASARPSILPSKDVKPKPIADAKAPEKRASPSKPASAPASRSGSKSTQTVAKTTTAAAVASTGPSSRSPSTLLPKKPTAIKTEGKPAEVKKMTAKSVPADLSRPKSTSTSSMKKTTTLSGTAPAAGVVPSRVKATPMPSRPSTTPFIDKKPTSAKPSSTTPRLSRLATNTSAPDLKNVRSKVGSTENIKHQPGGGRAKVEKKTEAAATTRKPESNAVTKTAGPIASAQKQPAGKPCTLYKAPLHLVPLIERLGTPQQIAIAREGDLLTKERLCCGLSMFEVILTRIRSYLQDPIWLGPPPTNGVGTSMSVWSPPAVE

SEQ ID NO: 772381 - protein, 905 aa, Homo sapiens
MADLSLADALTEPSPDIEGEIKRDFIATLEAEAFDDVVGETVGKTDYIPLLDVDEKTGNSESKKKPCSETSQIEDTPSSKPTLLANGGHGVEGSDTTGSPTEFLEEKMAYQEYPNSQNWPEDTNFCFQPEQVVDPIQTDPFKMYHDDDLADLVFPSSATADTSIFAGQNDPLKDSYGMSPCNTAVVPQGWSVEALNSPHSESFVSPEAVAEPPQPTAVPLELAKEIEMASEERPPAQALEIMMGLKTTDMAPSKETEMALAKDMALATKTEVALAKDMESPTKLDVTLAKDMQPSMESDMALVKDMELPTEKEVALVKDVRWPTETDVSSAKNVVLPTETEVAPAKDVTLLKETERASPIKMDLAPSKDMGPPKENKKETERASPIKMDLAPSKDMGPPKENKIVPAKDLVLLSEIEVAQANDIISSTEISSAEKVALSSETEVALARDMTLPPETNVILTKDKALPLEAEVAPVKDMAQLPETEIAPAKDVAPSTVKEVGLLKDMSPLSETEMALGKDVTPPPETEVVLIKNVCLPPEMEVALTEDQVPALKTEAPLAKDGVLTLANNVTPAKDVPPLSETEATPVPIKDMEIAQTQKGISEDSHLESLQDVGQSAAPTFMISPETVTGTGKKCSLPAEEDSVLEKLGERKPCNSQPSELSSETSGIARPEEGRPVVSGTGNDITTPPNKELPPSPEKKTKPLATTQPAKTSTSKAKTQPTSLPKQPAPTTIGGLNKKPMSLASGLVPAAPPKRPAVASARPSILPSKDVKPKPIADAKAPEKRASPSKPASAPASRSGSKSTQTVAKTTTAAAVASTGPSSRSPSTLLPKKPTAIKTEGKPAEVKKMTAKSVPADLSRPKSTSTSSMKKTTTLSGTAPAAGVVPSRVSHPPPPPNITKKTEHK

SEQ ID NO: 772382 - protein, 869 aa, Homo sapiens
MADLSLADALTEPSPDIEGEIKRDFIATLEAEAFDDVVGETVGKTDYIPLLDVDEKTGNSESKKKPCSETSQIEDTPSSKPTLLANGGHGVEGSDTTGSPTEFLEEKMAYQEYPNSQNWPEDTNFCFQPEQVVDPIQTDPFKMYHDDDLADLVFPSSATADTSIFAGQNDPLKDSYGMSPCNTAVVPQGWSVEALNSPHSESFVSPEAVAEPPQPTAVPLELAKEIEMASEERPPAQALEIMMGLKTTDMAPSKETEMALAKDMALATKTEVALAKDMESPTKLDVTLAKDMQPSMESDMALVKDMELPTEKEVALVKDVRWPTETDVSSAKNVVLPTETEVAPAKDVTLLKETERASPIKMDLAPSKDMGPPKENKKETERASPIKMDLAPSKDMGPPKENKIVPAKDLVLLSEIEVAQANDIISSTEISSAEKVALSSETEVALARDMTLPPETNVILTKDKALPLEAEVAPVKDMAQLPETEIAPAKDVAPSTVKEVGLLKDMSPLSETEMALGKDVTPPPETEVVLIKNVCLPPEMEVALTEDQVPALKTEAPLAKDGVLTLANNVTPAKDVPPLSETEATPVPIKDMEIAQTQKGISEDSHLESLQDVGQSAAPTFMISPETVTGTGKKCSLPAEEDSVLEKLGERKPCNSQPSELSSETSGIARPEEGRPVVSGTGNDITTPPNKELPPSPEKKTKPLATTQPAKTSTSKAKTQPTSLPKQPAPTTIGGLNKKPMSLASGLVPAAPPKRPAVASARPSILPSKDVKPKPIADAKAPEKRASPSKPASAPASRSGSKSTQTVAKTTTAAAVASTGPSSRSPSTLLPKKPTAIKTEGKPAEVKKMTAKSVPADLSRPKSKLTVLE

SEQ ID NO: 772383 - protein, 640 aa, Homo sapiens
MADLSLADALTEPSPDIEGEIKRDFIATLEAEAFDDVVGETVGKTDYIPLLDVDEKTGNSESKKKPCSETSQIEDTPSSKPTLLANGGHGVEGSDTTGSPTEFLEEKMAYQEYPNSQNWPEDTNFCFQPEQVVDPIQTDPFKMYHDDDLADLVFPSSATADTSIFAGQNDPLKDSYGMSPCNTAVVPQGWSVEALNSPHSESFVSPEAVAEPPQPTAVPLELAKEIEMASEERPPAQALEIMMGLKTTDMAPSKETEMALAKDMALATKTEVALAKDMESPTKLDVTLAKDMQPSMESDMALVKDMELPTEKEVALVKDVRWPTETDVSSAKNVVLPTETEVAPAKDVTLLKETERASPIKMDLAPSKDMGPPKENKKETERASPIKMDLAPSKDMGPPKENKIVPAKDLVLLSEIEVAQANDIISSTEISSAEKVALSSETEVALARDMTLPPETNVILTKDKALPLEAEVAPVKDMAQLPETEIAPAKDVAPSTVKEVGLLKDMSPLSETEMALGKDVTPPPETEVVLIKNVCLPPEMEVALTEDQVPALKTEAPLAKDGVLTLANNVTPAKDVPPLSETEATPVPIKDMEIAQTQKGISEDSHLESLQDVGQSAAPTFMISPGTCLCLFSVFLSTRL

SEQ ID NO: 772384 - protein, 978 aa, Homo sapiens
MADLSLADALTEPSPDIEGEIKRDFIATLEAEAFDDVVGETVGKTDYIPLLDVDEKTGNSESKKKPCSETSQIEDTPSSKPTLLANGGHGVEGSDTTGSPTEFLEEKMAYQEYPNSQNWPEDTNFCFQPEQVVDPIQTDPFKMYHDDDLADLVFPSSATADTSIFAGQNDPLKDSYGMSPCNTAVVPQGWSVEALNSPHSESFVSPEAVAEPPQPTAVPLELAKEIEMASEERPPAQALEIMMGLKTTDMAPSKETEMALAKDMALATKTEVALAKDMESPTKLDVTLAKDMQPSMESDMALVKDMELPTEKEVALVKDVRWPTETDVSSAKNVVLPTETEVAPAKDVTLLKETERASPIKMDLAPSKDMGPPKENKKETERASPIKMDLAPSKDMGPPKENKIVPAKDLVLLSEIEVAQANDIISSTEISSAEKVALSSETEVALARDMTLPPETNVILTKDKALPLEAEVAPVKDMAQLPETEIAPAKDVAPSTVKEVGLLKDMSPLSETEMALGKDVTPPPETEVVLIKNVCLPPEMEVALTEDQVPALKTEATTIGGLNKKPMSLASGLVPAAPPKRPAVASARPSILPSKDVKPKPIADAKAPEKRASPSKPASAPASRSGSKSTQTVAKTTTAAAVASTGPSSRSPSTLLPKKPTAIKTEGKPAEVKKMTAKSVPADLSRPKSTSTSSMKKTTTLSGTAPAAGVVPSRVKATPMPSRPSTTPFIDKKPTSAKPSSTTPRLSRLATNTSAPDLKNVRSKVGSTENIKHQPGGGRAKVEKKTEAAATTRKPESNAVTKTAGPIASAQKQPAGKVQIVSKKVSYSHIQSKCGSKDNIKHVPGGGNVQIQNKKVDISKVSSKCGSKANIKHKPGGGDVKIESQKLNFKEKAQAKVGSLDNVGHLPAGGAVKTEGGGSEAPLCPGPPAGEEPAISEAAPEAGAPTSASGLNGHPTLSGGGDQREAQTLDSQIQETSI

SEQ ID NO: 772385 - protein, 117 aa, Homo sapiens
MADLSLADALTEPSPDIEGEIKRDFIATLEAEAFDDVVGETVGKTDYIPLLDVDEKTGNSESKKKPCSETSQIEDTPSSKPTLLANGGHGVEGSDTTGSLACLSTLGLLQHQTSDLS

SEQ ID NO: 772386 - protein, 134 aa, Homo sapiens
MADLSLADALTEPSPDIEGEIKRDFIATLEAEAFDDVVGETVGKTDYIPLLDVDEKTGNSESKKKPCSETSQIEDLPLPPHPASLSFHLPLDTPSSKPTLLANGGHGVEGSDTTGSLACLSTLGLLQHQTSDLS

SEQ ID NO: 772387 - protein, 72 aa, Homo sapiens
DLSPTPTSTKSTTVTPITTTTTVLGFPRMSPCNTAVVPQGWSVEALNSPHSESFVSPEAVAEPPQPTAEVNY

SEQ ID NO: 772388 - protein, 134 aa, Homo sapiens; identical to SEQ ID NO: 772386

SEQ ID NO: 772389 - protein, 1152 aa, Homo sapiens; identical to SEQ ID NO: 772361

SEQ ID NO: 772390 - protein, 1152 aa, Homo sapiens; identical to SEQ ID NO: 772361

SEQ ID NO: 772391 - protein, 1131 aa, Homo sapiens
MADLSLADALTEPSPDIEGEIKRDFIATLEAEAFDDVVGETVGKTDYIPLLDVDEKTGNSESKKKPCSETSQIEDTPSSKPTLLANGGHGVEGSDTTGSPTEFLEEKMAYQEYPNSQNWPEDTNFCFQPEQVVDPIQTDPFKMYHDDDLADLVFPSSATADTSIFAGQNDPLKDSYGMSPCNTAVVPQGWSVEALNSPHSESFVSPEAVAEPPQPTAVPLELAKEIEMASEERPPAQALEIMMGLKTTDMAPSKETEMALAKDMALATKTEVALAKDMESPTKLDVTLAKDMQPSMESDMALVKDMELPTEKEVALVKDVRWPTETDVSSAKNVVLPTETEVAPAKDVTLLKETERASPIKMDLAPSKDMGPPKENKKETERASPIKMDLAPSKDMGPPKENKIVPAKDLVLLSEIEVAQANDIISSTEISSAEKVALSSETEVALARDMTLPPETNVILTKDKALPLEAEVAPVKDMAQLPETEIAPAKDVAPSTVKEVGLLKDMSPLSETEMALGKDVTPPPETEVVLIKNVCLPPEMEVALTEDQVPALKTEAPLAKDGVLTLANNVTPAKDVPPLSETEATPVPIKDMEIAQTQKGISEDSHLESLQDVGQSAAPTFMISPETVTGTGKKCSLPAEEDSVLEKLGERKPCNSQPSELSSETSGIARPEEGRPVVSGTGNDITTPPNKELPPSPEKKTKPLATTQPAKTSTSKAKTQPTSLPKQPAPTTIGGLNKKPMSLASGLVPAAPPKRPAVASARPSILPSKDVKPKPIADAKAPEKRASPSKPASAPASRSGSKSTQTVAKTTTAAAVASTGPSSRSPSTLLPKKPTAIKTEGKPAEVKKMTAKSVPADLSRPKSTSTSSMKKTTTLSGTAPAAGVVPSRVKATPMPSRPSTTPFIDKKPTSAKPSSTTPRLSRLATNTSAPDLKNVRSKVGSTENIKHQPGGGRVQIQNKKVDISKVSSKCGSKANIKHKPGGGDVKIESQKLNFKEKAQAKVGSLDNVGHLPAGGAVKTEGGGSEAPLCPGPPAGEEPAISEAAPEAGAPTSASGLNGHPTLSGGGDQREAQTLDSQIQETMQIETYRLTFRANARARTDHGADIVSRPPHFPGGPNSGSRVLGPLSRAVH

SEQ ID NO: 772392 - protein, 1121 aa, Homo sapiens
MADLSLADALTEPSPDIEGEIKRDFIATLEAEAFDDVVGETVGKTDYIPLLDVDEKTGNSESKKKPCSETSQIEDTPSSKPTLLANGGHGVEGSDTTGSPTEFLEEKMAYQEYPNSQNWPEDTNFCFQPEQVVDPIQTDPFKMYHDDDLADLVFPSSATADTSIFAGQNDPLKDSYGMSPCNTAVVPQGWSVEALNSPHSESFVSPEAVAEPPQPTAVPLELAKEIEMASEERPPAQALEIMMGLKTTDMAPSKETEMALAKDMALATKTEVALAKDMESPTKLDVTLAKDMQPSMESDMALVKDMELPTEKEVALVKDVRWPTETDVSSAKNVVLPTETEVAPAKDVTLLKETERASPIKMDLAPSKDMGPPKENKKETERASPIKMDLAPSKDMGPPKENKIVPAKDLVLLSEIEVAQANDIISSTEISSAEKVALSSETEVALARDMTLPPETNVILTKDKALPLEAEVAPVKDMAQLPETEIAPAKDVAPSTVKEVGLLKDMSPLSETEMALGKDVTPPPETEVVLIKNVCLPPEMEVALTEDQVPALKTEAPLAKDGVLTLANNVTPAKDVPPLSETEATPVPIKDMEIAQTQKGISEDSHLESLQDVGQSAAPTFMISPETVTGTGKKCSLPAEEDSVLEKLGERKPCNSQPSELSSETSGIARPEEGRPVVSGTGNDITTPPNKELPPSPEKKTKPLATTQPAKTSTSKAKTQPTSLPKQPAPTTIGGLNKKPMSLASGLVPAAPPKRPAVASARPSILPSKDVKPKPIADAKAPEKRASPSKPASAPASRSGSKSTQTVAKTTTAAAVASTGPSSRSPSTLLPKKPTAIKTEGKPAEVKKMTAKSVPADLSRPKSTSTSSMKKTTTLSGTAPAAGVVPSRVKATPMPSRPSTTPFIDKKPTSAKPSSTTPRLSRLATNTSAPDLKNVRSKVGSTENIKHQPGGGRAKVEKKTEAAATTRKPESNAVTKTAGPIASAQKQPAGKVQIQNKKVDISKVSSKCGSKANIKHKPGGGDVKIESQKLNFKEKAQAKVGSLDNVGHLPAGGAVKTEGGGSEAPLCPGPPAGEEPAISEAAPEAGAPTSASGLNGHPTLSGGGDQREAQTLDSQIQETSI

SEQ ID NO: 772393 - protein, 1152 aa, Homo sapiens; identical to SEQ ID NO: 772361

SEQ ID NO: 772394 - protein, 1152 aa, Homo sapiens; identical to SEQ ID NO: 772361

SEQ ID NO: 772395 - protein, 1152 aa, Homo sapiens; identical to SEQ ID NO: 772361

SEQ ID NO: 772396 - protein, 1152 aa, Homo sapiens; identical to SEQ ID NO: 772361

SEQ ID NO: 772397 - protein, 1152 aa, Homo sapiens; identical to SEQ ID NO: 772361

SEQ ID NO: 772398 - protein, 1152 aa, Homo sapiens; identical to SEQ ID NO: 772361

SEQ ID NO: 772399 - protein, 1128 aa, Homo sapiens
MADLSLADALTEPSPDIEGEIKRDFIATLEAEAFDDVVGETVGKTDYIPLLDVDEKTGNSESKKKPCSETSQIEDTPSSKPTLLANGGHGVEGSDTTGSPTEFLEEKMAYQEYPNSQNWPEDTNFCFQPEQVVDPIQTDPFKMYHDDDLADLVFPSSATADTSIFAGQNDPLKDSYGMSPCNTAVVPQGWSVEALNSPHSESFVSPEAVAEPPQPTAVPLELAKEIEMASEERPPAQALEIMMGLKTTDMAPSKETEMALAKDMALATKTEVALAKDMESPTKLDVTLAKDMQPSMESDMALVKDMELPTEKEVALVKDVRWPTETDVSSAKNVVLPTETEVAPAKDVTLLKETERASPIKMDLAPSKDMGPPKENKKETERASPIKMDLAPSKDMGPPKENKIVPAKDLVLLSEIEVAQANDIISSTEISSAEKVALSSETEVALARDMTLPPETNVILTKDKALPLEAEVAPVKDMAQLPETEIAPAKDVAPSTVKEVGLLKDMSPLSETEMALGKDVTPPPETEVVLIKNVCLPPEMEVALTEDQVPALKTEAPLAKDGVLTLANNVTPAKDVPPLSETEATPVPIKDMEIAQTQKGISEDSHLESLQDVGQSAAPTFMISPETVTGTGKKCSLPAEEDSVLEKLGERKPCNSQPSELSSETSGIARPEEGRPVVSGTGNDITTPPNKELPPSPEKKTKPLATTQPAKTSTSKAKTQPTSLPKQPAPTTIGGLNKKPMSLASGLVPAAPPKRPAVASARPSILPSKDVKPKPIADAKAPEKRASPSKPASAPASRSGSKSTQTVAKTTTAAAVASTGPSSRSPSTLLPKKPTAIKTEGKPAEVKKMTAKSVPADLSRPKSTSTSSMKKTTTLSGTAPAAGVVPSRVKATPMPSRPSTTPFIDKKPTSAKPSSTTPRLSRLATNTSAPDLKNVRSKVGSTENIKHQPGGGRAKVEKKTEAAATTRKPESNAVTKTAGPIASAQKQPAGKVQIVSKKVSYSHIQSKCGSKDNIKHVPGGGNVQIQNKKVDISKVSSKCGSKANIKHKPGGGDVKIESQKLNFKEKAQAKVGSLDNVGHLPAGGAVKVASGSLGRHSWGGVGTMQLGSGSSQVGTCHRPSVSSGVMSS

SEQ ID NO: 772400 - protein, 1087 aa, Homo sapiens
MADLSLADALTEPSPDIEGEIKRDFIATLEAEAFDDVVGETVGKTDYIPLLDVDEKTGNSESKKKPCSETSQIEDTPSSKPTLLANGGHGVEGSDTTGSPTEFLEEKMAYQEYPNSQNWPEDTNFCFQPEQVVDPIQTDPFKMYHDDDLADLVFPSSATADTSIFAGQNDPLKDSYGMSPCNTAVVPQGWSVEALNSPHSESFVSPEAVAEPPQPTAVPLELAKEIEMASEERPPAQALEIMMGLKTTDMAPSKETEMALAKDMALATKTEVALAKDMESPTKLDVTLAKDMQPSMESDMALVKDMELPTEKEVALVKDVRWPTETDVSSAKNVVLPTETEVAPAKDVTLLKETERASPIKMDLAPSKDMGPPKENKKETERASPIKMDLAPSKDMGPPKENKIVPAKDLVLLSEIEVAQANDIISSTEISSAEKVALSSETEVALARDMTLPPETNVILTKDKALPLEAEVAPVKDMAQLPETEIAPAKDVAPSTVKEVGLLKDMSPLSETEMALGKDVTPPPETEVVLIKNVCLPPEMEVALTEDQVPALKTEAPLAKDGVLTLANNVTPAKDVPPLSETEATPVPIKDMEIAQTQKGISEDSHLESLQDVGQSAAPTFMISPETVTGTGKKCSLPAEEDSVLEKLGERKPCNSQPSELSSETSGIARPEEGRPVVSGTGNDITTPPNKELPPSPEKKTKPLATTQPAKTSTSKAKTQPTSLPKQPAPTTIGGLNKKPMSLASGLVPAAPPKRPAVASARPSILPSKDVKPKPIADAKAPEKRASPSKPASAPASRSGSKSTQTVAKTTTAAAVASTGPSSRSPSTLLPKKPTAIKTEGKPAEVKKMTAKSVPADLSRPKSTSTSSMKKTTTLSGTAPAAGVVPSRVKATPMPSRPSTTPFIDKKPTSAKPSSTTPRLSRLATNTSAPDLKNVRSKVGSTENIKHQPGGGRAKVEKKTEAAATTRKPESNAVTKTAGPIASAQKQPAGKVQIVSKKVSYSHIQSKCGSKDNIKHVPGGGNVQIQNKKVDISKVSSKCGSKANIKHKPGEWCLPCPLGLQGMSSCHGSAGQPAGWQGFHLCAFSIP

SEQ ID NO: 772401 - protein, 1017 aa, Homo sapiens
MADLSLADALTEPSPDIEGEIKRDFIATLEAEAFDDVVGETVGKTDYIPLLDVDEKTGNSESKKKPCSETSQIEDTPSSKPTLLANGGHGVEGSDTTGSPTEFLEEKMAYQEYPNSQNWPEDTNFCFQPEQVVDPIQTDPFKMYHDDDLADLVFPSSATADTSIFAGQNDPLKDSYGMSPCNTAVVPQGWSVEALNSPHSESFVSPEAVAEPPQPTAVPLELAKEIEMASEERPPAQALEIMMGLKTTDMAPSKETEMALAKDMALATKTEVALAKDMESPTKLDVTLAKDMQPSMESDMALVKDMELPTEKEVALVKDVRWPTETDVSSAKNVVLPTETEVAPAKDVTLLKETERASPIKMDLAPSKDMGPPKENKKETERASPIKMDLAPSKDMGPPKENKIVPAKDLVLLSEIEVAQANDIISSTEISSAEKVALSSETEVALARDMTLPPETNVILTKDKALPLEAEVAPVKDMAQLPETEIAPAKDVAPSTVKEVGLLKDMSPLSETEMALGKDVTPPPETEVVLIKNVCLPPEMEVALTEDQVPALKTEAPLAKDGVLTLANNVTPAKDVPPLSETEATPVPIKDMEIAQTQKGISEDSHLESLQDVGQSAAPTFMISPETVTGTGKKCSLPAEEDSVLEKLGERKPCNSQPSELSSETSGIARPEEGRPVVSGTGNDITTPPNKELPPSPEKKTKPLATTQPAKTSTSKAKTQPTSLPKQPAPTTIGGLNKKPMSLASGLVPAAPPKRPAVASARPSILPSKDVKPKPIADAKAPEKRASPSKPASAPASRSGSKSTQTVAKTTTAAAVASTGPSSRSPSTLLPKKPTAIKTEGKPAEVKKMTAKSVPADLSRPKSTSTSSMKKTTTLSGTAPAAGVVPSRVKATPMPSRPSTTPFIDKKPTSAKPSSTTPRLSRLATNTSAPDLKNVRSKAKVEKKTEAAATTRKPESNAVTKTAGPIASAQKQPAGKVQIVSKKVSYSHIQSKCGSKDNIKHVPGGGNCKYKLWLAGI

SEQ ID NO: 772402 - protein, 789 aa, Homo sapiens
MADLSLADALTEPSPDIEGEIKRDFIATLEAEAFDDVVGETVGKTDYIPLLDVDEKTGNSESKKKPCSETSQIEDTPSSKPTLLANGGHGVEGSDTTGSPTEFLEEKMAYQEYPNSQNWPEDTNFCFQPEQVVDPIQTDPFKMYHDDDLADLVFPSSATADTSIFAGQNDPLKDSYGMSPCNTAVVPQGWSVEALNSPHSESFVSPEAVAEPPQPTAVPLELAKEIEMASEERPPAQALEIMMGLKTTDMAPSKETEMALAKDMALATKTEVALAKDMESPTKLDVTLAKDMQPSMESDMALVKDMELPTEKEVALVKDVRWPTETDVSSAKNVVLPTETEVAPAKDVTLLKETERASPIKMDLAPSKDMGPPKENKKETERASPIKMDLAPSKDMGPPKENKIVPAKDLVLLSEIEVAQANDIISSTEISSAEKVALSSETEVALARDMTLPPETNVILTKDKALPLEAEVAPVKDMAQLPETEIAPAKDVAPSTVKEVGLLKDMSPLSETEMALGKDVTPPPETEVVLIKNVCLPPEMEVALTEDQVPALKTEAPLAKDGVLTLANNVTPAKDVPPLSETEATPVPIKDMEIAQTQKGISEDSHLESLQDVGQSAAPTFMISPETVTGTGKKCSLPAEEDSVLEKLGERKPCNSQPSELSSETSGIARPEEGRPVVSGTGNDITTPPNKELPPSPEKKTKPLATTQPAKTSTSKAKTQPTSLPKQPAPTTIGGLNKKPMSLASGLVPAAPPKRPAVASARPSILPSKDVKPKVSGHLTTVPRKIVPL

SEQ ID NO: 772403 - protein, 72 aa, Homo sapiens
CRSKDPCSLPAEEDSVLEKLGERKPCNSQPSELSSETSANFMYCGTPPTQAKQVCRPSDRRSTPAQACQGPS

SEQ ID NO: 772404 - protein, 267 aa, Homo sapiens
  misc_feature (1)..(1): Xaa can be any naturally occurring amino acid
  misc_feature (3)..(3): Xaa can be any naturally occurring amino acid
  misc_feature (6)..(6): Xaa can be any naturally occurring amino acid
  misc_feature (17)..(18): Xaa can be any naturally occurring amino acid
  misc_feature (21)..(21): Xaa can be any naturally occurring amino acid
  misc_feature (23)..(23): Xaa can be any naturally occurring amino acid
  misc_feature (25)..(25): Xaa can be any naturally occurring amino acid
  misc_feature (27)..(27): Xaa can be any naturally occurring amino acid
  misc_feature (32)..(32): Xaa can be any naturally occurring amino acid
  misc_feature (35)..(35): Xaa can be any naturally occurring amino acid
  misc_feature (45)..(45): Xaa can be any naturally occurring amino acid
  misc_feature (48)..(48): Xaa can be any naturally occurring amino acid
  misc_feature (57)..(57): Xaa can be any naturally occurring amino acid
  misc_feature (63)..(63): Xaa can be any naturally occurring amino acid
  misc_feature (65)..(65): Xaa can be any naturally occurring amino acid
  misc_feature (67)..(67): Xaa can be any naturally occurring amino acid
  misc_feature (73)..(73): Xaa can be any naturally occurring amino acid
XRXDPXVCSIQRKPFEXXEEXLXAXWXDQPAXLEXFPGPLKRHPXAFXLAPTAKARXANWLLXKXYXLLRTIXVQPLPKGDQVLNFSDAEDLIDDSKLKDMRDEVLEHELMVADRRQKREIRQLEQELHKWQVLVDSITGMSSPDFDNQTLAVLRGRMVRYLMRSREITLGRATKDNQIDVDLSLEGPAWKISRKQGVIKLKNNGDFFIANEGRRPIYIDGRPVLCGSKWRLSNNSVVEIASLRFVFLINQDLIALIRAEAAKITPQ

SEQ ID NO: 772405 - protein, 191 aa, Homo sapiens
MCFAKIMCTSTSFLLNTENHKDPKNVEATLKHELMVADRRQKREIRQLEQELHKWQVLVDSITGMSSPDFDNQTLAVLRGRMVRYLMRSREITLGRATKDNQIDVDLSLEGPAWKISRKQGVIKLKNNGDFFIANEGRRPIYIDGRPVLCGSKWRLSNNSVVEIASLRFVFLINQDLIALIRAEAAKITPQ

SEQ ID NO: 772406 - protein, 98 aa, Homo sapiens
RLAAVPQSRGSPNAFHCVSVYIRVCKTRRRDRGPNRWGLAVLPRLGLNSWTQTILPPRPPKVLELQMEMGCHVVSCPMGKRLTCEELREASRKQPVKN

SEQ ID NO: 772407 - protein, 68 aa, Homo sapiens
PARRRAAVTRLSERLSLCFCLHSRLQDPAARPRPEQMEMGCHVVSCPMGKRLTCEELREASRKQPVKN

SEQ ID NO: 772408 - protein, 68 aa, Homo sapiens; identical to SEQ ID NO: 772407

SEQ ID NO: 772409 - protein, 244 aa, Homo sapiens
APVYDWSPQIQGIIFGAVGYGGILTMAPSGYLAGRVGTKRVVGISLFATSFLTLCIPLATDFGIVLLIVTRIVQGLSQSSILGGQFAIWEKWGPPQERSRLCSIALSGMLLGCFTAILIGGFISETLGWPFVFYIFGGVGCVCCLLWFVVIYDDPVSYPWISTSEKEYIISSLKQQVGSSKQPLPIKAMLRSLPIWSICLGCFSHQWLVSTMVVYIPTYISSVYHVNIRDVSMFPSLPFSCLHG

SEQ ID NO: 772410 - protein, 249 aa, Homo sapiens
MATKTELSPTARESKNAQDMQVDETLIPRKVPSLCSARYGIALVLHFCNFTTIAQSQLNDSSEVLPVDSFGGLSKAPKSLPAKSSILGGQFAIWEKWGPPQERSRLCSIALSGMLLGCFTAILIGGFISETLGWPFVFYIFGGVGCVCCLLWFVVIYDDPVSYPWISTSEKEYIISSLKQQVGSSKQPLPIKAMLRSLPIWSICLGCFSHQWLVSTMVVYIPTYISSVYHVNIRDVSMFPSLPFSCLHG

SEQ ID NO: 772411 - protein, 420 aa, Homo sapiens
MATKTELSPTARESKNAQDMQVDETLIPRKVPSLCSARYGIALVLHFCNFTTIAQNVIMNITMVAMVNSTSPQSQLNDSSEVLPVDSFGGLSKAPKSLPAKSSILGGQFAIWEKWGPPQERSRLCSIALSGMLLGCFTAILIGGFISETLGWPFVFYIFGGVGCVCCLLWFVVIYDDPVSYPWISTSEKEYIISSLKQQVGSSKQPLPIKAMLRSLPIWSICLGCFSHQWLVSTMVVYIPTYISSVYHVNIRDNGLLSALPFIVAWVIGMVGGYLADFLLTKKFRLITVRKIATILGSLPSSALIVSLPYLNSGYITATALLTLSCGLSTLCQSGIYINVLDIAPRYSSFLMGASRGFSSIAPVIVPTVSGFLLSQDPEFGWRNVFFLLFAVNLLGLLFYLIFGEADVQEWAKERKLTRL

SEQ ID NO: 772412 - protein, 244 aa, Homo sapiens; identical to SEQ ID NO: 772409

SEQ ID NO: 772413 - protein, 267 aa, Homo sapiens
MATKTELSPTARESKNAQDMQVDETLIPRKVPSLCSARYGIALVLHFCNFTTIAQNVIMNITMVAMVNSTSPQSQLNDSSEVLPVDSFGGLSKAPKSLPAKSSILGGQFAIWEKWGPPQERSRLCSIALSGMLLGCFTAILIGGFISETLGWPFVFYIFGGVGCVCCLLWFVVIYDDPVSYPWISTSEKEYIISSLKQQVGSSKQPLPIKAMLRSLPIWSICLGCFSHQWLVSTMVVYIPTYISSVYHVNIRDVSMFPSLPFSCLHG

SEQ ID NO: 772414 - protein, 163 aa, Homo sapiens
AGYQRRVPITAGGLPVLCQSRANDQEGVRLLEPSEAMPKSKELVSSSSSGSDSDSEVDKKLKRKKQVAPEKPVKKQKTGETSRALSSSKQSSSSRDDNMFQIGKMRYVSVRDFKGKVLIDIREYWMDPEGEMKPGRKGISLNPEQWSQLKEQISDIDDAVRKL

SEQ ID NO: 772415 - protein, 158 aa, Homo sapiens
  misc_feature (1)..(1): Xaa can be any naturally occurring amino acid
XSAIMAGGVPVLCQSRANDQEGVRLLEPSEAMPKSKELVSSSSSGSDSDSEVDKKLKRKKQVAPEKPVKKQKTGETSRALSSSKQSSSSRDDNMFQIGKMRYVSVRDFKGKVLIDIREYWMDPEGEMKPGRKGISLNPEQWSQLKEQISDIDDAVRKL

SEQ ID NO: 772416 - protein, 171 aa, Homo sapiens
ANWVTGPPSVSRVSISLKSNSVPVLCQSRANDQEGVRLLEPSEAMPKSKELVSSSSSGSDSDSEVDKKLKRKKQVAPEKPVKKQKTGETSRALSSSKQSSSSRDDNMFQIGKMRYVSVRDFKGKVLIDIREYWMDPEGEMKPGRKGISLNPEQWSQLKEQISDIDDAVRKL

SEQ ID NO: 772417 - protein, 163 aa, Homo sapiens; identical to SEQ ID NO: 772414

SEQ ID NO: 772418 - protein, 172 aa, Homo sapiens
ADHVTAAPARRGRRLLAAVTSGFPVLCQSRANDQEGVRLLEPSEAMPKSKELVSSSSSGSDSDSEVDKKLKRKKQVAPEKPVKKQKTGETSRALSSSKQSSSSRDDNMFQIGKMRYVSVRDFKGKVLIDIREYWMDPEGEMKPGRKGISLNPEQWSQLKEQISDIDDAVRKL

SEQ ID NO: 772419 - protein, 172 aa, Homo sapiens; identical to SEQ ID NO: 772418

SEQ ID NO: 772420 - protein, 172 aa, Homo sapiens; identical to SEQ ID NO: 772418

SEQ ID NO: 772421 - protein, 172 aa, Homo sapiens; identical to SEQ ID NO: 772418

SEQ ID NO: 772422 - protein, 172 aa, Homo sapiens; identical to SEQ ID NO: 772418

SEQ ID NO: 772423 - protein, 161 aa, Homo sapiens
LQSFRCFKTACRSQRHYIRKILQRYSTPSHSLYRMPKSKELVSSSSSGSDSDSEVDKKLKRKKQVAPEKPVKKQKTGETSRALSSSKQSSSSRDDNMFQIGKMRYVSVRDFKGKVLIDIREYWMDPEGEMKPGRKGISLNPEQWSQLKEQISDIDDAVRKL

SEQ ID NO: 772424 - protein, 127 aa, Homo sapiens
MPKSKELVSSSSSGSDSDSEVDKKLKRKKQVAPEKPVKKQKTGETSRALSSSKQSSSSRDDNMFQIGKMRYVSVRDFKGKVLIDIREYWMDPEGEMKPGRKGISLNPEQWSQLKEQISDIDDAVRKL

SEQ ID NO: 772425 - protein, 172 aa, Homo sapiens; identical to SEQ ID NO: 772418

SEQ ID NO: 772426 - protein, 172 aa, Homo sapiens; identical to SEQ ID NO: 772418

SEQ ID NO: 772427 - protein, 127 aa, Homo sapiens; identical to SEQ ID NO: 772424

SEQ ID NO: 772428 - protein, 84 aa, Homo sapiens
ARTLLLLLSSPVVMKALVMNKRIGKMRYVSVRDFKGKVLIDIREYWMDPEGEMKPGRKGISLNPEQWSQLKEQISDIDDAVRKL

SEQ ID NO: 772429 - protein, 122 aa, Homo sapiens
AGYQRRVPITAGGLPVLCQSRANDQEGVRLLEPSEAMPKSKELVSSSSSGSDSDSEVDKKIGKMRYVSVRDFKGKVLIDIREYWMDPEGEMKPGRKGISLNPEQWSQLKEQISDIDDAVRKL

SEQ ID NO: 772430 - protein, 129 aa, Homo sapiens
ADHVTAAPARRGRRLLAAVTSGFPVLCQSRANDQEGVRLLEPSEAMPKSKELVSSSSSGSDSDSEVDKKLKRKKQVAPEKPVKKQKTGETSRALSSSKQSSSSRDDNMFQELFITFITGVPPAQEVSGV

SEQ ID NO: 772431 - protein, 172 aa, Homo sapiens; identical to SEQ ID NO: 772418

SEQ ID NO: 772432 - protein, 172 aa, Homo sapiens; identical to SEQ ID NO: 772418

SEQ ID NO: 772433 - protein, 81 aa, Homo sapiens
  misc_feature (19)..(19): Xaa can be any naturally occurring amino acid
DKHNYCCIIIIKCENKPFXIGKMRYVSVRDFKGKVLIDIREYWMDPEGEMKPGRKGISLNPEQWSQLKEQISDIDDAVRKL

SEQ ID NO: 772434 - protein, 190 aa, Homo sapiens
MYETNNRGDTLGVLTPARGALLVFKIYKYDQQSRLESRERIPVLCQSRANDQEGVRLLEPSEAMPKSKELVSSSSSGSDSDSEVDKKLKRKKQVAPEKPVKKQKTGETSRALSSSKQSSSSRDDNMFQIGKMRYVSVRDFKGKVLIDIREYWMDPEGEMKPGRKGISLNPEQWSQLKEQISDIDDAVRKL

SEQ ID NO: 772435 - protein, 163 aa, Homo sapiens; identical to SEQ ID NO: 772414

SEQ ID NO: 772436 - protein, 172 aa, Homo sapiens; identical to SEQ ID NO: 772418

SEQ ID NO: 772437 - protein, 172 aa, Homo sapiens; identical to SEQ ID NO: 772418

SEQ ID NO: 772438 - protein, 127 aa, Homo sapiens; identical to SEQ ID NO: 772424

SEQ ID NO: 772439 - protein, 172 aa, Homo sapiens; identical to SEQ ID NO: 772418

SEQ ID NO: 772440 - protein, 172 aa, Homo sapiens; identical to SEQ ID NO: 772418

SEQ ID NO: 772441 - protein, 129 aa, Homo sapiens; identical to SEQ ID NO: 772430

SEQ ID NO: 772442 - protein, 189 aa, Homo sapiens
  misc_feature (154)..(154): Xaa can be any naturally occurring amino acid
ADHVTAAPARRGRRLLAAVTSGFPVLCQSRANDQEGVRLLEPSEAMPKSKELVSSSSSGSDSDSEVDKKLKRKKQVAPEKPVKKQKTGETSRALSSSKQSSSSRDDNMFQIGKMRYVSVRDFKGKVLIDIREYWMDPDTAFPPVKPVSFHSPLXQRRSLLHQLPAQSPLFSRSNPLLPKLSLQTSLTPL

SEQ ID NO: 772443 - protein, 94 aa, Homo sapiens
ADHVTAAPARRGRRLLAAVTSGFPVLCQSRANDQEGVRLLEPSEAMPKSKELVSSSSSGSDSDSEVDKKLKRKKQVAPEKPVKKQKTDWENEVR

SEQ ID NO: 772444 - protein, 336 aa, Homo sapiens
MSDKPGRRQTSIQNGQPHDGPRRLNDWRKFKLESQDSDSIPPSKKEILRQMSSPQSRNGKDSEAETGILTHSTRTPGTEIQTIISNPVPKMEEAKSQSLEEDFEGQATHTGPKGVINDWRKFKLESQDSDSIPPSKKEILRQMSSPQSRNGKDSKERVSRKMSIQEYELIHKEKEDENCLRKYRRQCMQDMHQKLSFGPRYGFVYELETGKQFLETIEKELKITTIVVHIYEDGIKGCDALNSSLTCLAAEYPIVKFCKIKASNTGAGDRFSLDVLPTLLIYKGGELISNFISVAEQFAEEFFAGDVESFLNEYGLLPEREVHVLEHTKIEEEDVE

SEQ ID NO: 772445 - protein, 194 aa, Homo sapiens
MSSPQSRNGKDSKERVSRKMSIQEYELIHKEKEDENCLRKYRRQCMQDMHQKLSFGPRYGFVYELETGKQFLETIEKELKITTIVVHIYEDGIKGCDALNSSLTCLAAEYPIVKFCKIKASNTGAGDRFSLDVLPTLLIYKGGELISNFISVAEQFAEEFFAGDVESFLNEYGLLPEREVHVLEHTKIEEEDVE

SEQ ID NO: 772446 - protein, 246 aa, Homo sapiens
MEEAKSQSLEEDFEGQATHTGPKGVINDWRKFKLESQDSDSIPPSKKEILRQMSSPQSRNGKDSKERVSRKMSIQEYELIHKEKEDENCLRKYRRQCMQDMHQKLSFGPRYGFVYELETGKQFLETIEKELKITTIVVHIYEDGIKGCDALNSSLTCLAAEYPIVKFCKIKASNTGAGDRFSLDVLPTLLIYKGGELISNFISVAEQFAEEFFAGDVESFLNEYGLLPEREVHVLEHTKIEEEDVE

SEQ ID NO: 772447 - protein, 199 aa, Homo sapiens
FQNQRQSAPGAMNGDDAFVRRPRVGSQIPQKMQKAFDDIAKYFSEKEWEKMKASEKIIYVYMKRKYEAMTKLGFKATLPPFMRNKRVADFQGNDFDNDPNRGNQVEHPQMTFGRLQGIFPKITPEKPAEEGNDSKGVPEASGPQNNGKQLRPSGKLNTSEKVNKTSGPKRGKHAWTHRVRERKQLVIYEEISDPPEDDE

SEQ ID NO: 772448 - protein, 240 aa, Homo sapiens
FQNQRQSAPGAMNGDDAFVRRPRVGSQIPQKMQKHPWRQVCDRGIHLVNLSPFWKVGREPASSIKALLCGRGEARAFDDIAKYFSEKEWEKMKASEKIIYVYMKRKYEAMTKLGFKATLPPFMRNKRVADFQGNDFDNDPNRGNQVEHPQMTFGRLQGIFPKITPEKPAEEGNDSKGVPEASGPQNNGKQLRPSGKLNTSEKVNKTSGPKRGKHAWTHRVRERKQLVIYEEISDPPEDDE

SEQ ID NO: 772449 - protein, 1790 aa, Homo sapiens
FLLEVATAAGLSGARTRLGSQVGGAMRRSKADVERYVASVLGLTPSPRQKSMKGFYFAKLYYEAKEYDLAKKYICTYINVQERDPKAHRFLGLLYELEENTEKAVECYRRSVELNPTQKDLVLKIAELLCKNDVTDGRAKYWVERAAKLFPGSPAIYKLKEQLLDCEGEDGWNKLFDLIQSELYVRPDDVHVNIRLVELYRSTKRLKDAVAHCHEAERNIALRSSLEWNSCVVQTLKEYLESLQCLESDKSDWRATNTDLLLAYANLMLLTLSTRDVQENRELLESFDSALQSAESSLGGNDELSATFLEMKGHFYMYAGSLLLKMGQHGNNVQWRALSELAALCYLIAFQVPRPKIKLREGKAGQNLLEMMACDRLSQSGHMLLSLSRGKQDFLKEVVETFANKIGQSALYDALFSSQSPKDTSFLGSDDIGKIDVQEPELEDLARYDVGAIRAHNGSLQHLTWLGLQWNSLPASPGIRKWLKQLFHRLPHETSRLETNAPESICILDLEVFLLGVVYTSHLQLKEKCNSHHSSYQPLCLPFPVCKQLCTERQKSWWDAVCTLIHRKAVPGNLAKLRLLVQHEINTLRAQEKHGLQPALLVHWAKYLQKTGSGLNSFYGQLEYIGRSVHYWKKVLPLLKIIKKNSIPEPIDPLFKHFHSVDIQASEIVEYEEDAHITFAMLDAVNGNIEDAVTAFESIKSVVSYWNLALIFHRKAEDIENDALSPEEQEECRNYLTKTRDYLIKIIDDGDSNLSVVKKLSVPLESVKQMLNSVMQELEDYSEGGPLYKNGSLRNADSEIKHSTPSPTRYSLSPSKSYKYSPETPPRWTEDRNSLLNMICQQVEAIKKEMQELKLNSSKSASRHRWPTENYGPDSVPDGYQGSQTFHGAPLTVATTGPSVYYSQSPAYNSQYLLRPAGNVTPTKGSSNTDFKSTKEGFSIPVSADGFKFGISEPGNQEKKREKPLENDTGLQAQDISGRKKGRGVIFGQTSSTFTFADVAKSTSGEGFQFGKKDLNFKGFSGAGEKLFSSRYGKMANKANTSGDFEKDDDAYKTEDSDDIHFEPVVQMPEKVELVTGEEGEKVLYSQGVKLFRFDAEVSQWKERGLGNLKILKNEVNGKLRMLMRREQVLKVCANHWITTTMNLKPLSGSDRAWMWSASHFSDGDAKLERLAAKFKTPELAEEFKQKFEECQRLLLDIPLQTPHKLVDTGRAAKLIQRAEEMKSGLKDFKTFLTNDQTKVTEEENKGSGTGAAGASDTTIKPNAENTGPTLEWDNYDLREDALDDSVSSSSVHASPLASSPVRKNLFRFDESTTGSNFSFKSALSLSKSPAKLNQSGTSVGTDEESVVTQEEERDGQYFEPVVPLPDLVEVSSGEENEQVVFSHRAEIYRYDKDVGQWKERGIGDIKILQNYDNKQVRIVMRRDQVLKLCANHRITPDMSLQNMKGTERVWVWTACDFADGERKVEHLAVRFKLQDVADSFKKIFDEAKTAQEKDSLITPHVSRSSTPRESPCGKIAVAILEETTRERTDVIQGDDVADAASEVEVSSTSETTTKAVVSPPKFVFVSESVKRIFSSEKSKPFVFGNSSATGSLFGFSFNAPLKSNNSETSSVAQSGSESKVEPKKCELSKNSDIEQPSDSKVKNLSASFPTEESSINYTFKTPEKEPPLWHAEFTKEELVQKLRSTTKSADHLNGLLREIEATNAVPMEQIKLLKSEIRRLERNQEREKSAANLEYLKNVLLQFIFLKPGSERERLLPVINTMLQLSPEEKGKLAAVAQDEEENASRSSG

SEQ ID NO: 772450 - protein, 70 aa, Homo sapiens
IMSNEMESVMSLLSKRSPGPDVVTAEFYHNFKEELIPILPKLFHKIEGERIPPNSFYKANIIMIPNYTGG

SEQ ID NO: 772451 - protein, 76 aa, Homo sapiens
EDEKQRPSKTYRKLRTWSVSKPNPPPPLMNYSLLAKKLFASCKNTPKGSKYLSVRHLRTKRLPKGPPPGALPGDPA

SEQ ID NO: 772452 - protein, 96 aa, Homo sapiens
VRGVESSFTISGSSSSHTAHSRIWSYCFMFQFLALTCHLFSREQGALQVSVFCVEPGLGAASPMPVCLLSTHSGSDTELEAGCAGEPGGECRCREW

SEQ ID NO: 772453 - protein, 81 aa, Homo sapiens
QVSPTQHVGCAWPAPGLGSGLGAVNTALRSSIMVCPSKKSLIWLRGLGHSSQAGPTLAGGPGAAEEMGLSEETICSLQVKL

SEQ ID NO: 772454 - protein, 1536 aa, Homo sapiens
GWTSHLSNCGESNRPPKERSCFRVCDWHSDLFQWEVSDWHHCVLVPYARGEVKPRTAECVTAQHGLQHRMVRCIQKLNRTVVANEICEHFALQPPTEQACLIPCPRDCVVSEFLPWSNCSKGCGKKLQHRTRAVIAPPLFGGLQCPNLTESRACDAPISCPLGEEEYTFSLKVGPWSKCRLPHLKEINPSGRTVLDFNSDSNERVTFKHQSYKAHHHSKSWAIEIGYQTRQVSCTRSDGQNAMLSLCLQDSFPLTVQSCIMPKDCETSQWSSWSPCSKTCRSGSLLPGFRSRSRNVKHMAIGGGKECPELLEKEACIVEGELLQQCPRYSWRTSEWKECQVSLLLEQQDPHWHVTGPVCGGGIQTREVYCAQSVPAAAALRAKEVSRPVEKALCVGPAPLPSQLCNIPCSTDCIVSSWSAWGLCIHENCHDPQGKKGFRTRQRHVLMESTGPAGHCPHLVESVPCEDPMCYRWLASEGICFPDHGKCGLGHRILKAVCQNDRGEDVSGSLCPVPPPPERKSCEIPCRMDCVLSEWTEWSSCSQSCSNKNSDGKQTRSRTILALAGEGGKPCPPSQALQEHRLCNDHSCMQLHWETSPWGPCSEDTLVTALNATIGWNGEATCGVGIQTRRVFCVKSHVGQVMTKRCPDSTRPETVRPCFLPCKKDCIVTAFSEWTPCPRMCQAGNATVKQSRYRIIIQEAANGGQECPDTLYEERECEDVSLCPVYRWKPQKWSPCILVPESVWQGITGSSEACGKGLQTRAVSCISDDNRSAEMMECLKQTNGMPLLVQECTVPCREDCTFTAWSKFTPCSTNCEATKSRRRQLTGKSRKKEKCQDSDLYPLVETELCPCDEFISQPYGNWSDCILPEGRREPHRGLRVQADSKECGEGLRFRAVACSDKNGRPVDPSFCSSSGYIQEKCVIPCPFDCKLSDWSSWGSCSSSCGIGVRIRSKWLKEKPYNGGRPCPKLDLKNQAKVHEAVPCYSECNQYSWVVEHWSSCKINNELRSLRCGGGTQSRKIRCVNTADGEGGAVDSNLCNQDEIPPETQSCSLMCPNECVMSEWGLWSKCPQSCDPHTMQRRTRHLLRPSLNSRTCAEDSQVQPCLLNENCFQFQYNLTEWSTCQLSENAPCGQGVRTRLLSCVCSDGKPVSMDQCEQHNLEKPQRMSIPCLVECVVNCQLSGWTAWTECSQTCGHGGRMSRTRFIIMPTQGEGRPCPTELTQEKTCPVTPCYSWVLGNWSACKLEGGDCGEGVQIRSLSCMVHSGSISHAAGRVEDALCGEMPFQDSILKQLCSVPCPGDCHLTEWSEWSTCELTCIDGRSFETVGRQSRSRTFIIQSFENQDSCPQQVLETRPCTGGKCYHYTWKASLWNNNERTVWCQRSDGVNVTGGCSPQARPAAIRQCIPACRKPFSYCTQGGVCGCEKGYTEIMKSNGFLDYCMKVPGSEDKKADVKNLSGKNRPVNSKIHDIFKGWSLQPLDPDGRVKIWVYGVSGGAFLIMIFLIFTSYLVCKKPKPHQSTPPQQKPLTLAYDGDLDM

SEQ ID NO: 772455 - protein, 257 aa, Homo sapiens
MRGNRLREVQQLGGGCPGGGSTGLGGQFGPETGLGTGIVSSSKTVRTEAMRPRALRPWHPAPRPMSSLELFAVGGFDGLRRLHSVERYDPFSNTWAAAAPLPEAVSSAAVASCAGKLFVIGGARQGGVNTDKVQCFDPKEDRWSLRSPAPFSQRCLEAVSLEDTIYVMGGLMSKIFTYDPGTDVWGEAAVLPSPVESCGVTVCDGKVHILGGRDDRGESTDKVFTFDPSSGQVEVQPSLQRCTSSHGCVTIIQSLGR

SEQ ID NO: 772456 - protein, 398 aa, Homo sapiens
LEGRLRAANSLALRRVAAAFSLAPLAERCGRVLRQAFAEVARHADFLELAPDEVVALLADPALGVAREEAVFEAAMRWVRHDAPARRGQLRRLLEHVRLPLLAPAYFLEKVEADELLQACGECRPLLLEARACFILGREAGALRTRPRRFMDLAEVIVVIGGCDRKGLLKLPFADAYHPESQRWTPLPSLPGYTRSEFAACALRNDVYVSGGHINSHDVWMFSSHLHTWIKVASLHKGRWRHKMAVVQGQLFAVGGFDGLRRLHSVERYDPFSNTWAAAAPLPEAVSSAAVASCAGKLFVIGGARQGGVNTDKVGVGLRRERALKAGVPTVCQAQNWAFPCPCPFIHLIPSNSPDQSPPCFREGNEQKNDPKVTQWVSSTLGLKCLGWCHVSFIHFKN

SEQ ID NO: 772457 - protein, 246 aa, Homo sapiens
LEGRLRAANSLALRRVAAAFSLAPLAERCGRVLRQAFAEVARHADFLELAPDEVVALLADPALGVAREEAVFEAAMRWVRHDAPARRGQLRRLLEHVRLPLLAPAYFLEKVEADELLQACGECRPLLLEARACFILGREAGALRTRPRRFMDLAEVIVVIGGCDRKGLLKLPFADAYHPESQRWTPLPSLPGYTRSEFAACALRNDVYVSGEGGAATGAHTGLTSSLRTPPPLLFPPIGREGRDVF

SEQ ID NO: 772458 - protein, 438 aa, Homo sapiens
LEGRLRAANSLALRRVAAAFSLAPLAERCGRVLRQAFAEVARHADFLELAPDEVVALLADPALGVAREEAVFEAAMRWVRHDAPARRGQLRRLLEHVRLPLLAPAYFLEKVEADELLQACGECRPLLLEARACFILGREAGALRTRPRRFMDLAEVIVVIGGCDRKGLLKLPFADAYHPESQRWTPLPSLPGYTRSEFAACALRNDVYVSGGHINSHDVWMFSSHLHTWIKVASLHKGRWRHKMAVVQGQLFAVGGFDGLRRLHSVERYDPFSNTWAAAAPLPEAVSSAAVASCAGKLFVIGGARQGGVNTDKVQCFDPKEDRWSLRSPAPFSQRCLEAVSLEDTIYVMGGLMSKIFTYDPGTDVWGEAAVLPSPVESCGVTVCDGKVHILGGRDDRGESTDKVFTFDPSSGQVEVQPSLQRCTSSHGCVTIIQSLGR

SEQ ID NO: 772459 - protein, 230 aa, Homo sapiens
MFSSHLHTWIKVASLHKGRWRHKMAVVQGQVGTSCSGCPGTKLFAVGGFDGLRRLHSVERYDPFSNTWAAAAPLPEAVSSAAVASCAGKLFVIGGARQGGVNTDKVQCFDPKEDRWSLRSPAPFSQRCLEAVSLEDTIYVMGGLMSKIFTYDPGTDVWGEAAVLPSPVESCGVTVCDGKVHILGGRDDRGESTDKVFTFDPSSGQVEVQPSLQRCTSSHGCVTIIQSLGR

SEQ ID NO: 772460 - protein, 134 aa, Homo sapiens
LVLISWDYRCEPPHPAIISCFRKQELKIHLHIYYLLYHVDLSFAAISMGFGIVTNFFHHFQPHPNLFFLLFISTPKACIHLPLIRYLLMILHCLKNEISFNLTPAFSFVAILYSVCPQLNFTICHSQLPSPNPA

SEQ ID NO: 772461 - protein, 110 aa, Homo sapiens
LFSGKCILSHIPKRKVTYLYVIIWRFNRKNLKGHAHKNPILEKPGIGHAVAKGLSWFGGVPFLRKSVLNISIKIIGETSPTLPGGYPESSRNKGVRKRQSKSLKGASRAL

SEQ ID NO: 772462 - protein, 45 aa, Homo sapiens
TGGDLPKAFGVQPSHSCAMDVGQGFQKDDFGAVGLNDWPTAFWTF

SEQ ID NO: 772463 - protein, 445 aa, Homo sapiens
MHGHSRNGQAHVPRRKRRNRFVKKNGQCNVYFANLSNKSQRYMADIFTTCVDTRWRYMLMIFSAAFLVSWLFFGLLFWCIAFFHGDLEASPGVPAAGGPAAGGGGAAPVAPKPCIMHVNGFLGAFLFSVETQTTIGYGFRCVTEECPLAVIAVVVQSIVGCVIDSFMIGTIMAKMARPKKRAQTLLFSHHAVISVRDGKLCLMWRVGNLRKSHIVEAHVRAQLIKPYMTQEGEYLPLDQRDLNVGYDIGLDRIFLVSPIIIVHEIDEDSPLYGMGKEELESEDFEIVVILEGMVEATAMTTQARSSYLASEILWGHRFEPVVFEEKSHYKVDYSRFHKTYEVAGTPCCSARELQESKITVLPAPPPPPSAFCYENELALMSQEEEEMEEEAAAAAAVAAGLGLEAGSKEEAGIIRMLEFGSHLDLERMQASLPLDNISYRRESAI

SEQ ID NO: 772464 - protein, 445 aa, Homo sapiens; identical to SEQ ID NO: 772463

SEQ ID NO: 772465 - protein, 445 aa, Homo sapiens; identical to SEQ ID NO: 772463

SEQ ID NO: 772466 - protein, 119 aa, Homo sapiens [sequence omitted]

SEQ ID NO: 772467 - protein, 69 aa, Homo sapiens
ARGNAGPLCATLSPSPREEASPPCPEQHSESEMKLLSHLPQPSSPASQVRVPRQPATASASERVDQASG

SEQ ID NO: 772468 - protein, 96 aa, Homo sapiens
MIHICLCQEPGEGLAQAGPGCSWESRLAWRKAEDLHGSFWKADPLLISEATFSATVAFRCLPSSSALPTHISYTSLLPEATVETTTLPATVSDRFS

SEQ ID NO: 772469 - protein, 502 aa, Homo sapiens
SCGHLPQAMDLSNNTMSLSVRTPGLSRRLSSQSVIGRPRGMSASSVGSGYGGSAFGFGASCGGGFSAASMFGSSSGFGGGSGSSMAGGLGAGYGRALGGGSFGGLGMGFGGSPGGGSLGILSGNDGGLLSGSEKETMQNLNDRLASYLDKVRALEEANTELENKIREWYETRGTGTADASQSDYSKYYPLIEDLRNKIISASIGNAQLLLQIDNARLAAEDFRMKYENELALRQGVEADINGLRRVLDELTLTRTDLEMQIESLNEELAYMKKNHEDELQSFRVGGPGEVSVEMDAAPGVDLTRLLNDMRAQYETIAEQNRKDAEAWFIEKSGELRKEISTNTEQLQSSKSEVTDLRRAFQNLEIELQSQLAMKKSLEDSLAEAEGDYCAQLSQVQQLISNLEAQLLQVRADAERQNVDHQRLLNVKARLELEIETYRRLLDGEAQGDGLEESLFVTDSKSQAQSTDSSKDPTKTRKIKTVVQEMVNGEVVSSQVQEIEELM

SEQ ID NO: 772470 - protein, 38 aa, Homo sapiens
MGKEQSVRGGSPQSYNSKQFSAQASLLPLFQFTSFATS

SEQ ID NO: 772471 - protein, 59 aa, Homo sapiens
GGVRFPGESPRGTEGGRTTLRAQEALEGQLGTSDSESGSAVRGWGKEVSSQESWCQGLR

SEQ ID NO: 772472 - protein, 73 aa, Homo sapiens
MTLGHNMIYLQTAETSRTPFDLAEGESELVSGFNIEYAAGPFALFFIAEYTNIIIINTLTTTIFLGTTYDAFS

SEQ ID NO: 772473 - protein, 73 aa, Homo sapiens
MTLGHNMIYLQTTETSRTPFDLAEGESELVSGFNIEYAAGPFALFFIAEYTNIIIINTLTTTIFLGTTYDAFS

SEQ ID NO: 772474 - protein, 126 aa, Homo sapiens
MECIKQTLVCKTQGQLKLYINVHYMSGFYFTYKAPLTLHPYHNTRTPLITPAIMTLGHNMIYLQTTETSRTPFDLAEGESELVSGFNIEYAAGPFALFFIAEYTNIIIINTLTTTIFLGTTYDAFS

SEQ ID NO: 772475 - protein, 109 aa, Homo sapiens
MYFANSPTPVIIPLTSILLVEARRTVMFIDSICLLGDMFLESVLVKNQVRKEVKGSSSYFSQRNTTVTYKVSGSRSKVCVVPYYILEDCFTVLLLYSVYVFANSLSFCQ

SEQ ID NO: 772476 - protein, 321 aa, Homo sapiens
MGEPQGSMRILVTGGSGLVGKAIQKVVADGAGLPGEDWVFVSSKDADLTDTAQTRALFEKVQPTHVIHLAAMVGGLFRNIKYNLDFWRKNVHMNDNVLHSAFEVGARKVVSCLSTCIFPDKTTYPIDETMIHNGPPHNSNFGYSYAKRMIDVQNRAYFQQYGCTFTAVIPTNVFGPHDNFNIEDGHVLPGLIHKVHLAKSSGSALTVWGTGNPRRQFIYSLDLAQLFIWVLREYNEVEPIILSVGEEDEVSIKEAAEAVVEAMDFHGEVTFDTTKSDGQFKKTASNSKLRTYLPDFRFTPFKQAVKETCAWFTDNYEQARK

SEQ ID NO: 772477 - protein, 319 aa, Homo sapiens
MGSELSGAGRGATDMGEPQGSMRILVTGGSGLVGKAIQKVVADGAGLPGEDWVFVSSKDADLTDTAQTRALFEKVQPTHVIHLAAMVGGLFRNIKYNLDFWRKNVHMNDNVLHSAFEVGARKVVSCLSTCIFPDKTTYPIDETMIHNGPPHNSNFGYSYAKRMIDVQNRAYFQQYGCTFTAVIPTNVFGPHDNFNIEDGHVLPGLIHKVHLAKSSGSALTVWGTGNPRRQFIYSLDLASLSESGEYMKWAQYPHRARTMRPIQGGSRGEMKAGSSRGSTMDHHGERENKKQKQALRPRPRHGTRTERKDRMAARTSRDR

SEQ ID NO: 772478 - protein, 356 aa, Homo sapiens
SRPRPPPGSAGSRSAPGRKPLSGSRRWGWTQGATDMGEPQGSMRILVTGGSGLVGKAIQKVVADGAGLPGEDWVFVSSKDADLTDTAQTRALFEKVQPTHVIHLAAMVGGLFRNIKYNLDFWRKNVHMNDNVLHSAFEVGARKVVSCLSTCIFPDKTTYPIDETMIHNGPPHNSNFGYSYAKRMIDVQNRAYFQQYGCTFTAVIPTNVFGPHDNFNIEDGHVLPGLIHKVHLAKSSGSALTVWGTGNPRRQFIYSLDLAQLFIWVLREYNEVEPIILSVGEEDEVSIKEAAEAVVEAMDFHGEVTFDTTKSDGQFKKTASNSKLRTYLPDFRFTPFKQAVKETCAWFTDNYEQARK

SEQ ID NO: 772479 - protein, 356 aa, Homo sapiens; identical to SEQ ID NO: 772478

SEQ ID NO: 772480 - protein, 321 aa, Homo sapiens; identical to SEQ ID NO: 772476

SEQ ID NO: 772481 - protein, 339 aa, Homo sapiens
TRPPTRPAGGGAGRGATDMGEPQGSMRILVTGGSGLVGKAIQKVVADGAGLPGEDWVFVSSKDADLTDTAQTRALFEKVQPTHVIHLAAMVGGLFRNIKYNLDFWRKNVHMNDNVLHSAFEVGARKVVSCLSTCIFPDKTTYPIDETMIHNGPPHNSNFGYSYAKRMIDVQNRAYFQQYGCTFTAVIPTNVFGPHDNFNIEDGHVLPGLIHKVHLAKSSGSALTVWGTGNPRRQFIYSLDLAQLFIWVLREYNEVEPIILSVGEEDEVSIKEAAEAVVEAMDFHGEVTFDTTKSDGQFKKTASNSKLRTYLPDFRFTPFKQAVKETCAWFTDNYEQARK

SEQ ID NO: 772482 - protein, 321 aa, Homo sapiens; identical to SEQ ID NO: 772476

SEQ ID NO: 772483 - protein, 243 aa, Homo sapiens
ALSVGLARDRKNVHMNDNVLHSAFEVGARKVVSCLSTCIFPDKTTYPIDETMIHNGPPHNSNFGYSYAKRMIDVQNRAYFQQYGCTFTAVIPTNVFGPHDNFNIEDGHVLPGLIHKVHLAKSSGSALTVWGTGNPRRQFIYSLDLAQLFIWVLREYNEVEPIILSVGEEDEVSIKEAAEAVVEAMDFHGEVTFDTTKSDGQFKKTASNSKLRTYLPDFRFTPFKQAVKETCAWFTDNYEQARK

SEQ ID NO: 772484 - protein, 341 aa, Homo sapiens
SRPRPPPGSAGSRSAPGRKPLSGSRRWGWTQGATDMGEPQGSMRILVTGGSGLVGKAIQKVVADGAGLPGEDWVFVSSKDADLTDTAQTRALFEKVQPTHVIHLAAMVGGLFRNIKYNLDFWRKNVHMNDNVLHSAFEVGARKVVSCLSTCIFPDKTTYPIDETMIHNGPPHNSNFGYSYAKRMIDVQNRAYFQQYGCTFTAVIPTNVFGPHDNFNIEDGHVLPGLIHKVHLAKSSGSALTVWGTGNPRRQFIYSLDLAQLFIWVLREYNEVEPIILSVGEEDEVSIKEAAEAVVEAMDFHGEVTFDTTKSDGQFKKTASNSKLRTYLPDFRFTPFKQGEP

SEQ ID NO: 772485 - protein, 431 aa, Homo sapiens
SRPRPPPGSAGSRSAPGRKPLSGSRRWGWTQGATDMGEPQGSMRILVTGGSGLVGKAIQKVVADGAGLPGEDWVFVSSKDADLTWLAWPGCAWLCSWKNKHPPISSWKPAPSYQPGPGATLPFDCPSCHSPTQFLHLAPNLGCWFPPEPPDSLASYRDTAQTRALFEKVQPTHVIHLAAMVGGLFRNIKYNLDFWRKNVHMNDNVLHSAFEVGARKVVSCLSTCIFPDKTTYPIDETMIHHGLPQNSQYWGNSYAQRMTRQLQNRAYFQQYGCTFTAVIPTNVFGPHDNFNIEDGHVLPGLIHKVHLAKSSGSALTVWGTGNPRRQFIYSLDLAQLFIWVLREYNEVEPIILSVGEEDEVSIKEAAEAVVEAMDFHGEVTFDTTKSDGQFKKTASNSKLRTYLPDFRFTPFKQAVKETCAWFTDNYEQARK

SEQ ID NO: 772486 - protein, 147 aa, Homo sapiens
MGEPQGSMRILVTGGSGLVGKAIQKVVADGAGLPGEDWVFVSSKDADLTDTAQTRALFEKVQPTHVIHLVGEEDEVSIKEAAEAVVEAMDFHGEVTFDTTKSDGQFKKTASNSKLRTYLPDFRFTPFKQAVKETCAWFTDNYEQARK

SEQ ID NO: 772487 - protein, 335 aa, Homo sapiens
PGGEFGTRGRGATDMGEPQGSMRILVTGGSGLVGKAIQKVVADGAGLPGEDWVFVSSKDADLTDTAQTRALFEKVQPTHVIHLAAMVGGLFRNIKYNLDFWRKNVHMNDNVLHSAFEVGARKVVSCLSTCIFPDKTTYPIDETMIHNGPPHNSNFGYSYAKRMIDVQNRAYFQQYGCTFTAVIPTNVFGPHDNFNIEDGHVLPGLIHKVHLAKSSGSALTVWGTGNPRRQFIYSLDLAQLFIWVLREYNEVEPIILSVGEEDEVSIKEAAEAVVEAMDFHGEVTFDTTKSDGQFKKTASNSKLRTYLPDFRFTPFKQAVKETCAWFTDNYEQARK

SEQ ID NO: 772488 - protein, 335 aa, Homo sapiens
MGSELSGAGRGATDMGEPQGSMRILVTGGSGLVGKAIQKVVADGAGLPGEDWVFVSSKDADLTDTAQTRALFEKVQPTHVIHLAAMVGGLFRNIKYNLDFWRKNVHMNDNVLHSAFEVGARKVVSCLSTCIFPDKTTYPIDETMIHNGPPHNSNFGYSYAKRMIDVQNRAYFQQYGCTFTAVIPTNVFGPHDNFNIEDGHVLPGLIHKVHLAKSSGSALTVWGTGNPRRQFIYSLDLAQLFIWVLREYNEVEPIILSVGEEDEVSIKEAAEAVVEAMDFHGEVTFDTTKSDGQFKKTASNSKLRTYLPDFRFTPFKQAVKETCAWFTDNYEQARK

SEQ ID NO: 772489 - protein, 356 aa, Homo sapiens; identical to SEQ ID NO: 772478

SEQ ID NO: 772490 - protein, 196 aa, Homo sapiens
SRPRPPPGSAGSRSAPGRKPLSGSRRWGWTQGATDMGEPQGSMRILVTGGSGLVGKAIQKVVADGAGLPGEDWVFVSSKDADLTDTAQTRALFEKVQPTHVIHLAAMVGGLFRNIKYNLDFWRKNVHMNDNVLHSAFEVGARKVVSCLSTCIFPDKTTYPIDETMIHNGPPHNSNFGYSYAKRMIDVQNRSSRPSC

SEQ ID NO: 772491 - protein, 192 aa, Homo sapiens [sequence omitted]

SEQ ID NO: 772492 - protein, 170 aa, Homo sapiens [sequence omitted]

SEQ ID NO: 772493 - protein, 356 aa, Homo sapiens; identical to SEQ ID NO: 772478

SEQ ID NO: 772494 - protein, 139 aa, Homo sapiens
QSVGITGMSHHAWPFFLFFFFPFQEKRSKVPSTVCLFVCFETEFFSVTQAGVQWCDLGPTATSTSRFKQFSCPSLPTSGVAGIIGACQYARLIFVFLVEMRFHYVGQAGFECLTSGDLPASASKSVGITGVSYPARPLL

SEQ ID NO: 772495 - protein, 78 aa, Homo sapiens
MTWGSVSISWEAQESAFDSFLIEVSNSDHPHETMVLSVPGVSRSSVITNLKASSNYTAHLHGLIGGQRAQTLMVQATT

SEQ ID NO: 772496 - protein, 45 aa, Homo sapiens
MELLLSSLQRSFECSWEDDTYPRHNIRIQQSNFNHSFIQNIWAYW

SEQ ID NO: 772497 - protein, 234 aa, Homo sapiens
HLLALQIIRDLVDKGGDIFLDQLARLGVISKVSTLAGPSSDDENEEESKPEKEDEPQEDAKELQQGKPYHWRDWSIIRGRDCLYIWSDAAALELSNGSNGWFRFILDGKLATMYSSGSPEGGSDSSESRSEFLEKLQRARGQVKPSTSSQPILSAPGPTKLTVGNWSLTCLKEGEIAIHNSDGQQATILKEDLPGFVFESNRGTKHSFTAETSLGSEFVTGWTGKRGRKLKSKL

SEQ ID NO: 772498 - protein, 94 aa, Homo sapiens
MPSSLLAVDNRVLSRSGSFPELQPPTYHSHSAQTPQPCSWSCQAYVCLRGLTLAGTLDPGAFTRLTHSLLRCFCSEGHLLTSLSPRLVPPPPLY

SEQ ID NO: 772499 - protein, 103 aa, Homo sapiens
MPWVPQDPWGQAQLLPPQLHQTPPASGRGSASLAHWPPMGPSSSGGGTQPMRQRKEGWAAVSAGWEPWPPPGPTLVCWVWCIFPSKCTDVSYRHLGGYWVVAW

SEQ ID NO: 772500 - protein, 187 aa, Homo sapiens
SIARRFGPRSRTGGRTPGPRPALADLPRVEGGRRRRSSPPRRTPKWSFRTRGVWPGVSGLTAPRAERLFAEEGPPGREPERGGARPVPARRCPARGTAAPPGPSPARPQLAPGPRGQAGRERGDVHGGPARALLLPPGPPCAGGGGPSLRAAEARPAAPTASPPPCGPAASGASWDPGPRRAGRRQR

SEQ ID NO: 772501 - protein, 579 aa, Homo sapiens
MQICGSSVASVAAGTSFQVLGPVCWQQLDLKMAVRVLWGGLSLLRVLWCLLPQTGYVHPDEFFQSPEVMAEDILGVQAARPWEFYPSSSCRSVLFPLLISGSTFWLLRLWEELGPWPGLVSGYALLVGPRLLLTALSFALDGAVYHLAPPMGADRWNALALLSGSYVTLVFYTRTFSNTIEGLLFTWLLVLVSSHVTWGPTRKEPAPGPRWRSWLLGGIVAAGFFNRPTFLAFAVVPLYLWGTRGATNPGLKSLTREALVLLPGATLTAAVFVATDSWYFSSPATSRNLVLTPVNFLHYNLNPQNLARHGTHARLTHLAVNGFLLFGVLHAQALQAAWQQLQVGLQASAQMGLLRALGARSLLSSPRSYLLLLYFMPLALLSAFSHQEARFLIPLLVPLVLLCSPQTQPVPWKGTVVLFNALGALLFGCLHQGGLVPGLEYLEQVVHAPVLPSTPTHYTLLFTHTYMPPRHLLHLPGLGAPVEVVDMGGTEDWALCQTLKSFTRQPACQVAGGPWLCRLFVVTPGTTRRAVEKCSFPFKNETLLFPHLTLEDPPALSSLLSGAWRDHLSLHIVELGEET

SEQ ID NO: 772502 - protein, 111 aa, Homo sapiens
AAAGQDSRPDMERPRSPQCSAPASASASVTLAQLLQLVQQGQELPGLEKRHIAAIHGEPTASRLPRRPKPWEAAALAESLPPPTLRIGTAPAEPGLVEAATAPSSWHTVGP

SEQ ID NO: 772503 - protein, 111 aa, Homo sapiens; identical to SEQ ID NO: 772502

SEQ ID NO: 772504 - protein, 107 aa, Homo sapiens
MPAIFINALPPPNTIGGPALIISLQVYPAAPERQRPARRGHDDGGGFVKTKMGICREKKERSDCYCVYIEREDIRDSILKKTCTLNNCFAEMLLICSFAPATLPQPL

SEQ ID NO: 772505 - protein, 106 aa, Homo sapiens
LLCLELYRILGHLVAQGLICHPWSLSSPRADEALAYLVYFLWESGPCKLARSLLCRGAVSGYVGVPGATSVFILNSCIAWHSIRRRPLLQGQLCLTTPSSFLKFFF

SEQ ID NO: 772506 - protein, 98 aa, Homo sapiens
VLVLRKDVKESNQQSSLSRDKRANRGPEQVFLWPVAKGLTQPSTYKCAAEPSHWEGSSEGHSHSSDKKLCSQRGSCQTEALLLRHTLHGSEIPAENTL

SEQ ID NO: 772507 - protein, 1190 aa, Homo sapiens
HEAAQGTGVRAGVRAGTTQSGRRRARVSGRLAEVSMASVAWAVLKVLLLLPTQTWRPVGAGNPPDCDSPLASALPRSSFSSSSELSSSHGPGFSRLNRRDGAGGWTPLVSNKYQWLQIDLGERMEVTAVATQGGYGSSDWVTSYLLMFSDGGRNWKQYRREESIWGFPGNTNADSVVHYRLQPPFEARFLRFLPLAWNPRGRIGMRIEVYGCAYKSEVVYFDGQSALLYRLDKKPLKPIRDVISLKFKAMQSNGILLHREGQHGNHITLELIKGKLVFFLNSGNAKLPSTIAPVTLTLGSLLDDQHWHSVLIELLDTQVNFTVDKHTHHFQAKGDSSYLDLNFEISFGGIPTPGRSRAFRRKSFHGCLENLYYNGVDVTELAKKHKPQILMMGNVSFSCPQPQTVPVTFLSSRSYLALPGNSGEDKVSVTFQFRTWNRAGHLLFGELRRGSGSFVLFLKDGKLKLSLFQPGQSPRNVTAGAGLNDGQWHSVSFSAKWSHMNVVVDDDTAVQPLVAVLIDSGDTYYFGETAAWTVVQHGGPDAVTLRGAPSGHPRSAVSFAYAAGAGQLRSAVNLAERCEQRLALRCGTARRPDSRDGTPLSWWVGRTNETHTYWGGSLPDAQKCTCGLEGNCIDSQYYCNCDAGRNEWTSDTIVLSQKEHLPVTQIVMTDAGRPHSEAAYTLGPLLCRGDQSFWNSASFNTETSYLHFPAFHGELTADVCFFFKTTVSSGVFMENLGITDFIRIELRAPTEVTFSFDVGNGPCEVTVQSPTPFNDNQWHHVRAERNVKGASLQVDQLPQKMQPAPADGHVRLQLNSQLFIGGTATRQRGFLGCIRSLQLNGVALDLEERATVTPGVEPGCAGHCSTYGHLCRNGGRCREKRRGVTCDCAFSAYDGPFCSNEISAYFATGSSMTYHFQEHYTLSENSSSLVSSLHRDVTLTREMITLSFRTTRTPSLLLYVSSFYEEYLSVILANNGSLQIRYKLDRHQNPDAFTFDFKNMADGQLHQVKINREEAVVMVEVNQSTKKQVILSSGTEFNAVKSLILGKVLEAAGADPDTRRAATSGFTGCLSAVRFGRAAPLKAALRPSGPSRVTVRGHVAPMARCAAGAASGSPARELAPRLAGGAGRSGPADEGEPLVNADRRDSAVIGGVIAVVIFILLCITAIAIRIYQQRKLRKENESKVSKKEEC

SEQ ID NO: 772508 - protein, 1162 aa, Homo sapiens
HEAAQGTGVRAGVRAGTTQSGRRRARVSGRLAEVSMASVAWAVLKVLLLLPTQTWRPVGAGNPPDCDSPLASALPRSSFSSSSELSSSHGPGFSRLNRRDGAGGWTPLVSNKYQWLQIDLGERMEVTAVATQGGYGSSDWVTSYLLMFSDGGRNWKQYRREESIWGFPGNTNADSVVHYRLQPPFEARFLRFLPLAWNPRGRIGMRIEVYGCAYKSEVVYFDGQSALLYRLDKKPLKPIRDVISLKFKAMQSNGILLHREGQHGNHITLELIKGKLVFFLNSGNAKLPSTIAPVTLTLGSLLDDQHWHSVLIELLDTQVNFTVDKHTHHFQAKGDSSYLDLNFEISFGGIPTPGRSRAFRRKSFHGCLENLYYNGVDVTELAKKHKPQILMMGNVSFSCPQPQTVPVTFLSSRSYLALPGNSGEDKVSVTFQFRTWNRAGHLLFGELRRGSGSFVLFLKDGKLKLSLFQPGQSPRNVTAGAGLNDGQWHSVSFSAKWSHMNVVVDDDTAVQPLVAVLIDSGDTYYFGGCLDNSSGSGCKSPLGGFQGCLRLITIGDKAVDPILVQQGALGSFRDLQIDSCGITDRCLPSYCEHGGECSQSWDTFSCDCLGTGYTGETCHSSLYEQSCEAHKHRGNPSGLYYIDADGSGPLGPFLVYCNDDRDAAWTVVQHGGPDAVTLRGAPSGHPRSAVSFAYAAGAGQLRSAVNLAERCEQRLALRCGTARRPDSRDGTPLSWWVGRTNETHTYWGGSLPDAQKCTCGLEGNCIDSQYYCNCDAGRNEWTSDTIVLSQKEHLPVTQIVMTDAGRPHSEAAYTLGPLLCRGDQSFWNSASFNTETSYLHFPAFHGELTADVCFFFKTTVSSGVFMENLGITDFIRIELRAPTEVTFSFDVGNGPCEVTVQSPTPFNDNQWHHVRAERNVKGASLQVDQLPQKMQPAPADGHVRLQLNSQLFIGGTATRQRGFLGCIRSLQLNGVALDLEERATVTPGVEPGCAGHCSTYGHLCRNGGRCREKRRGVTCDCAFSAYDGPFCSNEISAYFATGSSMTYHFQEHYTLSENSSSLVSSLHRDVTLTREMITLSFRTTRTPSLLLYVSSFYEEYLSVILANNGSLQIRYKLDRHQNPDAFTFDFKNMADGQLHQVKINREEAVVMVEVIPQMQKSN

SEQ ID NO: 772509 - protein, 1162 aa, Homo sapiens; identical to SEQ ID NO: 772508

SEQ ID NO: 772510 - protein, 31 aa, Homo sapiens
ITDFIRIELRGKLATLDKSQGTHYLAIKALT

SEQ ID NO: 772511 - protein, 1162 aa, Homo sapiens; identical to SEQ ID NO: 772508

SEQ ID NO: 772512 - protein, 746 aa, Homo sapiens
MASVAWAVLKVLLLLPTQTWRPVGAGNPPDCDSPLASALPRSSFSSSSELSSSHGPGFSRLNRRDGAGGWTPLVSNKYQWLQIDLGERMEVTAVATQGGYGSSDWVTSYLLMFSDGGRNWKQYRREESIWGFPGNTNADSVVHYRLQPPFEARFLRFLPLAWNPRGRIGMRIEVYGCAYKSEVVYFDGQSALLYRLDKKPLKPIRDVISLKFKAMQSNGILLHREGQHGNHITLELIKGKLVFFLNSGNAKLPSTIAPVTLTLGSLLDDQHWHSVLIELLDTQVNFTVDKHTHHFQAKGDSSYLDLNFEISFGGIPTPGRSRAFRRKSFHGCLENLYYNGVDVTELAKKHKPQILMMGNVSFSCPQPQTVPVTFLSSRSYLALPGNSGEDKVSVTFQFRTWNRAGHLLFGELRRGSGSFVLFLKDGKLKLSLFQPGQSPRNVTAGAGLNDGQWHSVSFSAKWSHMNVVVDDDTAVQPLVAVLIDSGDTYYFGGCLDNSSGSGCKSPLGGFQGCLRLITIGDKAVDPILVQQGALGSFRDLQIDSCGITDRCLPSYCEHGGECSQSWDTFSCDCLGTGYTGETCHSSLYEQSCEAHKHRGNPSGLYYIDADGSGPLGPFLVYCKYDRDAAWTVVQHGGPDAVTLRGAPSGHPRSAVSFAYAAGAGQLRSAVNLAERCEQRLALRCGTARRPDSRDGTPLSWWVGRTNETHTYWGGSLPDAQKCTCGLEGNCIDSQYYCNCDAGRNEW

SEQ ID NO: 772513 - protein, 107 aa, Homo sapiens
RDRERELEIRQEKKGNSSTGNICDPTKETNENMVNLRGMQIKTRSYVSPITLASFCKDDIIKIIIGGAGRMWRNRALSDVADVNGSGGSFSVSAFTGGCPLIQQFHM

SEQ ID NO: 772514 - protein, 1529 aa, Homo sapiens
MRGVGWQMLSLSLGLVLAILNKVAPQACPAQCSCSGSTVDCHGLALRSVPRNIPRNTERLDLNGNNITRITKTDFAGLRHLRVLQLMENKISTIERGAFQDLKELERLRLNRNHLQLFPELLFLGTAKLYRLDLSENQIQAIPRKAFRGAVDIKNLQLDYNQISCIEDGAFRALRDLEVLTLNNNNITRLSVASFNHMPKLRTFRLHSNNLYCDCHLAWLSDWLRQRPRVGLYTQCMGPSHLRGHNVAEVQKREFVCSGHQSFMAPSCSVLHCPAACTCSNNIVDCRGKGLTEIPTNLPETITEIRLEQNTIKVIPPGAFSPYKKLRRIDLSNNQISELAPDAFQGLRSLNSLVLYGNKITELPKSLFEGLFSLQLLLLNANKINCLRVDAFQDLHNLNLLSLYDNKLQTIAKGTFSPLRAIQTMHLAQNPFICDCHLKWLADYLHTNPIETSGARCTSPRRLANKRIGQIKSKKFRCSAKEQYFIPGTEDYRSKLSGDCFADLACPEKCRCEGTTVDCSNQKLNKIPEHIPQYTAELRLNNNEFTVLEATGIFKKLPQLRKINFSNNKITDIEEGAFEGASGVNEILLTSNRLENVQHKMFKGLESLKTLMLRSNRITCVGNDSFIGLSSVRLLSLYDNQITTVAPGAFDTLHSLSTLNLLANPFNCNCYLAWLGEWLRKKRIVTGNPRCQKPYFLKEIPIQDVAIQDFTCDDGNDDNSCSPLSRCPTECTCLDTVVRCSNKGLKVLPKGIPRDVTELYLDGNQFTLVPKELSNYKHLTLIDLSNNRISTLSNQSFSNMTQLLTLILSYNRLRCIPPRTFDGLKSLRLLSLHGNDISVVPEGAFNDLSALSHLAIGANPLYCDCNMQWLSDWVKSEYKEPGIARCAGPGEMADKLLLTTPSKKFTCQGPVDVNILAKCNPCLSNPCKNDGTCNSDPVDFYRCTCPYGFKGQDCDVPIHACISNPCKHGGTCHLKEGEEDGFWCICADGFEGENCEVNVDDCEDNDCENNSTCVDGINNYTCLCPPEYTGELCEEKLDFCAQDLNPCQHDSKCILTPKGFKCDCTPGYVGEHCDIDFDDCQDNKCKNGAHCTDAVNGYTCICPEGYSGLFCEFSPPMVLPRTSPCDNFDCQNGAQCIVRINEPICQCLPGYQGEKCEKLVSVNFINKESYLQIPSAKVRPQTNITLQIATDEDSGILLYKGDKDHIAVELYRGRVRASYDTGSHPASAIYSVETINDGNFHIVELLALDQSLSLSVDGGNPKIITNLSKQSTLNFDSPLYVGGMPGKSNVASLRQAPGQNGTSFHGCIRNLYINSELQDFQKVPMQTGILPGCEPCHKKVCAHGTCQPSSQAGFTCECQEGWMGPLCDQRTNDPCLGNKCVHGTCLPINAFSYSCKCLEGHGGVLCDEEEDLFNPCQAIKCKHGKCRLSGLGQPYCECSSGYTGDSCDREISCRGERIRDYYQKQQGYAACQTTKKVSRLECRGGCAGGQCCGPLRSKRRKYSFECTDGSSFVDEVEKVVKCGCTRCVS

SEQ ID NO: 772515 - protein, 101 aa, Homo sapiens
GRAGSTHASGSSGYTGDSCDREISCRGERIRDYYQKQQGYAACQTTKKVSRLECRGGCAGGQCCGPLRSKRRKYSFECTDGSSFVDEVEKVVKCGCTRCVS

SEQ ID NO: 772516 - protein, 1521 aa, Homo sapiens
MRGVGWQMLSLSLGLVLAILNKVAPQACPAQCSCSGSTVDCHGLALRSVPRNIPRNTERLDLNGNNITRITKTDFAGLRHLRVLQLMENKISTIERGAFQDLKELERLRLNRNHLQLFPELLFLGTAKLYRLDLSENQIQAIPRKAFRGAVDIKNLQLDYNQISCIEDGAFRALRDLEVLTLNNNNITRLSVASFNHMPKLRTFRLHSNNLYCDCHLAWLSDWLRQRPRVGLYTQCMGPSHLRGHNVAEVQKREFVCSGHQSFMAPSCSVLHCPAACTCSNNIVDCRGKGLTEIPTNLPETITEIRLEQNTIKVIPPGAFSPYKKLRRIDLSNNQISELAPDAFQGLRSLNSLVLYGNKITELPKSLFEGLFSLQLLLLNANKINCLRVDAFQDLHNLNLLSLYDNKLQTIAKGTFSPLRAIQTMHLAQNPFICDCHLKWLADYLHTNPIETSGARCTSPRRLANKRIGQIKSKKFRCSGTEDYRSKLSGDCFADLACPEKCRCEGTTVDCSNQKLNKIPEHIPQYTAELRLNNNEFTVLEATGIFKKLPQLRKINFSNNKITDIEEGAFEGASGVNEILLTSNRLENVQHKMFKGLESLKTLMLRSNRITCVGNDSFIGLSSVRLLSLYDNQITTVAPGAFDTLHSLSTLNLLANPFNCNCYLAWLGEWLRKKRIVTGNPRCQKPYFLKEIPIQDVAIQDFTCDDGNDDNSCSPLSRCPTECTCLDTVVRCSNKGLKVLPKGIPRDVTELYLDGNQFTLVPKELSNYKHLTLIDLSNNRISTLSNQSFSNMTQLLTLILSYNRLRCIPPRTFDGLKSLRLLSLHGNDISVVPEGAFNDLSALSHLAIGANPLYCDCNMQWLSDWVKSEYKEPGIARCAGPGEMADKLLLTTPSKKFTCQGPVDVNILAKCNPCLSNPCKNDGTCNSDPVDFYRCTCPYGFKGQDCDVPIHACISNPCKHGGTCHLKEGEEDGFWCICADGFEGENCEVNVDDCEDNDCENNSTCVDGINNYTCLCPPEYTGELCEEKLDFCAQDLNPCQHDSKCILTPKGFKCDCTPGYVGEHCDIDFDDCQDNKCKNGAHCTDAVNGYTCICPEGYSGLFCEFSPPMVLPRTSPCDNFDCQNGAQCIVRINEPICQCLPGYQGEKCEKLVSVNFINKESYLQIPSAKVRPQTNITLQIATDEDSGILLYKGDKDHIAVELYRGRVRASYDTGSHPASAIYSVETINDGNFHIVELLALDQSLSLSVDGGNPKIITNLSKQSTLNFDSPLYVGGMPGKSNVASLRQAPGQNGTSFHGCIRNLYINSELQDFQKVPMQTGILPGCEPCHKKVCAHGTCQPSSQAGFTCECQEGWMGPLCDQRTNDPCLGNKCVHGTCLPINAFSYSCKCLEGHGGVLCDEEEDLFNPCQAIKCKHGKCRLSGLGQPYCECSSGYTGDSCDREISCRGERIRDYYQKQQGYAACQTTKKVSRLECRGGCAGGQCCGPLRSKRRKYSFECTDGSSFVDEVEKVVKCGCTRCVS

SEQ ID NO: 772517 - protein, 1521 aa, Homo sapiens; identical to SEQ ID NO: 772516

SEQ ID NO: 772518 - protein, 142 aa, Homo sapiens
MLPDHLRSPLDHHRCPTSGDSQVEDPQPHEDTLAGRSVLVKNLNPQTLQPRWTRPYLVICSTLTAVCLQDLPHWVHHSRIKLCPSGSQPNPSLPPGSHKYSPLLPLNSLIFLKNSNNPYEPNTSLYSIRSLHPYPTFCSTAL

SEQ ID NO: 772519 - protein, 26 aa, Homo sapiens [sequence omitted]

SEQ ID NO: 772520 - protein, 50 aa, Homo sapiens [sequence omitted]

SEQ ID NO: 772521 - protein, 329 aa, Homo sapiens [sequence omitted]

SEQ ID NO: 772522 - protein, 329 aa, Homo sapiens [sequence omitted]

SEQ ID NO: 772523 - protein, 161 aa, Homo sapiens
MSGVVPTAPEQPAGEMENQTKPPDPRPDAPPEYNSHFLPGPPGTAVPPPTGYPGGLPMGYYSPQQPSTFPLYQPVGGIHPVRYQPGKYPMPNQSVPITWMPGPTPMANCPPGLEYLVQLDNIHVLQHFEPLETGGAVSSWCHHWLCCGTLEPVQGGVQHPK

SEQ ID NO: 772524 - protein, 329 aa, Homo sapiens [sequence omitted]

SEQ ID NO: 772525 - protein, 329 aa, Homo sapiens [sequence omitted]

SEQ ID NO: 772526 - protein, 329 aa, Homo sapiens [sequence omitted]

SEQ ID NO: 772527 - protein, 81 aa, Homo sapiens
RSRGGRRHRPRGGRRCRPSTADSAGKMSTEGGGRRCQAQVSRRISFSASHRLYSKFLSDEENLKLFGKCNNPNGHGHNYKD

SEQ ID NO: 772528 - protein, 171 aa, Homo sapiens
RSRGGRRHRPRGGRRCRPSTADSAGKMSTEGGGRRCQAQVSRRISFSASHRLYSKFLSDEENLKLFGKCNNPNGHGHNYKVVVTVHGEIDPATGMVMNLADLKKYMEEAIMQPLDHKNLDMDVPYFADVVSTTENVAVYIWDNLQKVLPVGVLYKVKVYETDNNIVVYKGE

SEQ ID NO: 772529 - protein, 92 aa, Homo sapiens
RSRGGRRHRPRGGRRCRPSTADSAGKMSTEGGGRRCQAQVSRRISFSASHRLYSKFLSDEENLKLFGKCNNPNGHGHNYKGERKTDDISALQ

SEQ ID NO: 772530 - protein, 118 aa, Homo sapiens
RSRGGRRHRPRGGRRCRPSTADSAGKMSTEGGGRRCQAQVSRRISFSASHRLYSKFLSDEENLKLFGKCNNPNGHGHNYKVVRTHCALECLFIEIIVRPVINLSLFKTKLVIYILKII

SEQ ID NO: 772531 - protein, 171 aa, Homo sapiens; identical to SEQ ID NO: 772528

SEQ ID NO: 772532 - protein, 171 aa, Homo sapiens; identical to SEQ ID NO: 772528

SEQ ID NO: 772533 - protein, 87 aa, Homo sapiens
RSRGGRRHRPRGGRRCRPSTADSAGKMSTEGGGRRCQAQVSRRISFSASHRLYSKFLSDEENLKLFGKCNNPNGHGHNYKGGDYAAP

SEQ ID NO: 772534 - protein, 81 aa, Homo sapiens; identical to SEQ ID NO: 772527

SEQ ID NO: 772535 - protein, 171 aa, Homo sapiens; identical to SEQ ID NO: 772528

SEQ ID NO: 772536 - protein, 116 aa, Homo sapiens
MRAKSICTWSHHHWCPGLALTNADSNITVEHPDVAAVPRCRRVILQVPRLTPCCAGPGMTWPQMAALAPSKTGLSRWAGRWLPPPMTELYQAPPIMIWAGRALGNHEETQEASGKM

SEQ ID NO: 772537 - protein, 196 aa, Homo sapiens
TASPSPSKRPVRRPWTQTPEMKPLLLAVSLGLIAALQAHHLLASDEEIQDVSGTWYLKAMTVDREFPEMNLESVTPMTLTTLEGGNLEAKVTMLISGRCQEVKAVLEKTDEPGKYTADGGKHVAYIIRSHVKDHYIFYCEGELHGKPVRGVKLVGRDPKNNLEALEDFEKAAGARGLSTESILIPRQSETCSPGSD

SEQ ID NO: 772538 - protein, 54 aa, Homo sapiens
MLGWADERICVVEPSNVREKDVEDLFYKYGRIRKIKLKNGHCLVPFALVRFEDP

SEQ ID NO: 772539 - protein, 452 aa, Homo sapiens
RSAPNPQRHLRSQLGRLCESNEGHQCGETLSQTANLLVHKSYPTEAKPSECTKCGKAFENRQRSHTGQRPCKECGQACSCLSCQSPPMKTQTVEKPCNCQDSRTASVTYVKSLSSKKSYECQKCGKAFICPSSFRGHVNSHHGQKTHACKVCGKTFMYYSYLTRHVRTHTGEKPYECKECGKAFSCPSYFREHVRTHTGEKPYECKHCGKSFSCYSSFRDHVRTHTGEKPCQCKHCGKAFTCYSSLREHGRTHSGEKPYECKECGKAFRYPSSLRAHMRMHTGEKPYVCKQCGKAFGCPTYFRRHVKTHSGVKPYQCKECGKAYSFSSSLRIHVRTHTGEKPFECKHCGKAFSCHSSLREHVRTHSGEKPYECNQCGKAFSHAQYFQKHVRSHSGVKPYECTECGKAYSCSSSLRVHVRTHTGERPYECKQCGKTFRYLASLQAHVRTHAGA

SEQ ID NO: 772540 - protein, 315 aa, Homo sapiens
RSAPNPQRHLRSQLGRLCESNEGHQCGETLSQTANLLVHKSYPTEAKPSECTKCGKAFENRQRSHTGQRPCKECGQACSCLSCQSPPMKTQTVEKPCNCQDSRTASVTYVKSLSSKKSYECQKCGKAFICPSSFRGHVNSHHGQKTHACKVCGKTFMYYSYLTRHVRTHTGEKPYECKECGKAFSCPSYFREHVRTHTGEKPYECKHCGKSFSCYSSFRDHVRTHTGEKPCQCKHCGKAFTCYSSLREHGRTHSGEKPYECKECGKAFRYPSSLRAHMRMHTGEKPYVCKQCGKAFGCPTYFRRHVIFPPPFEST

SEQ ID NO: 772541 - protein, 104 aa, Homo sapiens
AGIRVGKGGSRPTGRALRPRRGKGRMADRAQTPGSLPLGFSAGVSSSMIWHLLFGIMCQAGGGPGLNTRPCSSQVKRLIVSCRRILLKGTQAPRREGTVLKVTS

SEQ ID NO: 772542 - protein, 343 aa, Homo sapiens
MLATRLSRPLSRLPGKTLSACDRENGARRPLLLGSTSFIPIGRRTYASAAEPVGSKAVLVTGCDSGFGFSLAKHLHSKGFLVFAGCLMKDKGHDGVKELDSLNSDRLRTVQLNVCSSEEVEKVVEIVRSSLKDPEKGMWGLVNNAGISTFGEVEFTSLETYKQVAEVNLWGTVRMTKSFLPLIRRAKGRVVNISSMLGRMANPARSPYCITKFGVEAFSDCLRYEMYPLGVKVSVVEPGNFIAATSLYSPESIQAIAKKMWEELPEVVRKDYGKKYFDEKIAKMETYCSSGSTDTSPVIDAVTHALTATTPYTRYHPMDYYWWLRMQIMTHLPGAISDMIYIR

SEQ ID NO: 772543 - protein, 343 aa, Homo sapiens; identical to SEQ ID NO: 772542

SEQ ID NO: 772544 - protein, 343 aa, Homo sapiens; identical to SEQ ID NO: 772542

SEQ ID NO: 772545 - protein, 256 aa, Homo sapiens
MKDKGHDGVKELDSLNSDRLRTVQLNVCSSEEVEKVVEIVRSSLKDPEKGMWGLVNNAGISTFGEVEFTSLETYKQVAEVNLWGTVRMTKSFLPLIRRAKGRVVNISSMLGRMANPARSPYCITKFGVEAFSDCLRYEMYPLGVKVSVVEPGNFIAATSLYSPESIQAIAKKMWEELPEVVRKDYGKKYFDEKIAKMETYCSSGSTDTSPVIDAVTHALTATTPYTRYHPMDYYWWLRMQIMTHLPGAISDMIYIR

SEQ ID NO: 772546 - protein, 380 aa, Homo sapiens
MLATRLSRPLSRLPGKTLSACDRENGARRPLLLGSTSFIPIGRRTYASAAEPVGSKAVLVTGCDSGFGFSLAKHLHSKGFLVFAGCLMKDKGHDGVKELDSLNSDRLRTVQLNVCSSEEVEKVVEIVRSSLKDPEKGMWGLVNNAGISTFGEVEFTSLETYKQVAEVNLWGTVRMTKSFLPLIRRAKGEWERELPPAPEPAPRVHLCSEWKYLSQQLQCPQLSRGRVVNISSMLGRMANPARSPYCITKFGVEAFSDCLRYEMYPLGVKVSVVEPGNFIAATSLYSPESIQAIAKKMWEELPEVVRKDYGKKYFDEKIAKMETYCSSGSTDTSPVIDAVTHALTATTPYTRYHPMDYYWWLRMQIMTHLPGAISDMIYIR

SEQ ID NO: 772547 - protein, 343 aa, Homo sapiens; identical to SEQ ID NO: 772542

SEQ ID NO: 772548 - protein, 257 aa, Homo sapiens
RGFEKCLVTGCDLDVGLIGKIDSKGSCVCSSEEVEKVVEIVRSSLKDPEKGMWGLVNNAGISTFGEVEFTSLETYKQVAEVNLWGTVRMTKSFLPLIRRAKGRVVNISSMLGRMANPARSPYCITKFGVEAFSDCLRYEMYPLGVKVSVVEPGNFIAATSLYSPESIQAIAKKMWEELPEVVRKDYGKKYFDEKIAKMETYCSSGSTDTSPVIDAVTHALTATTPYTRYHPMDYYWWLRMQIMTHLPGAISDMIYIR

SEQ ID NO: 772549 - protein, 163 aa, Homo sapiens
MLATRLSRPLSRLPGKTLSACDRENGARRPLLLGSTSFIPIGRRTYASAAEPVGSKAVLVTGCDSGFGFSLAKHLHSKGFLVFAGCLMKDKGHDGVKELDSLNSDRLRTVQLNVCSSEEVEKVVEIVRSSLKDPEKGMWGLVNNAGISPEIISYRDFKKTSLY

SEQ ID NO: 772550 - protein, 110 aa, Homo sapiens
AGTVGDFGSRFACRSVRVAEAAGRRSAGGGASRKTLRQRPPSALPAGERAPARRRVKARASASPLQRSPLPIWFWNHREELGHSNTRCYHAGHPPLQTPVTAPRKNPKCL

SEQ ID NO: 772551 - protein, 83 aa, Homo sapiens
AGTVGDFGSRFACRSVRVAEAAGRRSAGGGASRKTLRQRPPSALPAGERAPARRRVKARASASPLQRSPLPIWFWPVSLEICL

SEQ ID NO: 772552 - protein, 110 aa, Homo sapiens; identical to SEQ ID NO: 772550

SEQ ID NO: 772553 - protein, 74 aa, Homo sapiens
KAQIHTDSCLASHFSPRVFTPNYHRIGLDLVFESVACCPLHCALLLLTHLSSPVLPGTARFPGKTRGADADAWA

SEQ ID NO: 772554 - protein, 150 aa, Homo sapiens
LSQDKPLVGAPARIQYPGPRSPYCITKFGVEAFSDCLRYEMYPLGVKVSVVEPGNFIAATSLYSPESIQAIAKKMWEELPEVVRKDYGKKYFDEKIAKMETYCSSGSTDTSPVIDAVTHALTASSSPWGGSGCRGVDAAANLVVVGGRSR

SEQ ID NO: 772555 - protein, 343 aa, Homo sapiens; identical to SEQ ID NO: 772542

SEQ ID NO: 772556 - protein, 343 aa, Homo sapiens; identical to SEQ ID NO: 772542

SEQ ID NO: 772557 - protein, 256 aa, Homo sapiens; identical to SEQ ID NO: 772545

SEQ ID NO: 772558 - protein, 324 aa, Homo sapiens
MASNGIQKRRPLLLGSTSFIPIGRRTYASAAEPVGSKAVLVTGCDSGFGFSLAKHLHSKGFLVFAGCLMKDKGHDGVKELDSLNSDRLRTVQLNVCSSEEVEKVVEIVRSSLKDPEKGMWGLVNNAGISTFGEVEFTSLETYKQVAEVNLWGTVRMTKSFLPLIRRAKGRVVNISSMLGRMANPARSPYCITKFGVEAFSDCLRYEMYPLGVKVSVVEPGNFIAATSLYSPESIQAIAKKMWEELPEVVRKDYGKKYFDEKIAKMETYCSSGSTDTSPVIDAVTHALTATTPYTRYHPMDYYWWLRMQIMTHLPGAISDMIYIR

SEQ ID NO: 772559 - protein, 335 aa, Homo sapiens
MLATRLSRPLSRLPGKTLSACDRENGARRPLLLGSTSFIPIGRRTYASAAEPVGSKAVLVTGCDSGFGFSLAKHLHSKGFLVFAGCLMKDKGHDGVKELDSLNSDRLRTVQLNVCSSEEVEKVVEIVRSSLKDPEKGMWGLVNNAGISTFGEVEFTSLETYKQVAEVNLWGTVRMTKSFLPLIRRAKGRVVNISSMLGRMANPARSPYCITKFGVEAFSDCLRYEMYPLGVKVSVVEPGNFIAATSLYSPESIQAIAKKMWEELPEVVRKDYGKKYFDEKIAKMETYCSSGSTDTSPVIDAVTHALTASSSPWGGSGCRGVDAAANLVVVGGRSR

SEQ ID NO: 772560 - protein, 206 aa, Homo sapiens
MWGLVNNAGISTFGEVEFTSLETYKQVAEVNLWGTVRMTKSFLPLIRRAKGRVVNISSMLGRMANPARSPYCITKFGVEAFSDCLRYEMYPLGVKVSVVEPGNFIAATSLYSPESIQAIAKKMWEELPEVVRKDYGKKYFDEKIAKMETYCSSGSTDTSPVIDAVTHALTATTPYTRYHPMDYYWWLRMQIMTHLPGAISDMIYIR

SEQ ID NO: 772561 - protein, 162 aa, Homo sapiens
MLATRLSRPLSRLPGKTLSACDRENGARRPLLLGSTSFIPIGRRTYASAAEPVGSKAVLVTGCDSGFGFSLAKHLHSKGFLVFAGCLMKDKGHDGVKELDSLNSDRLRTVQLNVCSSEEVEKVVEIVRSSLKDPEKGMWGLVNNAGISTFGEVEFTSLERGL

SEQ ID NO: 772562 - protein, 110 aa, Homo sapiens
  misc_feature (91)..(91): Xaa can be any naturally occurring amino acid
  misc_feature (106)..(106): Xaa can be any naturally occurring amino acid
MLATRLSRPLSRLPGKTLSACDRENGARRPLLLGSTSFIPIGRRTYASAAEPVGSKAVLVTGCDSGFGFSLAKHLHSKGFLVFAGCLMKTXAMMGQELTANSTIRXSAHV

SEQ ID NO: 772563 - protein, 110 aa, Homo sapiens; identical to SEQ ID NO: 772550

SEQ ID NO: 772564 - protein, 574 aa, Homo sapiens
RSRAEEASQGHAGEAGRPARGAPASGALSGASARAPMVTCAHLGRRARLPAAQPSACPGTCFSQEERMAAGYLPRWSQELVTFEDVSMDFSQEEWELLEPAQKNLYREVMLENYRNVVSLEALKNQCTDVGIKEGPLSPAQTSQVTSLSSWTGYLLFQPVASSHLEQREALWIEEKGTPQASCSDWMTVLRNQDSTYKKVALQEEPASGINMIKLIREDGGWKQLEDSHEDPQGLLSQKASLHVVAVPQEKATAWHGFGENGNLSPALVLSQGSSKGNHLCGSELDITSLASDSVLNHHQLGYADRRPCESNECGNAIRQNSHFIQHGGKMFVYLENGQSLNHGMALTIHNKINTAEKPFECHQCGKVFNRRHSLSEHQRIHTGEKPYECQECGRAFTHSSTLTRHLRTHTGEKPYGCGECGKAFNRISSLTQHQRIHTGEKPYKCEDCGKSFCQSSYLILHKRTHTGEKPYECSECGKAFSDRSSLNQHERTHTGENPYECKQCGRAFSQRSSLVRHERTHTGEKPYRCQECGKAFSQSSSLVTHQKTHSSQKTYKIIDCGKAFYQNRHLIGY

SEQ ID NO: 772565 - protein, 120 aa, Homo sapiens
NIALEVDAFGTRNGTDDPSYNGAITVCCNEKNYSFSLACNAKRLNCFPVLMDIVSNGLLGMVKPSVHIRTERSTFLEVNIYNLTIPDSPLSGISQITLLSAGILFLLSKPLHNKLTFGLI

SEQ ID NO: 772566 - protein, 536 aa, Homo sapiens
MPTVDDILEQVGESGWFQKQAFLILCLLSAAFAPICVGIVFLGFTPDHHCQSPGVAELSQRCGWSPAEELNYTVPGLGPAGEAFLGQCRRYEVDWNQSALSCVDPLASLATNRSHLPLGPCQDGWVYDTPGSSIVTEFNLVCADSWKLDLFQSCLNAGFLFGSLGVGYFADRFGRKLCLLGTVLVNAVSGVLMAFSPNYMSMLLFRLLQGLVSKGNWMAGYTLITEFVGSGSRRTVAIMYQMAFTVGLVALTGLAYALPHWRWLQLAVSLPTFLFLLYYWCVPESPRWLLSQKRNTEAIKIMDHIAQKNGKLPPADLKMLSLEEDVTGTFILMYLWFTDSVLYQGLILHMGATSGNLYLDFLYSALVEIPGAFIALITIDRVGRIYPMAMSNLLAGAACLVMIFISPDLHWLNIIIMCVGRMGITIAIQMICLVNAELYPTFVRNLGVMVCSSLCDIGGIITPFIVFRLREVWQALPLILFAVLGLLAAGVTLLLPETKGVALPETMKDAENLGRKAKPKENTIYLKVQTSEPSGT

SEQ ID NO: 772567 - protein, 554 aa, Homo sapiens
MPTVDDILEQVGESGWFQKQAFLILCLLSAAFAPICVGIVFLGFTPDHHCQSPGVAELSQRCGWSPAEELNYTVPGLGPAGEAFLGQCRRYEVDWNQSALSCVDPLASLATNRSHLPLGPCQDGWVYDTPGSSIVTEFNLVCADSWKLDLFQSCLNAGFLFGSLGVGYFADRFGRKLCLLGTVLVNAVSGVLMAFSPNYMSMLLFRLLQGLVSKGNWMAGYTLITEFVGSGSRRTVAIMYQMAFTVGLVALTGLAYALPHWRWLQLAVSLPTFLFLLYYWCVPESPRWLLSQKRNTEAIKIMDHIAQKNGKLPPADLKMLSLEEDVTEKLSPSFADLFRTPRLRKRTFILMYLWFTDSVLYQGLILHMGATSGNLYLDFLYSALVEIPGAFIALITIDRVGRIYPMAMSNLLAGAACLVMIFISPDLHWLNIIIMCVGRMGITIAIQMICLVNAELYPTFVRNLGVMVCSSLCDIGGIITPFIVFRLREVWQALPLILFAVLGLLAAGVTLLLPETKGVALPETMKDAENLGRKAKPKENTIYLKVQTSEPSGT

SEQ ID NO: 772568 - protein, 472 aa, Homo sapiens
MPTVDDILEQVGESGWFQKQAFLILCLLSAAFAPICVGIVFLGFTPDHHCQSPGVAELSQRCGWSPAEELNYTVPGLGPAGEAFLGQCRRYEVDWNQSALSCVDPLASLATNRSHLPLGPCQDGWVYDTPGSSIVTEFNLVCADSWKLDLFQSCLNAGFLFGSLGVGYFADRFGRKLCLLGTVLVNAVSGVLMAFSPNYMSMLLFRLLQGLVSKGNWMAGYTLITEFVGSGSRRTVAIMYQMAFTVGLVALTGLAYALPHWRWLQLAVSLPTFLFLLYYWCVPESPRWLLSQKRNTEAIKIMDHIAQKNGKLPPADLKMLSLEEDVTGTFILMYLWFTDSVLYQGLILHMGATSGNLYLDFLYSALVEIPGAFIALITIDRVGRIYPMAMSNLLAGAACLVMIFISPDLHWLNIIIMCVGRMGITIAIQMICLVNAELYPTFVRNLGVMVCSSLCDIGGIITPFIVFRLREV

SEQ ID NO: 772569 - protein, 324 aa, Homo sapiens
PSLERRAAAAEPDVSAKMAGRSMQAARCPTDELSLTNCAVVNEKDFQSGQHVIVRTSPNHRYTFTLKTHPSVVPGSIAFSLPQRKWAGLSIGQEIEVSLYTFDKAKQCIGTMTIEIDFLQKKSIDSNPYDTDKMAAEFIQQFNNQAFSVGQQLVFSFNEKLFGLLVKDIEAMDPSILKGEPATGKRQKIEVGLVVGNSQVAFEKAENSSLNLIGKAKTKENRQSIINPDWNFEKMGIGGLDKEFSDIFRRAFASRVFPPEIVEQMGCKHVKGILLYGPPGCGKTLLARQIGKMLNAREPKVVNGPEILNKYVGESEANIRKLFA

SEQ ID NO: 772570 - protein, 210 aa, Homo sapiens
PSLERRAAAAEPDVSAKMAGRVVNMLKASCYMDPQVVLGANSGLHIIIFDEIDAICKQRGSMAGSTGVHDTVVNQLLSKIDGMEQLNNILVIGMTNRPDLIDEALLRPGRLEVKMEIGLPDEKGRLQILHIHTARMRGHQLLSADVDIKELAVETKNFSGAELEGLVRAAQSTAMNRHIKASTKVEVDMEKAESLQVMRGDFLASLENDI

SEQ ID NO: 772571 - protein, 171 aa, Homo sapiens
PSLERRAAAAEPDVSAKMAGRSMQAARCPTDELSLTNCAVVNEKDFQSGQHVIVRTSPNHRYTFTLKTHPSVVPGSIAFSLPQRKWAGLSIGQEIEVSLYTFDKAKQCIGTMTIEIDFLQKKSIDSNPYDTDKMAARPLSSHELLTQGRAAKPGYRNLNLPMIACPSKAVL

SEQ ID NO: 772572 - protein, 175 aa, Homo sapiens
GTEVSGSRPFPFSSPLESSLPRLPRLPALRRAGVLVPYRQSPAARSRDALFLLWVLIMETKRVEIPGSVLDDLCSRFILHIPSEERDNAIRVCFQIELAHWFYLDFYMQNTPGLPQCGIRDFAKAVFSHCPFLLPQGEDVERVWMNGRNIKWEYQHMVQLFLMRHLKMYYWFRGT

SEQ ID NO: 772573 - protein, 86 aa, Homo sapiens
GTEVSGSRPFPFSSPLESSLPRLPRLPALRRAGVLVPYRQSPAARSRDALFLLWVLIMETKRVEIPGSVLDDLCRICEDYFMKTRK

SEQ ID NO: 772574 - protein, 104 aa, Homo sapiens
APLCLLSVSLADLTTSSSLVPSAFMLSQQKEHCIVTWSQHATCPITSMQLEDSAAVTQADVTACPPLSALVPPRPQGCTERHCAGFQTTSLTGKGHVQSWPPCS

SEQ ID NO: 772575 - protein, 130 aa, Homo sapiens
PKVTGGQCPRSQGGYGFPTQSPGRPHLGTPTRSQQLRGAQGGVLGPRGPGCKETACLQGPLGEPLPPRPPPVSQEAPKSMRPHLGMRPRQGWEGCRSWEAPGQLQPFRRSLWPQNSGKSKKESKCLAFGD

SEQ ID NO: 772576 - protein, 37 aa, Homo sapiens
MRKKKKDKRKKKREKEEERRRRKKEKEKRKEEEKEEE

SEQ ID NO: 772577 - protein, 152 aa, Homo sapiens
CLEDPVDGTNTIHHIHGKTWSFVCVLKQSSQGSLCPWQKIDSKLAPREDTIQGFNIPGYSPLCLEMRCLFPPLRFCWSCVLLSGACVTIRQRQEGLHRSAATGSEQSKQHCKQLKLGPAQRTSQPLGTLLTSSSTLAWLRTVRSPPMWRQWV

SEQ ID NO: 772578 - protein, 188 aa, Homo sapiens
KFIDTQTSQSRSSKDAVGQISVHVDITATPGTGDHKVTVKVIAINDLNWQTTAMFRPFVEVCILGPNLGDKKRKQGTKTKSNTWSPKYNETFQFILGKENRPGAYELHLSVKDYCFAREDRIIGMTVIQLQNIAEKGSYGAWYPLLKNISMDETGLTILRILSQRTSDDVAKEFVRLKSETRSTEESA

SEQ ID NO: 772579 - protein, 135 aa, Homo sapiens
MFRPFVEVCILGPNLGDKKRKQGTKTKSNTWSPKYNETFQFILGKENRPGAYELHLSVKDYCFAREDRIIGMTVIQLQNIAEKGSYGAWYPLLKNISMDETGLTILRILSQRTSDDVAKEFVRLKSETRSTEESA

SEQ ID NO: 772580 - protein, 123 aa, Homo sapiens
FSFSTTEGVSEQDGGSTLQRAAVSREDSGTYVCWAENRVGRTQAVSFVHVKEAPVLQGEAFSYLVEPVGGSIQLDCVVRGDPVPDIHWIKDGLPLRGSHLRHQLQNGSLTIRRTEARRGLAPW

SEQ ID NO: 772581 - protein, 152 aa, Homo sapiens
  misc_feature (148)..(148): Xaa can be any naturally occurring amino acid
MMDASKELQVLHIDFLNQDNAVSHHTWEFQTSSPVFRRGQVFHLRLVLNQPLQSYHQLKLEFSTGPNPSIAKHTLVVLDPRTPSDHYNWQATLQNESGKEVTVAVTSSPNAILGKYQLNVKTGNHILKSEENILYLLFNPWCKGGHWXLMPY

SEQ ID NO: 772582 - protein, 728 aa, Homo sapiens
MMDASKELRSHFVAQAACCGYFTAAIIAHCSLKLLGSSDSPTSVSRVTGIQLQVLHIDFLNQDNAVSHHTWEFQTSSPVFRRGQVFHLRLVLNQPLQSYHQLKLEFSTGPNPSIAKHTLVVLDPRTPSDHYNWQATLQNESGKEVTVAVTSSPNAILGKYQLNVKTGNHILKSEENILYLLFNPWCKEDMVFMPDEDERKEYILNDTGCHYVGAARSIKCKPWNFGQFEKNVLDCCISLLTESSLKPTDRRDPVLVCRAMCAMMSFEKGQGVLIGNWTGDYEGGTAPYKWTGSAPILQQYYNTKQAVCFGQCWVFAGILTTVLRALGIPARSVTGFDSAHDTERNLTVDTYVNENGEKITSMTHDSVWNFHVWTDAWMKRPDLPKGYDGWQAVDATPQERSQGVFCCGPSPLTAIRKGDIFIVYDTRFVFSEVNGDRLIWLVKMVNGQEELHVISMETTSIGKNISTKAVGQDRRRDITYEYKYPEGSSEERQVMDHAFLLLSSEREHRRPVKENFLHMSVQSDDVLLGNSVNFTVILKRKTAALQNVNILGSFELQLYTGKKMAKLCDLNKTSQIQGQVSEVTLTLDSKTYINSLAILDDEPVIRGFIIAEIVESKEIMASEVFTSFQYPEFSIELPNTGRIGQLLVCNCIFKNTLAIPLTDVKFSLESLGISSLQTSDHGTVQPGETIQSQIKCTPIKTGPKKFIVKLSSKQVKEINAQKIVLITK

SEQ ID NO: 772583 - protein, 622 aa, Homo sapiens
MGVPNEQSCVPARTGVSPAAGAEPAPTILPPTETGIQHSTVAVTSSPNAILGKYQLNVKTGNHILKSEENILYLLFNPWCKEDMVFMPDEDERKEYILNDTGCHYVGAARSIKCKPWNFGQFEKNVLDCCISLLTESSLKPTDRRDPVLVCRAMCAMMSFEKGQGVLIGNWTGDYEGGTAPYKWTGSAPILQQYYNTKQAVCFGQCWVFAGILTTVLRALGIPARSVTGFDSAHDTERNLTVDTYVNENGEKITSMTHDSVWNFHVWTDAWMKRPDLPKGYDGWQAVDATPQERSQGVFCCGPSPLTAIRKGDIFIVYDTRFVFSEVNGDRLIWLVKMVNGQEELHVISMETTSIGKNISTKAVGQDRRRDITYEYKYPEGSSEERQVMDHAFLLLSSEREHRRPVKENFLHMSVQSDDVLLGNSVNFTVILKRKTAALQNVNILGSFELQLYTGKKMAKLCDLNKTSQIQGQVSEVTLTLDSKTYINSLAILDDEPVIRGFIIAEIVESKEIMASEVFTSFQYPEFSIELPNTGRIGQLLVCNCIFKNTLAIPLTDVKFSLESLGISSLQTSDHGTVQPGETIQSQIKCTPIKTGPKKFIVKLSSKQVKEINAQKIVLITK

SEQ ID NO: 772584 - protein, 75 aa, Homo sapiens
  misc_feature (7)..(7): Xaa can be any naturally occurring amino acid
  misc_feature (9)..(9): Xaa can be any naturally occurring amino acid
CREFRNXGXDVKFSLESLGISSLQTSDHGTVQPGETIQSQIKCTPIKTGPKKFIVKLSSKQVKEINAQKIVLITK

SEQ ID NO: 772585 - protein, 411 aa, Homo sapiens
MGVPNEQSCVPARTGVSPAAGAEPAPTILPPTETGIQHSTVAVTSSPNAILGKYQLNVKTGNHILKSEENILYLLFNPWCKEDMVFMPDEDERKEYILNDTGCHYVGAARSIKCKPWNFGQFEKNVLDCCISLLTESSLKPTDRRDPVLVCRAMCAMMSFEKGQGVLIGNWTGDYEGGTAPYKWTGSAPILQQYYNTKQAVCFGQCWVFAGILTTVLRALGIPARSVTGFDSAHDTERNLTVDTYVNENGEKITSMTHDSVWNFHVWTDAWMKRPDLPKGYDGWQAVDATPQERSQGVFCCGPSPLTAIRKGDIFIVYDTRFVFSEVNGDRLIWLVKMVNGQEELHVISMETTSIGKNISTKAVGQDRRRDITYEYKYPEGASITGLLLTQPLSHPEHENSQDWGWTWATW

SEQ ID NO: 772586 - protein, 684 aa, Homo sapiens
MMDASKELQVLHIDFLNQDNAVSHHTWEFQTSSPVFRRGQVFHLRLVLNQPLQSYHQLKLEFSTGPNPSIAKHTLVVLDPRTPSDHYNWQATLQNESGKEVTVAVTSSPNAILGKYQLNVKTGNHILKSEENILYLLFNPWCKEDMVFMPDEDERKEYILNDTGCHYVGAARSIKCKPWNFGQFEKNVLDCCISLLTESSLKPTDRRDPVLVCRAMCAMMSFEKGQGVLIGNWTGDYEGGTAPYKWTGSAPILQQYYNTKQAVCFGQCWVFAGILTTVLRALGIPARSVTGFDSAHDTERNLTVDTYVNENGEKITSMTHDSVWNFHVWTDAWMKRPDLPKGYDGWQAVDATPQERSQGVFCCGPSPLTAIRKGDIFIVYDTRFVFSEVNGDRLIWLVKMVNGQEELHVISMETTSIGKNISTKAVGQDRRRDITYEYKYPEGSSEERQVMDHAFLLLSSEREHRRPVKENFLHMSVQSDDVLLGNSVNFTVILKRKTAALQNVNILGSFELQLYTGKKMAKLCDLNKTSQIQGQVSEVTLTLDSKTYINSLAILDDEPVIRGFIIAEIVESKEIMASEVFTSFQYPEFSIELPNTGRIGQLLVCNCIFKNTLAIPLTDVKFSLESLGISSLQTSDHGTVQPGETIQSQIKCTPIKTGPKKFIVKLSSKQVKEINAQKIVLITK

SEQ ID NO: 772587 - protein, 622 aa, Homo sapiens; identical to SEQ ID NO: 772583

SEQ ID NO: 772588 - protein, 285 aa, Homo sapiens
MVNGQEELHVISMETTSIGKNISTKAVGQDRRRDITYEYKYPEGSSEERQVMDHAFLLLSSEREHRRPVKENFLHMSVQSDDVLLGNSVNFTVILKRKTAALQNVNILGSFELQLYTGKKMAKLCDLNKTSQIQGQVSEVTLTLDSKTYINSLAILDDEPVIRGFIIAEIVESKEIMASEVFTSFQYPEFSIELPNTGRIGQLLVCNCIFKNTLAIPLTDVKFSLESLGISSLQTSDHGTVQPGETIQSQIKCTPIKTGPKKFIVKLSSKQVKEINAQKIVLITK

SEQ ID NO: 772589 - protein, 622 aa, Homo sapiens; identical to SEQ ID NO: 772583

SEQ ID NO: 772590 - protein, 622 aa, Homo sapiens; identical to SEQ ID NO: 772583

SEQ ID NO: 772591 - protein, 118 aa, Homo sapiens
MMDASKELQVLHIDFLNQDNAVSHHTWEFQTSSPVFRRGQVFHLRLVLNQPLQSYHQLKLEFSTGPNPSIAKHTLVVLDPRTPSDHYNWQATLQNESGKEVSTHWAGGWAGWLLAECS

SEQ ID NO: 772592 - protein, 353 aa, Homo sapiens
MDYKSSLIQDGNPMENLEKQLICPICLEMFTKPVVILPCQHNLCRKCANDIFQAANPYWTSRGSSVSMSGGRFRCPTCRHEVIMDRHGVYGLQRNLLVENIIDIYKQECSSRPLQKGSHPMCKEHEDEKINIYCLTCEVPTCSMCKVFGIHKACEVAPLQSVFQGQKTELNNCISMLVAGNDRVQTIITQLEDSRRVTKENSHQVKEELSQKFDTLYAILDEKKSELLQRITQEQEKKLSFIEALIQQYQEQLDKSTKLVETAIQSLDEPGGATFLLTAKQLIKSIVEASKGCQLGKTEQGFENMDFFTLDLEHIADALRAIDFGTDEEEEEFIEEEDQEEEESTEGKEEGHQ

SEQ ID NO: 772593 - protein, 346 aa, Homo sapiens
MDYKSSLIQDGNPMENLEKQLICPICLEMFTKPVVILPCQHNLCRKCANDIFQAANPYWTSRGSSVSMSGGRFRCPTCRHEVIMDRHGVYGLQRNLLVENIIDIYKQECSSRPLQKGSHPMCKEHEDEKINIYCLTCEVPTCSMCKVFGIHKACEVAPLQSVFQGQKTELNNCISMLVAGNDRVQTIITQLEDSRRVTKENSHQVKEELSQKFDTLYAILDEKKSELLQRITQEQEKKLSFIEALIQQYQEQLDKSTKLVETAIQSLDEPGGATFLLTAKQLIKSIVEASKGCQLGKTEQGFENMDFFTLDLEHIADALRAIDFGTAEDDEDDDVDTKKQKTDEDD

SEQ ID NO: 772594 - protein, 188 aa, Homo sapiens
MDYKSSLIQDGNPMENLEKQLICPICLEMFTKPVVILPCQHNLCRKCANDIFQAANPYWTSRGSSVSMSGGRFRCPTCRHEVIMDRHGVYGLQRNLLVENIIDIYKQECSSRPLQKGSHPMCKEHEDEKINIYCLTCEVPTCSMCKVFGIHKACEVAPLQSPGWEGSGPLEGQWGGDVFSLLREQGLG

SEQ ID NO: 772595 - protein, 37 aa, Homo sapiens
MTPPQTGPSRIGTRACTLQEPQTSAVLETERVPERGD

SEQ ID NO: 772596 - protein, 445 aa, Homo sapiens
MERAPPDGPLNASGALAGEAAAAGGARGFSAAWTAVLAALMALLIVATVLGNALVMLAFVADSSLRTQNNFFLLNLAISDFLVGAFCIPLYVPYVLTGRWTFGRGLCKLWLVVDYLLCTSSAFNIVLISYDRFLSVTRAVSYRAQQGDTRRAVRKMLLVWVLAFLLYGPAILSWEYLSGGSSIPEGHCYAEFFYNWYFLITASTLEFFTPFLSVTFFNLSIYLNIQRRTRLRLDGAREAAGPEPPPEAQPSPPPPPGCWGCWQKGHGEAMPLHRYGVGEAAVGAEAGEATLGGGGGGGSVASPTSSSGSSSRGTERPRSLKRGSKPSASSASLEKRMKMVSQSFTQRFRLSRDRKVAKSLAVIVSIFGLCWAPYTLLMIIRAACHGHCVPDYWYETSFWLLWANSAVNPVLYPLCHHSFRRAFTKLLCPQKLKIQPHSSLEHCWK

SEQ ID NO: 772597 - protein, 453 aa, Homo sapiens
MERAPPDGPLNASGALAGEAAAAGGARGFSAAWTAVLAALMALLIVATVLGNALVMLAFVADSSLRTQNNFFLLNLAISDFLVGAFCIPLYVPYVLTGRWTFGRGLCKLWLVVDYLLCTSSAFNIVLISYDRFLSVTRAVSYRAQQGDTRRAVRKMLLVWVLAFLLYGPAILSWEYLSGGSSIPEGHCYAEFFYNWYFLITASTLEFFTPFLSVTFFNLSIYLNIQRRTRLRLDGAREAAGPEPPPEAQPSPPPPPGCWGCWQKGHGEAMPLHRYGVGEAAVGAEAGEATLGGGGGGGSVASPTSSSGSSSRGTERPRSLKRGSKPSASSASLEKRMKMVSQSFTQRFRLSRDRKVAKSLAVIVSIFGLCWAPYTLLMIIRAACHGHCVPDYWYETSFWLLWANSAVNPVLYPLCHHSFRRAFTKLLCPQKLKIQPHSSLEHCWKKMKKKTCL

SEQ ID NO: 772598 - protein, 365 aa, Homo sapiens
MERAPPDGPLNASGALAGEAAAAGGARGFSAAWTAVLAALMALLIVATVLGNALVMLAFVADSSLRTQNNFFLLNLAISDFLVGAFCIPLYVPYVLTGRWTFGRGLCKLWLVVDYLLCTSSAFNIVLISYDRFLSVTRAVSYRAQQGDTRRAVRKMLLVWVLAFLLYGPAILSWEYLSGGSSIPEGHCYAEFFYNWYFLITASTLEFFTPFLSVTFFNLSIYLNIQRRTRLRLDGAREAAGPEPPPEAQPSPPPPPGCWGCWQKGHGEAMPLHRKVAKSLAVIVSIFGLCWAPYTLLMIIRAACHGHCVPDYWYETSFWLLWANSAVNPVLYPLCHHSFRRAFTKLLCPQKLKIQPHSSLEHCWK

SEQ ID NO: 772599 - protein, 62 aa, Homo sapiens
SDFQPLLHPPHSQLVPVFPFTEKKEASEELPEPPTTPSACQQLIPFLQMSYLCSRLQPAVPP

SEQ ID NO: 772600 - protein, 165 aa, Homo sapiens
MTTHTGEKPYKCQHCGKAFTYPQAFQRHEKTHTGEKPYECKQCGKTFSWSETLRVHMRIHTGDKLYKCEHCGKAFTSSRSFQGHLRTHTGEKPYECKQCGKAFTWSSTFREHVRIHTQEQLYKCEQCGKAFTSSRSFRGHLRTHTGEKPYECKQCGKTFTWSSTF

SEQ ID NO: 772601 - protein, 252 aa, Homo sapiens
AERPGLCLPKPAPPQASPAHLQSALLSPLYINECTQDPPSVFHAAARVPPKQTSSQDSVARPSQPPARLSLPTHQQQDSQAISIPPKSPVPPAPRLLFTCRAVPASAHPLILQIWSSIPGPAHHLFMTTACQEANYGALLRELCLTQFQVDMEAVGETLWCDWGRTIRSYRELADCTWHMAEKLGCFWPNAEVDRFFLAVHGRYFRSCPISGRAVRDPPGSILYPFIVVPITVTLLVTALVVWQSKRTEGIV

SEQ ID NO: 772602 - protein, 192 aa, Homo sapiens
AAAASHRSRARSRPRRVSSGPAPRRAQSSAGRVASGLDSAPLCTMARALCRLPRRGLWLLLAHHLFMTTACQEANYGALLRELCLTQFQVDMEAVGETLWCDWGRTIRSYRELADCTWHMAEKLGCFWPNAEVDRFFLAVHGRYFRSCPISGRAVRDPPGSILYPFIVVPITVTLLVTALVVWQSKRTEGIV

SEQ ID NO: 772603 - protein, 192 aa, Homo sapiens; identical to SEQ ID NO: 772602

SEQ ID NO: 772604 - protein, 126 aa, Homo sapiens
MTTACQEANYGALLRELCLTQFQVDMEAVGETLWCDWGRTIRSYRELADCTWHMAEKLGCFWPNAEVDRFFLAVHGRYFRSCPISGRAVRDPPGSILYPFIVVPITVTLLVTALVVWQSKRTEGIV

SEQ ID NO: 772605 - protein, 168 aa, Homo sapiens
AAAASHRSRARSRPRRVSSGPAPRRAQSSAGRVASGLDSAPLCTMARALCRLPRRGLWLLLAHHLFMTTACQEANYGALLRELCLTQFQVDMEAVGETLWCDWGRTIRSYRELADCTWHMAEKLGCFWPNAEVDRFFLAVHGPSGALGQSRPTMPPFFQPRRAHRSPE

SEQ ID NO: 772606 - protein, 140 aa, Homo sapiens
GERAFWKAWAHHLFMTTACQEANYGALLRELCLTQFQVDMEAVGETLWCDWGRTIRSYRELADCTWHMAEKLGCFWPNAEVDRFFLAVHGRYFRSCPISGRAVRDPPGSILYPFIVVPITVTLLVTALVVWQSKRTEGIV

SEQ ID NO: 772607 - protein, 218 aa, Homo sapiens
SSLAVTFSPQTEEPEEVLEYEEGSYNLDSRDVQTGMSADNLQPKDTHEKHLMSQRNSGETTETSDGMNFTKYVSVPEKDLEKTEECNFLEPENVGGGPPHRVPRSLDFGDVPIDSDVHVSSTRSEITKNLDVKGSENSLPGAGSSGNFDRDTISSEYTHSSASSPELNDSSVALSSWGQQPSSGYQEENQGNWSEQNHQESELITTDGQVEIVTKVKD

SEQ ID NO: 772608 - protein, 125 aa, Homo sapiens
ILPNTQPGYLTFLQQTLSGSLLPRKRPPAPLPLLWSCACPSPASSLPHHLPLLVSNAICLWLSKAQGRPLPVCMEKSCQAPCHLPSHGHLGELLLAATYVGCLDAHRAMTEPVRRKYLNPCIPHP

SEQ ID NO: 772609 - protein, 72 aa, Homo sapiens
GNSRTVAEARLLCFSRSRLCAWGLHRPTLAAAAAALLAQEAIRMKQENRSNPGDGGCSEPRSCHCIPAWATE

SEQ ID NO: 772610 - protein, 95 aa, Homo sapiens
PAAPSPSPGCVSLPMTRSWGPPARPGTFLPNPQTHDSLPHRLPQRPPTHFILSGHPSDLDPPVRAFKAPNSGTRSAPLPRPRAGNFSLPDPALLF

SEQ ID NO: 772611 - protein, 149 aa, Homo sapiens
MYVSTQMSNICITRRKGEREPSGTCCTRHIICYCPCFPDEARYSSMKLNDWFSVNTASERQRWNLNAHLSDSTSCSFHMASKLCCPTSHFWEVATPSFHPLFWILTRDSTLPQLSKPAAAAKKPQHRHTLDLHHVLMSQMLYQAFDSLI

SEQ ID NO: 772612 - protein, 104 aa, Homo sapiens
MKLNDWFSVNTASERQRWNLNAHLSDSTSCSFHMASKLCCPTSHFWEVATPSFHPLFWILTRDSTLPQLSKPAAAAKKPQHRHTLDLHHVLMSQMLYQAFDSLI

SEQ ID NO: 772613 - protein, 56 aa, Homo sapiens
MLHLPSNYEVGTTDIHKEPEPECGSDVPAPPSQETTESNPRLRPTPLLIATCHTTR

SEQ ID NO: 772614 - protein, 1301 aa, Homo sapiens
MKVVPEKNAVRILWGRERGARAMGAQRLLQELVEDKTRWMKWEGKRVELPDSPRSTFLLAFSPDRTLLASTHVNHNIYITEVKTGKCVHSLIGHRRTPWCVTFHPTISGLIASGCLDGEVRIWDLHGGSESWFTDSNNAIASLAFHPTAQLLLIATANEIHFWDWSRREPFAVVKTASEMERVRLVRFDPLGHYLLTAIVNPSNQQGDDEPEIPIDGTELSHYRQRALLQSQPVRRTPLLHNFLHMLSSRSSGIQTEPFHPPEQASSTQQDQGLLNRPSAFSTVQSSTAGNTLRNLSLGPTRRSLGGPLSSHPSRYHREIAPGLTGSEWTRTVLSLNSRSEAESMPPPRTSASSVSLLSVLRQQEGGSQASVYTSATEGRGFPASGLATESDGGNGSSQNNSGSIRHELQCDLRRFFLEYDRLQELDQSLSGEAPQTQQAQEMLNNNIESERPGPSHQPTPHSSENNSNLSRGHLNRCRACHNLLTFNNDTLRWERTTPNYSSGEASSSWQVPSSFESVPSSGSQLPPLERTEGQTPSSSRLELSSSASPQEERTVGVAFNQETGHWERIYTQSSRSGTVSQEALHQDMPEESSEEDSLRRRSLALSPRLEYSGAILAHCKLRLPGSCHSPASASQVAGTTGAHHHARLIFAFLVEMEFHHVSQAGLELLTSGDLPTSASQVLGLQAVSHRAWPRLLESSLISLSRYDGAGSREHPIYPDPARLSPAAYYAQRMIQYLSRRDSIRQRSMRYQQNRLRSSTSSSSSDNQGPSVEGTDLEFEDFEDNGDRSRHRAPRNARMSAPSLGRFVPRRFLLPEYLPYAGIFHERGQPGLATHSSVNRVLAGAVIGDGQSAVASNIANTTYRLQWWDFTKFDLPEISNASVNVLVQNCKIYNDASCDISADGQLLAAFIPSSQRGFPDEGILAVYSLAPHNLGEMLYTKRFGPNAISVSLSPMGRYVMVGLASRRILLHPSTEHMVAQVFRLQQAHGGETSMRRVFNVLYPMPADQRRHVSINSARWLPEPGLGLAYGTNKGDLVICRPEALNSGVEYYWDQLNETVFTVHSNSRSSERPGTSRATWRTDRDMGLMNAIGLQPRNPATSVTSQGTQTLALQLQNAETQTEREVPEPGTAASGPGEGEGSEYGASGEDALSRIQRLMAEGGMTAVVQREQSTTMASMGGFGNNIIVSHRIHRSSQTGTEPGAAHTSSPQPSTSRGLLPEAGQLAERGLSPRTASWDQPGTPGREPTQPTLPSSSPVPIPVSLPSAEGPTLHCELTNNNHLLDGGSSRGDAAGPRGEPRNR

SEQ ID NO: 772615 - protein, 150 aa, Homo sapiens
SDFLCVLWVQTEILPYGTELSHYRQRALLQSQPVRRTPLLHNFLHMLSSRSSGIQAVSREVPATEKEVHWQSGLMPDVANKLREGVAWLAFSTTEPFLFAYFLIPLSPCIFLSFPSLNVESRTRSVKGQPFTFLLLNEPFFCLVTKCPEL

SEQ ID NO: 772616 - protein, 1053 aa, Homo sapiens
MLSSRSSGIQVGEQSTVQDSATPSPPPPPPQPSTERPRTSAYIRLRQRVSYPTAECCQHLGILCLCSRCSGTRVPSLLPHQDSVPPASARATTPSFSFVQTEPFHPPEQASSTQQDQGLLNRPSAFSTVQSSTAGNTLRNLSLGPTRRSLGGPLSSHPSRYHREIAPGLTGSEWTRTVLSLNSRSEAESMPPPRTSASSVSLLSVLRQQEGGSQASVYTSATEGRGFPASGLATESDGGNGSSQNNSGSIRHELQCDLRRFFLEYDRLQELDQSLSGEAPQTQQAQEMLNNNIESERPGPSHQPTPHSSENNSNLSRGHLNRCRACHNLLTFNNDTLRWERTTPNYSSGEASSSWQVPSSFESVPSSGSQLPPLERTEGQTPSSSRLELSSSASPQEERTVGVAFNQETGHWERIYTQSSRSGTVSQEALHQDMPEESSEEDSLRRRLLESSLISLSRYDGAGSREHPIYPDPARLSPAAYYAQRMIQYLSRRDSIRQRSMRYQQNRLRSSTSSSSSDNQGPSVEGTDLEFEDFEDNGDRSRHRAPRNARMSAPSLGRFVPRRFLLPEYLPYAGIFHERGQPGLATHSSVNRVLAGAVIGDGQSAVASNIANTTYRLQWWDFTKFDLPEISNASVNVLVQNCKIYNDASCDISADGQLLAAFIPSSQRGFPDEGILAVYSLAPHNLGEMLYTKRFGPNAISVSLSPMGRYVMVGLASRRILLHPSTEHMVAQVFRLQQAHGGETSMRRVFNVLYPMPADQRRHVSINSARWLPEPGLGLAYGTNKGDLVICRPEALNSGVEYYWDQLNETVFTVHSNSRSSERPGTSRATWRTDRDMGLMNAIGLQPRNPATSVTSQGTQTLALQLQNAETQTEREVPEPGTAASGPGEGEGSEYGASGEDALSRIQRLMAEGGMTAVVQREQSTTMASMGGFGNNIIVSHRIHRSSQTGTEPGAAHTSSPQPSTSRGLLPEAGQLAERGLSPRTASWDQPGTPGREPTQPTLPSSSPVPIPVSLPSAEGPTLHCELTNNNHLLDGGSSRGDAAGPRGEPRNR

SEQ ID NO: 772617 - protein, 1024 aa, Homo sapiens
MLSSRSSGIQVGEQSTVQDSATPSPPPPPPQPSTERPRTSAYIRLRQRVSYPTAECCQHLGILCLCSRCSGTRVPSLLPHQDSVPPASARATTPSFSFVQTEPFHPPEQASSTQQDQGLLNRPSAFSTVQSSTAGNTLRNLSLGPTRRSLGGPLSSHPSRYHREIAPGLTGSEWTRTVLSLNSRSEAESMPPPRTSASSVSLLSVLRQQEGGSQASVYTSATEGRGFPASGLATESDGGNGSSQNNSGSIRHELQCDLRRFFLEYDRLQELDQSLSGEAPQTQQAQEMLNNNIESERPGPSHQPTPHSSENNSNLSRGHLNRCRACHNLLTFNNDTLRWERTTPNYSSGEASSSWQVPSSFESVPSSGSQLPPLERTEGQTPSSSRLELSSSASPQEERTVGVAFNQETGHWERIYTQSSRSGTVSQEALHQDMPEESSEEDSLRRLSPAAYYAQRMIQYLSRRDSIRQRSMRYQQNRLRSSTSSSSSDNQGPSVEGTDLEFEDFEDNGDRSRHRAPRNARMSAPSLGRFVPRRFLLPEYLPYAGIFHERGQPGLATHSSVNRVLAGAVIGDGQSAVASNIANTTYRLQWWDFTKFDLPEISNASVNVLVQNCKIYNDASCDISADGQLLAAFIPSSQRGFPDEGILAVYSLAPHNLGEMLYTKRFGPNAISVSLSPMGRYVMVGLASRRILLHPSTEHMVAQVFRLQQAHGGETSMRRVFNVLYPMPADQRRHVSINSARWLPEPGLGLAYGTNKGDLVICRPEALNSGVEYYWDQLNETVFTVHSNSRSSERPGTSRATWRTDRDMGLMNAIGLQPRNPATSVTSQGTQTLALQLQNAETQTEREVPEPGTAASGPGEGEGSEYGASGEDALSRIQRLMAEGGMTAVVQREQSTTMASMGGFGNNIIVSHRIHRSSQTGTEPGAAHTSSPQPSTSRGLLPEAGQLAERGLSPRTASWDQPGTPGREPTQPTLPSSSPVPIPVSLPSAEGPTLHCELTNNNHLLDGGSSRGDAAGPRGEPRNR

SEQ ID NO: 772618 - protein, 855 aa, Homo sapiens
MLSSRSSGIQVGEQSTVQDSATPSPPPPPPQPSTERPRTSAYIRLRQRVSYPTAECCQHLGILCLCSRCSGTRVPSLLPHQDSVPPASARATTPSFSFVQTEPFHPPEQASSTQQDQGLLNRPSAFSTVQSSTAGNTLRNLSLGPTRRSLGGPLSSHPSRYHREIAPGLTGSEWTRTVLSLNSRSEAESMPPPRTSASSVSLLSVLRQQEGGSQASVYTSATEGRGFPASGLATESDGGNGSSQNNSGSIRHELQCDLRRFFLEYDRLQELDQSLSGEAPQTQQAQEMLNNNIESERPGPSHQPTPHSSENNSNLSRGHLNRCRACHNLLTFNNDTLRWERTTPNYSSGEASSSWQVPSSFESVPSSGSQLPPLERTEGQTPSSSRLELSSSASPQEERTVGVAFNQETGHWERIYTQSSRSGTVSQEALHQDMPEESSEEDSLRRLSPAAYYAQRMIQYLSRRDSIRQRSMRYQQNRLRSSTSSSSSDNQGPSVEGTDLEFEDFEDNGDRSRHRAPRNARMSAPSLGRFVPRRFLLPEYLPYAGIFHERGQPGLATHSSVNRVLAGAVIGDGQSAVASNIANTTYRLQWWDFTKFDLPEISNASVNVLVQNCKIYNDASCDISADGQLLAAFIPSSQRGFPDEGILAVYSLAPHNLGEMLYTKRFGPNAISVSLSPMGRYVMVGLASRRILLHPSTEHMVAQVFRLQQAHGGETSMRRVFNVLYPMPADQRRHVSINSARWLPEPGLGLAYGTNKGDLVICRPEALNSGVEYYWDQLNETVFTVHSNSRSSERPGTSRATWRTDRDMGLMNAIGLQPRNPATSVTSQGTQTLALQLQNAETHQRELQVRARFYR

SEQ ID NO: 772619 - protein, 76 aa, Homo sapiens
LPPLERTEGQTPSSSRLELSSSASPQEERTVGVAFNQETGHWERIYTQSSRSGTVSQEALHQDMPEESSEEDSLRR

SEQ ID NO: 772620 - protein, 1238 aa, Homo sapiens
MKVVPEKNAVRILWGRERGARAMGAQRLLQELVEDKTRWMKWEGKRVELPDSPRSTFLLAFSPDRTLLASTHVNHNIYITEVKTGKCVHSLIGHRRTPWCVTFHPTISGLIASGCLDGEVRIWDLHGGSESWFTDSNNAIASLAFHPTAQLLLIATANEIHFWDWSRREPFAVVKTASEMERVRLVRFDPLGHYLLTAIVNPSNQQGDDEPEIPIDGTELSHYRQRALLQSQPVRRTPLLHNFLHMLSSRSSGIQVGEQSTVQDSATPSPPPPPPQPSTERPRTSAYIRLRQRVSYPTAECCQHLGILCLCSRCSGTRVPSLLPHQDSVPPASARATTPSFSFVQTEPFHPPEQASSTQQDQGLLNRPSAFSTVQSSTAGNTLRNLSLGPTRRSLGGPLSSHPSRYHREIAPGLTGSEWTRTVLSLNSRSEAESMPPPRTSASSVSLLSVLRQQEGGSQASVYTSATEGRGFPASGLATESDGGNGSSQNNSGSIRHELQCDLRRFFLEYDRLQELDQSLSGEAPQTQQAQEMLNNNIESERPGPSHQPTPHSSENNSNLSRGHLNRCRACHNLLTFNNDTLRWERTTPNYSSGEASSSWQVPSSFESVPSSGSQLPPLERTEGQTPSSSRLELSSSASPQEERTVGVAFNQETGHWERIYTQSSRSGTVSQEALHQDMPEESSEEDSLRRRLLESSLISLSRYDGAGSREHPIYPDPARDNGDRSRHRAPRNARMSAPSLGRFVPRRFLLPEYLPYAGIFHERGQPGLATHSSVNRVLAGAVIGDGQSAVASNIANTTYRLQWWDFTKFDLPEISNASVNVLVQNCKIYNDASCDISADGQLLAAFIPSSQRGFPDEGILAVYSLAPHNLGEMLYTKRFGPNAISVSLSPMGRYVMVGLASRRILLHPSTEHMVAQVFRLQQAHGGETSMRRVFNVLYPMPADQRRHVSINSARWLPEPGLGLAYGTNKGDLVICRPEALNSGVEYYWDQLNETVFTVHSNSRSSERPGTSRATWRTDRDMGLMNAIGLQPRNPATSVTSQGTQTLALQLQNAETQTEREVPEPGTAASGPGEGEGSEYGASGEDALSRIQRLMAEGGMTAVVQREQSTTMASMGGFGNNIIVSHRIHRSSQTGTEPGAAHTSSPQPSTSRGLLPEAGQLAERGLSPRTASWDQPGTPGREPTQPTLPSSSPVPIPVSLPSAEGPTLHCELTNNNHLLDGGSSRGDAAGPRGEPRNR

SEQ ID NO: 772621 - protein, 1024 aa, Homo sapiens; identical to SEQ ID NO: 772617

SEQ ID NO: 772622 - protein, 1024 aa, Homo sapiens; identical to SEQ ID NO: 772617

SEQ ID NO: 772623 - protein, 577 aa, Homo sapiens
MLSSRSSGIQVGEQSTVQDSATPSPPPPPPQPSTERPRTSAYIRLRQRVSYPTAECCQHLGILCLCSRCSGTRVPSLLPHQDSVPPASARATTPSFSFVQTEPFHPPEQASSTQQDQGLLNRPSAFSTVQSSTAGNTLRNLSLGPTRRSLGGPLSSHPSRYHREIAPGLTGSEWTRTVLSLNSRSEAESMPPPRTSASSVSLLSVLRQQEGGSQASVYTSATEGRGFPASGLATESDGGNGSSQNNSGSIRHELQCDLRRFFLEYDRLQELDQSLSGEAPQTQQAQEMLNNNIESERPGPSHQPTPHSSENNSNLSRGHLNRCRACHNLLTFNNDTLRWERTTPNYSSGEASSSWQVPSSFESVPSSGSQLPPLERTEGQTPSSSRLELSSSASPQEERTVGVAFNQETGHWERIYTQSSRSGTVSQEALHQDMPEESSEEDSLRRLSPAAYYAQRMIQYLSRRDSIRQRSMRYQQNRLRSSTSSSSSDNQGPSVEGTDLEFEDFEDNGDRSRHRAPRNARMSAPSLGRFVPRRFLLPEYLPYAGIFHERGQPGLATHSSVNRVLAGKEMFLWLLKM

SEQ ID NO: 772624 - protein, 223 aa, Homo sapiens
SARRKQSGAPVPWFLRAMARGGWRRLRRLLSAGQLLFQGRALLVTNTLGCGALMAAGDGVRQSWEIRARPGQVFDPRRSASMFAVGCSMGPFLHYWYLSLDRLFPASGLRGFPNVLKKVLVDQLVASPLLGVWYFLGLGCLEGQTVGESCQELREKFWEFYKADWCVWPAAQFVNFLFVPPQFRVTYINGLTLGWDTYLSYLKYRSPVPLTPPGCVALDTRAD

SEQ ID NO: 772625 - protein, 223 aa, Homo sapiens; identical to SEQ ID NO: 772624

SEQ ID NO: 772626 - protein, 223 aa, Homo sapiens; identical to SEQ ID NO: 772624

SEQ ID NO: 772627 - protein, 329 aa, Homo sapiens
SARRKQSGAPVPWFLRAMARGGWRRLRRLLSAGQLLFQGRALLVTNTLGCGALMAAGDGVRQSWEIRARPGQVFDPRRSASMFAVGCSMGPFLHYWYLSLDRLFPASGLRGFPNVLKKVLVDQLVASPLLGVWYFLGRLVRVACCAVRELPLRAPPISSHLHQRPDAGLGHVPVLLEVPEPSSSDTPRLCGPGHPSRLNCLLPGPDARLSPGGPPPLTEGEWAPAASSGLEPRPSTTSAPEHWAEPPFPSSLLGLSFLNRNTPMKMDDHPLALLSRNLMRPVTKMSHPQHRAHSANQSQAPAPQHCHPPGSGPSHQSRAPSGPGTKAGT

SEQ ID NO: 772628 - protein, 128 aa, Homo sapiens
SARRKQSGAPVPWFLRAMARGGWRRLRRLLSAGQLLFQGRALLVTNTLGCGALMAAGDGVRQSWEIRARPGQVFDPRRSAVTKMSHPQHRAHSANQSQAPAPQHCHPPGSGPSHQSRAPSGPGTKAGT

SEQ ID NO: 772629 - protein, 193 aa, Homo sapiens
MHGWALPVFPVRLRLRDGIGLTQALAREGEREWTEELAGRPSPLTYTLIASMFAVGCSMGPFLHYWYLSLDRLFPASGLRGFPNVLKKVLVDQLVASPLLGVWYFLGLGCLEGQTVGESCQELREKFWEFYKADWCVWPAAQFVNFLFVPPQFRVTYINGLTLGWDTYLSYLKYRSPVPLTPPGCVALDTRAD

SEQ ID NO: 772630 - protein, 49 aa, Homo sapiens
MWLFVKLCCCLWPTAQDSQAGMAVFLLPSWCVVEFVDSVLCRTLFWKNP

SEQ ID NO: 772631 - protein, 126 aa, Homo sapiens
MANEALGISTASCWRSQRTGDSAGMGESEGLTECPILTSSCTFQRDGLQGVIEWMNMTRGTQSSPQQLLEDSISGPLNPPHQHMHTCTDLQGPDPGGPGDTASRGCLAMSLPRSAWIHARPPSTIC

SEQ ID NO: 772632 - protein, 104 aa, Homo sapiens
MSSAARSRLTRATRQEMLFLALLLLPVVVAFARAEAEEDGDLQCLCVKTTSQVRPRHITSLEVIKAGPHCPTAQLIATLKNGRKICLDLQALLYKKIIKEHLES

SEQ ID NO: 772633 - protein, 649 aa, Homo sapiens [sequence omitted]

SEQ ID NO: 772634 - protein, 175 aa, Homo sapiens
MENDPSRRRESISLTPVAKGLENMGADFLESLEEGQLPRSDLSPAEIRSSWSEAAPKPFSRWRNLQPALRARSFCREHMQLFRWIGTGLLCTGLSAFLLVACLLDFQRALALFVLTCVVLTFLGHRLLKRLLGPKLRRFLKPQGHPRLLLWFKRDPRPWSKEGPNQYLPQITWTV

SEQ ID NO: 772635 - protein, 199 aa, Homo sapiens
ISGTDYTCALAALGRTPWSPAFLLTVHLEPALSLLQIDATSLIAASVMAAPCALALSKLVYPEVEESKFRREEGVKLTYGEHSRRSCRQGSGTRWGEQSRGSRSLCPSLSSTSLGPSLHFSCSGLGFICCLSPFSVAYNRNPETGYFIKNKNLFLTVMEAEKSKVEGLYLARAFLLLGILQSPKLAQGITWRGVEGCQA

SEQ ID NO: 772636 - protein, 649 aa, Homo sapiens [sequence omitted]

SEQ ID NO: 772637 - protein, 543 aa, Homo sapiens
MENDPSRRRESISLTPVAKGLENMGADFLESLEEGQLPRSDLSPAEIRSSWSEAAPKPFSRWRNLQPALRARSFCREHMQLFRWIGTGLLCTGLSAFLLVACLLDFQRALALFVLTCVVLTFLGHRLLKRLLGPKLRRFLKPQGHPRLLLWFKRGLALAAFLGLVLWLSLDTSQRPEQLVSFAGICVFVALLFACSKHHCAVSWRAVSWGLGLQFVLGLLVIRTEPGFIAFEWLGEQIRIFLSYTKAGSSFVFGEALVKDVFAFQVLPIIVFFSCVISVLYHVGLMQWVILKIAWLMQVTMGTTATETLSVAGNIFVSQTEAPLLIRPYLADMTLSEVHVVMTGGYATIAGSLLGAYISFGIDATSLIAASVMAAPCALALSKLVYPEVEESKFRREEGVKLTYGDAQNLIEAASTGAAISVKVVANIAANLIAFLAVLDFINAALSWLGDMVDIQGLSFQLICSYILRPVAFLMGVAWEDCPVVAELLGIKLFLNEFVAYQDLSKYKQRRLAGAEEWVGNRKQWISRRGLAMLTRLVLNSWP

SEQ ID NO: 772638 - protein, 107 aa, Homo sapiens
MAHWPGANTGQASSLLWKDRPSTCQAFVPNLLHERPSPEDGAAQGPSSRTAGMTASRFPGCCVLGVTWSSRVLPYSTRGLCLHQGGKTVLGATPWAMKRSGQKDSAG

SEQ ID NO: 772639 - protein, 77 aa, Homo sapiens
ALNGVVLAGQNLWGTVCWCAIGGLHQAVVVVAVLAGTDQIEVSDDDLGVSAWMVVEQIVRLEVLVCDAQCMQILDAI

SEQ ID NO: 772640 - protein, 181 aa, Homo sapiens
RCGHCPTPVRLRPLWAAPPQIRIGDNRAFGGGGRSCPRLWVGRRSRNPEPPRGGDSAPAPEPGPGEAGMAPRPPTAAPQESVTFKDVSVDFTQEEWYHVDPAQRSLYRDVMLENYSHLVSLGYQVSKPEVIFKLEQGEEPWISEGEIQRPFYPGFVCLLPLSLPSGSKGERRQKLPRKNPE

SEQ ID NO: 772641 - protein, 115 aa, Homo sapiens
RCGHCPTPVRLRPLWAAPPQIRIGDNRAFGGGGRSCPRLWVGRRSRNPEPPRGGDSDSCPGAGPWRGRNGPEASDRRAPGISDIQRCVCGLHPGRMVPCRPCSEELIQGCDAGEL

SEQ ID NO: 772642 - protein, 237 aa, Homo sapiens
RCGHCPTPVRLRPLWAAPPQIRIGDNRAFGGGGRSCPRLWVGRRSRNPEPPRGGDSAPAPEPGPGEAGMAPRPPTAAPQESVTFKDVSVDFTQEEWYHVDPAQRSLYRDVMLENYSHLVSLGYQVSKPEVIFKLEQGEEPWISEGEIQRPFYPDWKTRPEVKSSHLQQDVSEVSHCTHDLLHATLEDSWDVSSQLDRQQENWKRHLGSEASTQKKIITPQENFEQNKFGENSRLNTN

SEQ ID NO: 772643 - protein, 115 aa, Homo sapiens; identical to SEQ ID NO: 772641

SEQ ID NO: 772644 - protein, 788 aa, Homo sapiens
MALLFDFAAHCLSEFLDAQPVNKQGLQLGFSFSFPCHQTGLDRSTLISWTKGFRCSGVEGQDVVQLLRDAIRRQGAYNIDVVAVVNDTVGTMMGCEPGVRPCEVGLVVDTGTNACYMEEARHVAVLDEDRGRVCVSVEWGSFSDDGALGPVLTTFDHTLDHESLNPGAQRFEKMIGGLYLGELVRLVLAHLARCGVLFGGCTSPALLSQGSILLEHVAEMEDPSTGAARVHAILQDLGLSPGASDVELVQHVCAAVCTRAAQLCAAALAAVLSCLQHSREQQTLQVAVATGGRVCERHPRFCSVLQGTVMLLAPECDVSLIPSVDGGGRGVAMVTAVAARLAAHRRLLEETLAPFRLNHDQLAAVQAQMRKAMAKGLRGEASSLRMLPTFVRATPDGSERGDFLALDLGGTNFRVLLVRVTTGVQITSEIYSIPETVAQGSGQQLFDHIVDCIVDFQQKQGLSGQSLPLGFTFSFPCRQLGLDQGILLNWTKGFKASDCEGQDVVSLLREAITRRQAVELNVVAIVNDTVGTMMSCGYEDPRCEIGLIVGTGTNACYMEELRNVAGVPGDSGRMCINMEWGAFGDDGSLAMLSTRFDASVDQASINPGKQRFEKMISGMYLGEIVRHILLHLTSLGVLFRGQQIQRLQTRDIFKTKFLSEIESDSLALRQVRAILEDLGLPLTSDDALMVLEVCQAVSQRAAQLCGAGVAAVVEKIRGNRGLEELAVSVGVDGTLYKLHPRFSSLVAATVRELAPRCVVTFLQSEDGSGKGAALVTAVACRLAQLTRV

SEQ ID NO: 772645 - protein, 923 aa, Homo sapiens
MDSIGSSGLRQGEETLSCSEEGLPGPSDSSELVQECLQQFKVTRAQLQQIQASLLGSMEQALRGQASPAPAVRMLPTYVGSTPHGTEQGDFVVLELGATGASLRVLWVTLTGIEGHRVEPRSQEFVIPQEVMLGAGQQLFDFAAHCLSEFLDAQPVNKQGLQLGFSFSFPCHQTGLDRSTLISWTKGFRCSGVEGQDVVQLLRDAIRRQGAYNIDVVAVVNDTVGTMMGCEPGVRPCEVGLVVDTGTNACYMEEARHVAVLDEDRGRVCVSVEWGSFSDDGALGPVLTTFDHTLDHESLNPGAQRFEKMIGGLYLGELVRLVLAHLARCGVLFGGCTSPALLSQGSILLEHVAEMEDPSTGAARVHAILQDLGLSPGASDVELVQHVCAAVCTRAAQLCAAALAAVLSCLQHSREQQTLQVAVATGGRVCERHPRFCSVLQGTVMLLAPECDVSLIPSVDGGGRGVAMVTAVAARLAAHRRLLEETLAPFRLNHDQLAAVQAQMRKAMAKGLRGEASSLRMLPTFVRATPDGSERGDFLALDLGGTNFRVLLVRVTTGVQITSEIYSIPETVAQGSGQQLFDHIVDCIVDFQQKQGLSGQSLPLGFTFSFPCRQLGLDQGILLNWTKGFKASDCEGQDVVSLLREAITRRQAVELNVVAIVNDTVGTMMSCGYEDPRCEIGLIVGTGTNACYMEELRNVAGVPGDSGRMCINMEWGAFGDDGSLAMLSTRFDASVDQASINPGKQRFEKMISGMYLGEIVRHILLHLTSLGVLFRGQQIQRLQTRDIFKTKFLSEIESDSLALRQVRAILEDLGLPLTSDDALMVLEVCQAVSQRAAQLCGAGVAAVVEKIRGNRGLEELAVSVGVDGTLYKLHPRFSSLVAATVRELAPRCVVTFLQSEDGSGKGAALVTAVACRLAQLTRV

SEQ ID NO: 772646 - protein, 511 aa, Homo sapiens
MDSIGSSGLRQGEETLSCSEEGLPGPSDSSELVQECLQQFKVTRAQLQQIQASLLGSMEQALRGQASPAPAVRMLPTYVGSTPHGTDFAGLRNLGSGQRALVLPAAWLSVTCCPPEQGDFVVLELGATGASLRVLWVTLTGIEGHRVEPRSQEFVIPQEVMLGAGQQLFDHIVDCIVDFQQKQGLSGQSLPLGFTFSFPCRQLGLDQGILLNWTKGFKASDCEGQDVVSLLREAITRRQAVELNVVAIVNDTVGTMMSCGYEDPRCEIGLIVGTGTNACYMEELRNVAGVPGDSGRMCINMEWGAFGDDGSLAMLSTRFDASVDQASINPGKQRFEKMISGMYLGEIVRHILLHLTSLGVLFRGQQIQRLQTRDIFKTKFLSEIESDSLALRQVRAILEDLGLPLTSDDALMVLEVCQAVSQRAAQLCGAGVAAVVEKIRGNRGLEELAVSVGVDGTLYKLHPRFSSLVAATVRELAPRCVVTFLQSEDGSGKGAALVTAVACRLAQLTRV

SEQ ID NO: 772647 - protein, 39 aa, Homo sapiens
MALPGIASVVCQAGCCLVSVTETLSNTGLDKVEFSFFPL

SEQ ID NO: 772648 - protein, 180 aa, Homo sapiens
RLVPCVSILELLHLTHAATPGEGAISLMSLAGAQGAERWGNVLKVTQQPGSRPRVALVCPTAASVFVLPHHLPHCELLQGKGRVLFVFAFPRATGIDLRSVLRTHTILGAHSSHHALEAPLSQDSSPQMPTTCRKDASPTASLQGKVSLSLQDSHLRFLCVNHSDSNAPSPLPVVLHWLG

SEQ ID NO: 772649 - protein, 572 aa, Homo sapiens
MSYQGKKNIPRITSDRLLIKGGKIVNDDQSFYADIYMEDGLIKQIGENLIVPGGVKTIEAHSRMVIPGGIDVHTRFQMPDQGMTSADDFFQGTKAALAGGTTMIIDHVVPEPGTSLLAAFDQWREWADSKSCCDYSLHVDISEWHKGIQEEMEALVKDHGVNSFLVYMAFKDRFQLTDCQIYEVLSVIRDIGAIAQVHAENGDIIAEEQQRILDLGITGPEGHVLSRPEEVEAEAVNRAITIANQTNCPLYITKVMSKSSAEVIAQARKKGTVVYGEPITASLGTDGSHYWSKNWAKAAAFVTSPPLSPDPTTPDFLNSLLSCGDLQVTGSAHCTFNTAQKAVGKDNFTLIPEGTNGTEERMSVIWDKAVVTGKMDENQFVAVTSTNAAKVFNLYPRKGRIAVGSDADLVIWDPDSVKTISAKTHNSSLEYNIFEGMECRGSPLVVISQGKIVLEDGTLHVTEGSGRYIPRKPFPDFVYKRIKARSRLAELRGVPRGLYDGPVCEVSVTPKTVTPASSAKTSPAKQQAPPVRNLHQSGFSLSGAQIDDNIPRRTTQRIVAPPGGRANITSLG

SEQ ID NO: 772650 - protein, 572 aa, Homo sapiens; identical to SEQ ID NO: 772649

SEQ ID NO: 772651 - protein, 572 aa, Homo sapiens; identical to SEQ ID NO: 772649

SEQ ID NO: 772652 - protein, 572 aa, Homo sapiens; identical to SEQ ID NO: 772649

SEQ ID NO: 772653 - protein, 572 aa, Homo sapiens; identical to SEQ ID NO: 772649

SEQ ID NO: 772654 - protein, 136 aa, Homo sapiens
MECRGSPLVVISQGKIVLEDGTLHVTEGSGRYIPRKPFPDFVYKRIKARSRLAELRGVPRGLYDGPVCEVSVTPKTVTPASSAKTSPAKQQAPPVRNLHQSGFSLSGAQIDDNIPRRTTQRIVAPPGGRANITSLG

SEQ ID NO: 772655 - protein, 572 aa, Homo sapiens; identical to SEQ ID NO: 772649

SEQ ID NO: 772656 - protein, 572 aa, Homo sapiens; identical to SEQ ID NO: 772649

SEQ ID NO: 772657 - protein, 133 aa, Homo sapiens
LCNLITAHCWLLVFFFFTIRPVKLFSVHMPAEWKESFRISVSSPVILPCAVIIVDFWLRLVSGRISSFVSHCQPPSEAPHSRSHVTRGWVQLLIFRITAWVPWGIFTFRVIDSGYGSFLFSGKNRIFFLSNYF

SEQ ID NO: 772658 - protein, 619 aa, Homo sapiens
MSYQGKKNIPRITSDRLLIKGGKIVNDDQSFYADIYMEDGLIKQIGENLIVPGGVKTIEAHSRMVIPGGIDVHTRFQMPDQGMTSADDFFQGTKAALAGGTTMIIDHVVPEPGTSLLAAFDQWREWADSKSCCDYSLHVDISEWHKGIQEEMEALVKDHGVNSFLVYMAFKDRFQLTDCQIYEVLSVIRDIGAIAQVHAENGDIIAEEQQRILDLGITGPEGHVLSRPEEVEAEAVNRAITIANQTNCPLYITKVMSKSSAEVIAQARKKGTVVYGEPITASLGTDGSHYWSKNWAKAAAFVTSPPLSPDPTTPDFLNSLLSCGDLQVTGSAHCTFNTAQKAVGKDNFTLIPEGTNGTEERMSVIWDKAVVTGKMDENQFVAVTSTNAAKVFNLYPGAMWSAGRGGAAWPVLLGLLLALLVPGGGAAKTGAELVTCGSVLKLLNTHHRVRLHSHDIKYGSGSGQQSVTGVEASDDANSYWRIRGGSEGGCPRGSPVRCGQAVRLTHVLTGKNLHTHHFPSPLSNNQEVSAFGEDGEGDDLDLWTVRCSGQHWEREAAVRFQHVGTSVFLSVTGEQYGSPIRGQHEVHGMPSANTHNTWKAMEGIFIKPSVEPSAGHDEL

SEQ ID NO: 772659 - protein, 440 aa, Homo sapiens
MSYQGKKNIPRITSDRLLIKGGKIVNDDQSFYADIYMEDGLIKQIGENLIVPGGVKTIEAHSRMVIPGGIDVHTRFQMPDQGMTSADDFFQGTKAALAGGTTMIIDHVVPEPGTSLLAAFDQWREWADSKSCCDYSLHVDISEWHKGIQEEMEALVKDHGVNSFLVYMAFKDRFQLTDCQIYEVLSVIRDIGAIAQVHAENGDIIAEEQQRILDLGITGPEGHVLSRPEEVEAEAVNRAITIANQTNCPLYITKVMSKSSAEVIAQARKKGTVVYGEPITASLGTDGSHYWSKNWAKAAAFVTSPPLSPDPTTPDFLNSLLSCGDLQVTGSAHCTFNTAQKAVGKDNFTLIPEGTNGTEERMSVIWDKAVVTGKMDENQFVAVTSTNAAKVFNLYPRKGRIAVGSDADLVIWDPDSVKTISAKTHNSSRVHILRLQGGFP

SEQ ID NO: 772660 - protein, 572 aa, Homo sapiens; identical to SEQ ID NO: 772649

SEQ ID NO: 772661 - protein, 572 aa, Homo sapiens; identical to SEQ ID NO: 772649

SEQ ID NO: 772662 - protein, 320 aa, Homo sapiens
MPADPGQGFSAQNCLSTSGTVVYGEPITASLGTDGSHYWSKNWAKAAAFVTSPPLSPDPTTPDFLNSLLSCGDLQVTGSAHCTFNTAQKAVGKDNFTLIPEGTNGTEERMSVIWDKAVVTGKMDENQFVAVTSTNAAKVFNLYPRKGRIAVGSDADLVIWDPDSVKTISAKTHNSSLEYNIFEGMECRGSPLVVISQGKIVLEDGTLHVTEGSGRYIPRKPFPDFVYKRIKARSRLAELRGVPRGLYDGPVCEVSVTPKTVTPASSAKTSPAKQQAPPVRNLHQSGFSLSGAQIDDNIPRRTTQRIVAPPGGRANITSLG

SEQ ID NO: 772663 - protein, 158 aa, Homo sapiens
MPKRIRICSTQNSSLEYNIFEGMECRGSPLVVISQGKIVLEDGTLHVTEGSGRYIPRKPFPDFVYKRIKARSRLAELRGVPRGLYDGPVCEVSVTPKTVTPASSAKTSPAKQQAPPVRNLHQSGFSLSGAQIDDNIPRRTTQRIVAPPGGRANITSLG

SEQ ID NO: 772664 - protein, 113 aa, Homo sapiens
CDLADLSDQPDSLPFPDFVYKRIKARSRLAELRGVPRGLYDGPVCEVSVTPKTVTPASSAKTSPAKQQAPPVRNLHQSGFSLSGAQIDDNIPRRTTQRIVAPPGGRANITSLG

SEQ ID NO: 772665 - protein, 67 aa, Homo sapiens
  misc_feature (11)..(11): Xaa can be any naturally occurring amino acid
  misc_feature (19)..(19): Xaa can be any naturally occurring amino acid
  misc_feature (23)..(23): Xaa can be any naturally occurring amino acid
  misc_feature (34)..(34): Xaa can be any naturally occurring amino acid
FFSAHYTNSMXLACKNTAXWILXSGRLLLLCCEXTTEWGIWLGFWVFCCCCLFVILKVNCTFKKIIG

SEQ ID NO: 772666 - protein, 196 aa, Homo sapiens
MSYQGKKNIPRITSDRLLIKGGKIVNDDQSFYADIYMEDGLIKQIGENLIVPGGVKTIEAHSRMVIPGGIDVHTRFQMPDQGMTSADDFFQGTKAALAGGTTMIIDHVVPEPGTSLLAAFDQWREWADSKSCCDYSLHVDISEWHKGIQEEMEALVKDHGVNSFLVYMAFKDRFQLTDCQIYEALTRLTDNDLTDN

SEQ ID NO: 772667 - protein, 106 aa, Homo sapiens
KRQEFWGAGGSNNSITSGMLRGVHGEDPGLLLPKASSPVVSTGKMAANTLQAVVFLPLKGSAVLKGTVSALPGCCSGTPCCQPTTPPTILSFHPYPPVWTFHNSQP

SEQ ID NO: 772668 - protein, 106 aa, Homo sapiens; identical to SEQ ID NO: 772667

SEQ ID NO: 772669 - protein, 105 aa, Homo sapiens
MGGSSQRPRTTWQEGAFGFRTGMERELIESRNLETPDTEGGRYNRSCQVDFQGFALAVPETYGGLDSPVSTLPYLESCSVTQAGVQWCNLKLTATSVQVQVENLN

SEQ ID NO: 772670 - protein, 462 aa, Homo sapiens
DANDAAPVRPQPRCLARRARLGRLGPPPALPARPPVRPCQTVAAGRAVRSPSLPAAWRGASCCTPPRSCRHRACPLPRSALPPTARPPRDMAHAPARCPSARGSGDGEMGKPRNVALITGITGQDGSYLAEFLLEKGYEVHGIVRRSSSFNTGRIEHLYKNPQAHIEGNMKLHYGDLTDSTCLVKIINEVKPTEIYNLGAQSHVKISFDLAEYTADVDGVGTLRLLDAVKTCGLINSVKFYQASTSELYGKVQEIPQKETTPFYPRSPYGAAKLYAYWIVVNFREAYNLFAVNGILFNHESPRRGANFVTRKISRSVAKIYLGQLECFSLGNLDAKRDWGHAKDYVEAMWLMLQNDEPEDFVIATGEVHSVREFVEKSFLHIGKTIVWEGKNENEVGRCKETGKVHVTVDLKYYRPTEVDFLQGDCTKAKQKLNWKPRVAFDELVREMVHADVELMRTNPNA

SEQ ID NO: 772671 - protein, 358 aa, Homo sapiens
CTQAVCWERYHCLWFLMCKMDGSYLAEFLLEKGYEVHGIVRRSSSFNTGRIEHLYKNPQAHIEGNMKLHYGDLTDSTCLVKIINEVKPTEIYNLGAQSHVKISFDLAEYTADVDGVGTLRLLDAVKTCGLINSVKFYQASTSELYGKVQEIPQKETTPFYPRSPYGAAKLYAYWIVVNFREAYNLFAVNGILFNHESPRRGANFVTRKISRSVAKIYLGQLECFSLGNLDAKRDWGHAKDYVEAMWLMLQNDEPEDFVIATGEVHSVREFVEKSFLHIGKTIVWEGKNENEVGRCKETGKVHVTVDLKYYRPTEVDFLQGDCTKAKQKLNWKPRVAFDELVREMVHADVELMRTNPNA

SEQ ID NO: 772672 - protein, 462 aa, Homo sapiens; identical to SEQ ID NO: 772670

SEQ ID NO: 772673 - protein, 268 aa, Homo sapiens
MKSGKQLGSYEISFDLAEYTADVDGVGTLRLLDAVKTCGLINSVKFYQASTSELYGKVQEIPQKETTPFYPRSPYGAAKLYAYWIVVNFREAYNLFAVNGILFNHESPRRGANFVTRKISRSVAKIYLGQLECFSLGNLDAKRDWGHAKDYVEAMWLMLQNDEPEDFVIATGEVHSVREFVEKSFLHIGKTIVWEGKNENEVGRCKETGKVHVTVDLKYYRPTEVDFLQGDCTKAKQKLNWKPRVAFDELVREMVHADVELMRTNPNA

SEQ ID NO: 772674 - protein, 439 aa, Homo sapiens
DANDAAPVRPQPRCLARRARLGRLGPPPALPARPPVRPCQTVAAGRAVRSPSLPAAWRGASCCTPPRSCRHRACPLPRSALPPTARPPRDMAHAPARCPSARGSGDGEMGKPRNVALITGITGQDGSYLAEFLLEKGYEVHGIVRRSSSFNTGRIEHLYKNPQAHIEGNMKLHYGDLTDSTCLVKIINEVKPTEIYNLGAQSHVKISFDLAEYTADVDGVGTLRLLDAVKTCGLINSVKFYQASTSELYGKVQEIPQKETTPFYPRSPYGAAKLYAYWIVVNFREAYNLFAVNGILFNHESPRRGANFVTRKISRSVAKIYLGQLECFSLGNLDAKRDWGHAKDYVEAMWLMLQNDEPEDFVIATGEVHSVREFVEKSFLHIGKTIVWEGKNENEVDFLQGDCTKAKQKLNWKPRVAFDELVREMVHADVELMRTNPNA

SEQ ID NO: 772675 - protein, 472 aa, Homo sapiens
DANDAAPVRPQPRCLARRARLGRLGPPPALPARPPVRPCQTVAAGRAVRSPSLPAAWRGASCCTPPRSCRHRACPLPRSALPPTARPPRDMAHAPARCPSARGSGDGEMGKPRNVALITGITGQDGSYLAEFLLEKGYEVHGIVRRSSSFNTGRIEHLYKNPQAHIEGNMKLHYGDLTDSTCLVKIINEVKPTEIYNLGAQSHVKISFDLAEYTADVDGVGTLRLLDAVKTCGLINSVKFYQASTSELYGKVQEIPQKETTPFYPRSPYGAAKLYAYWIVVNFREAYNLFAVNGILFNHESPRRGANFVTRKISRSVAKIYLGQLECFSLGNLDAKRDWGHAKDYVEAMWLMLQNDEPEDFVIATGEVHSVREFVEKSFLHIGKTIVWEGKNENEVGRCKETGKVHVTVDLKYYRPTEVVRTLWPPSAWPRLAGWLGKCAHGMPGASLWSCQFSSLASFSVHFQNQNTVNSI

SEQ ID NO: 772676 - protein, 351 aa, Homo sapiens
DANDAAPVRPQPRCLARRARLGRLGPPPALPARPPVRPCQTVAAGRAVRSPSLPAAWRGASCCTPPRSCRHRACPLPRSALPPTARPPRDMAHAPARCPSARGSGDGEMGKPRNVALITGITGQDGSYLAEFLLEKGYEVHGIVRRSSSFNTGRIEHLYKNPQAHIEGNMKLHYGDLTDSTCLVKIINEVKPTEIYNLGAQSHVKISFDLAEYTADVDGVGTLRLLDAVKTCGLINSVKFYQASTSELYGKVQEIPQKETTPFYPRSPYGAAKLYAYWIVVNFREAYNLFAVNGILFNHESPRRGANFVTRKISRSVAKIYLGQLECFSLGNLDAKRDWGHAKDYVELAPL

SEQ ID NO: 772677 - protein, 177 aa, Homo sapiens
DANDAAPVRPQPRCLARRARLGRLGPPPALPARPPVRPCQTVAAGRAVRSPSLPAAWRGASCCTPPRSCRHRACPLPRSALPPTARPPRDMAHAPARCPSARGSGDGEMGKPRNVALITGITGQVSAGAGARRPRQPGHACSPYAPLLVGCGLSRNSPLGVPEGVCCREVGRKVRCS

SEQ ID NO: 772678 - protein, 475 aa, Homo sapiens
DANDAAPVRPQPRCLARRARLGRLGPPPALPARPPVRPCQTVAAGRAVRSPSLPAAWRGASCCTPPRSCRHRACPLPRSALPPTARPPRDMAHAPARCPSARGSGDGEMGKPRNVALITGITGQDGSYLAEFLLEKGYEMVPTWLSSCWRKAVHGIVRRSSSFNTGRIEHLYKNPQAHIEGNMKLHYGDLTDSTCLVKIINEVKPTEIYNLGAQSHVKISFDLAEYTADVDGVGTLRLLDAVKTCGLINSVKFYQASTSELYGKVQEIPQKETTPFYPRSPYGAAKLYAYWIVVNFREAYNLFAVNGILFNHESPRRGANFVTRKISRSVAKIYLGQLECFSLGNLDAKRDWGHAKDYVEAMWLMLQNDEPEDFVIATGEVHSVREFVEKSFLHIGKTIVWEGKNENEVGRCKETGKVHVTVDLKYYRPTEVDFLQGDCTKAKQKLNWKPRVAFDELVREMVHADVELMRTNPNA

SEQ ID NO: 772679 - protein, 439 aa, Homo sapiens; identical to SEQ ID NO: 772674

SEQ ID NO: 772680 - protein, 422 aa, Homo sapiens
DANDAAPVRPQPRCLARRARLGRLGPPPALPARPPVRPCQTVAAGRAVRSPSLPAAWRGASCCTPPRSCRHRACPLPRSALPPTARPPRDMAHAPARCPSARGSGDGEMGKPRNVALITGITGQDGSYLAEFLLEKGYEVHGIVRRSSSFNTGRIEHLYKNPQAHIEGNMKLHYGDLTDSTCLVKIINEVKPTEIYNLGAQSHVKISFDLAEYTADVDGVGTLRLLDAVKTCGLINSVKFYQASTSELYGKVQEIPQKETTPFYPRSPYGAAKLYAYWIVVNFREAYNLFAVNGILFNHESPRRGANFVTRKISRSVAKIYLGQLECFSLGNLDAKRDWGHAKDYVEAMWLMLQNDEPEDFVIATGEVHSVREFVEKSFLHIGKTIVWEGKNENEVGRCKETGKVHVTVDLKYYRPTEVETN

SEQ ID NO: 772681 - protein, 148 aa, Homo sapiens
PLSAVDALASGLLLLLFLSLSFLEKILKCPRLSVPGSPAGLVQVEGNSAAGTFCSRGCFPSCSALAQAARSSEASGGRARPPCSPPLGRPPLRTHGAVDHPSVPWVASRDFLGSLISVPESTTPGLEKIALHAPETLDHMMPSLWTDP

SEQ ID NO: 772682 - protein, 67 aa, Homo sapiens
  misc_feature (5)..(5): Xaa can be any naturally occurring amino acid
  misc_feature (8)..(8): Xaa can be any naturally occurring amino acid
  misc_feature (16)..(16): Xaa can be any naturally occurring amino acid
  misc_feature (28)..(30): Xaa can be any naturally occurring amino acid
  misc_feature (39)..(39): Xaa can be any naturally occurring amino acid
  misc_feature (54)..(54): Xaa can be any naturally occurring amino acid
RCVWXSQXPVCLVGVXSPLAGVLRWVEXXXSQCPQRRSXKPLCLYVSRCLLIQXLNSSHLTPPHRSH

SEQ ID NO: 772683 - protein, 67 aa, Homo sapiens
PFPDTHPFSARNGAVGERISRGGWIENGYHLRSPRRPAIGQCLMESSRWRRLKGNSLLPAGPREGGL

SEQ ID NO: 772684 - protein, 248 aa, Homo sapiens
MQTCPLAFPGHVSQALGTLLFLAASLSAQNEGWDSPICTEGVVSVSWGENTVMSCNISNAFSHVNIKLRAHGQESAIFNEVAPGYFSRDGWQLQVQGGVAQLVIKGARDSHAGLYMWHLVGHQRNNRQVTLEVSGAEPQSAPDTGFWPVPAVVTAVFILLVALVMFAWYRCRCSQQRREKKFFLLEPQMKVAALRAGAQQGLSRASAELWTPDSEPTPRPLALVFKPSPLGALELLSPQPLFPYAADP

SEQ ID NO: 772685 - protein, 180 aa, Homo sapiens
EIYVLIGSGGCIHSSLCPLEALSPALALALAQQPANALRSSPDPCVPLSGPTGWDSPICTEGVVSVSWGENTVMSCNISNAFSHVNIKLRAHGQESAIFNEVAPGYFSRDGWQLQVQGGVAQLVIKGARDSHAGLYMWHLCRASLDPDLFMLLSSSLRRGPLMSSSVWGGKITGNPPSVL

SEQ ID NO: 772686 - protein, 248 aa, Homo sapiens; identical to SEQ ID NO: 772684

SEQ ID NO: 772687 - protein, 219 aa, Homo sapiens
MQTCPLAFPGHVSQALGTLLFLAASLSAQNEGWDSPICTEGVVSVSWGENTVMSCNISNAFSHVNIKLRAHGQESAIFNEVAPGYFSRDGWQLQVQGGVAQLVIKGARDSHAGLYMWHLVGHQRNNRQVTLEVSGAEPQSAPDTGFWPVPAVVTAVFILLVALVMFAWYRCRCSQQRRECRASLDPDLFMLLSSSLRRGPLMSSSVWGGKITGNPPSVL

SEQ ID NO: 772688 - protein, 219 aa, Homo sapiens; identical to SEQ ID NO: 772687

SEQ ID NO: 772689 - protein, 248 aa, Homo sapiens; identical to SEQ ID NO: 772684

SEQ ID NO: 772690 - protein, 73 aa, Homo sapiens
DEGHVANRNMKGETRKGFHPCDMHGPAQPPMWTLCLSVSASLSLFSLTHMHAHMHTCPCAHTCSRIPQLPLAV

SEQ ID NO: 772691 - protein, 110 aa, Homo sapiens
MCLVFVAFATWAVRTSDPHTPDAWKTALLANVGTISAIRYFRRQRGKGAAATAPAPAPRSQARAREMQDEETTTGAQGRTRCRPRPGPLTPLFYRVQEGGVSWCCSLRLT

SEQ ID NO: 772692 - protein, 38 aa, Homo sapiens
QQLASLRTPGSQENCSSLTSRQTGLKVSGVLGVVGGAF

SEQ ID NO: 772693 - protein, 490 aa, Homo sapiens
MERVGCTLTTTYAHPRPTPTNFLPAISTMASSYRDRFPHSNLTHSLSLPWRPSTYYKVASNSPSVAPYCTRSQRVSENTMLPFVSNRTTFFTRYTPDDWYRSNLTNYQESNTSRHNSEKLRVDTSRLIQDKYQQTRKTQADTTQNLGERVNDIGFWKSEIIHELDEMIGETNALTDVKKRLERALMETEAPLQVARECLFHREKRMGIDLVHDEVEAQLLTEVDTILCCQERMKLHLDKAIAQLAANRASQHELEKDLSDKQTAYRIDDKCHHLRNTSDGVGYFRGVERVDATVSVPESWAKFTDDNILRSQSERAASAKLRDDIENLLVVTANEMWNQFNKVNLSFTNRIAETADAKNKIQTHLAKTLQEIFQTEMTIESIKKAIKDKTAFLKVAQTRLDERTRRPNIELCRDMAQLRLVNEVHEVDDTIQTLQQRLRDAEDTLQSLVHIKATLEYDLAVKANSLYIDQEKCMSMRKSYPNTLRLVGFC

SEQ ID NO: 772694 - protein, 90 aa, Homo sapiens
  misc_feature (15)..(15): Xaa can be any naturally occurring amino acid
ATDNAVVAENVEDDXLHLRLVNEVHEVDDTIQTLQQRLRDAEDTLQSLVHIKATLEYDLAVKANSLYIDQEKCMSMRKSYPNTLRLVGFC

SEQ ID NO: 772695 - protein, 490 aa, Homo sapiens; identical to SEQ ID NO: 772693

SEQ ID NO: 772696 - protein, 233 aa, Homo sapiens
MERVGCTLTTTYAHPRPTPTNFLPAISTMASSYRDRFPHSNLTHSLSLPWRPSTYYKVASNSPSVAPYCTRSQRVSENTMLPFVSNRTTFFTRYTPDDWYRSNLTNYQESNTSRHNSEKLRVDTSRLIQDKYQQTRKTQADTTQNLGERVNDIGFWKSEIIHELDEMIGETNALTDVKKRLERALMETEAPLQVARECLFHREKRMGIDLVHDEVEAQLLTVNVGEMHQSQAA

SEQ ID NO: 772697 - protein, 122 aa, Homo sapiens
HSGCMFFKVGSIEPLFMHSSLFRISSSPLQRLHGPLDSQLEAPLCFRRTQHLVNEVHEVDDTIQTLQQRLRDAEDTLQSLVHIKATLEYDLAVKANSLYIDQEKCMSMRKSYPNTLRLVGFC

SEQ ID NO: 772698 - protein, 324 aa, Homo sapiens
MIGETNALTDVKKRLERALMETEAPLQVARECLFHREKRMGIDLVHDEVEAQLLTEVDTILCCQERMKLHLDKAIAQLAANRASQHELEKDLSDKQTAYRIDDKCHHLRNTSDGVGYFRGVERVDATVSVPESWAKFTDDNILRSQSERAASAKLRDDIENLLVVTANEMWNQFNKVNLSFTNRIAETADAKNKIQTHLAKTLQEIFQTEMTIESIKKAIKDKTAFLKVAQTRLDERTRRPNIELCRDMAQLRLVNEVHEVDDTIQTLQQRLRDAEDTLQSLVHIKATLEYDLAVKANSLYIDQEKCMSMRKSYPNTLRLVGFC

SEQ ID NO: 772699 - protein, 643 aa, Homo sapiens
MEAVETGERPTFGAWDYGVFALMLLVSTGIGLWVGLARGGQRSAEDFFTGGRRLAALPVGLSLSASFMSAVQVLGVPSEAYRYGLKFLWMCLGQLLNSVLTALLFMPVFYRLGLTSTYEYLEMRFSRAVRLCGTLQYIVATMLYTGIVIYAPALILNQVTGLDIWASLLSTGIICTFYTAVGGMKAVVWTDVFQVVVMLSGFWVVLARGVMLVGGPRQVLTLAQNHSRINLMDFNPDPRSRYTFWTFVVGGTLVWLSMYGVNQAQVQRYVACRTEKQAKLALLINQVGLFLIVSSAACCGIVMFVFYTDCDPLLLGRISAPDQYMPLLVLDIFEDLPGVPGLFLACAYSGTLSTASTSINAMAAVTVEDLIKPRLRSLAPRKLVIISKGLSLIYGSACLTVAALSSLLGGGVLQGSFTVMGVISGPLLGAFILGMFLPACNTPGVLAGLGAGLALSLWVALGATLYPPSEQTMRVLPSSAARCVALSVNASGLLDPALLPANDSSRAPSSGMDASRPALADSFYAISYLYYGALGTLTTVLCGALISCLTGPTKRSTLAPGLLWWDLARQTASVAPKEEVAILDDNLVKGPEELPTGNKKPPGFLPTNEDRLFFLGQKELEGAGSWTPCVGHDGGRDQQETNL

SEQ ID NO: 772700 - protein, 122 aa, Homo sapiens
QKLAEHLTIPDRKTMYEQWENFNKETENAKKYQTEIMELKNMITALKKSLDEGNSRLDQAEKRISELKERSLEINHRSKRKKRKRVKKVEGTYGTPSIRPIDALRESQKDKGKNHYIQRNNG

SEQ ID NO: 772701 - protein, 91 aa, Homo sapiens
LAWLRQITRNLVALNDTTYSVQFYRLDVWHRSHWANIKVSAGLYSFLEAPGENPFPCLFQLLEEVTFPGSWTPSPSSKPSPVCLPTLTDKL

SEQ ID NO: 772702 - protein, 95 aa, Homo sapiens
MLGASEGRPRDDKKKKDAGNSARKDKDPVNNSGGRAKKKRGSTGKVRDKLNNKVWWDKATYDKFCREVPNYKFITQVVVSERQGRAERQGRAEGD

SEQ ID NO: 772703 - protein, 110 aa, Homo sapiens
LEVLEPFGEDLGDVVSTSYICHSAKGIDRVYVATRHRAGPMDGYFKKADFHSIEGRHFLTIRTIQSGTDCLERHEVSVTGDIQIEARQSLGCHIVEGPLPWGRVIGLNCC

SEQ ID NO: 772704 - protein, 140 aa, Homo sapiens
MYMTMALPKKSPTTQRWEEQVEKAFLRPSPDWILRMAARMCEEETSTRQSGPTRMNMQAAKMTTWLSQVSAQASLRTDRISQKKWLISRGPQKGSLRMRLTWTIARREPHVQEVMARVMQTFQVMMMKYRRGWQMATYRS

SEQ ID NO: 772705 - protein, 221 aa, Homo sapiens
MGGAGRGGSRLSSQHFGRLGQEDRLSPGVRDQPGQHSETVSLHKIKKKVSWALYMCLWSQLLRRLRQEDCLSPGVGCCSEPRSHHCPPLWATEQYPVSENKQQKAETLKGSVYGKTACQNTWLLLPQISGPGNEGWSREAFLQAVATRPAMGTLATEASRGVSQSLDRCADVSGVEGGWGVCKGVCVPGGCSWASMCVPVCVRAPPLQPSVVSPSSPFATF

SEQ ID NO: 772706 - protein, 221 aa, Homo sapiens; identical to SEQ ID NO: 772705

SEQ ID NO: 772707 - protein, 221 aa, Homo sapiens; identical to SEQ ID NO: 772705

SEQ ID NO: 772708 - protein, 221 aa, Homo sapiens; identical to SEQ ID NO: 772705

SEQ ID NO: 772709 - protein, 182 aa, Homo sapiens [sequence omitted]

SEQ ID NO: 772710 - protein, 105 aa, Homo sapiens [sequence omitted]

SEQ ID NO: 772711 - protein, 287 aa, Homo sapiens
FYFRTLFQQHNEAVNVWTHLLAALVLLLRLALFVETVDFWGDPHALPLFIIVLASFTYLSFSALAHLLQAKSEFWHYSFFFLDYVGVAVYQFGSALAHFYYAIEPAWHAQVQAVFLPMAAFLAWLSCIGSCYNKYIQKPGLLGRTCQEVPSVLAYALDISPVVHRIFVSSDPTTDDPALLYHKCQVVFFLLAAAFFSTFMPERWFPGSCHVFGQGHQLFHIFLVLCTLAQLEAVALDYEARRPIYEPLHTHWPHNFSGLFLLTVGSSILTAFLLSQLVQRKLDQKTK

SEQ ID NO: 772712 - protein, 83 aa, Homo sapiens
FYFRTLFQQHNEAVNVWTHLLAALVLLLRLALFVETVDFWGDPHALPLFIIVLASFTYLSFSALAHLLQAKSEFWHYSFFFLD

SEQ ID NO: 772713 - protein, 99 aa, Homo sapiens
EIPHTEYSPPYSLEKMTDLVAVWDVALSDGVHKIEFEHGTTSGKRVVYVDGKEEIRKEWMFKLVGKETFYVGAAKTKATINIDAISGFAYEYTLYGGYW

SEQ ID NO: 772714 - protein, 179 aa, Homo sapiens
MTDLVAVWDVALSDGVHKIEFEHGTTSGKRVVYVDGKEEIRKEWMFKLVGKETFYVGAAKTKATINIDAISGFAYEYTLEINGKSLKKYMEDRSKTTNTWVLHMDGENFRIVLEKDAMDVWCNGKKLETAGEFVDDGTETHFSIGNHDCYIKAVSSGKRKEGIIHTLIVDNREIPEIAS

SEQ ID NO: 772715 - protein, 426 aa, Homo sapiens
SALYRIAAHVCNPKVGSVAAGGVASCAGRPRGPERRDKQSARLVLAPAELSTSAPAAPVSRPGEQGHAAYAAESEPTGCLVKPTPEPPAAHRAQSDRISLCHPGLECSGMISAHCNLHLPGSSDSCASASGVAGIYRRALPCPANFSIFAKTGFHRFVQAGLELLTSSDPTALTSQSAGITGCEPSRLATFSKVLNQSLLRQSYDPSSMAILSYAVPFIRTLPLLCYNHLLVSPDSATLSPPYSLEKMTDLVAVWDVALSDGVHKIEFEHGTTSGKRVVYVDGKEEIRKEWMFKLVGKETFYVGAAKTKATINIDAISGFAYEYTLEINGKSLKKYMEDRSKTTNTWVLHMDGENFRIVLEKDAMDVWCNGKKLETAGEFVDDGTETHFSIGNHDCYIKAVSSGKRKEGIIHTLIVDNREIPEIAS

SEQ ID NO: 772716 - protein, 120 aa, Homo sapiens
SALYRIAAHVCNPKVGSVAAGGVASCAGRPRGPERRDKQSARLVLAPAELSTSAPAAPVSRPGEQGHAAYAAESEPTGCLVKPTPEPPAAHRAQTDCFCQPWHLEMTVLSLKMMKALLTA

SEQ ID NO: 772717 - protein, 81 aa, Homo sapiens
VRAIVILSSTHTRPPKKDAMDVWCNGKKLETAGEFVDDGTETHFSIGNHDCYIKAVSSGKRKEGIIHTLIVDNREIPEIAS

SEQ ID NO: 772718 - protein, 86 aa, Homo sapiens
MRGGCGLRLRQRTRVGSVAAGGVASCAGRPRGPERRDKQSARLVLAPAELSTSAPAAPVSRPGEQGHAAYAAESEPTGCLVKPTPE

SEQ ID NO: 772719 - protein, 179 aa, Homo sapiens; identical to SEQ ID NO: 772714

SEQ ID NO: 772720 - protein, 199 aa, Homo sapiens
DPPLCLPKCRDYSPPYSLEKMTDLVAVWDVALSDGVHKIEFEHGTTSGKRVVYVDGKEEIRKEWMFKLVGKETFYVGAAKTKATINIDAISGFAYEYTLEINGKSLKKYMEDRSKTTNTWVLHMDGENFRIVLEKDAMDVWCNGKKLETAGEFVDDGTETHFSIGNHDCYIKAVSSGKRKEGIIHTLIVDNREIPEIAS

SEQ ID NO: 772721 - protein, 179 aa, Homo sapiens; identical to SEQ ID NO: 772714

SEQ ID NO: 772722 - protein, 175 aa, Homo sapiens
MTDLVAVWDVALSDGVHKIEFEHGTTSGKRVVYVDGKEEIRKEWMFKLVGKETFYVGAAKTKATINIDAISGFAYEYTLEINGKSLKKYMEDRSKTTNTWVLHMDGENFRIVLEKDAMDVWCNGKKLETAGEFVDDGTETHFSIGNHDCYIKAVSSGKRARRAWPEERGQKEVAS

SEQ ID NO: 772723 - protein, 307 aa, Homo sapiens
GKPEGCGSCYSQGQAPGNRGHSGVVCSLICNIIVLSCAFPMHYIKTWSLLGEMSEKLRRCRKELTAAIDRAFEGVSYSQECTGQQRLELSAAPLSFSLPVHRLLCRRHPLAACSSAAPFAAVPCAPENENPAFATNHAPVNAKPHALCPERKPLTSKENVLMHSSILAPERESWRTAGEGENWRKENLRKDMERDLKADSNMPLNNSSQEVTKDLLDMIDHTSIRTIEELAGKIEFENELNHMCGHCQDSPFKEEAWALLMDKSPQKATDADPGSLKQAFDDHNIVETVLDLEEDYNVMTSFKYQIE

SEQ ID NO: 772724 - protein, 189 aa, Homo sapiens
GKPEGCGSCYSQGQAPGNRGHSGVVCSLICNIIVLSCAFPMHYIKTWSLLGEMSEKLRRCRKELTAAIDRAFEGVSYSQECTGQQRLELSAAPLSFSLPVHRLLCRRHPLAACSSAAPFAAVPCAPENENPAFATNHAPVNAKPHALCPERKPLTSKENVLMHSSILAPERESWRTAGEGENWRKENLR

SEQ ID NO: 772725 - protein, 553 aa, Homo sapiens
RHFLVSEPGAEAMGSQEVLGHAARLASSGLLLQVLFRLITFVLNAFILRFLSKEIVGVVNVRLTLLYSTTLFLAREAFRRACLSGGTQRDWSQTLNLLWLTVPLGVFWSLFLGWIWLQLLEVPDPNVVPHYATGVVLFGLSAVVELLGEPFWVLAQAHMFVKLKVIAESLSVILKSVLTAFLVLWLPHWGLYIFSLAQLFYTTVLVLCYVIYFTKLLGSPESTKLQTLPVSRITDLLPNITRNGAFINWKEAKLTWSFFKQSFLKQILTEGERYVMTFLNVLNFGDQGVYDIVNNLGSLVARLIFQPIEESFYIFFAKVLERGKDATLQKQEDVAVAAAVLESLLKLALLAGLTITVFGFAYSQLALDIYGGTMLSSGSGPVLLRSYCLYVLLLAINGVTECFTFAAMSKEEVDRYNFVMLALSSSFLVLSYLLTRWCGSVGFILANCFNMGIRITQSLCFIHRYYRRSPHRPLAGLHLSPVLLGTFALSGGVTAVSEVFLCCEQGWPARLAHIAVGAFCLGATLGTAFLTETKLIHFLRTQLGVPRRTDKMT

SEQ ID NO: 772726 - protein, 502 aa, Homo sapiens
  misc_feature (3)..(4): Xaa can be any naturally occurring amino acid
  misc_feature (8)..(12): Xaa can be any naturally occurring amino acid
  misc_feature (14)..(14): Xaa can be any naturally occurring amino acid
QPXXALVXXXXXFXFLRPLLQVLFRLITFVLNAFILRFLSKEIVGVVNVRVPLGVFWSLFLGWIWLQLLEVPDPNVVPHYATGVVLFGLSAVVELLGEPFWVLAQAHMFVKLKVIAESLSVILKSVLTAFLVLWLPHWGLYIFSLAQLFYTTVLVLCYVIYFTKLLGSPESTKLQTLPVSRITDLLPNITRNGAFINWKEAKLTWSFFKQSFLKQILTEGERYVMTFLNVLNFGDQGVYDIVNNLGSLVARLIFQPIEESFYIFFAKVLERGKDATLQKQEDVAVAAAVLESLLKLALLAGLTITVFGFAYSQLALDIYGGTMLSSGSGPVLLRSYCLYVLLLAINGVTECFTFAAMSKEEVDRYNFVMLALSSSFLVLSYLLTRWCGSVGFILANCFNMGIRITQSLCFIHRYYRRSPHRPLAGLHLSPVLLGTFALSGGVTAVSEVFLCCEQGWPARLAHIAVGAFCLGATLGTAFLTETKLIHFLRTQLGVPRRTDKMT

SEQ ID NO: 772727 - protein, 327 aa, Homo sapiens
EAVGLIAEEIVTNITRNGAFINWKEAKLTWSFFKQSFLKQILTEGERYVMTFLNVLNFGDQGVYDIVNNLGSLVARLIFQPIEESFYIFFAKVLERGKDATLQKQEDVAVAAAVLESLLKLALLAGLTITVFGFAYSQLALDIYGGTMLSSGSGPVLLRSYCLYVLLLAINGVTECFTFAAMSKEEVDRYNFVMLALSSSFLVLSYLLTRWCGSVGFILANCFNMGIRITQSLCFIHRYYRRSPHRPLAGLHLSPVLLGTFALSGGVTAVSEVFLCCEQGWPARLAHIAVGAFCLGATLGTAFLTETKLIHFLRTQLGVPRRTDKMT

SEQ ID NO: 772728 - protein, 252 aa, Homo sapiens
RHFLVSEPGAEAMGSQEVLGHAARLASSGLLLQVLFRLITFVLNAFILRFLSKEIVGVVNVRVPLGVFWSLFLGWIWLQLLEVPDPNVVPHYATGVVLFGLSAVVELLGEPFWVLAQAHMFVKLKVIAESLSVILKSVLTAFLVLWLPHWGLYIFSLAQLFYTTVLVLCYVIYFTKLLGSPESTKLQTLPVSRITDLLPNITRNGAFINWKEAKLTWSFFKQSFLKQILTEGERYVDDLFECLGLWDHGGVK

SEQ ID NO: 772729 - protein, 486 aa, Homo sapiens
GGISWCLSLARRLWAARRCWATRPGWPPPVSSCRVPLGVFWSLFLGWIWLQLLEVPDPNVVPHYATGVVLFGLSAVVELLGEPFWVLAQAHMFVKLKVIAESLSVILKSVLTAFLVLWLPHWGLYIFSLAQLFYTTVLVLCYVIYFTKLLGSPESTKLQTLPVSRITDLLPNITRNGAFINWKEAKLTWSFFKQSFLKQILTEGERYVMTFLNVLNFGDQGVYDIVNNLGSLVARLIFQPIEESFYIFFAKVLERGKDATLQKQEDVAVAAAVLESLLKLALLAGLTITVFGFAYSQLALDIYGGTMLSSGSGPVLLRSYCLYVLLLAINGVTECFTFAAMSKEEVDRYNFVMLALSSSFLVLSYLLTRWCGSVGFILANCFNMGIRITQSLCFIHRYYRRSPHRPLAGLHLSPVLLGTFALSGGVTAVSEVFLCCEQGWPARLAHIAVGAFCLGATLGTAFLTETKLIHFLRTQLGVPRRTDKMT

SEQ ID NO: 772730 - protein, 218 aa, Homo sapiens
  misc_feature (3)..(3): Xaa can be any naturally occurring amino acid
MSXVPHAYDGNENSIVTSELCPRKMLSSRSFRKNNSIFSFSFLSCPVLLRSYCLYVLLLAINGVTECFTFAAMSKEEVDRYNFVMLALSSSFLVLSYLLTRWCGSVGFILANCFNMGIRITQSLCFIHRYYRRSPHRPLAGLHLSPVLLGTFALSGGVTAVSEVFLCCEQGWPARLAHIAVGAFCLGATLGTAFLTETKLIHFLRTQLGVPRRTDKMT

SEQ ID NO: 772731 - protein, 136 aa, Homo sapiens
MTTAHFYCQYCTASLLGKKYVLKDDSPYCVTCYDRVFSNYCEECKKPIESDSKDLCYKDRHWHEGCFKCTKCNHSLVEKPFAAKDERLLCTECYSNECSSKCFHCKRTIMPGSRKMEFKGNYWHETCLCVRIADNL

SEQ ID NO: 772732 - protein, 136 aa, Homo sapiens; identical to SEQ ID NO: 772731

SEQ ID NO: 772733 - protein, 136 aa, Homo sapiens; identical to SEQ ID NO: 772731

SEQ ID NO: 772734 - protein, 136 aa, Homo sapiens; identical to SEQ ID NO: 772731

SEQ ID NO: 772735 - protein, 125 aa, Homo sapiens
SRGGRHFLSASPVGLAHRVKPAAANRGARLLPVARPGGRRPPGLGKPFQVPRVAGVTHAPPSTRRRLPLAPGLGAFATLSSLFPKKRGRGRRRAAWAGRQSRGRAPGETPGSVCVGRTLGARLRM

SEQ ID NO: 772736 - protein, 125 aa, Homo sapiens
GWRSVAWERRIDLETKTPGPDKNLEAWRQKNKIPHSLWRLWGRALPCPFLRLAAPNPWCFLTTRDLLRFRMPAPIRVSVLSVSYKDTLTGLEAPQIQDGLVPILTIMRSTKTCFRMRSPLKLQAI

SEQ ID NO: 772737 - protein, 120 aa, Homo sapiens
RVPRLNYQPPSHPKGCHHQKFNMLLVHAKKSPVIVGLISTLLIDPHFLLFYLKANTSFTIVTPELFIFSVQVCALFSKLFGSSVSEGLSHLFTIVDCAAFFVFNYRLYKILSAGGRLLLP

SEQ ID NO: 772738 - protein, 59 aa, Homo sapiens
EEDPVSKQIIINQDLKDKKTFAICRAGEKHGGTGSGMCKGPGAGKKSAFFPHSRLCKGP

SEQ ID NO: 772739 - protein, 49 aa, Homo sapiens
FSDIISYHFLPDSLCSTQSGLLDVAQARNAPTSASLRWLLPLPRLSVFP

SEQ ID NO: 772740 - protein, 472 aa, Homo sapiens
MSENNKNSLESSLRQLKCHFTWNLMEGENSLDDFEDKVFYRTEFQNREFKATMCNLLAYLKHLKGQNEAALECLRKAEELIQQEHADQAEIRSLVTWGNYAWVYYHMGRLSDVQIYVDKVKHVCEKFSSPYRIESPELDCEEGWTRLKCGGNQNERAKVCFEKALEKKPKNPEFTSGLAIASYRLDNWPPSQNAIDPLRQAIRLNPDNQYLKVLLALKLHKMREEGEEEGEGEKLVEEALEKAPGVTDVLRSAAKFYRRKDEPDKAIELLKKALEYIPNNAYLHCQIGCCYRAKVFQVMNLRENGMYGKRKLLELIGHAVAHLKKADEANDNLFRVCSILASLHALADQYEEAEYYFQKEFSKELTPVAKQLLHLRYGNFQLYQMKCEDKAIHHFIEGVKINQKSREKEKMKDKLQKIAKMRLSKNGADSEALHVLAFLQELNEKMQQADEDSERGLESGSLIPSASSWNGE

SEQ ID NO: 772741 - protein, 303 aa, Homo sapiens
MKERRCALRRLWKRRLDNWPPSQNAIDPLRQAIRLNPDNQYLKVLLALKLHKMREEGEEEGEGEKLVEEALEKAPGVTDVLRSAAKFYRRKDEPDKAIELLKKALEYIPNNAYLHCQIGCCYRAKVFQVMNLRENGMYGKRKLLELIGHAVAHLKKADEANDNLFRVCSILASLHALADQYEEAEYYFQKEFSKELTPVAKQLLHLRYGNFQLYQMKCEDKAIHHFIEGVKINQKSREKEKMKDKLQKIAKMRLSKNGADSEALHVLAFLQELNEKMQQADEDSERGLESGSLIPSASSWNGE

SEQ ID NO: 772742 - protein, 454 aa, Homo sapiens
MSENNKNSLESSLRQLKCHFTWNLMEGENSLDDFEDKVFYRTEFQNREFKATMCNLLAYLKHLKGQHADQAEIRSLVTWGNYAWVYYHMGRLSDVQIYVDKVKHVCEKFSSPYRIESPELDCEEGWTRLKCGGNQNERAKVCFEKALEKKPKNPEFTSGLAIASYRLDNWPPSQNAIDPLRQAIRLNPDNQYLKVLLALKLHKMREEGEEEGEGEKLVEEALEKAPGVTDVLRSAAKFYRRKDEPDKAIELLKKALEYIPNNAYLHCQIGCCYRAKVFQVMNLRENGMYGKRKLLELIGHAVAHLKKADEANDNLFRVCSILASLHALADQYEEAEYYFQKEFSKELTPVAKQLLHLRYGNFQLYQMKCEDKAIHHFIEGVKINQKSREKEKMKDKLQKIAKMRLSKNGADSEALHVLAFLQELNEKMQQADEDSERGLESGSLIPSASSWNGE

SEQ ID NO: 772743 - protein, 472 aa, Homo sapiens; identical to SEQ ID NO: 772740

SEQ ID NO: 772744 - protein, 251 aa, Homo sapiens
MREEGEEEGEGEKLVEEALEKAPGVTDVLRSAAKFYRRKDEPDKAIELLKKALEYIPNNAYLHCQIGCCYRAKVFQVMNLRENGMYGKRKLLELIGHAVAHLKKADEANDNLFRVCSILASLHALADQYEEAEYYFQKEFSKELTPVAKQLLHLRYGNFQLYQMKCEDKAIHHFIEGVKINQKSREKEKMKDKLQKIAKMRLSKNGADSEALHVLAFLQELNEKMQQADEDSERGLESGSLIPSASSWNGE

SEQ ID NO: 772745 - protein, 164 aa, Homo sapiens
  misc_feature (32)..(32): Xaa can be any naturally occurring amino acid
  misc_feature (86)..(86): Xaa can be any naturally occurring amino acid
  misc_feature (116)..(116): Xaa can be any naturally occurring amino acid
  misc_feature (125)..(125): Xaa can be any naturally occurring amino acid
  misc_feature (131)..(131): Xaa can be any naturally occurring amino acid
  misc_feature (152)..(152): Xaa can be any naturally occurring amino acid
VDIHCIGSNSNILVGLDPWLALQGASSLATLXFEASDLIQGFYRKGSCSCSSNVMQLAQKLQQQQQQQQQQQHLLGQVAIQQQQQXGPGVQTNQVLGPKPQGLMPPSSHQGLLVQXVSPQPTPGXPGYAWXLPQVGLLLQQQHPGALGPPRXLTGQVFYDPVPG

SEQ ID NO: 772746 - protein, 63 aa, Homo sapiens
ERDPEAPAVFSEPSSHSAWPGGEAPYPPLGSPLAPGGGGVGRPAVWSAPMEIHCKHDPFASMH

SEQ ID NO: 772747 - protein, 109 aa, Homo sapiens
QGTTGSGDREGGRKMHPTNRKGKLIGQGVRPGGQSKRRAAPSLSNVAPAFQNRTLPGRQGRGGRRGAARRACPASDGGFQRVSRYARVPRYVSAQEAEAARLRVRGPSS

SEQ ID NO: 772748 - protein, 41 aa, Homo sapiens
MKSELEPGKGRDRNKGLEDRMDGEGCMETPGRRAEGLKAPG

SEQ ID NO: 772749 - protein, 68 aa, Homo sapiens
LTPLKRASRSERTKSFSVRDLGPSWERFLAEMAAVEPSDCQGEIVLQQAAVDSLPEWVRTGPEDRVVS

SEQ ID NO: 772750 - protein, 91 aa, Homo sapiens
RKSQHLKHNLCFSQTPDPRNNSSLVPWRWAGVERHGKCFSKEESFPAHSSYSMFLKVQINGFSLYLQENPNSCTDPMGLQGPVGSDCCLSL

SEQ ID NO: 772751 - protein, 73 aa, Homo sapiens
QGLKVRTKSLFPYPPHQGQFGVLSKGDALGPDSLAASPPSAANAASSHQLQTQAQRSCWEERRRIALSFAFLA

SEQ ID NO: 772752 - protein, 106 aa, Homo sapiens
IGTHHHTRLIFVFLVKMGFYHVGQAGLELLTSGDLPTLASQSAGITSVSHHTWRILTFSCTISSQYLCNRYYHYLYFIDEETERTWQLAQGHTAHWVITNPHKFGF

SEQ ID NO: 772753 - protein, 118 aa, Homo sapiens
LRLQGEVYRAEFCALAENECCCNGCMCPCSGRSWWCAIHVEPRIASWIFRPLDSASLRKVEIFSLLGGNTMESLFTGCGGWPTPGECPSLEVVGVLSNQLLPDEKKKAERACPPPHDT

SEQ ID NO: 772754 - protein, 155 aa, Homo sapiens
MERDKKDREGRETQRPERCIESGEVSCCRLRPAGGKVLSRAAKSPVVAFGQQEWQCLFGTWLHVSVLRKIMVVCIHVEPRIASWIFRPLDSASLRKVEIFSLLGGNTMESLFTGCGGWPTPGECPSLEVVGVLSNQLLPDEKKKAERACPPPHDT

SEQ ID NO: 772755 - protein, 486 aa, Homo sapiens
MLHLSEFSEPDALLVKSTEGCCAEPSAELPRLPARDAPAATGYPGAGDFLSWALNSCGASGDLADSCFLEGPAPTPPPGLSYSGSFFIQAVPEHPHDPEALFNLMSGVLGLAPFPGPEAAASRSPLDAPFPAGSDALLPGPPDLYSPDLGAAPFPEAFWEASPCAGAPSQCLYEPQLSPPDVKPGLRRPPASPALDAVSAFKGPYAPWELLSVGAPGNCGSQGDYQAAPEARFPVIGTKIEDLLSISCPAELPAVPANRLYPSGAYDAFPLAPGDLGEGAEGLPGLLTPPSGEGGSSGDGGEFLASTQPQLSPLGLRSAAAADFPKPLVADIPGSSGVAAPPVPPPPPTPFPQAKARRKGRRGGKCSTRCFCPRPHAKAFACPVESCVRSFARSDELNRHLRIHTGHKPFQCRICLRNFSRSDHLTTHVRTHTGEKPFACDVCGRRFARSDEKKRHSKVHLKQKARAEERLKGLGFYSLGLSFASL

SEQ ID NO: 772756 - protein, 150 aa, Homo sapiens
MLHLSEFSEPDALLVKSTEGCCAEPSAELPRLPARDAPAATGYPGGKEGEQGCSDDDGAARGRTIPENQEGLGHWSYENRGDGKLRSPGVRTPIPTHTGPPAPPQEPVRLSERPFACARVFCVCMFLCAPWDVCGPLLNQNVQKALCVYP

SEQ ID NO: 772757 - protein, 587 aa, Homo sapiens
MSQMLHIEIPNFGNTVLGCLNEQRLLGLYCDVSIVVKGQAFKAHRAVLAASSLYFRDLFSGNSKSAFELPGSVPPACFQQILSFCYTGRLTMTASEQLVVMYTAGFLQIQHIVERGTDLMFKVSSPHCDSQTAVIEDAGSEPQSPCNQLQPAAAAAAPYVVSPSVPIPLLTRVKHEAMELPPAGPGLAPKRPLETGPRDGVAVAAGAAVAAGTAPLKLPRVSYYGVPSLATLIPGIQQMPYPQGERTSPGASSLPTTDSPTSYHNEEDEEDDEAYDTMVEEQYGQMYIKASGSYAVQEKPEPVPLESRSCVLIRRDLVALPASLISQIGYRCHPKLYSEGDPGEKLELVAGSGVYITRGQLMNCHLCAGVKHKVLLRRLLATFFDRNTLANSCGTGIRSSTSDPSRKPLDSRVLNAVKLYCQNFAPSFKESEMNVIAADMCTNARRVRKRWLPKIKSMLPEGVEMYRTVMGSAAASVPLDPEFPPAAAQVFEQRIYAERRGDAATIVALRTDAVNVDLSAAANPAFDAGEEVDGAGSVIQEVAAPEPLPADGQSPPQPFEQGGGGPSRPQTPAAAARRPEGTYAGTL

SEQ ID NO: 772758 - protein, 293 aa, Homo sapiens
MVQEKPEPVPLESRSCVLIRRDLVALPASLISQIGYRCHPKLYSEGDPGEKLELVAGSGVYITRGQLMNCHLCAGVKHKVLLRRLLATFFDRNTLANSCGTGIRSSTSDPSRKPLDSRVLNAVKLYCQNFAPSFKESEMNVIAADMCTNARRVRKRWLPKIKSMLPEGVEMYRTVMGSAAASVPLDPEFPPAAAQVFEQRIYAERRGDAATIVALRTDAVNVDLSAAANPAFDAGEEVDGAGSVIQEVAAPEPLPADGQSPPQPFEQGGGGPSRPQTPAAAARRPEGTYAGTL

SEQ ID NO: 772759 - protein, 179 aa, Homo sapiens
MVLWPWGGAGLPAGRWLSSRRPVLTVYCQNFAPSFKESEMNVIAADMCTNARRVRKRWLPKIKSMLPEGVEMYRTVMGSAAASVPLDPEFPPAAAQVFEQRIYAERRGDAATIVALRTDAVNVDLSAAANPAFDAGEEVDGAGSVIQEVAAPEPLPADGQSPPQPFEQGGGGPSRPQTP

SEQ ID NO: 772760 - protein, 92 aa, Homo sapiens
PVTPSAAFNAKTLLTSTANPKPQPPSAVPWDPVAKRAPWITPPPEFQGPTLCVGVVCDLVAGKYPSCSWICFFFLLRQGLTLSLRLEYSSMT

SEQ ID NO: 772761 - protein, 68 aa, Homo sapiens
MFISSHFWHFLLSSSWTVLQGCSDNATIEEVLEVLFFRIPLMGWCEAAIAQHLGCGLKVREEKGRALA

SEQ ID NO: 772762 - protein, 156 aa, Homo sapiens
MGLYIGWRCPHYLWDCFRIGDESRCFCGHLLREHRIISDISVPCKVSQCRCFMFCFIPSRPEEVGEFWLKRRATFDPKAWRAQCRCKHSHEEHAATGPHPCRHHGCCCGCFESNFLCAACDRRWEEHETFFDTQKTRQRGGRPRGTDTVSNWHRPL

SEQ ID NO: 772763 - protein, 381 aa, Homo sapiens
RDFLLGHVDAESLVRHHPDCKDLLIEALKFHLLPEQRGVLGTSRTRPRRCEGAGPVLFAVGASPGAWGVAQRVGSTHESRLHLPSPGGGSLFAIHGDCEAYDTRTDRWHVVASMSTRRARVGVAAVGNRLYAVGGYDGTSDLATVESYDPVTNTWQPEVSMGTRRSCLGVAALHGLLYSAGGYDGASCLNSAERYDPLTGTWTSVAAMSTRRRYVRVATLDGNLYAVGGYDSSSHLATVEKYEPQVNVWSPVASMLSRRSSAGVAVLEGALYVAGGNDGTSCLNSVERYSPKAGAWESVAPMNIRRSTHDLVAMDGWLYAVGGNDGSSSLNSIEKYNPRTNKWVAASCMFTRRSSVGVAVLELLNFPPPSSPTLSVSSTSL

SEQ ID NO: 772764 - protein, 174 aa, Homo sapiens [sequence omitted]

SEQ ID NO: 772765 - protein, 256 aa, Homo sapiens
MCVCFCRGGGMGPCRAAQGRVGWDFSREGARPGPGPGSSRHPHPSLLQGTAKAKPSSGWDYVYWVDPWRGAARRDLGGREKQRQRGHEEGSASEKGQAVTITPFLLPSAGVTRVRQSLKTWVEHGPFSGDPGLPRSVRVELLTLVAGPARGRSGHRQPPPQPQSLRRPLWLSHSDPSLKFRTLGLREGSGAECLPPGTFLPFSWSFSAPELAHLSNARAPWIPLPGAFQIQQKQIFFFLESRTKSGMRSRGGKDSK

SEQ ID NO: 772766 - protein, 256 aa, Homo sapiens; identical to SEQ ID NO: 772765

SEQ ID NO: 772767 - protein, 256 aa, Homo sapiens; identical to SEQ ID NO: 772765

SEQ ID NO: 772768 - protein, 103 aa, Homo sapiens
MQVASPLVCSLASISPEGQEWCGAGEGQSHTWIPHPLQIQAPEVRNQITESEMEIPRKIFKANLQGISPHHPHRVQPYQRCPCYGKSDRNLPSSPSPVRSSPV

SEQ ID NO: 772769 - protein, 167 aa, Homo sapiens
ERAEALDRQRTKNISAISYINQRNREWNIVESEKALVVKVTNMKNQQMDPFTRRQCKPTIVSNSRDPAVQAAILAQLNAKYGSGVLPDAPKEMSKGQGKDKDLNSKSASGPLQKICFKVTRFWMWKIGLYKFPQLQSSKGFSHSTFQGFGSPRMGVPRRFLEFGRFP

SEQ ID NO: 772770 - protein, 111 aa, Homo sapiens
HAFAVPLASTAAPCTLPFALCDSPQAPPPCPTFPGTVPCLPCSWLSSLVTCGYDKKVEDVGVGERRVEGGKQKKKVKEALEETTGPVGKEGHCRGNPWLWGKGIGPGYPIA

SEQ ID NO: 772771 - protein, 110 aa, Homo sapiens
QVEVNLLLLSAVLLRTSRILCIFWLQREAHLLIFTAGYLESWKTKTSQLQETTLDKHKHDFPQEGLSQCRADLLDFKHADGKCSPPRSRAMVVYYLILLVDKNGQLRTVF

SEQ ID NO: 772772 - protein, 124 aa, Homo sapiens
FLFQLLQSCPALFTSSPSVYLLKRTAWFQEAGRGISEVWRKQTSQGTEVGVGQGRRADPLTRSKHRVAVPVYKPKTRKPKPGNKTTKQNKIRKSTALGKNKQTQAPNPVPTPLSASLFQHPCFV

SEQ ID NO: 772773 - protein, 1021 aa, Homo sapiens
MAGISYVASFFLLLTKLSIGQREVTVQKGPLFRAEGYPVSIGCNVTGHQGPSEQHFQWSVYLPTNPTQEVQIISTKDAAFSYAVYTQRVRGGDVYVERVQGNSVLLHISKLQMKDAGEYECHTPNTDENYYGSYRAKTNLIVIPDTLSATMSSQTLGKEEGEPLALTCEASKATAQHTHLSVTWYLTQDGGGSQATEIISLSKDFILVPGPLYTERFAASDVQLNKLGPTTFRLSIERLQSSDQGQLFCEATEWIQDPDETWMFITKKQTDQTTLRIQPAVKDFQVNITADSLFAEGKPLELVCLVVSSGRDPQLQGIWFFNGTEIAHIDAGGVLGLKNDYKERASQGELQVSKLGPKAFSLKIFSLGPEDEGAYRCVVAEVMKTRTGSWQVLQRKQSPDSHVHLRKPAARSVVVSTKNKQQVVWEGETLAFLCKAGGAESPLSVSWWHIPRDQTQPEFVAGMGQDGIVQLGASYGVPSYHGNTRLEKMDWATFQLEITFTAITDSGTYECRVSEKSRNQARDLSWTQKISVTVKSLESSLQVSLMSRQPQVMLTNTFDLSCVVRAGYSDLKVPLTVTWQFQPASSHIFHQLIRITHNGTIEWGNFLSRFQKKTKVSQSLFRSQLLVHDATEEETGVYQCEVEVYDRNSLYNNRPPRASAISHPLRIAVTLPESKLKVNSRSQGQELSINSNTDIECSILSRSNGNLQLAIIWYFSPVSTNASWLKILEMDQTNVIKTGDEFHTPQRKQKFHTEKVSQDLFQLHILNVEDSDRGKYHCAVEEWLLSTNGTWHKLGEKKSGLTELKLKPTGSKVRVSKVYWTENVTEHREVAIRCSLESVGSSATLYSVMWYWNRENSGSKLLVHLQHDGLLEYGEEGLRRHLHCYRSSSTDFVLKLHQVEMEDAGMYWCRVAEWQLHGHPSKWINQASDESQRMVLTVLPSEPTLPSRICSSAPLLYFLFICPFVLLLLLLISLLCLYWKARKLSTLRSNTRKEKALWVDLKEAGGVTTNRREDEEEDEGN

SEQ ID NO: 772774 - protein, 1021 aa, Homo sapiens; identical to SEQ ID NO: 772773

SEQ ID NO: 772775 - protein, 101 aa, Homo sapiens
WTQKFRVQSLGELTLPLQQLQTYDKCFGLTWFLGNLRRQVFTSFPEQQKSHNGRAWFSRISSHILSTLPPWSLGWGAALGMYPPMLLALGSRSEVGFYFVL

SEQ ID NO: 772776 - protein, 89 aa, Homo sapiens
VFETEVPSTLRRVEKDGSLKHGVFLPAGRLRGHSWLQKGLGFAGVDGERPRSGQEARAGPGLSRTGRAGVTVPSQTVLLISPLVCNSTR

SEQ ID NO: 772777 - protein, 116 aa, Homo sapiens
GPSWPPSPRTEFVFKEKLTMKTASLTEEKLECSLWCCLSDPSPRGLAARCCVLEGLIVQSRRQESSSSFSPICFVDSDEPNLTSVLEHLEDTKNNHSVKREAKLFSLFLMNIIFRN

SEQ ID NO: 772778 - protein, 114 aa, Homo sapiens [sequence omitted]

SEQ ID NO: 772779 - protein, 111 aa, Homo sapiens
LQEEKTRVSQHHLDQQLNSEAQRSNSLVAQLQAMVAEREAKVRQLEMEIGQLNVHVSRALAAPKPIFKPGKSIQLLPLLSTCLSSGQTSSFLAPLWPPASIWLPNPFCTQT

SEQ ID NO: 772780 - protein, 673 aa, Homo sapiens
MCWLSHHLLSSQYVERHFSREGTTQHSTGAGDHCYYQGKLRGNPHSFAALSTCQGLHGVFSDGNLTYIVEPQEVAGPWGAPQGPLPHLIYRTPLLPDPLGCREPGCLFAVPAQSAPPNRPRLRRKRQVRRGHPTVHSETKYVELIVINDHQLFEQMRQSVVLTSNFAKSVVNLADVIYKEQLNTRIVLVAMETWADGDKIQVQDDLLETLARLMVYRREGLPEPSDATHLFSGRTFQSTSSGAAYVGGICSLSHGGGVNEYGNMGAMAVTLAQTLGQNLGMMWNKHRSSAGDCKCPDIWLGCIMEDTGFYLPRKFSRCSIDEYNQFLQEGGGSCLFNKPLKLLDPPECGNGFVEAGEECDCGSVQECSRAGGNCCKKCTLTHDAMCSDGLCCRRCKYEPRGVSCREAVNECDIAETCTGDSSQCPPNLHKLDGYYCDHEQGRCYGGRCKTRDRQCQVLWGHAAADRFCYEKLNVEGTERGSCGRKGSGWVQCSSSPNRDVLCGFLLCVNISGAPRLGDLVGDISSVTFYHQGKELDCRGGHVQLADGSDLSYVEDGTACGPNMLCLDHRCLPASAFNFSTCPGSGERRICSHHGVCSNEGKCICQPDWTGKDCSIHNPLPTSPPTGETERYKGPSGTNIIIGSIAGAVLVAAIVLGGTGWGFKNIRRGRSGGA

SEQ ID NO: 772781 - protein, 667 aa, Homo sapiens
MCWLSHHLLSSQYVERHFSREGTTQHSTGAGDHCYYQGKLRGNPHSFAALSTCQGLHGVFSDGNLTYIVEPQEVAGPWGAPQGPLPHLIYRTPLLPDPLGCREPGCLFAVPAQSAPPNRPRLRRKRQVRRGHPTVHSETKYVELIVINDHQLFEQMRQSVVLTSNFAKSVVNLADVIYKEQLNTRIVLVAMETWADGDKIQVQDDLLETLARLMVYRREGLPEPSDATHLFSGRTFQSTSSGAAYVGGICSLSHGGGVNEYGNMGAMAVTLAQTLGQNLGMMWNKHRSSAGDCKCPDIWLGCIMEDTGFYLPRKFSRCSIDEYNQFLQEGGGSCLFNKPLKLLDPPECGNGFVEAGEECDCGSVQECSRAGGNCCKKCTLTHDAMCSDGLCCRRCKYEPRGVSCREAVNECDIAETCTGDSSQCPPNLHKLDGYYCDHEQGRCYGGRCKTRDRQCQVLWGHAAADRFCYEKLNVEGTERGSCGRKGSGWVQCSSSPNRDVLCGFLLCVNISGAPRLGDLVGDISSVTFYHQGKELDCRGGHVQLADGSDLSYVEDGTACGPNMLCLDHRCLPASAFNFSTCPGSGERRICSHHGVCSNEGKCICQPDWTGKDCSIHNPLPTSPPTGETERYKGPSGTNIIIGSIAGAVLVAAIVLGGTGWGFKSGGA

SEQ ID NO: 772782 - protein, 772 aa, Homo sapiens
MRLLRRWAFAALLLSLLPTPGLGTQGPAGALRWGGLPQLGGPGAPEVTEPSRLVRESSGGEVRKQQLDTRVRQEPPGGPPVHLAQVSFVIPAFNSNFTLDLELNHHLLSSQYVERHFSREGTTQHSTGAGDHCYYQGKLRGNPHSFAALSTCQGLHGVFSDGNLTYIVEPQEVAGPWGAPQGPLPHLIYRTPLLPDPLGCREPGCLFAVPAQSAPPNRPRLRRKRQVRRGHPTVHSETKYVELIVINDHQLFEQMRQSVVLTSNFAKSVVNLADVIYKEQLNTRIVLVAMETWADGDKIQVQDDLLETLARLMVYRREGLPEPSDATHLFSGRTFQSTSSGAAYVGGICSLSHGGGVNEYGNMGAMAVTLAQTLGQNLGMMWNKHRSSAGDCKCPDIWLGCIMEDTGFYLPRKFSRCSIDEYNQFLQEGGGSCLFNKPLKLLDPPECGNGFVEAGEECDCGSVQECSRAGGNCCKKCTLTHDAMCSDGLCCRRCKYEPRGVSCREAVNECDIAETCTGDSSQCPPNLHKLDGYYCDHEQGRCYGGRCKTRDRQCQVLWGHAAADRFCYEKLNVEGTERGSCGRKGSGWVQCSSSPNRDVLCGFLLCVNISGAPRLGDLVGDISSVTFYHQGKELDCRGGHVQLADGSDLSYVEDGTACGPNMLCLDHRCLPASAFNFSTCPGSGERRICSHHGVCSNEGKCICQPDWTGKDCSIHNPLPTSPPTGETERYKGPSGTNIIIGSIAGAVLVAAIVLGGTGWGFKNIRRGRSGGA

SEQ ID NO: 772783 - protein, 168 aa, Homo sapiens
NSVMQVAAKGPSLREAKGQMSPFPLPFHHLPPPSKPGTHRLGPEPRGCPHPATEGGTMQMSSRSKPFNSWLRRGLGGGCGPALGTTRVDQAWRALPPQSPTHLLRLSLAHPLPRVNVASTSWIATAQLGGTWRDAPRQPPVDLAWMAPPCNQAAETRVLSLWDLGGRG

SEQ ID NO: 772784 - protein, 769 aa, Homo sapiens
KEQERIKTAGFWIIHPYSDFRFYWDLIMLIMMVGNLVIIPVGITFFTEQTTTPWIIFNVASDTVFLLDLIMNFRTGTVNEDSSEIILDPKVIKMNYLKSWFVVDFISSIPVDYIFLIVEKGMDSEVYKTARALRIVRFTKILSLLRLLRLSRLIRYIHQWEEIFHMTYDLASAVVRIFNLIGMMLLLCHWDGCLQFLVPLLQDFPPDCWVSLNEMVNDSWGKQYSYALFKAMSHMLCIGYGAQAPVSMSDLWITMLSMIVGATCYAMFVGHATALIQSLDSSRRQYQEKYKQVEQYMSFHKLPADMRQKIHDYYEHRYQGKIFDEENILNELNDPLREEIVNFNCRKLVATMPLFANADPNFVTAMLSKLRFEVFQPGDYIIREGAVGKKMYFIQHGVAGVITKSSKEMKLTDGSYFGEICLLTKGRRTASVRADTYCRLYSLSVDNFNEVLEEYPMMRRAFETVAIDRLDRIGKKNSILLQKFQKDLNTGVFNNQENEILKQIVKHDREMVQAIAPINYPQMTTLNSTSSTTTPTSRMRTQSPPVYTATSLSHSNLHSPSPSTQTPQPSAILSPCSYTTAVCSPPVQSPLAARTFHYASPTASQLSLMQQQPQQQVQQSQPPQTQPQQPSPQPQTPGSSTPKNEVHKSTQALHNTNLTREVRPLSASQPSLPHEVSTLISRPHPTVGESLASIPQPVTAVPGTGLQAGGRSTVPQRVTLFRQMSSGAIPPNRGVPPAPPPPAAALPRESSSVLNTDPDAEKPRFASNL

SEQ ID NO: 772785 - protein, 53 aa, Homo sapiens
GKAAPHRVFLSFLFLLHLVNPYTYSMVQFKCYHVYNALSYPQSRGNLSFPHLT

SEQ ID NO: 772786 - protein, 100 aa, Homo sapiens
HTHTLTALTPQPSLLTGPPLNRGFLCYGMRFLLAEEKWLSGRWAGAPLTSLSVAATTSAASPPLLLPRTPQPQPESRCLYFLLPQRAQLPTKTPAGGLSS

SEQ ID NO: 772787 - protein, 108 aa, Homo sapiens
LTWHPGGHALGKAASTRPCFSSSSLVNKSKTSSQKTKQNKNNNKKQKKNKQNQNQNSCIEAAVLQLCDCPAEQGYPIGSEQQLRAVLQSDLYPLLITCRLRSCIYKDF

SEQ ID NO: 772788 - protein, 384 aa, Homo sapiens
MDAALLLNVEGVKKTILHGGTGELPNFITGSRVIFHFRTMKCDEERTVIDDSRQVGQPMHIIIGNMFKLEVWEILLTSMRVHEVAEFWCDTIHTGVYPILSRSLRQMAQGKDPTEWHVHTCGLANMFAYHTLGYEDLDELQKEPQPLVFVIELLQVDAPSDYQRETWNLSNHEKMKAVPVLHGEGNRLFKLGRYEEASSKYQEAIICLRNLQTKEKPWEVQWLKLEKMINTLILNYCQCLLKKEEYYEVLEHTSDILRHHPGIVKAYYVRARAHAEVWNEAEAKADLQKVLELEPSMQKAVRRELRLLENRMAEKQEEERLRCRNMLSQGATQPPAEPPTEPPAQSSTEPPAEPPTAPSAELSAGPPAEPATEPPPSPGHSLQH

SEQ ID NO: 772789 - protein, 270 aa, Homo sapiens
MDAALLLNVEGVKKTILHGGTGELPNFITGSRVIFHFRTMKCDEERTVIDDSRQVGQPMHIIIGNMFKLEVWEILLTSMRVHEVAEFWCDTIHTGVYPILSRSLRQMAQGKDPTEWHVHTCGLANMFAYHTLGYEDLDELQKEPQPLVFVIELLQVDAPSDYQRETWNLSNHEKMKAVPVLHGEGNRLFKLGRYEEASSKYQEAIICLRNLQTKEKPWEVQWLKLEKMINTLILNYCQCLLKKEEYYEVLEHTSDILRHHPGARGCRGGQ

SEQ ID NO: 772790 - protein, 321 aa, Homo sapiens
MDAALLLNVEGVKKTILHGGTGELPNFITGSRVIFHFRTMKCDEERTVIDDSRQVGQPMHIIIGNMFKLEVWEILLTSMRVHEVAEFWCDTIVDAPSDYQRETWNLSNHEKMKAVPVLHGEGNRLFKLGRYEEASSKYQEAIICLRNLQTKEKPWEVQWLKLEKMINTLILNYCQCLLKKEEYYEVLEHTSDILRHHPGIVKAYYVRARAHAEVWNEAEAKADLQKVLELEPSMQKAVRRELRLLENRMAEKQEEERLRCRNMLSQGATQPPAEPPTEPPAQSSTEPPAEPPTAPSAELSAGPPAEPATEPPPSPGHSLQH

SEQ ID NO: 772791 - protein, 108 aa, Homo sapiens; identical to SEQ ID NO: 772787

SEQ ID NO: 772792 - protein, 384 aa, Homo sapiens; identical to SEQ ID NO: 772788

SEQ ID NO: 772793 - protein, 384 aa, Homo sapiens; identical to SEQ ID NO: 772788

SEQ ID NO: 772794 - protein, 376 aa, Homo sapiens
MDAALLLNVEGVKKTILHGGTGELPNFITGSRKCDEERTVIDDSRQVGQPMHIIIGNMFKLEVWEILLTSMRVHEVAEFWCDTIHTGVYPILSRSLRQMAQGKDPTEWHVHTCGLANMFAYHTLGYEDLDELQKEPQPLVFVIELLQVDAPSDYQRETWNLSNHEKMKAVPVLHGEGNRLFKLGRYEEASSKYQEAIICLRNLQTKEKPWEVQWLKLEKMINTLILNYCQCLLKKEEYYEVLEHTSDILRHHPGIVKAYYVRARAHAEVWNEAEAKADLQKVLELEPSMQKAVRRELRLLENRMAEKQEEERLRCRNMLSQGATQPPAEPPTEPPAQSSTEPPAEPPTAPSAELSAGPPAEPATEPPPSPGHSLQH

SEQ ID NO: 772795 - protein, 148 aa, Homo sapiens
GSDRAVTGCYFSHGLGFTSDYWAATSIVKAYYVRARAHAEVWNEAEAKADLQKVLELEPSMQKAVRRELRLLENRMAEKQEEERLRCRNMLSQGATQPPAEPPTEPPAQSSTEPPAEPPTAPSAELSAGPPAEPATEPPPSPGHSLQH

SEQ ID NO: 772796 - protein, 207 aa, Homo sapiens
MDAALLLNVEGVKKTILHGGTGELPNFITGSRVIFHFRTMKCDEERTVIDDSRQVGQPMHIIIGNMFKLEVWEILLTSMRVHEVAEFWCDTIVDAPSDYQRETWNLSNHEKMKAVPVLHGEGNRLFKLGRYEEASSKYQEAIICLRNLQTKEKPWEVQWLKLEKMINTLILNYCQCLLKKEEYYEVLEHTSDILRHHPGARGCRGGQ

SEQ ID NO: 772797 - protein, 140 aa, Homo sapiens
GTLTQNEMIFKRLHLGTVSYGADTMDEIQSHVRDSYSQMQSQAGGNNTGSTPLRKAQSSAPKVRKSVSSRIHEAVKAIVLCHNVTPVYESRAGVTEETEFAEADQDFSDENRTYQASSPDEVSQSTKPWELVRSIWTPES

SEQ ID NO: 772798 - protein, 225 aa, Homo sapiens
GTLTQNEMIFKRLHLGTVSYGADTMDEIQSHVRDSYSQMQSQAGGNNTGSTPLRKAQSSAPKVRKSVSSRIHEAVKAIVLCHNVTPVYESRAGVTEETEFAEADQDFSDENRTYQASSPDEVALVQWTESVGLTLVSRDLTSMQLKTPSGQVLSFCILQLFPFTSESKRMGVIVRDESTAEITFYMKGADVAMSPIVQYNDWLEEERSLFQFLNRRREETQLLDA

SEQ ID NO: 772799 - protein, 95 aa, Homo sapiens
LGTVSYGADTMDEIQSHVRDSYSQVKWVPPARGLLPHTSRAMSPAEPRVFTICKLARFLVVLTSCYFSRLFEYTNQEIVFDEHLYMSEIVEGIVC

SEQ ID NO: 772800 - protein, 246 aa, Homo sapiens
GTLTQNEMIFKRLHLGTVSYGADTMDEIQSHVRDSYSQMQSQAGGNNTGSTPLRKAQSSAPKVRKSVSSRIHEAVKAIVLCHNVTPVYESRAGVTEETEFAEADQDFSDENRTYQASSPDEVALVQWTESVGLTLVSRDLTSMQLKTPSGQVLSFCILQLFPFTSESKRMGVIVRDESTAEITFYMKGADVAMSPIVQYNDWLEEEETGRDTAVGCIKKGARPTPLLQPFLPSLQPPVQRQIQSTG

SEQ ID NO: 772801 - protein, 155 aa, Homo sapiens
TLVLHLQETLVALALLLGQFAEEVAHAFQSHIIAVEIEAQREVGVGGLQVQIDQAVDGCLHVGGIILTNLGAHGWLARRSLPQNRAGRSQKQEMAEKMVPEVASGEEIGGRSEAGRESPDLFRPNTVEARDRHSSGHLNLLRKHGQRLERSAYRM

SEQ ID NO: 772802 - protein, 77 aa, Homo sapiens
SSCVILPSLVNTKKYTFSDPAMKQFLLYLDESNALGKKFIIQDIDDTHVFVIAELVNVLQERVGELMDQNAFSLTQK

SEQ ID NO: 772803 - protein, 117 aa, Homo sapiens
CSKAVGMPSPVSPKLSPGNSGNYSSGASSASASGSSVTIPQKIHQMAASYVQVTSNFLYATEIWDQAEQLSKEQKEFFAELDKVMGPLIFNASIMTDLVRYTRQGLHWLRQDAKLIS

SEQ ID NO: 772804 - protein, 185 aa, Homo sapiens
TSSAPPCAQPAMGKITLYEDRGFQGRHYECSSDHPNLQPYLSRCNSARVDSGCWMLYEQPNYSGLQYFLRRGDYADHQQWMGLSDSVRSCRLIPHSGSHRIRLYEREDYRGQMIEFTEDCSCLQDRFRFNEIHSLNVLEGSWVLYELSNYRGRQYLLMPGDYRRYQDWGATNARVGSLRRVIDFS

SEQ ID NO: 772805 - protein, 294 aa, Homo sapiens
MPRFLRQTLGIQRRKINTAAPLIASSEETKQRCAGGSGQNQPSLLPLLRRGPPLLALLSFAWLSSAQLSAAPRPPSRGGHGLRVADASSELPLSAAPPPGRAFVGTTSGRSRVAKACGRGTKLGAAKMRLSPAPLKLSRTPALLALALPLAAALAFSDETLDKVPKSEGYCSRILRAQGTRREGYTEFSLRVEGDPDFYKPGTSYRVTLSAAPPSYFRGFTLIALRENREGDKEEDHAGTFQEIWGSMWQISPVTLQRRCFKTGSLSSHRFGVYAHYPNYAAATAPKSIFSNFN

SEQ ID NO: 772806 - protein, 317 aa, Homo sapiens
MPRFLRQTLGIQRRKINTAAPLIASSEETKQRCAGGSGQNQPSLLPLLRRGPPLLALLSFAWLSSAQLSAAPRPPSRGGHGLRVADASSELPLSAAPPPGRAFVGTTSGRSRVAKACGRGTKLGAAKMRLSPAPLKLSRTPALLALALPLAAALAFSDETLDKVPKSEGYCSRILRAQGTRREGYTEFSLRVEGDPDFYKPGTSYRVTLSAAPPSYFRGFTLIALRENREGDKEEDHAGTFQIIDEEETQFMSNCPVAVTESTPRRRTRIQVFWIAPPAGTGCVILKASIVQKRIIYFQDEGSLTKKLCEQGKTLWV

SEQ ID NO: 772807 - protein, 133 aa, Homo sapiens
LGAAKMRLSPAPLKLSRTPALLALALPLAAALAFSDETLDKVPKSEGYCSRILRAQGTRREGYTEFSLRVEGDPDFYKPGTSYRGKWPPGVALGERDPVPGGRRPRGAGGGRAVSGRVARVQPGKGPSVLAAL

SEQ ID NO: 772808 - protein, 68 aa, Homo sapiens
IAPTSVTQATLLLRLNPGSFQLLVPVLREPGHSCATGITLAVPLFRRQHLNSPCAFSWIIALIPTIAQ

SEQ ID NO: 772809 - protein, 102 aa, Homo sapiens
EGQAPTRRPRVPTCVTQPGNHVQSDPKRSLTLSGHELRAIQIQFHSEQHMDPLFLPLGAHREMDTCTLPFTLCSHEARKHLKGALSSEQKPHTLWFFHFSPQ

SEQ ID NO: 772810 - protein, 100 aa, Homo sapiens
MNLALPLQQASAWKQWEVEVGVAGADPSPVVKHHLLDADLVILSSHEIWLYNRVGTSFLSQSCFYCCHMKHFLAPWPSGMIGRLPESSRKQKPLCFLYSL
